United States Patent Application Publication US 2023/0026259 A1 - sequence listing, part 64

SEQ ID NO: 162090 - DNA, 954 bp, Homo sapiens
  Payload ID: 11722
  Gene Symbol: OR2B11
  Gene Name: olfactory receptor, family 2, subfamily B, member 11
  Uniprot ID: Q5JQS5
  ENST ID: ENST00000318749
  CDS Start-End: 1-954
atgaaaagtgacaaccatagcttcttaggggactcccctaaagccttcatccttctgggtgtgtctgacaggccgtggctggaactccctctctttgtggtcctcctgctgtcctatgtgctggccatgttggggaacgtcgccatcatcctggcatcccgggtggatcctcaactccacagccccatgtacatcttcctcagtcacctgtccttcctggacctctgctacaccaccacgacagtccctcagatgctggtcaacatgggcagttcccagaagaccatcagctatggaggctgcactgtgcaatatgcagtcttccactggctgggatgcacggagtgcatcgtcctggccgccatggccctggaccgctacgtggccatctgcaagcccctgcactatgccgttctcatgcaccgtgctctctgtcagcagctcgtggctctggcctggctcagtggcttcggcaactccttcgtgcaggtggtcctgacggtgcaattgccattctgcgggcggcaggtgctgaacaactttttctgtgaggtgccggccgtgatcaagctgtcgtgtgctgacaccgctgtgaatgacaccatactggctgtgctggtggccttcttcgtgttggtgcccctggctctcatccttctctcctatggctttattgcccgggcagtgctcaggatccagtcctccaagggacgacacaaggcctttgggacgtgttcctcccacctgatgatcgtctccctcttctacctacctgcgatttacatgtatctgcagcccccttccagctactcccaagagcagggcaaatttatttctctcttctattccataatcacccccactctcaatcccttcacctacaccctgagaaataaagatatgaagggggctctgaggagacttctggccaggatctggaggctctgtggatga

SEQ ID NO: 162091 - DNA, 1212 bp, Homo sapiens
  Payload ID: 11723
  Gene Symbol: OR2B2
  Gene Name: olfactory receptor, family 2, subfamily B, member 2
  Uniprot ID: Q9GZK3
  ENST ID: ENST00000303324
  CDS Start-End: 78-1151
gctgacaaaatcaggaagtgtgttgttaacttcctgacttcttatatttcagagaacgaagagttgaaccatttaacatgaattgggtaaataagagtgtcccacaggagttcattctgttagttttctcagatcaaccatggctagagattccaccctttgtgatgtttctgttttcctatatcttgacaatctttggcaatctgacaataattcttgtgtcacatgtggatttcaaactccacacccctatgtacttttttcttagcaatctctcactcctggacctttgctataccacaagtacagttccacaaatgctggtaaacatatgcaacaccaggaaagtaatcagttatggtggctgtgtggcccagcttttcattttcctggccttgggttccacagaatgtcttctcctggccgtcatgtgctttgataggtttgtagctatttgtcggcctctccattactcaattatcatgcaccagaggctctgcttccagttggcagctgcatcctggattagtggctttagcaattcagtattacagtccacctggacacttaagatgccactgtgtggtcacaaagaagtggatcacttcttctgtgaagtccctgctctgctcaagttgtcctgtgttgacacaacagcaaatgaggctgaactattcttcatcagtgtgctattccttctaatacccgtgacactcatccttatatcgtatgcttttattgtccaagcagtgttgagaatccagtctgctgaaggtcaacgaaaggcatttgggacatgtggctcccatctaattgtggtgtcacttttttatggtacagctatctccatgtacctgcaaccaccttcacccagctccaaagaccggggaaagatggtttctctcttctgtggaatcattgcacccatgctgaatccccttatatatacacttaggaacaaagaggtaaaggaagcctttaaaaggttggttgcaaagagtcttcttaatcaagaaataagaaatatgcaaatgataagctttgctaaagacacagtgcttacttaccttactaacttctccgcaagttgtcctatttttgtcattactatagaaaactattgtaatctccctcaaagaaaatttccttgacaaaaagctatatttgtttctgttgcctaaacattttcattgaacaagcccccagaattgg

SEQ ID NO: 162092 - DNA, 1007 bp, Homo sapiens
  Payload ID: 11724
  Gene Symbol: OR2B3
  Gene Name: olfactory receptor, family 2, subfamily B, member 3
  Uniprot ID: O76000
  ENST ID: ENST00000377173
  CDS Start-End: 66-1007
ataaacaaacattgattgctttcctatcttacatttttttaggagtgcgaaataagtgagtcatcatgaattgggaaaatgagagctccccaaaagagtttatactacttggcttctcagatagggcttggctacaaatgcccctttttgtggtcctgttaatatcatacacaatcaccatatttggcaatgtgtccatcatgatggtgtgcattctggatcccaaacttcatactcccatgtatttctttctcactaatctctccatcttagatctctgctataccacaactacagtccctcatatgttggtaaatattggttgcaacaaaaagaccatcagctatgctggctgtgtggcccacctcatcatcttcctggccctaggtgctacagagtgtctccttctggctgttatgtcctttgacagatatgtggctgtttgcagacccctccactatgtagtcatcatgaattattggttctgcctaaggatggcagccttctcatggctcattggtttcggcaactcagtgctgcagtcttccttgactcttaacatgccacgctgtggtcaccaggaagtggaccactttttctgtgaggtgcctgcacttctcaagttgtcatgtgctgacacaaagcctattgaggctgagctcttcttctttagtgtactaattcttctaattccagtgacattgatcctcatctcctatggcttcatagctcaagcagtattaaaaatcaggtcagcagaaggacggcaaaaagcatttgggacatgtgggtcccacatgattgtggtgtccctcttttatggaacagccatttatatgtatcttcaaccaccttcatccacctctaaggactggggaaagatggtttccctcttctatggaatcatcacatccatgttgaactccctcatctacagccttagaaataaagatatgaaggaggccttcaagaggctgatgccaagaatctttttctgtaagaaataa

SEQ ID NO: 162093 - DNA, 1106 bp, Homo sapiens
  Payload ID: 11724
  Gene Symbol: OR2B3
  Gene Name: olfactory receptor, family 2, subfamily B, member 3
  Uniprot ID: O76000
  ENST ID: ENST00000383653
  CDS Start-End: 66-1007
ataaacaaacattgattgctttcctatcttacatttttttaggagtgcgaaataagtgagtcatcatgaattgggaaaatgagagctccccaaaagagtttatactacttggcttctcagatagggcttggctacaaatgcccctttttgtggtcctgttaatatcatacacaatcaccatatttggcaatgtgtccatcatgatggtgtgcattctggatcccaaacttcatactcccatgtatttctttctcactaatctctccatcttagatctctgctataccacaactacagtccctcatatgttggtaaatattggttgcaacaaaaagaccatcagctatgctggctgtgtggcccacctcatcatcttcctggccctaggtgctacagagtgtctccttctggctgttatgtcctttgacagatatgtggctgtttgcagacccctccactatgtagtcatcatgaattattggttctgcctaaggatggcagccttctcatggctcattggtttcggcaactcagtgctgcagtcttccttgactcttaacatgccacgctgtggtcaccaggaagtggaccactttttctgtgaggtgcctgcacttctcaagttgtcatgtgctgacacaaagcctattgaggctgagctcttcttctttagtgtactaattcttctaattccagtgacattgatcctcatctcctatggcttcatagctcaagcagtattaaaaatcaggtcagcagaaggacggcaaaaagcatttgggacatgtgggtcccacatgattgtggtgtccctcttttatggaacagccatttatatgtatcttcaaccaccttcatccacctctaaggactggggaaagatggtttccctcttctatggaatcatcacatccatgttgaactccctcatctacagccttagaaataaagatatgaaggaggccttcaagaggctgatgccaagaatctttttctgtaagaaataagaagtactccattgtgatgagaatcttcttagtctttccttatcttcaatgatggtaatgacctttgaactcattttcctattttccaggctctggtga

SEQ ID NO: 162094 - DNA, 1007 bp, Homo sapiens; identical to SEQ ID NO: 162092
  Payload ID: 11724
  Gene Symbol: OR2B3
  Gene Name: olfactory receptor, family 2, subfamily B, member 3
  Uniprot ID: O76000
  ENST ID: ENST00000420178
  CDS Start-End: 66-1007

SEQ ID NO: 162095 - DNA, 1007 bp, Homo sapiens; identical to SEQ ID NO: 162092
  Payload ID: 11724
  Gene Symbol: OR2B3
  Gene Name: olfactory receptor, family 2, subfamily B, member 3
  Uniprot ID: O76000
  ENST ID: ENST00000444830
  CDS Start-End: 66-1007

SEQ ID NO: 162096 - DNA, 1007 bp, Homo sapiens; identical to SEQ ID NO: 162092
  Payload ID: 11724
  Gene Symbol: OR2B3
  Gene Name: olfactory receptor, family 2, subfamily B, member 3
  Uniprot ID: O76000
  ENST ID: ENST00000415976
  CDS Start-End: 66-1007

SEQ ID NO: 162097 - DNA, 1007 bp, Homo sapiens; identical to SEQ ID NO: 162092
  Payload ID: 11724
  Gene Symbol: OR2B3
  Gene Name: olfactory receptor, family 2, subfamily B, member 3
  Uniprot ID: O76000
  ENST ID: ENST00000419873
  CDS Start-End: 66-1007

SEQ ID NO: 162098 - DNA, 1007 bp, Homo sapiens; identical to SEQ ID NO: 162092
  Payload ID: 11724
  Gene Symbol: OR2B3
  Gene Name: olfactory receptor, family 2, subfamily B, member 3
  Uniprot ID: O76000
  ENST ID: ENST00000450817
  CDS Start-End: 66-1007

SEQ ID NO: 162099 - DNA, 1007 bp, Homo sapiens; identical to SEQ ID NO: 162092
  Payload ID: 11724
  Gene Symbol: OR2B3
  Gene Name: olfactory receptor, family 2, subfamily B, member 3
  Uniprot ID: O76000
  ENST ID: ENST00000456140
  CDS Start-End: 66-1007

SEQ ID NO: 162100 - DNA, 942 bp, Homo sapiens
  Payload ID: 11725
  Gene Symbol: OR2B6
  Gene Name: olfactory receptor, family 2, subfamily B, member 6
  Uniprot ID: P58173
  ENST ID: ENST00000244623
  CDS Start-End: 1-942
atgaattgggtaaatgacagcatcatacaggagtttattctgctgggtttctcagatcgaccttggctggagtttccactccttgtggtcttcttgatttcttacactgtgaccatctttggcaatctgaccattattctagtgtcacgcctggacaccaaacttcatacccccatgtatttttttcttaccaatctatcactcctggatctttgttacaccacatgtacagtcccacaaatgctagtaaatttatgcagcatcaggaaagtaatcagttatcgtggctgtgtagcccagcttttcatatttctggccttgggggctactgaatatcttctcctggccgtcatgtcctttgataggtttgtagctatttgtcggcctctccattactcagttatcatgcaccagagactctgcctccagttggcagctgcatcctgggttactggttttagtaactcagtgtggttgtctaccctgactctccagctgccactctgtgacccctatgtgatagatcactttctctgtgaagtccctgcactgctcaagttatcttgtgttgagacaacagcaaatgaggctgaactattccttgtcagtgagctcttccatctaatacccctgacactcatccttatatcatatgcttttattgtccgagcagtattgaggatacagtctgctgaaggtcgacaaaaagcatttgggacatgtggttcccatctaattgtggtgtctcttttttatagtacagccgtctctgtgtacctgcaaccaccttcgcccagctccaaggaccaaggaaagatggtttctctcttctatggaatcattgcacccatgctgaatccccttatatatacacttaggaacaaggaggtaaaggaaggctttaaaaggttggttgcaagagtcttcttaatcaagaaataa

SEQ ID NO: 162101 - DNA, 1406 bp, Homo sapiens
  Payload ID: 11726
  Gene Symbol: OR2C1
  Gene Name: olfactory receptor, family 2, subfamily C, member 1
  Uniprot ID: O95371
  ENST ID: ENST00000304936
  CDS Start-End: 53-991
ttccagcagcttgcgctaaatgaattcatcaagtgactgaagacaaccagtgatggacggggtgaatgatagctccttgcagggctttgttctgatgggcatatcagaccatccccagctggagatgatcttttttatagccatcctcttctcctatttgctgaccctacttgggaactcaaccatcatcttgctttcccgcctggaggcccggctccatacacccatgtacttcttcctcagcaacctctcctccttggaccttgctttcgctactagttcagtcccccaaatgctgatcaatttatggggaccaggcaagaccatcagctatggtggctgcataacccagctctatgtcttcctttggctgggggccaccgagtgcatcctgctggtggtgatggcatttgaccgctacgtggcagtgtgccggcccctccgctacaccgccatcatgaacccccagctctgctggctgctggctgtgattgcctgcctgggtggcttgggcaactctgtgatccagtcaacattcactctgcagctcccattgtgtgggcaccggagggtggagggattcctctgcgaggtgcctgccatgatcaaactggcctgtggcgacacaagtctcaaccaggctgtgctcaatggtgtctgcaccttcttcactgcagtcccactaagcatcatcgtgatctcctactgcctcattgctcaggcagtgctgaaaatccgctctgcagaggggaggcgaaaggcgttcaatacgtgcctctcccatctgctggtggtgttcctcttctatggctcagccagctatgggtatctgcttccggccaagaacagcaaacaggaccagggcaagttcatttccctgttctactcgttggtcacacccatggtgaatcccctcatctacacgctgcggaacatggaagtgaagggcgcactgaggaggttgctggggaaaggaagagaagttggctgagagaacactccttcgttatttattgcgtcttcatctctacatgcgtttctcattaactctctctggccaggtgaacatgaggaatactaattccggtaaaaccaaggcatgttcctgacagccctaagctgacagccctaagctgttgggaacatggttagtgttattcgtaatgttctacacttatttaccaaaaatcctactgtggactaccgatagcaggggagacatgttgttgagggctcagaggttattgacctgtgacagacctgtctcactgtctctgtctctgttgcccacatgttatttaatatgccttatatttctgcagaattctgtacttttctaagcaaagcacctccacttgcagtatcttacataatgttactataattccataaaatcaagccatgta

SEQ ID NO: 162102 - DNA, 2742 bp, Homo sapiens
  Payload ID: 11727
  Gene Symbol: OR2C3
  Gene Name: olfactory receptor, family 2, subfamily C, member 3
  Uniprot ID: Q8N628
  ENST ID: ENST00000366487
  CDS Start-End: 363-1325
cagaaatcaactgacaaatggcagattcataggagaaaagacatacacatttatttgatcatagttttacataacagaggagccttcagatgagaatccaaagatacaagagaaacttcccatttttatgcttaggttcaaagccatatggacagccatgtagaaatatgattgaacatgaagggcatgatctaatactgatggactgagtgaagaagcccagcaagacccatcgtgagattctttttggcctctctgagcagtgttccttttttcttggtatgcaataagacctctctggaatggaggtcttatgatctacaatccagtaaggtggccttttgccccacccccagcatacaatgatggaaatagccaatgtgagttctccagaagtctttgtcctcctgggcttctccacacgaccctcactagaaactgtcctcttcatagttgtcttgagtttttacatggtatcgatcttgggcaatggcatcatcattctggtctcccatacagatgtgcacctccacacacctatgtacttctttcttgccaacctccccttcctggacatgagcttcaccacgagcattgtcccacagctcctggctaacctctggggaccacagaaaaccataagctatggagggtgtgtggtccagttctatatctcccattggctgggggcaaccgagtgtgtcctgctggccaccatgtcctatgaccgctacgctgccatctgcaggccactccattacactgtcattatgcatccacagctttgccttgggctagctttggcctcctggctggggggtctgaccaccagcatggtgggctccacgctcaccatgctcctaccgctgtgtgggaacaattgcatcgaccacttcttttgcgagatgcccctcattatgcaactggcttgtgtggataccagcctcaatgagatggagatgtacctggccagctttgtctttgttgtcctgcctctggggctcatcctggtctcttacggccacattgcccgggccgtgttgaagatcaggtcagcagaagggcggagaaaggcattcaacacctgttcttcccacgtggctgtggtgtctctgttttacgggagcatcatcttcatgtatctccagccagccaagagcacctcccatgagcagggcaagttcatagctctgttctacaccgtagtcactcctgcgctgaacccacttatttacaccctgaggaacacggaggtgaagagcgccctccggcacatggtattagagaactgctgtggctctgcaggcaagctggcgcaaatttagagactccagtgccttctgagaaggaagatcaagtttacatcgagcaaagtgaccttggaagacagggcacttgggatgtcgtttttcttctaatattgtttgagctcaaggtagatggaaatctgaaaggagtgtgctcatgccatttccagaccaagaaaatacatttattatttgctaattatcatagttttgttcaattgcgttgttggtttttgctatatatacacatgttgactgtcatcttgttttgtaaactccttgcgttgttgttcagctgttcctcagtatccgaagcgggtggattccaggacgctccgtggataataaactttgacgacgctgagagcgcgcggggagaccggagccggcctgttccccagagcccccggagccctcccagccctcaggcctgcgcctggggtgagctgagcccgggactccgccttgcaggctccggaaccctcgctgtggctcccccgctcggcccaggccttgaagccgcggcgaacctcttcctaccctacctcggggacctggtggcagcggcggcctcccccagcctggaccccgccggccgcgggtctcccggcccaaccccaccgacccagaccaagaccgcgccgagccgccgggactcagcgccttcgggtggcggcggtaagcggggaggaaacatggcgccgcccaaatgcgcccggaggccgttaggctgtggagggcgaggaaggcggtccagaggcggccggcaggtccacgtcctgggcgaccgctctgtcgcagttgggcgagacctacctagtcctgacgggtcgtatttccaagacattttcatattctatccattgttttgtgtgcattttattacttctgtatatagaggtaacaacgctaagcttttttgagatgtctgtttcttctagatgttctgaagtacctgatacatgttaaaattagaggtagtaaaatgacacattttgtaaataactttttgttaaaattcataggaaatgttattttgtgggggggggatggcatggtgtttgtggactggttcagggaaggaggggaaaagggaggtgcagagagctctaagccagtgtgcttacagtgaggcgagattcaccattgtttcttatgattgtgcattttgttttacttatctatgtatacagtgtatctaaaggacaaacgagtcctaatttacaacagctagtctttccagatgttaaagaacttctatcaatagagtaacctatcactagagttcacctctatcaatagagtaacctcattctctgcctgatgattcaaaggcatgggaagaccaaaaccatgtggcagttcctgtttttgattttattatatatatgtatataatatgaaagtagtcattaaagtagtctttcctttcgta

SEQ ID NO: 162103 - DNA, 2481 bp, Homo sapiens
  Payload ID: 11727
  Gene Symbol: OR2C3
  Gene Name: olfactory receptor, family 2, subfamily C, member 3
  Uniprot ID: Q8N628
  ENST ID: ENST00000617752
  CDS Start-End: 103-1065
cacttttaatgtttgctaactgatgtaattgcttcatgtctcatgccctgtatgccctgtgctcttcccacaggtggccttttgccccacccccagcatacaatgatggaaatagccaatgtgagttctccagaagtctttgtcctcctgggcttctccacacgaccctcactagaaactgtcctcttcatagttgtcttgagtttttacatggtatcgatcttgggcaatggcatcatcattctggtctcccatacagatgtgcacctccacacacctatgtacttctttcttgccaacctccccttcctggacatgagcttcaccacgagcattgtcccacagctcctggctaacctctggggaccacagaaaaccataagctatggagggtgtgtggtccagttctatatctcccattggctgggggcaaccgagtgtgtcctgctggccaccatgtcctatgaccgctacgctgccatctgcaggccactccattacactgtcattatgcatccacagctttgccttgggctagctttggcctcctggctggggggtctgaccaccagcatggtgggctccacgctcaccatgctcctaccgctgtgtgggaacaattgcatcgaccacttcttttgcgagatgcccctcattatgcaactggcttgtgtggataccagcctcaatgagatggagatgtacctggccagctttgtctttgttgtcctgcctctggggctcatcctggtctcttacggccacattgcccgggccgtgttgaagatcaggtcagcagaagggcggagaaaggcattcaacacctgttcttcccacgtggctgtggtgtctctgttttacgggagcatcatcttcatgtatctccagccagccaagagcacctcccatgagcagggcaagttcatagctctgttctacaccgtagtcactcctgcgctgaacccacttatttacaccctgaggaacacggaggtgaagagcgccctccggcacatggtattagagaactgctgtggctctgcaggcaagctggcgcaaatttagagactccagtgccttctgagaaggaagatcaagtttacatcgagcaaagtgaccttggaagacagggcacttgggatgtcgtttttcttctaatattgtttgagctcaaggtagatggaaatctgaaaggagtgtgctcatgccatttccagaccaagaaaatacatttattatttgctaattatcatagttttgttcaattgcgttgttggtttttgctatatatacacatgttgactgtcatcttgttttgtaaactccttgcgttgttgttcagctgttcctcagtatccgaagcgggtggattccaggacgctccgtggataataaactttgacgacgctgagagcgcgcggggagaccggagccggcctgttccccagagcccccggagccctcccagccctcaggcctgcgcctggggtgagctgagcccgggactccgccttgcaggctccggaaccctcgctgtggctcccccgctcggcccaggccttgaagccgcggcgaacctcttcctaccctacctcggggacctggtggcagcggcggcctcccccagcctggaccccgccggccgcgggtctcccggcccaaccccaccgacccagaccaagaccgcgccgagccgccgggactcagcgccttcgggtggcggcggtaagcggggaggaaacatggcgccgcccaaatgcgcccggaggccgttaggctgtggagggcgaggaaggcggtccagaggcggccggcaggtccacgtcctgggcgaccgctctgtcgcagttgggcgagacctacctagtcctgacgggtcgtatttccaagacattttcatattctatccattgttttgtgtgcattttattacttctgtatatagaggtaacaacgctaagcttttttgagatgtctgtttcttctagatgttctgaagtacctgatacatgttaaaattagaggtagtaaaatgacacattttgtaaataactttttgttaaaattcataggaaatgttattttgtgggggggggatggcatggtgtttgtggactggttcagggaaggaggggaaaagggaggtgcagagagctctaagccagtgtgcttacagtgaggcgagattcaccattgtttcttatgattgtgcattttgttttacttatctatgtatacagtgtatctaaaggacaaacgagtcctaatttacaacagctagtctttccagatgttaaagaacttctatcaatagagtaacctatcactagagttcacctctatcaatagagtaacctcattctctgcctgatgattcaaaggcatgggaagaccaaaaccatgtggcagttcctgtttttgattttattatatatatgtatataatatgaaagtagtcattaaagtagtctttcctttcgt

SEQ ID NO: 162104 - DNA, 1110 bp, Homo sapiens
  Payload ID: 11728
  Gene Symbol: OR2D2
  Gene Name: olfactory receptor, family 2, subfamily D, member 2
  Uniprot ID: Q9H210
  ENST ID: ENST00000299459
  CDS Start-End: 100-1026
ggcagttcctaagcctgcacttctgaattatataattttataggtatgcctgtctatggttagcacatagtgacttcttactgaaaaggacaacaaactatgagacagataaatcagacacaagtgacagaattcctccttctgggactctctgatgggccacacaccgagcagctgctatttatcgtattattgggtgtctacctggtcactgtgcttggaaatctgcttctaatctcccttgttcatgttgactcccaacttcacacacccatgtatttttttctctgcaacttgtctctggctgacctctgtttctctaccaacatagttcctcaggcactagtccacctgctttccagaaagaaggtcattgcattcacactttgcgcagctcgacttctctttttcctcatttttgggtgtacccagtgcgcccttcttgcagtgatgtcctatgatcgctatgttgcaatctgcaatcctctgcgttaccctaacatcatgacctggaaagtgtgtgtccagctggcaacaggatcatggaccagtggcattctggtgtctgtggtagacaccaccttcatactgaggctaccctaccgaggcagtaacagcattgctcatttcttttgtgaggcccctgcactattgatcttagcatccacagacacccatgcatcagagatggccatttttcttatgggggttgtgattctcctcatacctgtttttctgattctggtatcctatggccgtatcatagtaactgtggtcaagatgaagtcaactgtggggagtctcaaggcattttctacctgtggctcccacctcatggtggtcatacttttttatggatcagcaattatcacttacatgacacccaagtcttccaaacagcaggaaaaatcggtgtctgttttctatgcaatagtgactcccatgcttaatcccctcatctatagcctgagaaacaaggatgtgaaggcagctctgaggaaagtagccacaaggaatttcccatgaaggcttggaatctcacactgacagtgagctcagagaaccttttggcttcctacttcaaagacttgctgggaagacatggaatca

SEQ ID NO: 162105 - DNA, 1070 bp, Homo sapiens
  Payload ID: 11729
  Gene Symbol: OR2D3
  Gene Name: olfactory receptor, family 2, subfamily D, member 3
  Uniprot ID: Q8NGH3
  ENST ID: ENST00000317834
  CDS Start-End: 29-1021
caagacttgatgtcacagacccaaaaaaatgtgttcttttttcttgtgccaaacaggtaaacaggcaaaaatatcaatgggagaagaaaaccaaacctttgtgtccaagtttatcttcctgggtctttcacaggacttgcagacccagatcctgctatttatccttttcctcatcatttatctgctgaccgtgcttggaaaccagctcatcatcattctcatcttcctggattctcgccttcacactcccatgtatttttttcttagaaatctctcctttgcagatctctgtttctctactagcattgtccctcaagtgttggttcacttcttggtaaagaggaaaaccatttctttttatgggtgtatgacacagataattgtctttcttctggttgggtgtacagagtgtgcgctgctggcagtgatgtcctatgaccggtatgtggctgtctgcaagcccctgtactactctaccatcatgacacaacgggtgtgtctctggctgtccttcaggtcctgggccagtggggcactagtgtctttagtagataccagctttactttccatcttccctactggggacagaatataatcaatcactacttttgtgaacctcctgccctcctgaagctggcttccatagacacttacagcacagaaatggccatcttttcaatgggcgtggtaatcctcctggcccctgtctccctgattcttggttcttattggaatattatctccactgttatccagatgcagtctggggaagggagactcaaggctttttccacctgtggctcccatcttattgttgttgtcctcttctatgggtcaggaatattcacctacatgcgaccaaactccaagactacaaaagaactggataaaatgatatctgtgttctatacagcggtgactccaatgttgaaccccataatttatagcttgaggaacaaagatgtcaaaggggctctcaggaaactagttgggagaaagtgcttctctcataggcagtgacctctgagtctgacttttagagctatggcaacattctttaaaaaggagc

SEQ ID NO: 162106 - DNA, 1084 bp, Homo sapiens
  Payload ID: 11730
  Gene Symbol: OR2F1
  Gene Name: olfactory receptor, family 2, subfamily F, member 1 (gene/pseudogene)
  Uniprot ID: Q13607
  ENST ID: ENST00000392899
  CDS Start-End: 40-993
ctgactcccttcacagattaataatccttgaatattttaatgggaacagataaccagacttgggtgagtgaatttattctcctcggcctgtccagtgactgggacactcgggtctccctgtttgtcctgttcttggtcatgtatgtggtgaccgtgctggggaactgtctcattgtccttctgatcagactggacagccgactccacactcccatgtatttctttctcaccaacctctcccttgtcgatgtctcctatgccacaagtgtagtccctcagctgctggcacattttcttgcagaacataaagccatcccattccagagctgtgcagcccagttatttttctccctggccttgggtgggattgagtttgttctcctggcggtgatggcctatgaccgctatgtggctgtgtgtgatgccctgcgatactcggccatcatgcatggagggctgtgtgctaggttggccatcacatcctgggtcagtggcttcatcagctctcctgtgcagactgctatcacctttcagctgcccatgtgcagaaacaagtttattgatcacatatcctgtgaactcctagctgtggtcaggctggcttgtgtggacacctcctccaatgaggtcaccatcatggtgtctagcattgttcttctgatgacacccttctgcctggttcttttgtcctacatccagatcatctccaccatcctaaagatccagtccagagaaggaagaaagaaagctttccacacgtgtgcctctcacctcacagtggttgccctgtgctatggtgtggccattttcacttacatccagccccactccagtccctctgtccttcaggagaagttgttctctgtcttttatgccattttaacaccaatgctgaaccccatgatttacagcctaaggaataaagaggtgaagggggcctggcagaaactattatggaaattctctgggttaacatcaaagctggcaacttgactcatgagtatgacttagagaaaacagctttgcctcagtgttctccacccagctgagatctgacaggtgtaaactacattgccctggcaac

SEQ ID NO: 162107 - DNA, 1089 bp, Homo sapiens
  Payload ID: 11730
  Gene Symbol: OR2F1
  Gene Name: olfactory receptor, family 2, subfamily F, member 1 (gene/pseudogene)
  Uniprot ID: Q13607
  ENST ID: ENST00000624504
  CDS Start-End: 45-998
tttttctgactcccttcacagattaataatccttgaatattttaatgggaacagataaccagacttgggtgagtgaatttattctcctcggcctgtccagtgactgggacactcgggtctccctgtttgtcctgttcttggtcatgtatgtggtgaccgtgctggggaactgtctcattgtccttctgatcagactggacagccgactccacactcccatgtatttctttctcaccaacctctcccttgtcgatgtctcctatgccacaagtgtagtccctcagctgctggcacattttcttgcagaacataaagccatcccattccagagctgtgcagcccagttatttttctccctggccttgggtgggattgagtttgttctcctggcggtgatggcctatgaccgctatgtggctgtgtgtgatgccctgcgatactcggccatcatgcatggagggctgtgtgctaggttggccatcacatcctgggtcagtggcttcatcagctctcctgtgcagactgctatcacctttcagctgcccatgtgcagaaacaagtttattgatcacatatcctgtgaactcctagctgtggtcaggctggcttgtgtggacacctcctccaatgaggtcaccatcatggtgtctagcattgttcttctgatgacacccttctgcctggttcttttgtcctacatccagatcatctccaccatcctaaagatccagtccagagaaggaagaaagaaagctttccacacgtgtgcctctcacctcacagtggttgccctgtgctatggtgtggccattttcacttacatccagccccactccagtccctctgtccttcaggagaagttgttctctgtcttttatgccattttaacaccaatgctgaaccccatgatttacagcctaaggaataaagaggtgaagggggcctggcagaaactattatggaaattctctgggttaacatcaaagctggcaacttgactcatgagtatgacttagagaaaacagctttgcctcagtgttctccacccagctgagatctgacaggtgtaaactacattgccctggcaac

SEQ ID NO: 162108 - DNA, 1114 bp, Homo sapiens
  Payload ID: 11731
  Gene Symbol: OR2F2
  Gene Name: olfactory receptor, family 2, subfamily F, member 2
  Uniprot ID: O95006
  ENST ID: ENST00000408955
  CDS Start-End: 68-1021
tctttgattcaacagcttctgtttttttctgactctttctacagattaatattcctcacatttttaaatggaaatagataaccagacgtgggtgagagaatttattctccttggcttatccagtgactggtgcactcagatatccctgttttccctgttcttggtcacatacctcatgacagtgctggggaactgtctcattgtccttctgatcagactggacagccgactccacactcccatgtatttctttctcaccaacctctcccttgtcgatgtctcctatgccacaagcgtagtcccccagctgctggcacattttcttgcagaacataaagccatcccattccagagctgtgcagcccagttatttttctccctggccttgggtgggattgagtttgttctcctggcagtgatggcctatgaccgccatgtggctgtgtctgaccgcctgcgatactcggccatcatgcatggagggctgtgtgctaggttggccatcacatcctgggtcagtggctccatcaactctcttgtgcagactgctatcacctttcagctgcccatgtgcactaacaagtttattgatcacatatcctgtgaactcctagctgtggtcaggctggcttgtgtggacacctcctccaatgaggctgccatcatggtgtctagcattgttcttctgatgacacctttctgcctggttctgttgtcctacatccggatcatctccaccatcctaaagatccagtccagagaaggaagaaagaaagccttccacacgtgtgcctctcacctcacggtggttgccctgtgctacggcacaacgattttcacttacatccagccccactctggtccctcagtccttcaagagaagctgatctctgtcttctatgccattgttatgcctctgctgaaccctgtgatttatagtctaaggaataaagaggtgaagggggcctggcataaactattagagaaattctctgggttaacatccaagctgggaacttgactcatgaacattactttaagaagaagctttgcctcatttttctccacccagctcagatatggcagggataaactatgttgctctggcaaccgg

SEQ ID NO: 162109 - DNA, 954 bp, Homo sapiens
  Payload ID: 11732
  Gene Symbol: OR2G2
  Gene Name: olfactory receptor, family 2, subfamily G, member 2
  Uniprot ID: Q8NGZ5
  ENST ID: ENST00000320065
  CDS Start-End: 1-954
atggggatggtgagacataccaatgagagcaacctagcaggtttcatccttttagggttttctgattatcctcagttacagaaggttctatttgtgctcatattgattctgtatttactaactattttggggaataccaccatcattctggtttctcgtctggaacccaagcttcatatgccgatgtatttcttcctttctcatctctccttcctgtaccgctgcttcaccagcagtgttattccccagctcctggtaaacctgtgggaacccatgaaaactatcgcctatggtggctgtttggttcacctttacaactcccatgccctgggatccactgagtgcgtcctcccggctgtgatgtcctgtgaccgctatgtggctgtctgccgtcctctccattacactgtcttaatgcatatccatctctgcatggccttggcatctatggcatggctcagtggaatagccaccaccctggtacagtccaccctcaccctgcagctgcccttctgtgggcatcgccaagtggatcatttcatctgcgaggtccctgtgctcatcaagctggcttgtgtgggcaccacgtttaacgaggctgagctttttgtggctagtatccttttccttatagtgcctgtctcattcatcctggtctcctctggctacattgcccacgcagtgttgaggattaagtcagctaccaggagacagaaagcattcgggacctgcttctcccacctgacagtggtcaccatcttttatggaaccatcatcttcatgtatctgcagccagccaagagtagatccagggaccagggcaagtttgtttctctcttctacactgtggtaacccgcatgcttaaccctcttatttataccttgaggatcaaggaggtgaaaggggcattaaagaaagttctagcaaaggctctgggagtaaatattttatga

SEQ ID NO: 162110 - DNA, 930 bp, Homo sapiens
  Payload ID: 11733
  Gene Symbol: OR2G3
  Gene Name: olfactory receptor, family 2, subfamily G, member 3
  Uniprot ID: Q8NGZ4
  ENST ID: ENST00000320002
  CDS Start-End: 1-930
atgggattgggcaatgagagttccctaatggatttcatccttctaggcttctcagaccaccctcgtctggaggctgttctctttgtatttgtccttttcttctacctcctgacccttgtgggaaacttcaccataatcatcatctcatatctggatccccctcttcataccccaatgtacttttttctcagcaacctctctttactggacatctgcttcactactagccttgctcctcagaccttagttaacttgcaaagaccaaagaagacgatcacttacggtggttgtgtggcgcaactctatatttctctggcactgggctccactgaatgtatcctcttggctgacatggccttggatcggtacattgctgtctgcaaacccctccactatgtagtcatcatgaacccacggctttgccaacagctggcatctatctcctggctcagtggtttggctagttccctaatccatgcaacttttaccttgcaattgcctctctgtggcaaccataggctggaccattttatttgcgaagtaccagctcttctcaagttggcttgtgtggacaccactgtcaatgaattggtgctttttgttgttagtgttctgtttgttgtcattccaccagcactcatctccatctcctatggcttcataactcaagctgtgctgaggatcaaatcagtagaggcaaggcacaaagccttcagcacctgctcctcccaccttacagtggtgattatattctatggcaccataatctacgtgtacctgcaacctagtgacagctatgcccaggaccaagggaagtttatctccctcttctacaccatggtgacccccactttaaatcctatcatctatactttaaggaacaaggatatgaaagaggctctgaggaaacttctctcgggaaaattgtga

SEQ ID NO: 162111 - DNA, 951 bp, Homo sapiens
  Payload ID: 11734
  Gene Symbol: OR2G6
  Gene Name: olfactory receptor, family 2, subfamily G, member 6
  Uniprot ID: Q5TZ20
  ENST ID: ENST00000343414
  CDS Start-End: 1-951
atggaggaaaccaacaacagctctgaaaagggatttcttctcctgggattttcagatcagcctcagctagagaggtttctttttgccatcattttgtacttctacgtcttgagccttctggggaacactgccctcatactagtatgttgtctggactccagactccacactccaatgtacttcttcctcagcaacctctcgtgtgtggacatctgctttaccaccagtgttgccccacagttgctggttaccatgaataagaaagacaaaaccatgagctacggtggctgtgtggcccagctctatgtggccatggggttgggctcgtctgagtgtattctcttggccgtcatggcttatgaccgctatgctgctgtctgccggccactgcgctacatagccattatgcaccccaggttctgtgcgtctctggccggtggagcatggctcagcggcctcatcacctccctaattcagtgctccctcactgtgcagctgcccctctgtggtcatcgcacactggatcatattttctgtgaggtgccagtgctcatcaaactggcctgtgtggatacgactttcaacgaggcagaactctttgtggccagtgtagtctttctaattgtcccggtgttactcatcttagtctcctatggctttatcactcaagctgtgttaaggataaaatcagctgcgggccgccaaaaggcctttgggacctgttcgtctcacctggttgtggtcatcattttctatgggaccatcatattcatgtaccttcaaccggccaataggagatccaaaaaccagggaaagtttgtttctcttttctataccatagtcaccccacttttaaaccccattatctacactctgagaaacaaagatgtgaaaggggccttgaggaccctgatactgggtagtgctgctggacaaagccacaaggactag

SEQ ID NO: 162112 - DNA, 2253 bp, Homo sapiens
  Payload ID: 11735
  Gene Symbol: OR2H1
  Gene Name: olfactory receptor, family 2, subfamily H, member 1
  Uniprot ID: Q9GZK4
  ENST ID: ENST00000377132
  CDS Start-End: 710-1660
tcatgtgtctcagcacagtcttttacagcaaaaatgcatgtcacctcctcctaaaggctttccgtggcccacccacccagattcctcctttattgtgcagactctttcctaacccacacctcatcttaatttatttgccttcaattctgggcggcggtgttggggagggtctcaattttcccatgtatttcccagtgtttattgaatacatgaggccatactcttctagtctctctgcttctcatgctaggaactgaaccgaccagcctatactttaaggcttgttatttcactgactaaggaaaggctacttaagagggcaagctcagacatacataatctggagtggatcttccatgggaaaacacgtatataacagaaattattggcaaaactataagtatggtctacagactttctttgccctcaaccaggaagtcagaggcaccaatgtgaggttccacctgctttccagcacattcttggtttcctcacttctgctagacaacgtttgatcagaaggaacagggaacgagaaggagctgctggatgacgataagcctgggaaagggaggctgggtgagcagagacagaaaagaaacacctacctgctgtgacctcacaaacacccaggctgagttttgataagacaggttgaatcacactggggtgacagcctcatccctccaggtacaaacaagaacaggccatggttaaccaaagctcccccatgggcttcctccttctgggcttctctgaacacccagcactggaaaggactctctttgtggttgtcttcacttcctacctcttgaccctggtgggcaacacactcatcatcctgctgtctgtactgtaccccaggctccactctccaatgtactttttcctctctgacctctccttcttggacctctgctttaccacaagttgtgtcccccagatgctggtcaacctctggggcccaaagaagaccatcagcttcctgggatgctctgtccagctcttcatcttcctgtccctggggaccactgagtgcatcctcctgacagtgatggcctttgaccgatacgtggctgtctgccagcccctccactatgccaccatcatccacccccgcctgtgctggcagctggcatctgtggcctgggttatgagtctggttcaatcgatagtccagacaccatccaccctccacttgcccttctgtccccaccagcagatagatgactttttatgtgaggtcccatctctgattcgactctcctgtggagatacctcctacaatgaaatccagttggctgtgtccagtgtcatcttcgtggttgtgcctctcagcctcatccttgcctcttatggagccactgcccaggcagtgctgaggattaactctgccacagcatggagaaaggcctttgggacctgctcctcccatctcactgtggtcaccctcttctacagctcagtcattgctgtctacctccagcccaaaaatccgtatgcccaagggaggggcaagttctttggtctcttctatgcagtgggcactccttcacttaaccctctcgtatacaccctgaggaacaaggagataaagcgagcactcaggaggttactagggaaggaaagagactccagggaaagctggagagctgcttaatatactttcgaaattctggaggctggaaactccaagattaaggcagatttcatgcctattgagggcctgctttctgattatagaaggtgacttcttgctgtgcccacacatggtgaaagggactaccaactctctggagtctcttttatgagggcactaattccaattatgaagcctcttccctcatgacctaatcactgcccaaaggccccatgttctaatgccatcatcttggtggtttaggatttcaacatatgaattttggaaggacataagcattcaaccccctgcacatgtcttctttcctacttcctcaaggttctttctgtccagttgctccttcttctattgacccttttttgccttctctttctccttcactgcctcaagttacagccagaggaaaggaggaactaaaacttagcaaatctataatcacatgcaaatacacagaatggattgttacaaccaaaatgcaggctctattgttttcaatttagcagcctttcaaatgtatatggttctggccacattaaagttgcaaataacactttttttgagactgaaataaaggtgaaatattggaaggaaaa

SEQ ID NO: 162113 - DNA, 3021 bp, Homo sapiens
  Payload ID: 11735
  Gene Symbol: OR2H1
  Gene Name: olfactory receptor, family 2, subfamily H, member 1
  Uniprot ID: Q9GZK4
  ENST ID: ENST00000377133
  CDS Start-End: 463-1413
agtacagctcccatgcaaagtttgcttttagttctcattgtgagatcacaagtggaggctccaaccagtccagaagttcctttctatggggaagctgtggcagcaaggccgtgaagagagtctgacttaattgcaaagacgaggtttcaccatgttgaccaggctgatctcaaacatctgacctcaggaagtcagaggcaccaatgtgaggttccacctgctttccagcacattcttggtttcctcacttctgctagacaacgtttgatcagaaggaacagggaacgagaaggagctgctggatgacgataagcctgggaaagggaggctgggtgagcagagacagaaaagaaacacctacctgctgtgacctcacaaacacccaggctgagttttgataagacaggttgaatcacactggggtgacagcctcatccctccaggtacaaacaagaacaggccatggttaaccaaagctcccccatgggcttcctccttctgggcttctctgaacacccagcactggaaaggactctctttgtggttgtcttcacttcctacctcttgaccctggtgggcaacacactcatcatcctgctgtctgtactgtaccccaggctccactctccaatgtactttttcctctctgacctctccttcttggacctctgctttaccacaagttgtgtcccccagatgctggtcaacctctggggcccaaagaagaccatcagcttcctgggatgctctgtccagctcttcatcttcctgtccctggggaccactgagtgcatcctcctgacagtgatggcctttgaccgatacgtggctgtctgccagcccctccactatgccaccatcatccacccccgcctgtgctggcagctggcatctgtggcctgggttatgagtctggttcaatcgatagtccagacaccatccaccctccacttgcccttctgtccccaccagcagatagatgactttttatgtgaggtcccatctctgattcgactctcctgtggagatacctcctacaatgaaatccagttggctgtgtccagtgtcatcttcgtggttgtgcctctcagcctcatccttgcctcttatggagccactgcccaggcagtgctgaggattaactctgccacagcatggagaaaggcctttgggacctgctcctcccatctcactgtggtcaccctcttctacagctcagtcattgctgtctacctccagcccaaaaatccgtatgcccaagggaggggcaagttctttggtctcttctatgcagtgggcactccttcacttaaccctctcgtatacaccctgaggaacaaggagataaagcgagcactcaggaggttactagggaaggaaagagactccagggaaagctggagagctgcttaatatactttcgaaagtaagaagagtttcttcaagatttatgaacatgttaagttttccagactactacccttcccacatacacctgagccactgtggtgggtcacagtgtggctatgttatctatgagagggagaatgagaaagagagggacagagagataaaagaaattgggtgagaggagataggtagctccataaggcacacaaattcaaatattatcattcctatcactgtccattcttaatatttctatcctccattctgttctttttactgtcatcacttctatagatttcctaactccaccatgcctatttctggttatataattgctctccaattgtcatgtcagtgtaggggaactactccatcatagcattctggacaccttgcatgtatctacgtaggtcatgtaagcaaaggcttgaagaacagctaatctgagatttagaagaatgctttttgatcctcctggaatatgagaggatgggaggccctttagaacctgcctcaatgccatctctcactctccttcttatatccctgggagtatgtcatgtgacaagtctttactgtctcccaggttttggatggagcatggggttttctgccccacaccctttaggatatagctgaagaatataatgaggaatagctggattctagaactgactcctcaccagtggtatattccacaacagtgtcacagtcgtctggcccctttggtttccgtgtcatcctttttggtgtgtaggacaaggagccagggaattggcacgtttggcttttacttcttttttatatgtaaataataagccatctaagtgtaaaagtggctcatatcttctccagccaaatcagctaggccatggccttgccttgcttctcatgagtgtgcttgacagtcatcaccgtcactctatcttcatttctggttcttaccgtgttagcttagttcattcaagctactatcacaagctacacataaattgggtggtttataaataacaaacatttctttcttacagttctggaggctggaaactccaagattaaggcagatttcatgcctattgagggcctgctttctgattatagaaggtgacttcttgctgtgcccacacatggtgaaagggactaccaactctctggagtctcttttatgagggcactaattccaattatgaagcctcttccctcatgacctaatcactgcccaaaggccccatgttctaatgccatcatcttggtggtttaggatttcaacatatgaattttggaaggacataagcattcaaccccctgcacatgtcttctttcctacttcctcaaggttctttctgtccagttgctccttcttctattgacccttttttgccttctctttctccttcactgcctcaagttacagccagaggaaaggaggaactaaaacttagcaaatctataatcacatgcaaatacacagaatggattgttacaaccaaaatgcaggctctattgttttcaatttagcagcctttcaaatgtatatggttctggccacattaaagttgcaaataacactttttttgagactgaaataaaggtgaaatattggaaggaaaa

SEQ ID NO: 162114 - DNA, 3024 bp, Homo sapiens
  Payload ID: 11735
  Gene Symbol: OR2H1
  Gene Name: olfactory receptor, family 2, subfamily H, member 1
  Uniprot ID: Q9GZK4
  ENST ID: ENST00000377136
  CDS Start-End: 466-1416
gtcactcagtacagctcccatgcaaagtttgcttttagttctcattgtgagatcacaagtggaggctccaaccagtccagaagttcctttctatggggaagctgtggcagcaaggccgtgaagagagtctgacttaattgcaaagacgaggtttcaccatgttgaccaggctgatctcaaacatctgacctcagtcagaggcaccaatgtgaggttccacctgctttccagcacattcttggtttcctcacttctgctagacaacgtttgatcagaaggaacagggaacgagaaggagctgctggatgacgataagcctgggaaagggaggctgggtgagcagagacagaaaagaaacacctacctgctgtgacctcacaaacacccaggctgagttttgataagacaggttgaatcacactggggtgacagcctcatccctccaggtacaaacaagaacaggccatggttaaccaaagctcccccatgggcttcctccttctgggcttctctgaacacccagcactggaaaggactctctttgtggttgtcttcacttcctacctcttgaccctggtgggcaacacactcatcatcctgctgtctgtactgtaccccaggctccactctccaatgtactttttcctctctgacctctccttcttggacctctgctttaccacaagttgtgtcccccagatgctggtcaacctctggggcccaaagaagaccatcagcttcctgggatgctctgtccagctcttcatcttcctgtccctggggaccactgagtgcatcctcctgacagtgatggcctttgaccgatacgtggctgtctgccagcccctccactatgccaccatcatccacccccgcctgtgctggcagctggcatctgtggcctgggttatgagtctggttcaatcgatagtccagacaccatccaccctccacttgcccttctgtccccaccagcagatagatgactttttatgtgaggtcccatctctgattcgactctcctgtggagatacctcctacaatgaaatccagttggctgtgtccagtgtcatcttcgtggttgtgcctctcagcctcatccttgcctcttatggagccactgcccaggcagtgctgaggattaactctgccacagcatggagaaaggcctttgggacctgctcctcccatctcactgtggtcaccctcttctacagctcagtcattgctgtctacctccagcccaaaaatccgtatgcccaagggaggggcaagttctttggtctcttctatgcagtgggcactccttcacttaaccctctcgtatacaccctgaggaacaaggagataaagcgagcactcaggaggttactagggaaggaaagagactccagggaaagctggagagctgcttaatatactttcgaaagtaagaagagtttcttcaagatttatgaacatgttaagttttccagactactacccttcccacatacacctgagccactgtggtgggtcacagtgtggctatgttatctatgagagggagaatgagaaagagagggacagagagataaaagaaattgggtgagaggagataggtagctccataaggcacacaaattcaaatattatcattcctatcactgtccattcttaatatttctatcctccattctgttctttttactgtcatcacttctatagatttcctaactccaccatgcctatttctggttatataattgctctccaattgtcatgtcagtgtaggggaactactccatcatagcattctggacaccttgcatgtatctacgtaggtcatgtaagcaaaggcttgaagaacagctaatctgagatttagaagaatgctttttgatcctcctggaatatgagaggatgggaggccctttagaacctgcctcaatgccatctctcactctccttcttatatccctgggagtatgtcatgtgacaagtctttactgtctcccaggttttggatggagcatggggttttctgccccacaccctttaggatatagctgaagaatataatgaggaatagctggattctagaactgactcctcaccagtggtatattccacaacagtgtcacagtcgtctggcccctttggtttccgtgtcatcctttttggtgtgtaggacaaggagccagggaattggcacgtttggcttttacttcttttttatatgtaaataataagccatctaagtgtaaaagtggctcatatcttctccagccaaatcagctaggccatggccttgccttgcttctcatgagtgtgcttgacagtcatcaccgtcactctatcttcatttctggttcttaccgtgttagcttagttcattcaagctactatcacaagctacacataaattgggtggtttataaataacaaacatttctttcttacagttctggaggctggaaactccaagattaaggcagatttcatgcctattgagggcctgctttctgattatagaaggtgacttcttgctgtgcccacacatggtgaaagggactaccaactctctggagtctcttttatgagggcactaattccaattatgaagcctcttccctcatgacctaatcactgcccaaaggccccatgttctaatgccatcatcttggtggtttaggatttcaacatatgaattttggaaggacataagcattcaaccccctgcacatgtcttctttcctacttcctcaaggttctttctgtccagttgctccttcttctattgacccttttttgccttctctttctccttcactgcctcaagttacagccagaggaaaggaggaactaaaacttagcaaatctataatcacatgcaaatacacagaatggattgttacaaccaaaatgcaggctctattgttttcaatttagcagcctttcaaatgtatatggttctggccacattaaagttgcaaataacactttttttgagactgaaataaaggtgaaatattggaaggaaaa

SEQ ID NO: 162115 - DNA, 2253 bp, Homo sapiens; identical to SEQ ID NO: 162112
  Payload ID: 11735
  Gene Symbol: OR2H1
  Gene Name: olfactory receptor, family 2, subfamily H, member 1
  Uniprot ID: Q9GZK4
  ENST ID: ENST00000383550
  CDS Start-End: 710-1660

SEQ ID NO: 162116 - DNA, 2253 bp, Homo sapiens
  Payload ID: 11735
  Gene Symbol: OR2H1
  Gene Name: olfactory receptor, family 2, subfamily H, member 1
  Uniprot ID: Q9GZK4
  ENST ID: ENST00000383644
  CDS Start-End: 710-1660
tcatgtgtctcagcacagtcttttacagcaaaaatgcatgtcacctcctcctaaaggctttccgtggcccacccacccagattcctcctttattgtgcagactctttcctaacccacacctcatcttaatttatttgccttcaattctgggcggcggtgttggggagggtctcaattttcccatgtatttcccagtgtttattgaatacatgaggccatactcttctagtctctctgcttctcatgctaggaactgaaccgaccagcctatactttaaggcttgttatttcactgactaaggaaaggctacttaagagggcaagctcagacatacataatctggagtggatcttccatgggaaaacacgtatataacagaaattattggcaaaactataagtatggtctacagactttctttgccctcaaccaggaagtcagaggcaccaatgtgaggttccacctgctttccagcacattcttggtttcctcacttctgctagacaacgtttgatcagaaggaacagggaacgagaaggagctgctggatgacaataagcctgggaaagggaggctgggtgagcagagacagaaaagaaacacctacctgctgtgacctcacaaacacccaggctgagttttgataagacaggttgaatcacactggggtgacagcctcatccctccaggtacaaacaagaacaggccatggttaaccaaagctcccccatgggcttcctccttctgggcttctctgaacacccagcactggaaaggactctctttgtggttgtcttcacttcctacctcttgaccctggtgggcaacacactcatcatcctgctgtctgtactgtaccccaggctccactctccaatgtactttttcctctctgacctctccttcttggacctctgctttaccacaagttgtgtcccccagatgctggtcaacctctggggcccaaagaagaccatcagcttcctgggatgctctgtccagctcttcatcttcctgtccctggggaccactgagtgcatcctcctgacagtgatggcctttgaccgatacgtggctgtctgccagcccctccactatgccaccatcatccacccccgcctgtgctggcagctggcatctgtggcctgggttatgagtctggttcaatcgatagtccagacaccatccaccctccacttgcccttctgtccccaccagcagatagatgactttttatgtgaggtcccatctctgattcgactctcctgtggagatacctcctacaatgaaatccagttggctgtgtccagtgtcatcttcgtggttgtgcctctcagcctcatccttgcctcttatggagccactgcccaggcagtgctgaggattaactctgccacagcatggagaaaggcctttgggacctgctcctcccatctcactgtggtcaccctcttctacagctcagtcattgctgtctacctccagcccaaaaatccgtatgcccaagggaggggcaagttctttggtctcttctatgcagtgggcactccttcacttaaccctctcgtatacaccctgaggaacaaggagataaagcgagcactcaggaggttactagggaaggaaagagactccagggaaagctggagagctgcttaatatactttcgaaattctggaggctggaaactccaagattaaggcagatttcatgcctattgagggcctgctttctgattatagaaggtgacttcttgctgtgcccacacatggtgaaagggactaccaactctctggagtctcttttatgagggcactaattccaattatgaagcctcttccctcgtgacctaatcactgcccaaaggccccatgttctaatgccatcatcttggtggtttaggatttcaacatatgaattttggaaggacataagcattcaaccccctgcacatgtcttctttcctacttcctcaaggttctttctgtccagttgctccttcttctattgacccttttttgccttctctttctccttcactgcctcaagttacagccagaggaaaggaggaactaaaacttagcaaatctataatcacatgcaaatacacagaatggattgttacaaccaaaatgcaggctctattgttttcaatttagcagcctttcaaatgtatatggttctggccacattaaagttgcaaataacactttttttgagactgaaataaaggtgaaatattggaaggaaaa

SEQ ID NO: 162117 - DNA, 1294 bp, Homo sapiens
  Payload ID: 11735
  Gene Symbol: OR2H1
  Gene Name: olfactory receptor, family 2, subfamily H, member 1
  Uniprot ID: Q9GZK4
  ENST ID: ENST00000396792
  CDS Start-End: 331-1281
tgaagatcggttaattaatccatgttttacatcagctttctttgccctcaaccaggaagtcagaggcaccaatgtgaggttccacctgctttccagcacattcttggtttcctcacttctgctagacaacgtttgatcagaaggaacagggaacgagaaggagctgctggatgacgataagcctgggaaagggaggctgggtgagcagagacagaaaagaaacacctacctgctgtgacctcacaaacacccaggctgagttttgataagacaggttgaatcacactggggtgacagcctcatccctccaggtacaaacaagaacaggccatggttaaccaaagctcccccatgggcttcctccttctgggcttctctgaacacccagcactggaaaggactctctttgtggttgtcttcacttcctacctcttgaccctggtgggcaacacactcatcatcctgctgtctgtactgtaccccaggctccactctccaatgtactttttcctctctgacctctccttcttggacctctgctttaccacaagttgtgtcccccagatgctggtcaacctctggggcccaaagaagaccatcagcttcctgggatgctctgtccagctcttcatcttcctgtccctggggaccactgagtgcatcctcctgacagtgatggcctttgaccgatacgtggctgtctgccagcccctccactatgccaccatcatccacccccgcctgtgctggcagctggcatctgtggcctgggttatgagtctggttcaatcgatagtccagacaccatccaccctccacttgcccttctgtccccaccagcagatagatgactttttatgtgaggtcccatctctgattcgactctcctgtggagatacctcctacaatgaaatccagttggctgtgtccagtgtcatcttcgtggttgtgcctctcagcctcatccttgcctcttatggagccactgcccaggcagtgctgaggattaactctgccacagcatggagaaaggcctttgggacctgctcctcccatctcactgtggtcaccctcttctacagctcagtcattgctgtctacctccagcccaaaaatccgtatgcccaagggaggggcaagttctttggtctcttctatgcagtgggcactccttcacttaaccctctcgtatacaccctgaggaacaaggagataaagcgagcactcaggaggttactagggaaggaaagagactccagggaaagctggagagctgcttaatatactttcgaaa

SEQ ID NO: 162118 - DNA, 1294 bp, Homo sapiens; identical to SEQ ID NO: 162117
  Payload ID: 11735
  Gene Symbol: OR2H1
  Gene Name: olfactory receptor, family 2, subfamily H, member 1
  Uniprot ID: Q9GZK4
  ENST ID: ENST00000400689
  CDS Start-End: 331-1281

SEQ ID NO: 162119 - DNA, 3021 bp, Homo sapiens; identical to SEQ ID NO: 162113
  Payload ID: 11735
  Gene Symbol: OR2H1
  Gene Name: olfactory receptor, family 2, subfamily H, member 1
  Uniprot ID: Q9GZK4
  ENST ID: ENST00000400693
  CDS Start-End: 463-1413

SEQ ID NO: 162120 - DNA, 3024 bp, Homo sapiens; identical to SEQ ID NO: 162114
  Payload ID: 11735
  Gene Symbol: OR2H1
  Gene Name: olfactory receptor, family 2, subfamily H, member 1
  Uniprot ID: Q9GZK4
  ENST ID: ENST00000400694
  CDS Start-End: 466-1416

SEQ ID NO: 162121 - DNA, 1294 bp, Homo sapiens
  Payload ID: 11735
  Gene Symbol: OR2H1
  Gene Name: olfactory receptor, family 2, subfamily H, member 1
  Uniprot ID: Q9GZK4
  ENST ID: ENST00000400712
  CDS Start-End: 331-1281
tgaagatcggttaattaatccatgttttacatcagctttctttgccctcaaccaggaagtcagaggcaccaatgtgaggttccacctgctttccagcacattcttggtttcctcacttctgctagacaacgtttgatcagaaggaacagggaacgagaaggagctgctggatgacaataagcctgggaaagggaggctgggtgagcagagacagaaaagaaacacctacctgctgtgacctcacaaacacccaggctgagttttgataagacaggttgaatcacactggggtgacagcctcatccctccaggtacaaacaagaacaggccatggttaaccaaagctcccccatgggcttcctccttctgggcttctctgaacacccagcactggaaaggactctctttgtggttgtcttcacttcctacctcttgaccctggtgggcaacacactcatcatcctgctgtctgtactgtaccccaggctccactctccaatgtactttttcctctctgacctctccttcttggacctctgctttaccacaagttgtgtcccccagatgctggtcaacctctggggcccaaagaagaccatcagcttcctgggatgctctgtccagctcttcatcttcctgtccctggggaccactgagtgcatcctcctgacagtgatggcctttgaccgatacgtggctgtctgccagcccctccactatgccaccatcatccacccccgcctgtgctggcagctggcatctgtggcctgggttatgagtctggttcaatcgatagtccagacaccatccaccctccacttgcccttctgtccccaccagcagatagatgactttttatgtgaggtcccatctctgattcgactctcctgtggagatacctcctacaatgaaatccagttggctgtgtccagtgtcatcttcgtggttgtgcctctcagcctcatccttgcctcttatggagccactgcccaggcagtgctgaggattaactctgccacagcatggagaaaggcctttgggacctgctcctcccatctcactgtggtcaccctcttctacagctcagtcattgctgtctacctccagcccaaaaatccgtatgcccaagggaggggcaagttctttggtctcttctatgcagtgggcactccttcacttaaccctctcgtatacaccctgaggaacaaggagataaagcgagcactcaggaggttactagggaaggaaagagactccagggaaagctggagagctgcttaatatactttcgaaa

SEQ ID NO: 162122 - DNA, 3021 bp, Homo sapiens
  Payload ID: 11735
  Gene Symbol: OR2H1
  Gene Name: olfactory receptor, family 2, subfamily H, member 1
  Uniprot ID: Q9GZK4
  ENST ID: ENST00000400713
  CDS Start-End: 463-1413
agtacagctcccatgcaaagtttgcttttagttctcattgtgagatcacaagtggaggctccaaccagtccagaagttcctttctatggggaagctgtggcagcaaggccgtgaagagagtctgacttaattgcaaagacgaggtttcaccatgttgaccaggctgatctcaaacatctgacctcaggaagtcagaggcaccaatgtgaggttccacctgctttccagcacattcttggtttcctcacttctgctagacaacgtttgatcagaaggaacagggaacgagaaggagctgctggatgacaataagcctgggaaagggaggctgggtgagcagagacagaaaagaaacacctacctgctgtgacctcacaaacacccaggctgagttttgataagacaggttgaatcacactggggtgacagcctcatccctccaggtacaaacaagaacaggccatggttaaccaaagctcccccatgggcttcctccttctgggcttctctgaacacccagcactggaaaggactctctttgtggttgtcttcacttcctacctcttgaccctggtgggcaacacactcatcatcctgctgtctgtactgtaccccaggctccactctccaatgtactttttcctctctgacctctccttcttggacctctgctttaccacaagttgtgtcccccagatgctggtcaacctctggggcccaaagaagaccatcagcttcctgggatgctctgtccagctcttcatcttcctgtccctggggaccactgagtgcatcctcctgacagtgatggcctttgaccgatacgtggctgtctgccagcccctccactatgccaccatcatccacccccgcctgtgctggcagctggcatctgtggcctgggttatgagtctggttcaatcgatagtccagacaccatccaccctccacttgcccttctgtccccaccagcagatagatgactttttatgtgaggtcccatctctgattcgactctcctgtggagatacctcctacaatgaaatccagttggctgtgtccagtgtcatcttcgtggttgtgcctctcagcctcatccttgcctcttatggagccactgcccaggcagtgctgaggattaactctgccacagcatggagaaaggcctttgggacctgctcctcccatctcactgtggtcaccctcttctacagctcagtcattgctgtctacctccagcccaaaaatccgtatgcccaagggaggggcaagttctttggtctcttctatgcagtgggcactccttcacttaaccctctcgtatacaccctgaggaacaaggagataaagcgagcactcaggaggttactagggaaggaaagagactccagggaaagctggagagctgcttaatatactttcgaaagtaagaagagtttcttcaagatttatgaacatgttaagttttccagactactacccttcccacatacacctgagccactgtggtgggtcacagtgtggctatgttatctatgagagggagaatgagaaagagagggacagagagataaaagaaattgggtgagaggagataggtagctccataaggcacacaaattcaaatattatcattcctatcactgtccattcttaatatttctatcctccattctgttctttttactgtcatcacttctatagatttcctaactccaccatgcctatttctggttatataattgctctccaattgtcatgtcagtgtaggggaactactccatcatagcattctggacaccttgcatgtatctacgtaggtcatgtaagcaaaggcttgaagaacagctaatctgagatttagaagaatgctttttgatcctcctggaatatgagaggatgggaggccctttagaacctgcctcaatgccatctctcactctccttcttatatccctgggagtatgtcatgtgacaagtctttactgtctcccaggttttggatggagcatggggttttctgccccacaccctttaggatatagctgaagaatataatgaggaatagctggattctagaactgactcctcaccagtggtatattccacaacagtgtcacagtcgtctggcccctttggtttccgtgtcatcctttttggtgtgtaggacaaggaaccagggaattggcacgtttggcttttacttcttttttatatgtaaataataagccatctaagtgtaaaagtggctcatatcttctccagccaaatcagctaggccatggccttgccttgcttctcatgagtgtgcttgacagtcatcaccgtcactctatcttcatttctggttcttaccgtgttagcttagttcattcaagctactatcacaagctacacataaattgggtggtttataaataacaaacatttctttcttacagttctggaggctggaaactccaagattaaggcagatttcatgcctattgagggcctgctttctgattatagaaggtgacttcttgctgtgcccacacatggtgaaagggactaccaactctctggagtctcttttatgagggcactaattccaattatgaagcctcttccctcgtgacctaatcactgcccaaaggccccatgttctaatgccatcatcttggtggtttaggatttcaacatatgaattttggaaggacataagcattcaaccccctgcacatgtcttctttcctacttcctcaaggttctttctgtccagttgctccttcttctattgacccttttttgccttctctttctccttcactgcctcaagttacagccagaggaaaggaggaactaaaacttagcaaatctataatcacatgcaaatacacagaatggattgttacaaccaaaatgcaggctctattgttttcaatttagcagcctttcaaatgtatatggttctggccacattaaagttgcaaataacactttttttgagactgaaataaaggtgaaatattggaaggaaaa

SEQ ID NO: 162123 - DNA, 3024 bp, Homo sapiens
  Payload ID: 11735
  Gene Symbol: OR2H1
  Gene Name: olfactory receptor, family 2, subfamily H, member 1
  Uniprot ID: Q9GZK4
  ENST ID: ENST00000400714
  CDS Start-End: 466-1416
gtcactcagtacagctcccatgcaaagtttgcttttagttctcattgtgagatcacaagtggaggctccaaccagtccagaagttcctttctatggggaagctgtggcagcaaggccgtgaagagagtctgacttaattgcaaagacgaggtttcaccatgttgaccaggctgatctcaaacatctgacctcagtcagaggcaccaatgtgaggttccacctgctttccagcacattcttggtttcctcacttctgctagacaacgtttgatcagaaggaacagggaacgagaaggagctgctggatgacaataagcctgggaaagggaggctgggtgagcagagacagaaaagaaacacctacctgctgtgacctcacaaacacccaggctgagttttgataagacaggttgaatcacactggggtgacagcctcatccctccaggtacaaacaagaacaggccatggttaaccaaagctcccccatgggcttcctccttctgggcttctctgaacacccagcactggaaaggactctctttgtggttgtcttcacttcctacctcttgaccctggtgggcaacacactcatcatcctgctgtctgtactgtaccccaggctccactctccaatgtactttttcctctctgacctctccttcttggacctctgctttaccacaagttgtgtcccccagatgctggtcaacctctggggcccaaagaagaccatcagcttcctgggatgctctgtccagctcttcatcttcctgtccctggggaccactgagtgcatcctcctgacagtgatggcctttgaccgatacgtggctgtctgccagcccctccactatgccaccatcatccacccccgcctgtgctggcagctggcatctgtggcctgggttatgagtctggttcaatcgatagtccagacaccatccaccctccacttgcccttctgtccccaccagcagatagatgactttttatgtgaggtcccatctctgattcgactctcctgtggagatacctcctacaatgaaatccagttggctgtgtccagtgtcatcttcgtggttgtgcctctcagcctcatccttgcctcttatggagccactgcccaggcagtgctgaggattaactctgccacagcatggagaaaggcctttgggacctgctcctcccatctcactgtggtcaccctcttctacagctcagtcattgctgtctacctccagcccaaaaatccgtatgcccaagggaggggcaagttctttggtctcttctatgcagtgggcactccttcacttaaccctctcgtatacaccctgaggaacaaggagataaagcgagcactcaggaggttactagggaaggaaagagactccagggaaagctggagagctgcttaatatactttcgaaagtaagaagagtttcttcaagatttatgaacatgttaagttttccagactactacccttcccacatacacctgagccactgtggtgggtcacagtgtggctatgttatctatgagagggagaatgagaaagagagggacagagagataaaagaaattgggtgagaggagataggtagctccataaggcacacaaattcaaatattatcattcctatcactgtccattcttaatatttctatcctccattctgttctttttactgtcatcacttctatagatttcctaactccaccatgcctatttctggttatataattgctctccaattgtcatgtcagtgtaggggaactactccatcatagcattctggacaccttgcatgtatctacgtaggtcatgtaagcaaaggcttgaagaacagctaatctgagatttagaagaatgctttttgatcctcctggaatatgagaggatgggaggccctttagaacctgcctcaatgccatctctcactctccttcttatatccctgggagtatgtcatgtgacaagtctttactgtctcccaggttttggatggagcatggggttttctgccccacaccctttaggatatagctgaagaatataatgaggaatagctggattctagaactgactcctcaccagtggtatattccacaacagtgtcacagtcgtctggcccctttggtttccgtgtcatcctttttggtgtgtaggacaaggaaccagggaattggcacgtttggcttttacttcttttttatatgtaaataataagccatctaagtgtaaaagtggctcatatcttctccagccaaatcagctaggccatggccttgccttgcttctcatgagtgtgcttgacagtcatcaccgtcactctatcttcatttctggttcttaccgtgttagcttagttcattcaagctactatcacaagctacacataaattgggtggtttataaataacaaacatttctttcttacagttctggaggctggaaactccaagattaaggcagatttcatgcctattgagggcctgctttctgattatagaaggtgacttcttgctgtgcccacacatggtgaaagggactaccaactctctggagtctcttttatgagggcactaattccaattatgaagcctcttccctcgtgacctaatcactgcccaaaggccccatgttctaatgccatcatcttggtggtttaggatttcaacatatgaattttggaaggacataagcattcaaccccctgcacatgtcttctttcctacttcctcaaggttctttctgtccagttgctccttcttctattgacccttttttgccttctctttctccttcactgcctcaagttacagccagaggaaaggaggaactaaaacttagcaaatctataatcacatgcaaatacacagaatggattgttacaaccaaaatgcaggctctattgttttcaatttagcagcctttcaaatgtatatggttctggccacattaaagttgcaaataacactttttttgagactgaaataaaggtgaaatattggaaggaaaa

SEQ ID NO: 162124 - DNA, 3021 bp, Homo sapiens
  Payload ID: 11735
  Gene Symbol: OR2H1
  Gene Name: olfactory receptor, family 2, subfamily H, member 1
  Uniprot ID: Q9GZK4
  ENST ID: ENST00000436167
  CDS Start-End: 463-1413
agtacagctcccatgcaaagtttgcttttagttctcattgtgagatcacaagtggaggctccaaccagtccagaagttcctttctatggggaagctgtggcagcaaggccgtgaagagagtctgacttaattgcaaagacgaggtttcaccatgttgaccaggctgatctcaaacatctgacctcaggaagtcagaggcaccaatgtgaggttccacctgctttccagcacattcttggtttcctcacttctgctagacaacgtttgatcagaaggaacagggaacgagaaggagctgctggatgacgataagcctgggaaagggaggctgggtgagcagagacagaaaagaaacacctacctgctgtgacctcacaaacacccaggctgagttttgataagacaggttgaatcacactggggtgacagcctcatccctccaggtacaaacaagaacaggccatggttaaccaaagctcccccatgggcttcctccttctgggcttctctgaacacccagcactggaaaggactctctttgtggttgtcttcacttcctacctcttgaccctggtgggcaacacactcatcatcctgctgtctgtactgtaccccaggctccactctccaatgtactttttcctctctgacctctccttcttggacctctgctttaccacaagttgtgtcccccagatgctggtcaacctctggggcccaaagaagaccatcagcttcctgggatgctctgtccagctcttcatcttcctgtccctggggaccactgagtgcatcctcctgacagtgatggcctttgaccgatacgtggctgtctgccagcccctccactatgccaccatcatccacccccgcctgtgctggcagctggcatctgtggcctgggttatgagtctggttcaatcgatagtccagacaccatccaccctccacttgcccttctgtccccaccagcagatagatgactttttatgtgaggtcccatctctgattcgactctcctgtggagatacctcctacaatgaaatccagttggctgtgtccagtgtcatcttcgtggttgtgcctctcagcctcatccttgcctcttatggagccactgcccaggcagtgctgaggattaactctgccacagcatggagaaaggcctttgggacctgctcctcccatctcactgtggtcaccctcttctacagctcagtcattgctgtctacctccagcccaaaaatccgtatgcccaagggaggggcaagttctttggtctcttctatgcagtgggcactccttcacttaaccctctcgtatacaccctgaggaacaaggagataaagcgagcactcaggaggttactagggaaggaaagagactccagggaaagctggagagctgcttaatatactttcgaaagtaagaagagtttcttcaagatttatgaacatgttaagttttccagactactacccttcccacatacacctgagccactgtggtgggtcacagtgtggctatgttatctatgagagggagaatgagaaagagagggacagagagataaaagaaattgggtgagaggagataggtagctccataaggcacacaaattcaaatattatcattcctatcactgtccattcttaatatttctatcctccattctgttctttttactgtcatcacttctatagatttcctaactccaccatgcctatttctggttatataattgctctccaattgtcatgtcagtgtaggggaactactccatcatagcattctggacaccttgcatgtatctacgtaggtcatgtaagcaaaggcttgaagaacagctaatctgagatttagaagaatgctttttgatcctcctggaatatgagaggatgggaggccctttagaacctgcctcaatgccatctctcactctccttcttatatccctgggagtatgtcatgtgacaagtctttactgtctcccaggttttggatggagcatggggttttctgccccacaccctttaggatatagctgaagaatataatgaggaatagctggattctagaactgactcctcaccagtggtatattccacaacagtgtcacagtcgtctggcccctttggtttccgtgtcatcctttttggtgtgtaggacaaggagccagggaattggcacgtttggcttttacttcttttttatatgtaaataataagccatctaagtgtaaaagtggctcatatcttctccagccaaatcagctaggccatggccttgccttgcttctcatgagtgtgcttgacagtcatcaccgtcactctatcttcatttctggttcttaccgtgttagcttagttcattcaagctactatcacaagctacacataaattgggtggtttataaataacaaacatttctttcttacagttctggaggctggaaactccaagattaaggcagatttcatgcctattgagggcctgctttctgattatagaaggtgacttcttgctgtgcccacacatggtgaaagggactaccaactctctggagtctcttttatgagggcactaattccaattatgaagcctcttccctcgtgacctaatcactgcccaaaggccccatgttctaatgccatcatcttggtggtttaggatttcaacatatgaattttggaaggacataagcattcaaccccctgcacatgtcttctttcctacttcctcaaggttctttctgtccagttgctccttcttctattgacccttttttgccttctctttctccttcactgcctcaagttacagccagaggaaaggaggaactaaaacttagcaaatctataatcacatgcaaatacacagaatggattgttacaaccaaaatgcaggctctattgttttcaatttagcagcctttcaaatgtatatggttctggccacattaaagttgcaaataacactttttttgagactgaaataaaggtgaaatattggaaggaaaa

SEQ ID NO: 162125 - DNA, 2253 bp, Homo sapiens
  Payload ID: 11735
  Gene Symbol: OR2H1
  Gene Name: olfactory receptor, family 2, subfamily H, member 1
  Uniprot ID: Q9GZK4
  ENST ID: ENST00000446161
  CDS Start-End: 710-1660
tcatgtgtctcagcacagtcttttacagcaaaaatgcatgtcacctcctcctaaaggctttccgtggcccacccacccagattcctcctttattgtgcagactctttcctaacccacacctcatcttaatttatttgccttcaattctgggcggcggtgttggggagggtctcaattttcccatgtatttcccagtgtttattgaatacatgaggccatactcttctagtctctctgcttctcatgctaggaactgaaccgaccagcctatactttaaggcttgttatttcactgactaaggaaaggctacttaagagggcaagctcagacatacataatctggagtggatcttccatgggaaaacacgtatataacagaaattattggcaaaactataagtatggtctacagactttctttgccctcaaccaggaagtcagaggcaccaatgtgaggttccacctgctttccagcacattcttggtttcctcacttctgctagacaacgtttgatcagaaggaacagggaacgagaaggagctgctggatgacgataagcctgggaaagggaggctgggtgagcagagacagaaaagaaacacctacctgctgtgacctcacaaacacccaggctgagttttgataagacaggttgaatcacactggggtgacagcctcatccctccaggtacaaacaagaacaggccatggttaaccaaagctcccccatgggcttcctccttctgggcttctctgaacacccagcactggaaaggactctctttgtggttgtcttcacttcctacctcttgaccctggtgggcaacacactcatcatcctgctgtctgtactgtaccccaggctccactctccaatgtactttttcctctctgacctctccttcttggacctctgctttaccacaagttgtgtcccccagatgctggtcaacctctggggcccaaagaagaccatcagcttcctgggatgctctgtccagctcttcatcttcctgtccctggggaccactgagtgcatcctcctgacagtgatggcctttgaccgatacgtggctgtctgccagcccctccactatgccaccatcatccacccccgcctgtgctggcagctggcatctgtggcctgggttatgagtctggttcaatcgatagtccagacaccatccaccctccacttgcccttctgtccccaccagcagatagatgactttttatgtgaggtcccatctctgattcgactctcctgtggagatacctcctacaatgaaatccagttggctgtgtccagtgtcatcttcgtggttgtgcctctcagcctcatccttgcctcttatggagccactgcccaggcagtgctgaggattaactctgccacagcatggagaaaggcctttgggacctgctcctcccatctcactgtggtcaccctcttctacagctcagtcattgctgtctacctccagcccaaaaatccgtatgcccaagggaggggcaagttctttggtctcttctatgcagtgggcactccttcacttaaccctctcgtatacaccctgaggaacaaggagataaagcgagcactcaggaggttactagggaaggaaagagactccagggaaagctggagagctgcttaatatactttcgaaattctggaggctggaaactccaagattaaggcagatttcatgcctattgagggcctgctttctgattatagaaggtgacttcttgctgtgcccacacatggtgaaagggactaccaactctctggagtctcttttatgagggcactaattccaattatgaagcctcttccctcgtgacctaatcactgcccaaaggccccatgttctaatgccatcatcttggtggtttaggatttcaacatatgaattttggaaggacataagcattcaaccccctgcacatgtcttctttcctacttcctcaaggttctttctgtccagttgctccttcttctattgacccttttttgccttctctttctccttcactgcctcaagttacagccagaggaaaggaggaactaaaacttagcaaatctataatcacatgcaaatacacagaatggattgttacaaccaaaatgcaggctctattgttttcaatttagcagcctttcaaatgtatatggttctggccacattaaagttgcaaataacactttttttgagactgaaataaaggtgaaatattggaaggaaaa

SEQ ID NO: 162126 - DNA, 3024 bp, Homo sapiens
  Payload ID: 11735
  Gene Symbol: OR2H1
  Gene Name: olfactory receptor, family 2, subfamily H, member 1
  Uniprot ID: Q9GZK4
  ENST ID: ENST00000453467
  CDS Start-End: 466-1416
gtcactcagtacagctcccatgcaaagtttgcttttagttctcattgtgagatcacaagtggaggctccaaccagtccagaagttcctttctatggggaagctgtggcagcaaggccgtgaagagagtctgacttaattgcaaagacgaggtttcaccatgttgaccaggctgatctcaaacatctgacctcagtcagaggcaccaatgtgaggttccacctgctttccagcacattcttggtttcctcacttctgctagacaacgtttgatcagaaggaacagggaacgagaaggagctgctggatgacaataagcctgggaaagggaggctgggtgagcagagacagaaaagaaacacctacctgctgtgacctcacaaacacccaggctgagttttgataagacaggttgaatcacactggggtgacagcctcatccctccaggtacaaacaagaacaggccatggttaaccaaagctcccccatgggcttcctccttctgggcttctctgaacacccagcactggaaaggactctctttgtggttgtcttcacttcctacctcttgaccctggtgggcaacacactcatcatcctgctgtctgtactgtaccccaggctccactctccaatgtactttttcctctctgacctctccttcttggacctctgctttaccacaagttgtgtcccccagatgctggtcaacctctggggcccaaagaagaccatcagcttcctgggatgctctgtccagctcttcatcttcctgtccctggggaccactgagtgcatcctcctgacagtgatggcctttgaccgatacgtggctgtctgccagcccctccactatgccaccatcatccacccccgcctgtgctggcagctggcatctgtggcctgggttatgagtctggttcaatcgatagtccagacaccatccaccctccacttgcccttctgtccccaccagcagatagatgactttttatgtgaggtcccatctctgattcgactctcctgtggagatacctcctacaatgaaatccagttggctgtgtccagtgtcatcttcgtggttgtgcctctcagcctcatccttgcctcttatggagccactgcccaggcagtgctgaggattaactctgccacagcatggagaaaggcctttgggacctgctcctcccatctcactgtggtcaccctcttctacagctcagtcattgctgtctacctccagcccaaaaatccgtatgcccaagggaggggcaagttctttggtctcttctatgcagtgggcactccttcacttaaccctctcgtatacaccctgaggaacaaggagataaagcgagcactcaggaggttactagggaaggaaagagactccagggaaagctggagagctgcttaatatactttcgaaagtaagaagagtttcttcaagatttatgaacatgttaagttttccagactactacccttcccacatacacctgagccactgtggtgggtcacagtgtggctatgttatctatgagagggagaatgagaaagagagggacagagagataaaagaaattgggtgagaggagataggtagctccataaggcacacaaattcaaatattatcattcctatcactgtccattcttaatatttctatcctccattctgttctttttactgtcatcacttctatagatttcctaactccaccatgcctatttctggttatataattgctctccaattgtcatgtcagtgtaggggaactactccatcatagcattctggacaccttgcatgtatctacgtaggtcatgtaagcaaaggcttgaagaacagctaatctgagatttagaagaatgctttttgatcctcctggaatatgagaggatgggaggccctttagaacctgcctcaatgccatctctcactctccttcttatatccctgggagtatgtcatgtgacaagtctttactgtctcccaggttttggatggagcatggggttttctgccccacaccctttaggatatagctgaagaatataatgaggaatagctggattctagaactgactcctcaccagtggtatattccacaacagtgtcacagtcgtctggcccctttggtttccgtgtcatcctttttggtgtgtaggacaaggagccagggaattggcacgtttggcttttacttcttttttatatgtaaataataagccatctaagtgtaaaagtggctcatatcttctccagccaaatcagctaggccatggccttgccttgcttctcatgagtgtgcttgacagtcatcaccgtcactctatcttcatttctggttcttaccgtgttagcttagttcattcaagctactatcacaagctacacataaattgggtggtttataaataacaaacatttctttcttacagttctggaggctggaaactccaagattaaggcagatttcatgcctattgagggcctgctttctgattatagaaggtgacttcttgctgtgcccacacatggtgaaagggactaccaactctctggagtctcttttatgagggcactaattccaattatgaagcctcttccctcgtgacctaatcactgcccaaaggccccatgttctaatgccatcatcttggtggtttaggatttcaacatatgaattttggaaggacataagcattcaaccccctgcacatgtcttctttcctacttcctcaaggttctttctgtccagttgctccttcttctattgacccttttttgccttctctttctccttcactgcctcaagttacagccagaggaaaggaggaactaaaacttagcaaatctataatcacatgcaaatacacagaatggattgttacaaccaaaatgcaggctctattgttttcaatttagcagcctttcaaatgtatatggttctggccacattaaagttgcaaataacactttttttgagactgaaataaaggtgaaatattggaaggaaaa

SEQ ID NO: 162127 - DNA, 1294 bp, Homo sapiens; identical to SEQ ID NO: 162117
  Payload ID: 11735
  Gene Symbol: OR2H1
  Gene Name: olfactory receptor, family 2, subfamily H, member 1
  Uniprot ID: Q9GZK4
  ENST ID: ENST00000431658
  CDS Start-End: 331-1281

SEQ ID NO: 162128 - DNA, 1294 bp, Homo sapiens; identical to SEQ ID NO: 162117
  Payload ID: 11735
  Gene Symbol: OR2H1
  Gene Name: olfactory receptor, family 2, subfamily H, member 1
  Uniprot ID: Q9GZK4
  ENST ID: ENST00000418376
  CDS Start-End: 331-1281

SEQ ID NO: 162129 - DNA, 1294 bp, Homo sapiens; identical to SEQ ID NO: 162121
  Payload ID: 11735
  Gene Symbol: OR2H1
  Gene Name: olfactory receptor, family 2, subfamily H, member 1
  Uniprot ID: Q9GZK4
  ENST ID: ENST00000416582
  CDS Start-End: 331-1281

SEQ ID NO: 162130 - DNA, 3021 bp, Homo sapiens
  Payload ID: 11735
  Gene Symbol: OR2H1
  Gene Name: olfactory receptor, family 2, subfamily H, member 1
  Uniprot ID: Q9GZK4
  ENST ID: ENST00000454071
  CDS Start-End: 463-1413
agtacagctcccatgcaaagtttgcttttagttctcattgtgagatcacaagtggaggctccaaccagtccagaagttcctttctatggggaagctgtggcagcaaggccgtgaagagagtctgacttaattgcaaagacgaggtttcaccatgttgaccaggctgatctcaaacatctgacctcaggaagtcagaggcaccaatgtgaggttccacctgctttccagcacattcttggtttcctcacttctgctagacaacgtttgatcagaaggaacagggaacgagaaggagctgctggatgacaataagcctgggaaagggaggctgggtgagcagagacagaaaagaaacacctacctgctgtgacctcacaaacacccaggctgagttttgataagacaggttgaatcacactggggtgacagcctcatccctccaggtacaaacaagaacaggccatggttaaccaaagctcccccatgggcttcctccttctgggcttctctgaacacccagcactggaaaggactctctttgtggttgtcttcacttcctacctcttgaccctggtgggcaacacactcatcatcctgctgtctgtactgtaccccaggctccactctccaatgtactttttcctctctgacctctccttcttggacctctgctttaccacaagttgtgtcccccagatgctggtcaacctctggggcccaaagaagaccatcagcttcctgggatgctctgtccagctcttcatcttcctgtccctggggaccactgagtgcatcctcctgacagtgatggcctttgaccgatacgtggctgtctgccagcccctccactatgccaccatcatccacccccgcctgtgctggcagctggcatctgtggcctgggttatgagtctggttcaatcgatagtccagacaccatccaccctccacttgcccttctgtccccaccagcagatagatgactttttatgtgaggtcccatctctgattcgactctcctgtggagatacctcctacaatgaaatccagttggctgtgtccagtgtcatcttcgtggttgtgcctctcagcctcatccttgcctcttatggagccactgcccaggcagtgctgaggattaactctgccacagcatggagaaaggcctttgggacctgctcctcccatctcactgtggtcaccctcttctacagctcagtcattgctgtctacctccagcccaaaaatccgtatgcccaagggaggggcaagttctttggtctcttctatgcagtgggcactccttcacttaaccctctcgtatacaccctgaggaacaaggagataaagcgagcactcaggaggttactagggaaggaaagagactccagggaaagctggagagctgcttaatatactttcgaaagtaagaagagtttcttcaagatttatgaacatgttaagttttccagactactacccttcccacatacacctgagccactgtggtgggtcacagtgtggctatgttatctatgagagggagaatgagaaagagagggacagagagataaaagaaattgggtgagaggagataggtagctccataaggcacacaaattcaaatattatcattcctatcactgtccattcttaatatttctatcctccattctgttctttttactgtcatcacttctatagatttcctaactccaccatgcctatttctggttatataattgctctccaattgtcatgtcagtgtaggggaactactccatcatagcattctggacaccttgcatgtatctacgtaggtcatgtaagcaaaggcttgaagaacagctaatctgagatttagaagaatgctttttgatcctcctggaatatgagaggatgggaggccctttagaacctgcctcaatgccatctctcactctccttcttatatccctgggagtatgtcatgtgacaagtctttactgtctcccaggttttggatggagcatggggttttctgccccacaccctttaggatatagctgaagaatataatgaggaatagctggattctagaactgactcctcaccagtggtatattccacaacagtgtcacagtcgtctggcccctttggtttccgtgtcatcctttttggtgtgtaggacaaggagccagggaattggcacgtttggcttttacttcttttttatatgtaaataataagccatctaagtgtaaaagtggctcatatcttctccagccaaatcagctaggccatggccttgccttgcttctcatgagtgtgcttgacagtcatcaccgtcactctatcttcatttctggttcttaccgtgttagcttagttcattcaagctactatcacaagctacacataaattgggtggtttataaataacaaacatttctttcttacagttctggaggctggaaactccaagattaaggcagatttcatgcctattgagggcctgctttctgattatagaaggtgacttcttgctgtgcccacacatggtgaaagggactaccaactctctggagtctcttttatgagggcactaattccaattatgaagcctcttccctcgtgacctaatcactgcccaaaggccccatgttctaatgccatcatcttggtggtttaggatttcaacatatgaattttggaaggacataagcattcaaccccctgcacatgtcttctttcctacttcctcaaggttctttctgtccagttgctccttcttctattgacccttttttgccttctctttctccttcactgcctcaagttacagccagaggaaaggaggaactaaaacttagcaaatctataatcacatgcaaatacacagaatggattgttacaaccaaaatgcaggctctattgttttcaatttagcagcctttcaaatgtatatggttctggccacattaaagttgcaaataacactttttttgagactgaaataaaggtgaaatattggaaggaaaa

SEQ ID NO: 162131 - DNA, 2253 bp, Homo sapiens; identical to SEQ ID NO: 162125
  Payload ID: 11735
  Gene Symbol: OR2H1
  Gene Name: olfactory receptor, family 2, subfamily H, member 1
  Uniprot ID: Q9GZK4
  ENST ID: ENST00000440672
  CDS Start-End: 710-1660

SEQ ID NO: 162132 - DNA, 2253 bp, Homo sapiens; identical to SEQ ID NO: 162116
  Payload ID: 11735
  Gene Symbol: OR2H1
  Gene Name: olfactory receptor, family 2, subfamily H, member 1
  Uniprot ID: Q9GZK4
  ENST ID: ENST00000415581
  CDS Start-End: 710-1660

SEQ ID NO: 162133 - DNA, 3024 bp, Homo sapiens; identical to SEQ ID NO: 162126
  Payload ID: 11735
  Gene Symbol: OR2H1
  Gene Name: olfactory receptor, family 2, subfamily H, member 1
  Uniprot ID: Q9GZK4
  ENST ID: ENST00000435958
  CDS Start-End: 466-1416

SEQ ID NO: 162134 - DNA, 3024 bp, Homo sapiens; identical to SEQ ID NO: 162114
  Payload ID: 11735
  Gene Symbol: OR2H1
  Gene Name: olfactory receptor, family 2, subfamily H, member 1
  Uniprot ID: Q9GZK4
  ENST ID: ENST00000443407
  CDS Start-End: 466-1416

SEQ ID NO: 162135 - DNA, 3021 bp, Homo sapiens; identical to SEQ ID NO: 162130
  Payload ID: 11735
  Gene Symbol: OR2H1
  Gene Name: olfactory receptor, family 2, subfamily H, member 1
  Uniprot ID: Q9GZK4
  ENST ID: ENST00000458051
  CDS Start-End: 463-1413

SEQ ID NO: 162136 - DNA, 3021 bp, Homo sapiens; identical to SEQ ID NO: 162113
  Payload ID: 11735
  Gene Symbol: OR2H1
  Gene Name: olfactory receptor, family 2, subfamily H, member 1
  Uniprot ID: Q9GZK4
  ENST ID: ENST00000412956
  CDS Start-End: 463-1413

SEQ ID NO: 162137 - DNA, 3024 bp, Homo sapiens
  Payload ID: 11735
  Gene Symbol: OR2H1
  Gene Name: olfactory receptor, family 2, subfamily H, member 1
  Uniprot ID: Q9GZK4
  ENST ID: ENST00000456657
  CDS Start-End: 466-1416
gtcactcagtacagctcccatgcaaagtttgcttttagttctcattgtgagatcacaagtggaggctccaaccagtccagaagttcctttctatggggaagctgtggcagcaaggccgtgaagagagtctgacttaattgcaaagacgaggtttcaccatgttgaccaggctgatctcaaacatctgacctcagtcagaggcaccaatgtgaggttccacctgctttccagcacattcttggtttcctcacttctgctagacaacgtttgatcagaaggaacagggaacgagaaggagctgctggatgacgataagcctgggaaagggaggctgggtgagcagagacagaaaagaaacacctacctgctgtgacctcacaaacacccaggctgagttttgataagacaggttgaatcacactggggtgacagcctcatccctccaggtacaaacaagaacaggccatggttaaccaaagctcccccatgggcttcctccttctgggcttctctgaacacccagcactggaaaggactctctttgtggttgtcttcacttcctacctcttgaccctggtgggcaacacactcatcatcctgctgtctgtactgtaccccaggctccactctccaatgtactttttcctctctgacctctccttcttggacctctgctttaccacaagttgtgtcccccagatgctggtcaacctctggggcccaaagaagaccatcagcttcctgggatgctctgtccagctcttcatcttcctgtccctggggaccactgagtgcatcctcctgacagtgatggcctttgaccgatacgtggctgtctgccagcccctccactatgccaccatcatccacccccgcctgtgctggcagctggcatctgtggcctgggttatgagtctggttcaatcgatagtccagacaccatccaccctccacttgcccttctgtccccaccagcagatagatgactttttatgtgaggtcccatctctgattcgactctcctgtggagatacctcctacaatgaaatccagttggctgtgtccagtgtcatcttcgtggttgtgcctctcagcctcatccttgcctcttatggagccactgcccaggcagtgctgaggattaactctgccacagcatggagaaaggcctttgggacctgctcctcccatctcactgtggtcaccctcttctacagctcagtcattgctgtctacctccagcccaaaaatccgtatgcccaagggaggggcaagttctttggtctcttctatgcagtgggcactccttcacttaaccctctcgtatacaccctgaggaacaaggagataaagcgagcactcaggaggttactagggaaggaaagagactccagggaaagctggagagctgcttaatatactttcgaaagtaagaagagtttcttcaagatttatgaacatgttaagttttccagactactacccttcccacatacacctgagccactgtggtgggtcacagtgtggctatgttatctatgagagggagaatgagaaagagagggacagagagataaaagaaattgggtgagaggagataggtagctccataaggcacacaaattcaaatattatcattcctatcactgtccattcttaatatttctatcctccattctgttctttttactgtcatcacttctatagatttcctaactccaccatgcctatttctggttatataattgctctccaattgtcatgtcagtgtaggggaactactccatcatagcattctggacaccttgcatgtatctacgtaggtcatgtaagcaaaggcttgaagaacagctaatctgagatttagaagaatgctttttgatcctcctggaatatgagaggatgggaggccctttagaacctgcctcaatgccatctctcactctccttcttatatccctgggagtatgtcatgtgacaagtctttactgtctcccaggttttggatggagcatggggttttctgccccacaccctttaggatatagctgaagaatataatgaggaatagctggattctagaactgactcctcaccagtggtatattccacaacagtgtcacagtcgtctggcccctttggtttccgtgtcatcctttttggtgtgtaggacaaggagccagggaattggcacgtttggcttttacttcttttttatatgtaaataataagccatctaagtgtaaaagtggctcatatcttctccagccaaatcagctaggccatggccttgccttgcttctcatgagtgtgcttgacagtcatcaccgtcactctatcttcatttctggttcttaccgtgttagcttagttcattcaagctactatcacaagctacacataaattgggtggtttataaataacaaacatttctttcttacagttctggaggctggaaactccaagattaaggcagatttcatgcctattgagggcctgctttctgattatagaaggtgacttcttgctgtgcccacacatggtgaaagggactaccaactctctggagtctcttttatgagggcactaattccaattatgaagcctcttccctcgtgacctaatcactgcccaaaggccccatgttctaatgccatcatcttggtggtttaggatttcaacatatgaattttggaaggacataagcattcaaccccctgcacatgtcttctttcctacttcctcaaggttctttctgtccagttgctccttcttctattgacccttttttgccttctctttctccttcactgcctcaagttacagccagaggaaaggaggaactaaaacttagcaaatctataatcacatgcaaatacacagaatggattgttacaaccaaaatgcaggctctattgttttcaatttagcagcctttcaaatgtatatggttctggccacattaaagttgcaaataacactttttttgagactgaaataaaggtgaaatattggaaggaaaa

SEQ ID NO: 162138 - DNA, 3024 bp, Homo sapiens; identical to SEQ ID NO: 162137
  Payload ID: 11735
  Gene Symbol: OR2H1
  Gene Name: olfactory receptor, family 2, subfamily H, member 1
  Uniprot ID: Q9GZK4
  ENST ID: ENST00000439879
  CDS Start-End: 466-1416

SEQ ID NO: 162139 - DNA, 2253 bp, Homo sapiens; identical to SEQ ID NO: 162112
  Payload ID: 11735
  Gene Symbol: OR2H1
  Gene Name: olfactory receptor, family 2, subfamily H, member 1
  Uniprot ID: Q9GZK4
  ENST ID: ENST00000421808
  CDS Start-End: 710-1660

SEQ ID NO: 162140 - DNA, 1294 bp, Homo sapiens; identical to SEQ ID NO: 162117
  Payload ID: 11735
  Gene Symbol: OR2H1
  Gene Name: olfactory receptor, family 2, subfamily H, member 1
  Uniprot ID: Q9GZK4
  ENST ID: ENST00000444920
  CDS Start-End: 331-1281

SEQ ID NO: 162141 - DNA, 3021 bp, Homo sapiens; identical to SEQ ID NO: 162124
  Payload ID: 11735
  Gene Symbol: OR2H1
  Gene Name: olfactory receptor, family 2, subfamily H, member 1
  Uniprot ID: Q9GZK4
  ENST ID: ENST00000449826
  CDS Start-End: 463-1413

SEQ ID NO: 162142 - DNA, 1294 bp, Homo sapiens; identical to SEQ ID NO: 162121
  Payload ID: 11735
  Gene Symbol: OR2H1
  Gene Name: olfactory receptor, family 2, subfamily H, member 1
  Uniprot ID: Q9GZK4
  ENST ID: ENST00000438840
  CDS Start-End: 331-1281

SEQ ID NO: 162143 - DNA, 2253 bp, Homo sapiens; identical to SEQ ID NO: 162116
  Payload ID: 11735
  Gene Symbol: OR2H1
  Gene Name: olfactory receptor, family 2, subfamily H, member 1
  Uniprot ID: Q9GZK4
  ENST ID: ENST00000440557
  CDS Start-End: 710-1660

SEQ ID NO: 162144 - DNA, 1584 bp, Homo sapiens
  Payload ID: 11736
  Gene Symbol: OR2H2
  Gene Name: olfactory receptor, family 2, subfamily H, member 2
  Uniprot ID: O95918
  ENST ID: ENST00000376947
  CDS Start-End: 491-1429
ttctataaaattcattcaaccaatagagcaataattgagcctacagagacaacttatcagaaaattcattcaatataccttacgagatcatccaatagataagagacaactctagaacagcattcagaacatagtggcactcaataaatttcccctgaatgaatgaattaatgaattagtgcatattttaatcagcctcctttgccctcacccaggaagtcagaggcaccagtgtgagtatccatctgctgtccagtacattcatggattcctcactctcactagacaatgtttgaccaggaagaacagggaatgagaaggagctgctggatggtgatgagccttggaaagggaggctgggcgagcagagacagaagagaaacacctacctgctgtgacctcacaaacacccaggctgagttttgataagacaggttgaatcacactggggtgacagcctcatccctccaggtacaaacaagaacaggccatggttaaccaaagctccacaccgggcttcctccttctgggcttctctgaacacccagggctggaaaggactctcttcgtggttgtcctcacttcctacctcctaaccctagtgggcaacacactcatcatcctgctgtctgcgctggaccccaagctccactctccaatgtactttttcctctccaacctctccttcttggacctctgtttcaccacgagttgtgttccccaaatgctggtcaacctctggggcccaaagaagaccatcagcttcctggactgctctgtccagatcttcatcttcctgtccctggggacaactgagtgcatcctcttgacagtgatggcttttgatcgctacgtggctgtctgccagcccctccactatgccaccatcatccacccccgcctgtgctggcagctggcatctgtggcctgggtcattgggctagtggagtcagtggtccagacaccatccaccctgcacctgcccttctgccccgatcggcaggtggatgattttgtctgtgaggtcccagctctaattcgactctcctgtgaagacacctcctacaatgagatccaggtggctgttgccagtgtcttcatcttggttgtgcctctcagcctcatccttgtctcttacggagccattacctgggcagtgctgaggattaactctgcaaaagggcggaggaaagcttttgggacctgctcctcccatctcactgtggtcaccctcttctacagctcagtcattgctgtctacctccagcccaaaaatccctatgcccaagagaggggcaagttctttggtctcttctatgcagtgggcactccttcacttaaccctctcatatacaccctgaggaacaaggaggtaaccagggcattcaggagattgctggggaaggaaatggggctcacacaaagctgagggagagctgcttaatgtgctttaaaagagaggagattctatgtgcttttatcagaaagtttgagttccctgcccctctgccttcttcacacccattacattgtgggaatggatgaaagccacatgtctgtgtgtgtgcatgtatgtgtgcaaga

SEQ ID NO: 162145 - DNA, 1584 bp, Homo sapiens
  Payload ID: 11736
  Gene Symbol: OR2H2
  Gene Name: olfactory receptor, family 2, subfamily H, member 2
  Uniprot ID: O95918
  ENST ID: ENST00000383546
  CDS Start-End: 491-1429
ttctataaaattcattcaaccaatagagcaataattgagcctacagagacaacttatcagaaaattcattcaatataccttacgagatcatccaatagataagagacaactctagaacagcattcagaacatagtggcactcaataaatttcccctgaatgaatgaattaatgaattagtgcatattttaatcagcctcctttgccctcacccaggaagtcagaggcaccagtgtgagtatccatctgctgtccagtacattcatggattcctcactctcactagacaatgtttgaccaggaagaacagggaatgagaaggagctgctggatggtgatgagccttggaaagggaggctgggcgagcagagacagaagagaaacacctacctgctgtgacctcacaaacacccaggctgagttttgataagacaggttgaatcacactggggtgacagcctcatccctccaggtacaaacaagaacaggccatggttaaccaaagctccacaccgggcttcctccttctgggcttctctgaacacccagggctggaaaggactctcttcgtggttgtcttcacttcctacctcctaaccctagtgggcaacacactcatcatcctgctgtctgtgctggaccccaagctccactctccaatgtactttttcctctccaacctctccttcttggacctctgtttcaccacgagttgtgttccccaaatgctggtcaacctctggggcccaaagaagaccatcagcttcctggactgctctgtccagatcttcatcttcctgtccctggggacaactgagtgcatcctcttgacagtgatggcttttgatcgctacgtggctgtctgccagcccctccactatgccaccatcatccacccccgcctgtgctggcagctggcatctgtggcctgggtcattgggctagtggagtcagtggtccagacaccatccaccctgcacctgcccttctgccccgatcggcaggtggatgattttgtctgtgaggtcccagctctaattcgactctcctgtgaagacacctcctacaatgagatccaggtggctgttgccagtgtcttcatcttggttgtgcctctcagcctcatccttgtctcttacggagccattacctgggcagtgctgaggattaactctgcaaaagggcggaggaaagcttttgggacctgctcctcccatctcactgtggtcaccctcttctacagctcagtcattgctgtctacctccagcccaaaaatccctatgcccaagagaggggcaagttctttggtctcttctatgcagtgggcactccttcacttaaccctctcatatacaccctgaggaacaaggaggtaaccagggcattcaggagattgctggggaaggaaatggggctcacacaaagctgagggagagctgcttaatgtgctttaaaagagaggagattctatgtgcttttatcagaaagtttgagttccctgcccctctgccttcttcacacccattacattgtgggaatggatgaaagccacatgtctgtgtgtgtgcatgtatgtgtgcaaga

SEQ ID NO: 162146 - DNA, 1584 bp, Homo sapiens
  Payload ID: 11736
  Gene Symbol: OR2H2
  Gene Name: olfactory receptor, family 2, subfamily H, member 2
  Uniprot ID: O95918
  ENST ID: ENST00000383640
  CDS Start-End: 491-1429
ttctataaaattcattcaaccaatagagcaataattgagcctacagagacaacttatcagaaaattcattcaatataccttacgagatcatccaatagataagagacaactctagaacagcattcagaacatagtggcactcaataaatttcccctgaatgaatgaattaatgaattagtgcatattttaatcagcctcctttgccctcacccaggaagtcagaggcaccagtgtgagtatccatctgctgtccagtacattcatggattcctcactctcactagacaatgtttgaccaggaagaacagggaatgagaaggagctgctggatggtgatgagccttggaaagggaggctgggcgagcagagacagaagagaaacacctacctgctgtgacctcacaaacacccaggctgagttttgataagacaggttgaatcacactggagtgacagcctcatccctccaggtacaaacaagaacaggccatggttaaccaaagctccacaccgggcttcctccttctgggcttctctgaacacccagggctggaaaggactctcttcgtggttgtcctcacttcctacctcctaaccctagtgggcaacacactcatcatcctgctgtctgcgctggaccccaagctccactctccaatgtactttttcctctccaacctctccttcttggacctctgtttcaccacgagttgtgttccccaaatgctggtcaacctctggggcccaaagaagaccatcagcttcctggactgctctgtccagatcttcatcttcctgtccctggggacaactgagtgcatcctcttgacagtgatggcttttgatcgctacgtggctgtctgccagcccctccactatgccaccatcatccacccccgcctgtgctggcagctggcatctgtggcctgggtcattgggctagtggagtcagtggtccagacaccatccaccctgcacctgcccttctgccccgatcggcaggtggatgattttgtctgtgaggtcccagctctaattcgactctcctgtgaagacacctcctacaatgagatccaggtggctgttgccagtgtcttcatcttggttgtgcctctcagcctcatccttgtctcttacggagccattacctgggcagtgctgaggattaactctgcaaaagggcggaggaaagcttttgggacctgctcctcccatctcactgtggtcaccctcttctacagctcagtcattgctgtctacctccagcccaaaaatccctatgcccaagagaggggcaagttctttggtctcttctatgcagtgggcactccttcacttaaccctctcatatacaccctgaggaacaaggaggtaaccagggcattcaggagattgctggggaaggaaatggggctcacacaaagctgagggagagctgcttaatgtgctttaaaagagaggagattctatgtgcttttatcagaaagtttgagttccctgcccctctgccttcttcacacccattacattgtgggaatggatgaaagccacatgtctgtgtgtgtgcatgtatgtgtgcaaga

SEQ ID NO: 162147 - DNA, 1584 bp, Homo sapiens
  Payload ID: 11736
  Gene Symbol: OR2H2
  Gene Name: olfactory receptor, family 2, subfamily H, member 2
  Uniprot ID: O95918
  ENST ID: ENST00000439874
  CDS Start-End: 491-1429
ttctataaaattcattcaaccaatagagcaataattgagcctacagagacaacttatcagaaaattcattcaatataccttacgagatcatccaatagataagagacaactctagaacagcattcagaacatagtggcactcaataaatttcccctgaatgaatgaattaatgaattagtgcatattttaatcagcctcctttgccctcacccaggaagtcagaggcaccagtgtgagtatccatctgctgtccagtacattcatggattcctcactctcactagacaatgtttgaccaggaagaacagggaatgagaaggagctgctggatggtgatgagccttggaaagggaggctgggcgagcagagacagaagagaaacacctacctgctgtgacctcacaaacacccaggctgagttttgataagacaggttgaatcacactggggtgacagcctcatccctccaggtacaaacaagaacaggccatggttaaccaaagctccacaccgggcttcctccttctgggcttctctgaacacccagggctggaaaggactctcttcgtggttgtcttcacttcctacctcctaaccctagtgggcaacacactcatcatcctgctgtctgcgctggaccccaagctccactctccaatgtactttttcctctccaacctctccttcttggacctctgtttcaccacgagttgtgttccccaaatgctggtcaacctctggggcccaaagaagaccatcagcttcctggactgctctgtccagatcttcatcttcctgtccctggggacaactgagtgcatcctcttgacagtgatggcttttgatcgctacgtggctgtctgccagcccctccactatgccaccatcatccacccccgcctgtgctggcagctggcatctgtggcctgggtcattgggctagtggagtcagtggtccagacaccatccaccctgcacctgcccttctgccccgatcggcaggtggatgattttgtctgtgaggtcccagctctaattcgactctcctgtgaagacacctcctacaatgagatccaggtggctgttgccagtgtcttcatcttggttgtgcctctcagcctcatccttgtctcttacggagccattacctgggcagtgctgaggattaactctgcaaaagggcggaggaaagcttttgggacctgctcctcccatctcactgtggtcaccctcttctacagctcagtcattgctgtctacctccagcccaaaaatccctatgcccaagagaggggcaagttctttggtctcttctatgcagtgggcactccttcacttaaccctctcatatacaccctgaggaacaaggaggtaaccagggcattcaggagattgctggggaaggaaatggggctcacacaaagctgagggagagctgcttaatgtgctttaaaagagaggagattctatgtgcttttatcagaaagtttgagttccctgcccctctgccttcttcacacccattacattgtgggaatggatgaaagccacatgtctgtgtgtgtgcatgtatgtgtgcaaga

SEQ ID NO: 162148 - DNA, 1584 bp, Homo sapiens; identical to SEQ ID NO: 162145
  Payload ID: 11736
  Gene Symbol: OR2H2
  Gene Name: olfactory receptor, family 2, subfamily H, member 2
  Uniprot ID: O95918
  ENST ID: ENST00000454628
  CDS Start-End: 491-1429

SEQ ID NO: 162149 - DNA, 1584 bp, Homo sapiens; identical to SEQ ID NO: 162144
  Payload ID: 11736
  Gene Symbol: OR2H2
  Gene Name: olfactory receptor, family 2, subfamily H, member 2
  Uniprot ID: O95918
  ENST ID: ENST00000411574
  CDS Start-End: 491-1429

SEQ ID NO: 162150 - DNA, 1584 bp, Homo sapiens
  Payload ID: 11736
  Gene Symbol: OR2H2
  Gene Name: olfactory receptor, family 2, subfamily H, member 2
  Uniprot ID: O95918
  ENST ID: ENST00000453513
  CDS Start-End: 491-1429
ttctataaaattcattcaaccaatagagcaataattgagcctacagagacaacttatcagaaaattcattcaatataccttacgagatcatccaatagataagagacaactctagaacagcattcagaacatagtggcactcaataaatttcccctgaatgaatgaattaatgaattagtgcatattttaatcagcctcctttgccctcacccaggaagtcagaggcaccagtgtgagtatccatctgctgtccagtacattcatggattcctcactctcactagacaatgtttgaccaggaagaacagggaatgagaaggagctgctggatggtgatgagccttggaaagggaggctgggcgagcagagacagaagagaaacacctacctgctgtgacctcacaaacacccaggctgagttttgataagacaggttgaatcacactggggtgacagcctcatccctccaggtacaaacaagaacaggccatggttaaccaaagctccacaccgggcttcctccttctgggcttctctgaacacccagggctggaaaggactctcttcgtggttgtcttcacttcctacctcctaaccctagtgggcaacacactcatcatcctgctgtctgtgctggaccccaagctccactctccaatgtactttttcctctccaacctctccttcttggacctctgtttcaccacgagttgtgttccccaaatgctggtcaacctctggggcccaaagaagaccatcagcttcctggactgctctgtccagatcttcatcttcctgtccctggggacaactgagtgcatcctcttgacagtgatggcttttgatcgctacgtggctgtctgccagcccctccactatgccaccatcatccacccccgcctgtgctggcagctggcatctgtggcctgggtcattgggctagtggagtcagtggtccagacaccatccaccctgcacctgcccttctgccccgatcggcaggtggatgattttgtctgtgaggtcccagctctaattcgactctcctgtgaagacacctcctacaatgagatccaggtggctgttgccagtgtcttcatcttggttgtgcctctcagcctcatccttgtctcttacggagccattacctgggcagtgctgaggattaactctgcaaaagggcggaggaaagcttttgggacctgctcctcccatctcactgtggtcaccctcttctacagctcagtcattgctgtctacctccagcccaaaaatccctatgcccaagagaggggcaagttctttggtctcttctatgcagtgggcactccttcacttaaccctctcatatacaccctgaggaacaaggaggtaaccagggcattcaggagattgctggggaaggaaatggggctcacacaaagctgagggagagctgcttaatgtgctttaaaagagaggagattctatgtgcttttatcagaaagtttgagttccctgcccctctgccttcttcacacccattatattgtgggaatggatgaaagccacatgtctgtgtgtgtgcatgtatgtgtgcaaga

SEQ ID NO: 162151 - DNA, 1273 bp, Homo sapiens
  Payload ID: 11737
  Gene Symbol: OR2J1
  Gene Name: olfactory receptor, family 2, subfamily J, member 1 (gene/pseudogene)
  Uniprot ID: Q9GZK6
  ENST ID: ENST00000377171
  CDS Start-End: 335-1273
aatcaatttaactttttaaaataaaaaattattttcttaaatattgtctttctgattatggaatatcttagtcttcatttatccaaatgttaactcaaggatgtatataaaagaactcagtaacttgaaaagctattacttgtatccacagctggacaaatatctcaatgaagcatacaaaggaaactgtataaaaattctactgccataatggtgcacactatctggaattgggatacttttttctccaatctgtttgcaagtgagcagttggcaatgcatggacagactttgagtttatgcgattctttctttaggtacaggaaaaataagaatgttgatgaaaaaaaatgcaagttttgaagacttctttcttctacttggattttctaactggcctcatctggaagtagttctctttgtggttatcttgatcttctacttgataacactgataggaaacctgttcatcatcatcctgtcatacctggactcccatctccacactcccatgtacttcttcctttcaaatctctcatttctggatctctgctacaccaccagctctatccctcagttgctggtgaatctctggggcccggaaaagaccatctcttatgctggttgtacggttcaactttactttgttctcgcactgggaaccgcagagtgtgtcctactggtggtgatgtcctatgatcgttatgcagctgtgtgtagacctttgcattacactgtcctcatgcaccctcgtttctgccgcttgttggctgcggcttcttgggtaagtggttttacaacctcagcacttcattcctcctttactttctggatacccctatgtagacatcgcctagtggatcacttcttctgtgaagttccagcacttctgcgattatcatgtgttgatacccaggcaaatgagctgaccctcatggtcatgagctccatatttgttctcatacctctcatcctcatcctcacttcctatggtgccattgcccgggctgtactgagcatgcaatcaaccactgggcttcagaaagtgcttaggacatgtggagcccatcttatggttgtatctctctttttcattccagtcatgtgcatgtatctccagccaccatcagaaaattctcaagatcaaggcaagttcattgccctcttttacactgttgtcacacctagtcttaaccctctaatctacactttcagaaacaaggatgtaagaggggcagtgaagagactaatggggtgggaatgggggatgtga

SEQ ID NO: 162152 - DNA, 1273 bp, Homo sapiens
  Payload ID: 11737
  Gene Symbol: OR2J1
  Gene Name: olfactory receptor, family 2, subfamily J, member 1 (gene/pseudogene)
  Uniprot ID: Q9GZK6
  ENST ID: ENST00000427659
  CDS Start-End: 335-1273
aatcaatttaactttttaaaataaaaaattattttcttaaatattgtctttctgattatggaatatcttagtcttcatttatccaaatgttaactcaaggatgtatataaaagaactcagtaacttgaaaagctattacttgtatccacagctggacaaatatctcaatgaagcatacaaaggaaactgtataaaaattctactgccataatggtgcacattatctggaattgggatacttttttctccaatctgtttgcaagtgagcagttggcaatgcatggacagactttgagtttatgcgattctttctttaggtacaggaaaaataagaatgttgatgaaaaaaaatgcaagttttgaagacttctttattctacttggattttctaactggcctcatctggaagtagttctctttgtggttatcttgatcttctacttgataacactgataggaaacctgttcatcatcatcctgtcatacctggactcccatctccacactcccatgtacttcttcctttcaaatctctcatttctggatctctgctacaccaccagctctatccctcagttgctggtgaatctctggggcccggaaaagaccatctcttatgctggttgtacggttcaactttactttgttctcgcactgggaaccgcagagtgtgtcctactggtggtgatgtcctatgatcgttatgcagctgtgtgtagacctttgcattacactgtcctcatgcaccctcgtttctgccgcttgttggctgcggcttcttgggtaagtggttttacaacctcagcacttcattcctcctttactttctggatacccctatgtagacatcgcctagtggatcacttcttctgtgaagttccagcacttctgcgattatcatgtgttgatacccaggcaaatgagctgaccctcatggtcatgagctccatttttgttctcatacctctcatcctcatcctcacttcctatggtgccattgcccgggctgtactgagcatgcaatcaaccactgggcttcagaaagtgcttaggacatgtggagcccatcttatggttgtatctctctttttcattccagtcatgtgcatgtatctccagccaccatcagaaaattctcaagatcaaggcaagttcattgccctcttttacactgttgtcacacctagtcttaaccctctaatctacactttcagaaacaaggatgtaagaggggcagtgaagagactaatggggtgggaatgggggatgtga

SEQ ID NO: 162153 - DNA, 1272 bp, Homo sapiens
  Payload ID: 11738
  Gene Symbol: OR2J2
  Gene Name: olfactory receptor, family 2, subfamily J, member 2
  Uniprot ID: O76002
  ENST ID: ENST00000358688
  CDS Start-End: 334-1272
aataatttgactttttaaagtaaaaaatcatttttcataaatattgtgttcctgattatggactatcttagtcttcattaatccaaatgttaattcagggatgtatataaagaactcagtaacttgagaagctattgcttgtatctgtagctggataaatatctcaatgaagcacataaagggaactgtataaaaattctactaccattatggtgcacactctctggaagtgggatacttttgtcttcaatctgtttgcaagtgagcggttgacaatgcatggacagactttgagtttatgtggttctttctttaggtataagaaaaagatgaatgatgattaaaaaaaatgcaagttcggaagacttctttattctacttggattttctaattggcctcagctggaagtagttctctttgtggttatcttgatcttctacctgatgacactgacaggaaacctgttcatcatcatcctgtcatacgtggactcccatctccacacaccaatgtacttcttcctttcaaacctctcatttctggatctctgctacaccaccagctctatccctcagttgctggtgaatctccggggcccggaaaagaccatctcgtatgctggttgcatggttcaactttactttgttcttgcactgggaatcgcagagtgtgtcctactggtggtgatgtcgtatgatcgttatgtagctgtgtgtagacctttgcattacactgtcctcatgcaccctcgtttctgccacttgttggttgcggcttcttgggtaattggttttactatctcagcacttcattcctcctttactttctgggtacccctttgtggacatcgcctagtggatcacttcttctgtgaagttccagcacttctgcgtttatcatgtgttgacacccatgcaaatgagctgaccctcatggtcatgagctccatttttgttctcatacctctcattctcattctcactacctatggtgccattgcccgggctgtactgagcatgcaatcaaccactgggcttcagaaagtgtttaggacatgtggagcccatcttatggttgtatctctctttttcattccagtcatgtgcatgtatctccagccaccatcagaaaattctcctgatcagggcaagttcattgccctcttttatactgttgtcacaccgagtcttaatcctctaatctacactctcagaaacaagcatgtaaaaggggcagcgaagagactattggggtgggagtgggggaagtga

SEQ ID NO: 162154 - DNA, 1272 bp, Homo sapiens
  Payload ID: 11738
  Gene Symbol: OR2J2
  Gene Name: olfactory receptor, family 2, subfamily J, member 2
  Uniprot ID: O76002
  ENST ID: ENST00000377167
  CDS Start-End: 334-1272
aataatttgactttttaaagtaaaaaatcatttttcataaatattgtgttcctgattatggactatcttagtcttcattaatccaaatgttaattcagggatgtatataaagaactcagtaacttgagaagctattgcttgtatctgtagctggataaatatctcaatgaagcatataaagggaactgtataaaaattctactaccattatggtgcacactctctggaagtgggatacttttgtcttcaatctgtttgcaagtgagcggttgacaatgcatggacagactttgagtttatgtggttctttctttaggtataagaaaaagatgaatgatgattaaaaaaaatgcaagttcggaagacttctttattctacttggattttctaattggcctcagctggaagtagttctctttgtggttatcttgatcttctacctgatgacactgacaggaaacctgttcatcatcatcctgtcatacgtggactcccatctccacacaccaatgtacttcttcctttcaaacctctcatttctggatctctgctacaccaccagctctatccctcagttgctggtgaatctccggggcccggaaaagaccatctcgtatgctggttgcatggttcaactttactttgttcttgcactgggaatcacagagtgtgtcctactggtggtgatgtcatatgatcgttatgtagctgtgtgtagacctttgcattacactgtcctcatgcaccctcgtttctgccacttgttggttgcggcttcttgggtaattggttttactatctcagcacttcattcctcctttactttctgggtacccctttgtggacatcgcctagtggatcacttcttctgtgaagttccagcacttctgcgtttatcatgtgttgacacccatgcaaatgagctgaccctcatggtcatgagctccatttttgttctcatacctctcattctcattctcactacctatggtgccattgcccgggctgtactgagcatgcaatcaaccactgggcttcagaaagtgtttaggacatgtggagcccatcttatggttgtatctctctttttcattccagtcatgtgcatgtatctccagccaccatcagaaaattctcctgatcagggcaagttcattgccctcttttatactgttgtcacaccgagtcttaatcctctaatctacactctcagaaacaagcatgtaaaaggggcagcgaagagactattggggtgggagtgggggaagtga

SEQ ID NO: 162155 - DNA, 1272 bp, Homo sapiens
  Payload ID: 11738
  Gene Symbol: OR2J2
  Gene Name: olfactory receptor, family 2, subfamily J, member 2
  Uniprot ID: O76002
  ENST ID: ENST00000415857
  CDS Start-End: 334-1272
aataatttgactttttaaagtaaaaaatcatttttcataaatattgtgttcctgattatggactatcttagtcttcattaatccaaatgttaattcagggatgtatataaagaactcagtaacttgagaagctattgcttgtatctgtagctggataaatatctcaatgaagcatataaagggaactgtataaaaattctactaccattatggtgcacactctctggaagtgggatacttttgtcttcaatctgtttgcaagtgagcggttgacaatgcatggacagactttgagtttatgtggttctttctttaggtataagaaaaagatgaatgatgattaaaaaaaatgcaagttcggaagacttctttattctacttggattttctaattggcctcagctggaagtagttctctttgtggttatcttgatcttctacctgatgacactgacaggaaacctgttcatcatcatcctgtcatacgtggactcccatctccacacaccaatgtacttcttcctttcaaacctctcatttctggatctctgccacaccaccagctctatccctcagttgctggtgaatctccggggcccggaaaagaccatctcgtatgctggttgcatggttcaactttactttgttcttgcactgggaatcgcagagtgtgtcctactggtggtgatgtcgtatgatcgttatgtagctgtgtgtagacctttgcattacactgtcctcatgcaccctcgtttctgccacttgttggctgcggcttcttgggtaattggttttactatctcagcacttcattcctcctttactttctgggtacccctttgtggacatcgcctagtggatcacttcttctgtgaagttccagcacttctgcgtttatcatgtgttgacacccatgcaaatgagctgaccctcatggtcatgagctccatttttgttctcatacctctcattctgattctcactgcctatggtgccattgcccgggctgtactgagcatgcaatcaaccactgggcttcagaaagtgtttaggacatgtggagcccatcttatggttgtatctctctttttcattccagtcatgtgcatgtatctccagccaccatcagaaaattctcctgatcagggcaagttcattgccctcttttatactgttgtcacaccgagtcttaatcctctaatctacactctcagaaacaagcatgtaaaaggggcagcgaagagactattggggtgggagtgggggaagtga

SEQ ID NO: 162156 - DNA, 1272 bp, Homo sapiens
  Payload ID: 11738
  Gene Symbol: OR2J2
  Gene Name: olfactory receptor, family 2, subfamily J, member 2
  Uniprot ID: O76002
  ENST ID: ENST00000411588
  CDS Start-End: 334-1272
aataatttgactttttaaagtaaaaaatcatttttcataaatattgtgttcctgattatggactatcttagtcttcattaatccaaatgttaattcagggatgtatataaagaactcagtaacttgagaagctattgcttgtatctgtagctggataaatatctcaatgaagcatataaagggaactgtataaaaattctactaccattatggtgcacactctctggaagtgggatacttttgtcttcaatctgtttgcaagtgagcggttgacaatgcatggacagactttgagtttatgtggttctttctttaggtataagaaaaagatgaatgatgattaaaaaaaatgcaagttcggaagacttctttattctacttggattttctaattggcctcagctggaagtagttctctttgtggttatcttgatcttctacctgatgacactgacaggaaacctgttcatcatcatcctgtcatacgtggactcccatctccacacaccaatgtacttcttcctttcaaacctctcatttctggatctctgctacaccaccagctctatccctcagttgctggtgaatctccggggcccggaaaagaccatctcgtatgctggttgcatggttcaactttactttgttcttgcactgggaatcgcagagtgtgtcctactggtggtgatgtcgtatgatcgttatgtagctgtgtgtagacctttgcattacactgtcctcatgcaccctcgtttctgccacttgttggttgcggcttcttgggtaattggttttactatctcagcacttcattcctcctttactttctgggtacccctttgtggacatcgcctagtggatcacttcttctgtgaagttccagcacttctgcgtttatcatgtgttgacacccatgcaaatgagctgaccctcatggtcatgagctccatttttgttctcatacctctcattctcattctcactacctatggtgccattgcccgggctgtactgagcatgcaatcaaccactgggcttcagaaagtgtttaggacatgtggagcccatcttatggttgtatctctctttttcattccagtcatgtgcatgtatctccagccaccatcagaaaattctcctgatcagggcaagttcattgccctcttttatactgttgtcacaccgagtcttaatcctctaatctacactctcagaaacaagcatgtaaaaggggcagcgaagagactattggggtgggagtgggggaagtga

SEQ ID NO: 162157 - DNA, 1272 bp, Homo sapiens; identical to SEQ ID NO: 162155
  Payload ID: 11738
  Gene Symbol: OR2J2
  Gene Name: olfactory receptor, family 2, subfamily J, member 2
  Uniprot ID: O76002
  ENST ID: ENST00000440124
  CDS Start-End: 334-1272

SEQ ID NO: 162158 - DNA, 1272 bp, Homo sapiens
  Payload ID: 11738
  Gene Symbol: OR2J2
  Gene Name: olfactory receptor, family 2, subfamily J, member 2
  Uniprot ID: O76002
  ENST ID: ENST00000427744
  CDS Start-End: 334-1272
aataatttgactttttaaagtaaaaaatcatttttcataaatattgtgttcctgattatggactatcttagtcttcattaatccaaatgttaattcagggatgtatataaagaactcagtaacttgagaagctattgcttgtatctgtagctggataaatatctcaatgaagcatataaagggaactgtataaaaattctactaccattatggtgcacactctctggaagtgggatacttttgtcttcaatctgtttgcaagtgagcggttgacaatgcatggacagactttgagtttatgtggttctttttttaggtataagaaaaagatgaatgatgattaaaaaaaatgcaagttcggaagacttctttattctacttggattttctaattggcctcagctggaagtagttctctttgtggttatcttgatcttctacctgatgacactgacaggaaacctgttcatcatcatcctgtcatacgtggactcccatctccacacaccaatgtacttcttcctttcaaacctctcatttctggatctctgccacaccaccagctctatccctcagttgctggtgaatctccggggcccggaaaagaccatctcgtatgctggttgcatggttcaactttactttgttcttgcactgggaatcgcagagtgtgtcctactggtggtgatgtcgtatgatcgttatgtagctgtgtgtagacctttgcattacactgtcctcatgcaccctcgtttctgccacttgttggctgcggcttcttgggtaattggttttactatctcagcacttcattcctcctttactttctgggtacccctttgtggacatcgcctagtggatcacttcttctgtgaagttccagcacttctgcgtttatcatgtgttgacacccatgcaaatgagctgaccctcatggtcatgagctccatttttgttctcatacctctcattctgattctcactgcctatggtgccattgcccgggctgtactgagcatgcaatcaaccactgggcttcagaaagtgtttaggacatgtggagcccatcttatggttgtatctctctttttcattccagtcatgtgcatgtatctccagccaccatcagaaaattctcctgatcagggcaagttcattgccctcttttatactgttgtcacaccgagtcttaatcctctaatctacactctcagaaacaagcatgtaaaaggggcagcgaagagactattggggtgggagtgggggaagtga

SEQ ID NO: 162159 - DNA, 1272 bp, Homo sapiens; identical to SEQ ID NO: 162155
  Payload ID: 11738
  Gene Symbol: OR2J2
  Gene Name: olfactory receptor, family 2, subfamily J, member 2
  Uniprot ID: O76002
  ENST ID: ENST00000419605
  CDS Start-End: 334-1272

SEQ ID NO: 162160 - DNA, 1272 bp, Homo sapiens; identical to SEQ ID NO: 162155
  Payload ID: 11738
  Gene Symbol: OR2J2
  Gene Name: olfactory receptor, family 2, subfamily J, member 2
  Uniprot ID: O76002
  ENST ID: ENST00000457762
  CDS Start-End: 334-1272

SEQ ID NO: 162161 - DNA, 936 bp, Homo sapiens
  Payload ID: 11739
  Gene Symbol: OR2J3
  Gene Name: olfactory receptor, family 2, subfamily J, member 3
  Uniprot ID: O76001
  ENST ID: ENST00000377169
  CDS Start-End: 1-936
atgaatgatgatggaaaagtcaatgctagctctgaggggtactttattttagttggattttctaattggcctcatctggaagtagttatctttgtggttgtcttgatcttctacttgatgacactgataggaaacctgttcatcatcatcctgtcatacctggactcccatctgcacacaccaatgtacttcttcctttcaaacctctcatttctggatctctgctacaccaccagctctatccctcagttgctggtcaatctctggggcccggaaaagaccatctcttatgctggttgcatgattcaactttactttgttctcgcactgggaaccacagagtgtgtcctactggtggtgatgtcctatgaccgttatgcagctgtgtgtagacctttgcattacactgtcctcatgcaccctcgtttctgccacctgctggctgtggcttcttgggtaagtggttttaccaactcagcacttcattcctccttcaccttctgggtacctctgtgtggacaccgccaagtagatcactttttctgtgaagttccagcacttctgcgattatcgtgtgttgatacccatgtcaatgagctgaccctcatgatcacaagctccatatttgttctcatacctctcatcctcattctcacttcttatggtgccatcgtccgagctatactgaggatgcagtcaaccactgggcttcagaaagtgtttggaacatgtggagctcatcttatggctgtatctctctttttcattccggccatgtgcatgtatctccagccaccatcaggaaattctcaagatcaaggcaagttcattgccctcttttatactgttgtcacacctagtcttaaccctctaatctacaccctcagaaacaaagttgtaagaggggcagtgaagagactaatggggtgggaatga

SEQ ID NO: 162162 - DNA, 936 bp, Homo sapiens
  Payload ID: 11739
  Gene Symbol: OR2J3
  Gene Name: olfactory receptor, family 2, subfamily J, member 3
  Uniprot ID: O76001
  ENST ID: ENST00000383651
  CDS Start-End: 1-936
atgaatgatgatggaaaagtcaatgctagctctgaggggtactttattttagttggattttctaattggcctcatctggaagtagttatctttgtggttgtcttgatcttctacttgatgacactgataggaaacctgttcatcatcatcctgtcatacctggactcccatctgcacacaccaatgtacttcttcctttcaaacctctcatttctggatctctgctacaccaccagctctatccctcagttgctggtcaatctctggggcccggaaaagaccatctcttatgctggttgcatgattcaactttactttgttctcgcactgggaaccacagagtgtgtcctactggtggtgatgtcctatgaccgttatgcagctgtgtgtagacctttgcattacactgtcctcatgcaccctcgtttctgccacctgctggctgtggcttcttgggtaagtggttttaccaactcagcacttcattcctccttcaccttctgggtacctctgtgtggacaccgccaagtagatcactttttctgtgaagttccagcacttctgcgattatcgtgtgttgatacccatgtcaatgagctgaccctcatgatcacaagctccatatttgttctcatacctctcatcctcattctcacttcttatggtgccatcgtccgagctgtactgaggatgcagtcaaccactgggcttcagaaagtgtttggaacatgtggagctcatcttatggctgtatctctctttttcattccggccatgtgcatatatctccagccaccatcaggaaattctcaagatcaaggcaagttcattgccctcttttatactgttgtcacacctagtcttaaccctctaatctacaccctcagaaacaaagttgtaagaggggcagtgaagagactaatggggtgggaatga

SEQ ID NO: 162163 - DNA, 936 bp, Homo sapiens; identical to SEQ ID NO: 162162
  Payload ID: 11739
  Gene Symbol: OR2J3
  Gene Name: olfactory receptor, family 2, subfamily J, member 3
  Uniprot ID: O76001
  ENST ID: ENST00000430478
  CDS Start-End: 1-936

SEQ ID NO: 162164 - DNA, 936 bp, Homo sapiens; identical to SEQ ID NO: 162162
  Payload ID: 11739
  Gene Symbol: OR2J3
  Gene Name: olfactory receptor, family 2, subfamily J, member 3
  Uniprot ID: O76001
  ENST ID: ENST00000428081
  CDS Start-End: 1-936

SEQ ID NO: 162165 - DNA, 936 bp, Homo sapiens; identical to SEQ ID NO: 162162
  Payload ID: 11739
  Gene Symbol: OR2J3
  Gene Name: olfactory receptor, family 2, subfamily J, member 3
  Uniprot ID: O76001
  ENST ID: ENST00000414140
  CDS Start-End: 1-936

SEQ ID NO: 162166 - DNA, 774 bp, Homo sapiens
  Payload ID: 11739
  Gene Symbol: OR2J3
  Gene Name: olfactory receptor, family 2, subfamily J, member 3
  ENST ID: ENST00000422576
  CDS Start-End: 1-774
atgaatgatgatggaaaagtcaatgctagctctgaggggtactttattttagttggattttctaattggcctcatctggaagtagttatctttgtggttgtcttgatcttctacttgatgacactgataggaaacctgttcatcatcatcctgtcatacctggactcccatctgcacacaccaatgtacttcttcctttcaaacctctcatttctggatctctgctacaccaccagctctatccctcagttgctggtcaatctctggggcccggaaaagaccatctcttatgctggttgcatgattcaactttactttgttctcgcactgggaaccacagagtgtgtcctactggtggtgatgtcctatgaccgttatgcagctgtgtgtagacctttgcattacactgtcctcatgcaccctcgtttctgccacctgctggctgtggcttcttgggtaagtggttttaccaactcagcacttcattcctccttcaccttctgggtacctctgtgtggacaccgccaagtagatcactttttctgtgaagttccagcacttctgcgattatcgtgtgttgatacccatgtcaatgagctgaccctcatgatcacaagctccatatttgttctcatacctctcatcctcattctcacttcttatggtgccatcgtccaagctgtactgaggatgcagtcaaccactgggcttcagaaagtgtttggaacatgtggagctcatcttatggctgtatctctctttttcattccggcc

SEQ ID NO: 162167 - DNA, 936 bp, Homo sapiens; identical to SEQ ID NO: 162162
  Payload ID: 11739
  Gene Symbol: OR2J3
  Gene Name: olfactory receptor, family 2, subfamily J, member 3
  Uniprot ID: O76001
  ENST ID: ENST00000418630
  CDS Start-End: 1-936

SEQ ID NO: 162168 - DNA, 936 bp, Homo sapiens; identical to SEQ ID NO: 162162
  Payload ID: 11739
  Gene Symbol: OR2J3
  Gene Name: olfactory receptor, family 2, subfamily J, member 3
  Uniprot ID: O76001
  ENST ID: ENST00000419260
  CDS Start-End: 1-936

SEQ ID NO: 162169 - DNA, 1075 bp, Homo sapiens
  Payload ID: 11739
  Gene Symbol: OR2J3
  Gene Name: olfactory receptor, family 2, subfamily J, member 3
  ENST ID: ENST00000621670
  CDS Start-End: 82-1017
catgtgtgctgatatttttggatcatttgtttactcgttttttgagtttacctttcttttttttctctcaggtaataggaaatgaatgatgatggaaaagtcaatgctagctctgaggggtactttattttagttggattttctaattggcctcatctggaagtagttatctttgtggttgtcttgatcttctacttgatgacactgataggaaacctgttcatcatcatcctgtcatacctggactcccatctgcacacaccaatgtacttcttcctttcaaacctctcatttctggatctctgctacaccaccagctctatccctcagttgctggtcaatctctggggcccggaaaagaccatctcttatgctggttgcatgattcaactttactttgttctcgcactgggaaccacagagtgtgtcctactggtggtgatgtcctatgaccgttatgcagctgtgtgtagacctttgcattacactgtcctcatgcaccctcgtttctgccacctgctggctgtggcttcttgggtaagtggttttaccaactcagcacttcattcctccttcaccttctgggtacctctgtgtggacaccgccaagtagatcactttttctgtgaagttccagcacttctgcgattatcgtgtgttgatacccatgtcaatgagctgaccctcatgatcacaagctccatatttgttctcatacctctcatcctcattctcacttcttatggtgccatcgtccaagctgtactgaggatgcagtcaaccactgggcttcagaaagtgtttggaacatgtggagctcatcttatggctgtatctctctttttcattccggccatgtgcatgtatctccagccaccatcagggaattctcaagatcaaggcaagttcattgctctcttttatactgttgttacacctagtcttaaccctctaatctacaccctcagaaacaaagatgtaagaggggtagtgaagagactaagggggtgggagtgagcctgtgtttgtgtgatattaacaatataatggagtctttcctcacaatgattcatcc

SEQ ID NO: 162170 - DNA, 951 bp, Homo sapiens
  Payload ID: 11740
  Gene Symbol: OR2K2
  Gene Name: olfactory receptor, family 2, subfamily K, member 2
  ENST ID: ENST00000302681
  CDS Start-End: 1-951
atgcaaggagaaaacttcaccatttggagcatttttttcttggagggattttcccagtacccagggttagaagtggttctcttcgtcttcagccttgtaatgtatctgacaacgctcttgggcaacagcactcttattttgatcactatcctagattcacgccttaaaacccccatgtacttattccttggaaatctctctttcatggatatttgttacacatctgcctctgttcctactttgctggtgaacttgctgtcatcccagaaaaccattatcttttctgggtgtgctgtacagatgtatctgtcccttgccatgggctccacagagtgtgtgctcctggccgtgatggcatatgaccgttatgtggccatttgtaacccgctgagatactccatcatcatgaacaggtgcgtctgtgcacggatggctacggtctcctgggtgacgggttgcctgaccgctctgctggaaaccagttttgccctgcagatacccctctgtgggaatctcatcgatcacttcacgtgtgaaattctggcggtgctaaagttagcttgcacaagttcactgctcatgaacaccatcatgctggtggtcagcattctcctcttgccaattccaatgctcttagtttgcatctcttacatcttcatcctttccactattctgagaatcacctcagcagagggaagaaacaaggctttttctacctgtggtgcccatttgactgtggtgattttgtattatggggctgccctctctatgtacctaaagccttcttcatcaaatgcacaaaaaatagacaaaatcatctcgttgctttacggagtgcttacccctatgttgaaccccataatttacagtttaagaaacaaggaagtcaaagatgctatgaagaaattgctgggcaaaataacattgcatcaaacacacgaacatctctga

SEQ ID NO: 162171 - DNA, 1038 bp, Homo sapiens
  Payload ID: 11740
  Gene Symbol: OR2K2
  Gene Name: olfactory receptor, family 2, subfamily K, member 2
  Uniprot ID: Q8NGT1
  ENST ID: ENST00000374428
  CDS Start-End: 1-1038
atgaatatcacactttattcatttctttatgtcctcagattaaatgaagggaatagtactggaagaaatatagatgaaagaaagaaaatgcaaggagaaaacttcaccatttggagcatttttttcttggagggattttcccagtacccagggttagaagtggttctcttcgtcttcagccttgtaatgtatctgacaacgctcttgggcaacagcactcttattttgatcactatcctagattcacgccttaaaacccccatgtacttattccttggaaatctctctttcatggatatttgttacacatctgcctctgttcctactttgctggtgaacttgctgtcatcccagaaaaccattatcttttctgggtgtgctgtacagatgtatctgtcccttgccatgggctccacagagtgtgtgctcctggccgtgatggcatatgaccgttatgtggccatttgtaacccgctgagatactccatcatcatgaacaggtgcgtctgtgcacggatggctacggtctcctgggtgacgggttgcctgaccgctctgctggaaaccagttttgccctgcagatacccctctgtgggaatctcatcgatcacttcacgtgtgaaattctggcggtgctaaagttagcttgcacaagttcactgctcatgaacaccatcatgctggtggtcagcattctcctcttgccaattccaatgctcttagtttgcatctcttacatcttcatcctttccactattctgagaatcacctcagcagagggaagaaacaaggctttttctacctgtggtgcccatttgactgtggtgattttgtattatggggctgccctctctatgtacctaaagccttcttcatcaaatgcacaaaaaatagacaaaatcatctcgttgctttacggagtgcttacccctatgttgaaccccataatttacagtttaagaaacaaggaagtcaaagatgctatgaagaaattgctgggcaaaataacattgcatcaaacacacgaacatctctga

SEQ ID NO: 162172 - DNA, 1692 bp, Homo sapiens
  Payload ID: 11741
  Gene Symbol: OR2L13
  Gene Name: olfactory receptor, family 2, subfamily L, member 13
  Uniprot ID: Q8N349
  ENST ID: ENST00000358120
  CDS Start-End: 146-1084
agcaaaagttgaaaaatcagtaacccaagatgactaaccaaatcaatatgctgggcaggatgagacatcagtgtctgcctcagacagaagagcacacacaaaacatgacctctcactccaagcccagttacagcagaaagttttcatggagaaatggaatcacacttcaaatgatttcattttgttgggtctgcttcccccaaatcaaactggaatatttctcttgtgccttatcatcctcatattctttctggcctcggtgggtaactcggccatgattcacctcatccacgtggatcctcgtctccacacaccgatgtactttcttctcagccagctctcccttatggacctgatgtacatctccaccaccgtccccaagatggcgtacaacttcctgtccggccagaaaggcatctccttcctgggatgtggtgtgcaaagcttcttcttcctgaccatggcgtgttctgaaggcttactcctgacctccatggcctacgaccgttatttggccatctgccactctctctattatcctatccgcatgagtaaaatgatgtgtgtgaagatgattggaggctcttggacactggggtccatcaactccttggcacacacagtctttgcccttcatattccctactgcaggtctagggctattgaccatttcttctgcgatgtcccagccatgttgcttcttgcctgtacagatacttgggtctatgaatatatggtttttgtaagtacaagcctctttctccttttccctttcattggcatcacttcttcctgtggccgagtcctatttgctgtctatcatatgcactcaaaggaggggagaaaaaaggccttcaccaccatttcaacacatttaactgtagtgatcttttactatgcaccttttgtctacacctatcttcggcccaggaatctccgctcaccagctgaagacaagatcctggcagtcttctacaccatccttacccccatgctcaatcccattatctacagcctgaggaataaggaagtcctgggggctatgaggagagtgtttgggatattctctttcctgaaagaataatcatggccatccccactccctttgtatttcctctttccaagttgattccaacacgctagagcagggttgtccaatagaaatacaacataatttaaaattttctaataggtacatttaagcagtcaaataaatttaaataatatatttaattcaaaacaatgttataattaatattaatattaacaatattgatgttaattacatagcatactatttcaataaattatatgcaatatattatagtacatgtttgtacatatattactattaacgtgataatgtttattcttgtatattgacatagaatttcttcatgtaataacacaaatttgttaatgttgccttttactctgtttgcattctaagtcttcaaagtcttgtgtttgttttatagagtgcagcgcagcttggacaaaacacatttcaagtgcccagtagtcagtgtctatagtgttggacagcacattcttagagcatccccaatcaatagtttcagaagttatatatgcatgtgtatgtgcatgtatggtgtatacaaacatatttttgttatatacaatattgctgatgaactgaaaattaacaagtaaaatgcacatgctaaggta

SEQ ID NO: 162173 - DNA, 1883 bp, Homo sapiens
  Payload ID: 11741
  Gene Symbol: OR2L13
  Gene Name: olfactory receptor, family 2, subfamily L, member 13
  Uniprot ID: Q8N349
  ENST ID: ENST00000366478
  CDS Start-End: 338-1276
ccggaggacgcgctgctgcgagaccagccgcggcgtctttggcagtagtgggcgtgcttgcgggtccaggagggcccctctcccgcgaccgccgaccacgatgagagcgtgaagaccctctcgaaaggaagggctctgctctacacactggtgtctcctgcggaagggcagctgggcacgccttccagaccgagcaaaagttgaaaaatcagtaacccaagatgactaaccaaatcaatatgctgggcaggatgagacatcagtgtctgcctcagacagaagagcacacacaaaacatgacctctcactccaagcccagttacagcagaaagttttcatggagaaatggaatcacacttcaaatgatttcattttgttgggtctgcttcccccaaatcaaactggaatatttctcttgtgccttatcatcctcatattctttctggcctcggtgggtaactcggccatgattcacctcatccacgtggatcctcgtctccacacaccgatgtactttcttctcagccagctctcccttatggacctgatgtacatctccaccaccgtccccaagatggcgtacaacttcctgtccggccagaaaggcatctccttcctgggatgtggtgtgcaaagcttcttcttcctgaccatggcgtgttctgaaggcttactcctgacctccatggcctacgaccgttatttggccatctgccactctctctattatcctatccgcatgagtaaaatgatgtgtgtgaagatgattggaggctcttggacactggggtccatcaactccttggcacacacagtctttgcccttcatattccctactgcaggtctagggctattgaccatttcttctgcgatgtcccagccatgttgcttcttgcctgtacagatacttgggtctatgaatatatggtttttgtaagtacaagcctctttctccttttccctttcattggcatcacttcttcctgtggccgagtcctatttgctgtctatcatatgcactcaaaggaggggagaaaaaaggccttcaccaccatttcaacacatttaactgtagtgatcttttactatgcaccttttgtctacacctatcttcggcccaggaatctccgctcaccagctgaagacaagatcctggcagtcttctacaccatccttacccccatgctcaatcccattatctacagcctgaggaataaggaagtcctgggggctatgaggagagtgtttgggatattctctttcctgaaagaataatcatggccatccccactccctttgtatttcctctttccaagttgattccaacacgctagagcagggttgtccaatagaaatacaacataatttaaaattttctaataggtacatttaagcagtcaaataaatttaaataatatatttaattcaaaacaatgttataattaatattaatattaacaatattgatgttaattacatagcatactatttcaataaattatatgcaatatattatagtacatgtttgtacatatattactattaacgtgataatgtttattcttgtatattgacatagaatttcttcatgtaataacacaaatttgttaatgttgccttttactctgtttgcattctaagtcttcaaagtcttgtgtttgttttatagagtgcagcgcagcttggacaaaacacatttcaagtgcccagtagtcagtgtctatagtgttggacagcacattcttagagcatccccaatcaatagtttcagaagttatatatgcatgtgtatgtgcatgtatggtgtatacaaacatatttttgttatatacaatattgctgatgaactgaaaattaacaagtaaaatgcacatgctaaggt

SEQ ID NO: 162174 - DNA, 939 bp, Homo sapiens
  Payload ID: 11742
  Gene Symbol: OR2L2
  Gene Name: olfactory receptor, family 2, subfamily L, member 2
  Uniprot ID: Q8NH16
  ENST ID: ENST00000366479
  CDS Start-End: 1-939
atggaaaattacaatcaaacatcaactgatttcatcttattggggctgttcccacaatcaagaattggccttttcgtattcaccctcatttttctcattttcctaatggctctaattggaaatctatccatgattcttctcatctttttggacatccatctccacacacctatgtatttcctacttagtcagctctccctcattgacctaaattacatctccaccattgttccaaagatggtttatgattttctgtatggaaacaagtctatctccttcactggatgtgggattcagagtttcttcttcttgactttagcagttgcagaagggctgctcctgacatcaatggcctatgatcgttatgtggccatttgctttcctctccactatcccatccgtataagcaaaagagtgtgtgtgatgatgataacaggatcttggatgataagctctatcaactcttgtgctcacacagtatatgcactctgtatcccatattgcaagtccagagccatcaatcattttttctgtgatgttccagctatgttgacgctagcctgcacagacacttgggtctatgagagcacagtgtttttgagcagcaccatctttcttgtgcttcctttcactggtattgcatgttcctatggccgggttctccttgctgtctaccgcatgcactctgcagaagggaggaagaaggcctattcaacctgtagcacccacctcactgtagtgtccttctactatgcaccctttgcttatacctatgtacgtccaagatccctgcgatctccaacagaggacaagattctggctgttttctacaccatcctcaccccaatgctcaaccccatcatctacagcctgagaaacaaggaggtgatgggggccctgacacaagtgattcagaaaatcttctcagtgaaaatgtag

SEQ ID NO: 162175 - DNA, 939 bp, Homo sapiens
  Payload ID: 11743
  Gene Symbol: OR2L3
  Gene Name: olfactory receptor, family 2, subfamily L, member 3
  Uniprot ID: Q8NG85
  ENST ID: ENST00000359959
  CDS Start-End: 1-939
atggaaaattacaatcaaacatcaactgatttcatcttattaggattcttcccaccatcaagaattggccttttcctcttcatcctcattgttttcattttcctaatggctctaattggaaacctatccatgattcttctcatcttcttggacacccatctccacacacccatgtatttcctacttagtcagctctccctcattgacctaaattacatctccaccattgttcctaagatggcatctgattttctgtctggtaacaagtctatctccttcactgggtgtgggattcagagtttcttcttctcggcattaggaggtgcagaagcactacttttggcatctatggcctatgatcgttacattgctatttgctttcctcttcactatcccatccgcatgagcaaaagaatgtgtgtgctgatgataacagggtcttggatcataggctcgatcaatgcttgtgctcacactgtatatgtactccatattccttattgccaatccagggccatcaatcatttcttctgtgatgtcccagcaatggtgactctggcctgcatggacacctgggtctatgagggcacagtgtttttgagcaccaccatctttctcgtgtttcccttcattgctatttcatgttcctatggccgggttctccttgctgtctaccacatgaaatctgcagaagggaggaagaaagcctacctgacctgcagcacccacctcactgtagtaactttctactatgcaccttttgtctacacttatctacgtccaagatccctgcgatctccaacagaggacaaggttctggctgtcttctacaccaccctcactccaatgctcaaccccatcatctatagcctgaggaacaaggaggtgatgggggccctgacacgagtgagtcagagaatctgctctgggaaaatgtag

SEQ ID NO: 162176 - DNA, 939 bp, Homo sapiens
  Payload ID: 11744
  Gene Symbol: OR2L5
  Gene Name: olfactory receptor, family 2, subfamily L, member 5
  Uniprot ID: Q8NG80
  ENST ID: ENST00000355281
  CDS Start-End: 1-939
atggaaaattacaatcaaacgtcaactgatttcatcttattggggctgttcccaccatcaaaaattggccttttcctcttcattctctttgttctcattttcctaatggctctaattggaaacctatccatgattcttctcatcttcttggacacccatctccacacacccatgtatttcctgcttagtcagctctccctcattgacctaaattacatctctacgattgttcctaagatggcttctgattttctgtatggaaacaagtctatctccttcattgggtgtgggattcagagtttcttcttcatgacttttgcaggtgcagaagcgctgctcctgacatcaatggcctatgatcgttatgtggccatttgctttcctctccactatcccatccgtatgagcaaaagaatgtatgtgctgatgataacaggatcttggatgataggctccatcaactcttgtgctcacacagtatatgcattccgtatcccatattgcaagtccagagccatcaatcattttttctgtgatgttccagctatgttgacattagcctgtacagacacctgggtctatgagtacacagtgtttttgagcagcaccatctttcttgtgtttcccttcactggcattgcgtgttcctatggctgggttctccttgctgtctaccgcatgcactctgcagaagggaggaaaaaggcctattcgacctgcagcacccacctcactgtagtaactttctactatgcaccctttgcttatacctatctatgtccaagatccctgcgatctctgacagaggacaaggttctggctgttttctacaccatcctcaccccaatgctcaaccccatcatctacagcctgagaaacaaggaggtgatgggggccctgacacgagtgattcagaatatcttctcggtgaaaatgtag

SEQ ID NO: 162177 - DNA, 939 bp, Homo sapiens
  Payload ID: 11745
  Gene Symbol: OR2L8
  Gene Name: olfactory receptor, family 2, subfamily L, member 8 (gene/pseudogene)
  Uniprot ID: Q8NGY9
  ENST ID: ENST00000357191
  CDS Start-End: 1-939
atggaaaattacaatcaaacatcaactgatttcatcttattggggctgtttccaccatcaagaattgaccttttcttcttcattctcattgttttcattttcctgatggctctaattggaaacctgtccatgattcttctcatcttcttggacacccatctccacacacccatgtatttcctactgagtcagctctccctcattgacctaaattacatctccaccattgttcctaagatggcatctgattttctgcatggaaacaagtctatctccttcactgggtgtgggattcagagtttcttcttcttggcattaggaggtgcagaagcactacttttggcatctatggcctatgatcgttacattgctatttgctttcctctccactatctcatccgcatgagcaaaagagtgtgtgtgctgatgataacagggtcttggatcataggctcgatcaatgcttgtgctcacactgtatatgtactccatattccttattgccgatccagggccatcaatcatttcttctgtgatgtcccagcaatggtgactctggcctgcatggacacctgggtctatgagggcacagtgtttttgagtgccaccatctttctcgtgtttcccttcattggtatttcatgttcctatggccaggttctctttgctgtctaccacatgaaatctgcagaagggaggaagaaagcctatttgacctgcagcacccacctcactgtagtaactttctactatgcaccttttgtctacacttatctacgtccaagatccctgcgatctccaacagaggacaaggttctggctgtcttctacaccatcctcaccccaatgctcaaccccatcatctatagcctgaggaacaaggaggtgatgggggccctgacacgagtgagtcagagaatctgctctgtgaaaatgtag

SEQ ID NO: 162178 - DNA, 1044 bp, Homo sapiens
  Payload ID: 11746
  Gene Symbol: OR2M2
  Gene Name: olfactory receptor, family 2, subfamily M, member 2
  Uniprot ID: Q96R28
  ENST ID: ENST00000359682
  CDS Start-End: 1-1044
atggcatgggagaatcagaccttcaactccgacttcatcctccttggaatcttcaatcacagcccaccacacacgttcctcttctttctggtcctgggcatctttttagtggccttcatgggaaactctgtcatggttctcctcatctacctggacacccagctccacacccccatgtacttcctcctcagccaactgtccctcatggacctcatgctcatctgcaccaccgtacccaagatggccttcaactacctgtctggcagcaagtccatttctatggctggttgtgtcacacaaattttcttctatatatcactgtctggctctgaatgttttcttttggctgttatggcttatgaccgctatattgctatttgccaccctctaagatataccaatctcatgaatcctaaaatttgtggacttatggctaccttctcctggatcctgggctctacagatggaatcattgatgctgtagccacattttccttctccttttgtgggtctcgggaaatagcccacttcttctgtgaattcccttccctactaatcctctcatgcaatgacacatcaatatttgaagaggttattttcatctgctgtatagtaatgcttgttttccctgttgcaatcatcattgcttcctatgctcgagttattctggctgtcattcacatgggatctggagagggtcgttgcaaagctttcacgacctgttcctctcacctcatggtggtgggaatgtactatggagcagctttgttcatgtacatacggcccacatctgatcactccccaacgcaggacaagatggtgtctgtattctacaccatcctcactcccatgctgaatcccctcatctacagcctccgcaacaaggaggtgactagagcattcatgaagatcttaggaaagggcaagtctgagagtgagttacctcataaactttatgttttgctgtttgctaaattcttctttctaatatccatctttttctatgatgtcaaaatactagcattgattatgtacattgcctaa

SEQ ID NO: 162179 - DNA, 939 bp, Homo sapiens
  Payload ID: 11747
  Gene Symbol: OR2M3
  Gene Name: olfactory receptor, family 2, subfamily M, member 3
  Uniprot ID: Q8NG83
  ENST ID: ENST00000456743
  CDS Start-End: 1-939
atggcaagggagaattcgaccttcaactccgacttcatcctcctgggaatcttcaatcacagccccacccacaccttcctcttctttctggtcctggccatcttttcagtggccttcatgggaaactctgtcatggttctcctcatctacctggacacccagctccacacccccatgtacctcctcctcagccaactgtccctcatggacctcatgctcatctgcaccaccgtacccaagatggccttcaactacctgtctggcagcaagtccatttctatggctggttgtgccacacaaattttcttctatacatcactgcttggctctgagtgctttcttttggctgttatggcttatgaccgctacactgccatttgccaccctctaagatacaccaatctcatgagccctaaaatttgtggacttatgactgccttttcctggatcctgggctctacggatggaattattgatgttgtagcaacattttccttctcctactgtgggtctcgggaaatagcccacttcttctgtgacttcccctccctactaatcctctcatgcagtgacacatcaatatttgaaaagattcttttcatctgctgtatagtaatgattgttttccctgttgcaatcatcattgcttcctatgctcgagttatcctggctgtcattcacatgggatctggagagggtcgtcgcaaagcttttactacttgttcctctcacctcttggtggtgggaatgtactatggagcagctttgttcatgtacatacggcccacatctgatcgctccccaacacaggacaagatggtgtctgtattctacaccatcctcactcccatgttgaatcccctcatctacagcctccgcaacaaggaggtgaccagagcattcatgaagatcttaggaaagggcaagtctggagagtga

SEQ ID NO: 162180 - DNA, 936 bp, Homo sapiens
  Payload ID: 11748
  Gene Symbol: OR2M4
  Gene Name: olfactory receptor, family 2, subfamily M, member 4
  Uniprot ID: Q96R27
  ENST ID: ENST00000306687
  CDS Start-End: 1-936
atggtgtgggaaaaccagaccttcaactccatcttcatcctgctgggaatcttcaatcacagtcccacccacaccttccttttttctctggtcctgggcatcttctcactggcattgatggaaaatatttccatggttctcctcatctacatagagaaacagctccacacccccatgtacttcctcctcagtcaactgtcccttatggacctcatgctcatctgcaccactctacccaagatgatcttcagctacttgtctgggaagaaatctatctctctggcaggttgtggaactcagatattcttctatgtgtccctgcttggagctgaatgtttcttgttggctgtcatggcttatgaccgctatgtggctatatgtcaccctcttcagtacaccatcctcatgaatccgaaactctgtgtcttcatgactgttgcttcctggaccttggggtctcttgatgggatcatagtgcttgcagctgtcctgtcattttcttactgcagctctctggaaattcatcactttttctgtgatgttgctgcccttttacctctatcctgcacagaaacatctgcatttgaaagactacttgtcatttgttgtgtggtaatgctaatctttccagtttcagttatcatactttcctattcccatgtccttcgagccgtcatccacatgggctctggggaaagtcgtcgcaaggccttcactacctgctcctcccacctgtctgtggtcggactctactacggtgctgctatgttcatgtacatgagaccagcttctaaacatacgccagaccaggacaagatggtgtcggccttctacactattctcacccctatgctgaaccctctcatttatagcctccgcaacaaagaagtgttcagggcactacagaaggtactgaagaaaagaaagttaatatga

SEQ ID NO: 162181 - DNA, 939 bp, Homo sapiens
  Payload ID: 11749
  Gene Symbol: OR2M5
  Gene Name: olfactory receptor, family 2, subfamily M, member 5
  Uniprot ID: A3KFT3
  ENST ID: ENST00000366476
  CDS Start-End: 1-939
atggcatgggagaatcagaccttcaactctgacttcatcctcctgggaatcttcaatcacagccccacccacaccttcctcttctttctggtcctggccatcttttcagtggccttcatgggaaactctgtcatggttctcctcatctacctggacacccagctccacacccccatgtacttcctcctcagtcaactgttcctcatggacctcatgctcatctgctctaccgtacccaagatggccttcaactacttgtctggcagcaagtccatttctatggctggttgtgccacacaaattttcttctatgtatcactgcttggctccgaatgctttctgttggctgttatgtcttatgaccgctatattgccatttgccaccctctaagatacaccaatctcatgagacccaaaatttgtggacttatgactgccttctcctggatcctgggctctatggatgcaatcattgatgctgtagcgacattttccttctcctactgtgggtctcgggaaatagcccacttcttctgtgacttcccttccctactaatcctctcatgcaatgacacatcaatatttgaaaaggttcttttcatctgctgtatagtaatgattgtttttcctgttgcaatcatcatcgcttcctatgctcgagttattctggctgtcattcacatgggatctggagagggtcgtcgcaaagcttttactacctgttcctctcacctcatggtggtgggaatgtactatggagcaggtttgttcatgtacatacggcccacatctgatcgctcccctatgcaggacaagctggtgtctgtattctacaccatcctcactcccatgctgaatcccctcatctacagcctccgcaacaaggaggtgaccagagcactcaggaaagtgttaggaaagggcaagtgtggagagtga

SEQ ID NO: 162182 - DNA, 939 bp, Homo sapiens
  Payload ID: 11750
  Gene Symbol: OR2M7
  Gene Name: olfactory receptor, family 2, subfamily M, member 7
  Uniprot ID: Q8NG81
  ENST ID: ENST00000317965
  CDS Start-End: 1-939
atggcatgggagaatcagaccttcaactctgacttcctcctcctgggaatcttcaatcatagccccacccacaccttcctcttctttctggtcctggccatcttttcagtggccttcatgggaaactccatcatggttctcctcatctacctggatacccagctccacacccccatgtacttcctcctcagccaactgtccctcatggacctcatgctcatctgcaccactgtacccaagatggccttcaactacttgtctggcagcaagtccatttctatggctggctgtgccacacaaattttcttctatatatcattgcttggctccgaatgctttctgttggctgttatgtcttatgaccgctacactgccatttgccaccctctaagatacaccaatctcatgagacccaaaatttgtggacttatgactgccttctcctggatcctgggctctacagatggaatcattgatgctgtagcgacattttccttctcctactgtgggtctcgggaaatagcccacttctgctgtgacttcccttccctactaatcctctcatgcaatgacacatcaatatttgaagaggttattttcatctgctgtatagtaatgcttgttttccctgttgcaatcatcatcacttcctatgctcgagttattctggctgtcattcacatgggatctggagagggacgtcgcaaagcttttactacttgttcctctcacctcatggtggtgggaatgtactatggagcaggtttgttcatgtgcattcagcccacatctcatcattctcctatgcaggacaagatggtgtctgtattctacaccatcgtcactcccatgctgaatcctctcatttatagcctccgcaacaaggaagtgaccagagcattaatgaaaatcttaggaaagggcaagtctggagattga

SEQ ID NO: 162183 - DNA, 1047 bp, Homo sapiens
  Payload ID: 11751
  Gene Symbol: OR2S2
  Gene Name: olfactory receptor, family 2, subfamily S, member 2 (gene/pseudogene)
  Uniprot ID: Q9NQN1
  ENST ID: ENST00000341959
  CDS Start-End: 57-1016
tcccaaaaagcctgatgcgctgctcagtactttgctgatggcagaggggatatcacatggaaaaagccaatgagacctcccctgtgatggggttcgttctcctgaggctctctgcccacccagagctggaaaagacattcttcgtgctcatcctgctgatgtacctcgtgatcctgctgggcaatggggtcctcatcctggtgaccatccttgactcccgcctgcacacgcccatgtacttcttcctagggaacctctccttcctggacatctgcttcactacctcctcagtcccactggtcctggacagctttttgactccccaggaaaccatctccttctcagcctgtgctgtgcagatggcactctcctttgccatggcaggaacagagtgcttgctcctgagcatgatggcatttgatcgctatgtggccatctgcaacccccttaggtactccgtgatcatgagcaaggctgcctacatgcccatggctgccagctcctgggctattggtggtgctgcttccgtggtacacacatccttggcaattcagctgcccttctgtggagacaatgtcatcaaccacttcacctgtgagattctggctgttctaaagttggcctgtgctgacatttccatcaatgtgatcagcatggaggtgacgaatgtgatcttcctaggagtcccggttctgttcatctctttctcctatgtcttcatcatcaccaccatcctgaggatcccctcagctgaggggaggaaaaaggtcttctccacctgctctgcccacctcaccgtggtgatcgtcttctacgggaccttattcttcatgtatgggaagcctaagtctaaggactccatgggagcagacaaagaggatctttcagacaaactcatcccccttttctatggggtggtgaccccgatgctcaaccccatcatctatagcctgaggaacaaggatgtgaaggctgctgtgaggagactgctgagaccaaaaggcttcactcagtgatggtggaagggtcctctgtgattgtcaccca

SEQ ID NO: 162184 - DNA, 960 bp, Homo sapiens
  Payload ID: 11751
  Gene Symbol: OR2S2
  Gene Name: olfactory receptor, family 2, subfamily S, member 2 (gene/pseudogene)
  Uniprot ID: Q9NQN1
  ENST ID: ENST00000625188
  CDS Start-End: 1-960
atggaaaaagccaatgagacctcccctgtgatggggttcgttctcctgaggctctctgcccacccagagctggaaaagacattcttcgtgctcatcctgctgatgtacctcgtgatcctgctgggcaatggggtcctcatcctggtgaccatccttgactcccgcctgcacacgcccatgtacttcttcctagggaacctctccttcctggacatctgcttcactacctcctcagtcccactggtcctggacagctttttgactccccaggaaaccatctccttctcagcctgtgctgtgcagatggcactctcctttgccatggcaggaacagagtgcttgctcctgagcatgatggcatttgatcgctatgtggccatctgcaacccccttaggtactccgtgatcatgagcaaggctgcctacatgcccatggctgccagctcctgggctattggtggtgctgcttccgtggtacacacatccttggcaattcagctgcccttctgtggagacaatgtcatcaaccacttcacctgtgagattctggctgttctaaagttggcctgtgctgacatttccatcaatgtgatcagcatggaggtgacgaatgtgatcttcctaggagtcccggttctgttcatctctttctcctatgtcttcatcatcaccaccatcctgaggatcccctcagctgaggggaggaaaaaggtcttctccacctgctctgcccacctcaccgtggtgatcgtcttctacgggaccttattcttcatgtatgggaagcctaagtctaaggactccatgggagcagacaaagaggatctttcagacaaactcatcccccttttctatggggtggtgaccccgatgctcaaccccatcatctatagcctgaggaacaaggatgtgaaggctgctgtgaggagactgctgagaccaaaaggcttcactcagtga

SEQ ID NO: 162185 - DNA, 1047 bp, Homo sapiens; identical to SEQ ID NO: 162183
  Payload ID: 11751
  Gene Symbol: OR2S2
  Gene Name: olfactory receptor, family 2, subfamily S, member 2 (gene/pseudogene)
  Uniprot ID: Q9NQN1
  ENST ID: ENST00000623973
  CDS Start-End: 57-1016

SEQ ID NO: 162186 - DNA, 1110 bp, Homo sapiens
  Payload ID: 11752
  Gene Symbol: OR2T1
  Gene Name: olfactory receptor, family 2, subfamily T, member 1
  Uniprot ID: O43869
  ENST ID: ENST00000366474
  CDS Start-End: 1-1110
atgtggcaagaatactattttttaaatgttttcttcccacttttaaaagtttgctgcctaacaattaattcacatgttgttattttactgccctgggaatgctatcatcttatttggaagatattaccttatatcggcacaactgtaggatcaatggaagagtacaacacatcctctacagacttcactttcatggggctgttcaacagaaaggaaacctcaggtcttatttttgccatcatctctatcatcttcttcaccgcactgatggccaatggggttatgatcttcctgatccaaacagatttgcgccttcatacacccatgtacttcctcctcagccacctttccttaattgacatgatgtatatttccactattgtgcctaagatgctggttaattacctgctggatcaaaggaccatttcctttgtggggtgcacagctcaacacttcctctaccttacccttgtgggagctgaattcttcctgctgggcctcatggcctatgaccgctatgtggccatttgcaaccctctgagataccctgtcctcatgagccgccgggtctgttggatgattatagcaggttcctggtttgggggctctttggatggcttcctcctaacccccatcaccatgagctttcccttctgcaattcccgggagattaaccacttcttctgtgaggcaccagcagtcctgaagttggcatgtgcagacacagccctctacgagacagtgatgtatgtgtgctgtgttttgatgctgctgattcctttctctgtagtccttgcttcctatgcccgaatcctgactacagttcagtgcatgagctcagtggagggcaggaagaaggcatttgccacttgctcatcccacatgactgtggtgtccttgttctacggggctgccatgtacacctacatgctgccacattcttaccacaagccagcccaggacaaagtcctctctgtgttttacaccattctcacacccatgctgaaccccctcatctacagccttagaaacaaggatgtgactggagctctgaagagggccttggggaggttcaagggtcctcaaagggtgtcaggaggtgtcttttga

SEQ ID NO: 162187 - DNA, 1110 bp, Homo sapiens; identical to SEQ ID NO: 162186
  Payload ID: 11752
  Gene Symbol: OR2T1
  Gene Name: olfactory receptor, family 2, subfamily T, member 1
  Uniprot ID: O43869
  ENST ID: ENST00000611851
  CDS Start-End: 1-1110

SEQ ID NO: 162188 - DNA, 1110 bp, Homo sapiens; identical to SEQ ID NO: 162186
  Payload ID: 11752
  Gene Symbol: OR2T1
  Gene Name: olfactory receptor, family 2, subfamily T, member 1
  Uniprot ID: O43869
  ENST ID: ENST00000613540
  CDS Start-End: 1-1110

SEQ ID NO: 162189 - DNA, 939 bp, Homo sapiens
  Payload ID: 11753
  Gene Symbol: OR2T10
  Gene Name: olfactory receptor, family 2, subfamily T, member 10
  Uniprot ID: Q8NGZ9
  ENST ID: ENST00000330500
  CDS Start-End: 1-939
atgcggctggccaaccagaccctgggtggtgactttttcctgttgggaatcttcagccagatctcacaccctggccgcctctgcttgcttatcttcagtatatttttgatggctgtgtcttggaatattacattgatacttctgatccacattgactcctctctgcatactcccatgtacttctttataaaccagctctcactcatagacttgacatatatttctgtcactgtccccaaaatgctggtgaaccagctggccaaagacaagaccatctcggtccttgggtgtggcacccagatgtacttctacctgcagttgggaggtgcagagtgctgccttctagccgccatggcctatgaccgctatgtggctatctgccatcctctccgttactctgtgctcatgagccatagggtatgtctcctcctggcatcaggctgctggtttgtgggctcagtggatggcttcatgctcactcccatcgccatgagcttccccttctgcagatcccatgagattcagcacttcttctgtgaggtccctgctgttttgaagctctcttgctcagacacctcactttacaagattttcatgtacttgtgctgtgtcatcatgctcctgatacctgtgacggtcatttcagtgtcttactactatatcatcctcaccatccataagatgaactcagttgagggtcggaaaaaggccttcaccacctgctcctcccacattacagtggtcagcctcttctatggagctgctatttacaactacatgctccccagctcctaccaaactcctgagaaagatatgatgtcatcctttttctacactatccttacacctgtcttgaatcctatcatttacagtttcaggaataaggatgtcacaagggctttgaaaaaaatgctgagcgtgcagaaacctccatattaa

SEQ ID NO: 162190 - DNA, 951 bp, Homo sapiens; identical to SEQ ID NO: 161881
  Payload ID: 11754
  Gene Symbol: OR2T11
  Gene Name: olfactory receptor, family 2, subfamily T, member 11 (gene/pseudogene)
  Uniprot ID: Q8NH01
  ENST ID: ENST00000330803
  CDS Start-End: 1-951

SEQ ID NO: 162191 - DNA, 963 bp, Homo sapiens
  Payload ID: 11755
  Gene Symbol: OR2T12
  Gene Name: olfactory receptor, family 2, subfamily T, member 12
  Uniprot ID: Q8NG77
  ENST ID: ENST00000317996
  CDS Start-End: 1-963
atggagatgagaaatactaccccagattttattctcctaggactctttaaccacaccagagcccaccaagtcctcttcatgatgcttctggccaccgttttgacctccctgtttagcaatgccctcatgattctcctgattcactgggaccaccggctccacaggcccatgtacttcctcctgagccaactttccctcatggacatgatgctggtttccaccactgtgcccaaaatggcggctgactacttgaccggaaataaggccatctcccgcgctggctgtggtgtgcagatcttcttcctccccacactgggtggtggagagtgcttcctcttagcagccatggcctatgaccgctatgcggctgtctgccacccactccgatatcccactctcatgagctggcagctgtgcctgaggatgaccatgtcgtcctggctcctgggtgcagctgacggcctcctgcaggctgttgctaccctgagcttcccatattgcggtgcacacgagatcgatcacttcttctgcgaggcccccgtgttggtgcgtttggcttgtgctgacacttcagtcttcgaaaacgccatgtacatctgctgtgtgttaatgctcctggtccccttttccctcatcctgtcctcctatggtctcatcctcgctgctgttctgctcatgcgctctacagaagcccgcaagaaggcctttgccacctgctcttcacatgtggctgtggtgggactcttttatggagctggcatttttacctatatgagacccaaatcccacaggtccactaaccacgataaggttgtgtcagccttctatactatgttcacccctttactaaatcccctcatctacagtgtgaggaacagtgaggtcaaggaagccctgaaacggtggctggggacgtgtgtaaacctaaaacaccagcaaaatgaggcccacaggtcaagatga

SEQ ID NO: 162192 - DNA, 975 bp, Homo sapiens
  Payload ID: 11756
  Gene Symbol: OR2T2
  Gene Name: olfactory receptor, family 2, subfamily T, member 2
  Uniprot ID: Q6IF00
  ENST ID: ENST00000342927
  CDS Start-End: 1-975
atgggcatggagggtcttctccagaactccactaacttcgtcctcacaggcctcatcacccatcctgccttccccgggcttctctttgcaatagtcttctccatctttgtggtggctataacagccaacttggtcatgattctgctcatccacatggactcccgcctccacacacccatgtacttcttgctcagccagctctccatcatggataccatctacatctgtatcactgtccccaagatgctccaggacctcctgtccaaggacaagaccatttccttcctgggctgtgcagttcagatcttcctctacctgaccctgattggaggggaattcttcctgctgggtctcatggcctatgaccgctatgtggctgtgtgcaaccctctacggtaccctctcctcatgaaccgcagggtttgcttattcatggtggtcggctcctgggttggtggttccttggatgggttcatgctgactcctgtcactatgagtttccccttctgtagatcccgagagatcaatcactttttctgtgagatcccagccgtgctgaagttgtcttgcacagacacgtcactctatgagaccctgatgtatgcctgctgcgtgctgatgctgcttatccctctatctgtcatctctgtctcctacacgcacatcctcctgactgtccacaggatgaactctgctgagggccggcgcaaagcctttgctacgtgttcctcccacattatggtggtgagcgttttctacggggcagccttctacaccaacgtgctgccccactcctaccacactccagagaaagataaagtggtgtctgccttctacaccatcctcacccccatgctcaacccactcatctacagcttgaggaataaagatgtggctgcagctctgaggaaagtactagggagatgtggttcctcccagagcatcagggtggcgactgtgatcaggaagggctag

SEQ ID NO: 162193 - DNA, 975 bp, Homo sapiens; identical to SEQ ID NO: 162192
  Payload ID: 11756
  Gene Symbol: OR2T2
  Gene Name: olfactory receptor, family 2, subfamily T, member 2
  Uniprot ID: Q6IF00
  ENST ID: ENST00000616594
  CDS Start-End: 1-975

SEQ ID NO: 162194 - DNA, 1054 bp, Homo sapiens
  Payload ID: 11756
  Gene Symbol: OR2T2
  Gene Name: olfactory receptor, family 2, subfamily T, member 2
  Uniprot ID: Q6IF00
  ENST ID: ENST00000610282
  CDS Start-End: 23-997
cccaaggagcttgtcatggaccatgggcatggagggtcttctccagaactccactaacttcgtcctcacaggcctcatcacccatcctgccttccccgggcttctctttgcaatagtcttctccatctttgtggtggctataacagccaacttggtcatgattctgctcatccacatggactcccgcctccacacacccatgtacttcttgctcagccagctctccatcatggataccatctacatctgtatcactgtccccaagatgctccaggacctcctgtccaaggacaagaccatttccttcctgggctgtgcagttcagatcttcctctacctgaccctgattggaggggaattcttcctgctgggtctcatggcctatgaccgctatgtggctgtgtgcaaccctctacggtaccctctcctcatgaaccgcagggtttgcttattcatggtggtcggctcctgggttggtggttccttggatgggttcatgctgactcctgtcactatgagtttccccttctgtagatcccgagagatcaatcactttttctgtgagatcccagccgtgctgaagttgtcttgcacagacacgtcactctatgagaccctgatgtatgcctgctgcgtgctgatgctgcttatccctctatctgtcatctctgtctcctacacgcacatcctcctgactgtccacaggatgaactctgctgagggccggcgcaaagcctttgctacgtgttcctcccacattatggtggtgagcgttttctacggggcagccttctacaccaacgtgctgccccactcctaccacactccagagaaagataaagtggtgtctgccttctacaccatcctcacccccatgctcaacccactcatctacagcttgaggaataaagatgtggctgcagctctgaggaaagtactagggagatgtggttcctcccagagcatcagggtggcgactgtgatcaggaagggctagcagggactcccacagcatcagagtggtgactgtgatcgggaaggattagcggggact

SEQ ID NO: 162195 - DNA, 954 bp, Homo sapiens
  Payload ID: 11757
  Gene Symbol: OR2T27
  Gene Name: olfactory receptor, family 2, subfamily T, member 27
  Uniprot ID: Q8NH04
  ENST ID: ENST00000344889
  CDS Start-End: 1-954
atggagcagagcaattattccgtgtatgccgactttatccttctgggtttgttcagcaacgcccgtttcccctggcttctctttgccctcattctcctggtctttttgacctccatagccagcaacgtggtcaagatcattctcatccacatagactcccgcctccacacccccatgtacttcctgctcagccagctctccctcagggacatcctgtatatttccaccattgtgcccaaaatgctggtcgaccaggtgatgagccagagagccatttcctttgctggatgcactgcccaacacttcctctacttgaccttagcaggggctgagttcttcctcctaggactcatgtcctatgatcgctacgtagccatctgcaaccctctgcactatcctgtcctcatgagccgcaagatctgctggttgattgtggcggcagcctggctgggagggtctatcgatggtttcttgctcacccccgtcaccatgcagttccccttctgtgcctctcgggagatcaaccacttcttctgcgaggtgcctgcccttctgaagctctcctgcacggacacatcagcctacgagacagccatgtatgtctgctgtattatgatgctcctcatccctttctctgtcatctcgggctcttacacaagaattctcattactgtttataggatgagcgaggcagaggggaggggaaaggctgtggccacctgctcctcacacatggtggttgtcagcctcttctatggggctgccatgtacacatacgtgctgcctcattcttaccacacccctgagcaggacaaagctgtatctgccttctacaccatccttactcccatgctcaatccactcatttacagccttaggaacaaggatgtcacaggggccctacagaaggttgtggggaggtgtgtgtcctcaggaaaggtaaccactttctaa

SEQ ID NO: 162196 - DNA, 948 bp, Homo sapiens
  Payload ID: 11758
  Gene Symbol: OR2T29
  Gene Name: olfactory receptor, family 2, subfamily T, member 29
  Uniprot ID: Q8NH02
  ENST ID: ENST00000328570
  CDS Start-End: 1-948
atggccaacatcaccaggatggccaaccacactggaaggttggatttcatcctcatgggactcttcagacaatccaaacatccagctctacttagtgtggtcatctttgtggttttcctgaaggcgttgtctggaaatgctgtcctgatccttctgatacactgtgacgcccacctccacagccccatgtactttttcatcagtcaattgtctctcatggacatggcgtacatttctgtcactgtgcccaagatgctcctggaccaggtcatgggtgtgaataaggtctcagcccctgagtgtgggatgcagatgttcctctatctgacactagcaggttcggaatttttccttctagccaccatggcctatgaccgctacgtggccatctgccatcctctccgttaccctgtcctcatgaaccatagggtctgtcttttcctggcatcgggctgctggttcctgggctcagtggatggcttcatgctcactcccatcaccatgagcttccccttctgcagatcctgggagattcatcatttcttctgtgaagtccctgctgtaacgatcctgtcctgctcagacacctcactctatgagaccctcatgtacctatgctgtgtcctcatgctcctcatccctgtgacgatcatttcaagctcctatttactcatcctcctcaccgtccacaggatgaactcagcagagggccggaaaaaggcctttgccacctgctcctcccacctgactgtggtcatcctcttctatggggctgccgtctacacctacatgctccccagctcctaccacacccctgagaaggacatgatggtatctgtcttctataccatcctcactccggtgctgaaccctttaatctatagtcttaggaataaggatgtcatgggggctctgaagaaaatgttaactgtgagattcgtcctttag

SEQ ID NO: 162197 - DNA, 957 bp, Homo sapiens
  Payload ID: 11759
  Gene Symbol: OR2T3
  Gene Name: olfactory receptor, family 2, subfamily T, member 3
  Uniprot ID: Q8NH03
  ENST ID: ENST00000359594
  CDS Start-End: 1-957
atgtgctcagggaatcagacttctcagaatcaaacagcaagcactgatttcaccctcacgggactctttgctgagagcaagcatgctgccctcctctacaccgtgaccttccttcttttcttgatggccctcactgggaatgccctcctcatcctcctcatccactcagagccccgcctccacacccccatgtacttcttcatcagccagctcgcgctcatggatctcatgtacctatgcgtgactgtgcccaagatgcttgtgggccaggtcactggagatgataccatttccccgtcaggctgtgggatccagatgttcttctacctgaccctggctggagctgaggttttcctcctggctgccatggcctatgaccgatatgctgctgtttgcagacctctccattacccactgctgatgaaccagagggtgtgccagctcctggtgtcagcctgctgggttttgggaatggttgatggtttgttgctcacccccattaccatgagcttccccttttgccagtctaggaaaatcctgagttttttctgtgagactcctgccctgctgaagctctcctgctctgacgtctccctctataagacgctcatgtacctgtgctgcatcctcatgcttctcgcccccatcatggtcatctccagctcatacaccctcatcctgcatctcatccacaggatgaattctgccgccggccacaggaaggccttggccacctgctcctcccacatgatcatagtgctgctgctcttcggtgcttccttctacacctacatgctcccgagttcctaccacacagctgagcaggacatgatggtgtctgccttttacaccatcttcactcctgtgctgaaccccctcatttacagtctccgcaacaaagatgtcaccagggctctgaggagcatgatgcagtcaagaatgaaccaagaaaagtag

SEQ ID NO: 162198 - DNA, 957 bp, Homo sapiens; identical to SEQ ID NO: 162197
  Payload ID: 11759
  Gene Symbol: OR2T3
  Gene Name: olfactory receptor, family 2, subfamily T, member 3
  Uniprot ID: Q8NH03
  ENST ID: ENST00000610467
  CDS Start-End: 1-957

SEQ ID NO: 162199 - DNA, 1008 bp, Homo sapiens
  Payload ID: 11759
  Gene Symbol: OR2T3
  Gene Name: olfactory receptor, family 2, subfamily T, member 3
  Uniprot ID: Q8NH03
  ENST ID: ENST00000614898
  CDS Start-End: 26-982
tcctcagggggaaactgagccagtcatgtgctcagggaatcagacttctcagaatcaaacagcaagcactgatttcaccctcacgggactctttgctgagagcaagcatgctgccctcctctacaccgtgaccttccttcttttcttgatggccctcactgggaatgccctcctcatcctcctcatccactcagagccccgcctccacacccccatgtacttcttcatcagccagctcgcgctcatggatctcatgtacctatgcgtgactgtgcccaagatgcttgtgggccaggtcactggagatgataccatttccccgtcaggctgtgggatccagatgttcttctacctgaccctggctggagctgaggttttcctcctggctgccatggcctatgaccgatatgctgctgtttgcagacctctccattacccactgctgatgaaccagagggtgtgccagctcctggtgtcagcctgctgggttttgggaatggttgatggtttgttgctcacccccattaccatgagcttccccttttgccagtctaggaaaatcctgagttttttctgtgagactcctgccctgctgaagctctcctgctctgacgtctccctctataagacgctcatgtacctgtgctgcatcctcatgcttctcgcccccatcatggtcatctccagctcatacaccctcatcctgcatctcatccacaggatgaattctgccgccggccacaggaaggccttggccacctgctcctcccacatgatcatagtgctgctgctcttcggtgcttccttctacacctacatgctcccgagttcctaccacacagctgagcaggacatgatggtgtctgccttttacaccatcttcactcctgtgctgaaccccctcatttacagtctccgcaacaaagatgtcaccagggctctgaggagcatgatgcagtcaagaatgaaccaagaaaagtagtaaagggcaagcattgtcccctcctc

SEQ ID NO: 162200 - DNA, 963 bp, Homo sapiens
  Payload ID: 11760
  Gene Symbol: OR2T33
  Gene Name: olfactory receptor, family 2, subfamily T, member 33
  Uniprot ID: Q8NG76
  ENST ID: ENST00000318021
  CDS Start-End: 1-963
atggagatgagaaatactaccccagattttattctcctaggactctttaaccacaccagagcccaccaagtcctcttcatgatggttctgagtatcgttttgacctccctgtttggcaattccctcatgattctcctgattcactgggaccaccggctccacacgcccatgtacttcctcctgagccaactttccctcatggacatgatgctggtttccaccactgtgcccaaaatggcggctgactacttgaccggaagtaaggccatctcccgcgctggctgtggtgtgcagatcttcttcctccccacactgggtggtggagagtgcttcctcttagcagccatggcctatgaccgctatgcggctgtctgccacccactccgatatcccactctcatgagctggcagctgtgcctgaggatgaccatgtcgtgttggctcctgggtgcagctgacgggctcctgcaggctgttgttaccctgagcttcccatattgtggtgcacacgagatcgatcacttcttctgcgagacccccgtgctggtgcgtttggcttgtgctgacacttcagtcttcgaaaacgccatgtacatctgctgtgtgttaatgctcctggtccccttttccctcatcctgtcctcctatggtctcatcctcgctgctgttctgcacatgcgctctacagaagcccgcaagaaggcctttgccacctgctcttcacatgtggctgtggtgggactcttttatggagctgccatttttacctatatgagacccaaatcccataggtccactaaccatgacaaggttgtgtcagccttctatactatgttcacccctttactaaaccccctcatctacagtgtgaagaacagtgaggtgaagggagccctgaaacggtggctggggacgtgtgtaaacataaaacaccagcaaaatgaggcccacaggtcaagatga

SEQ ID NO: 162201 - DNA, 957 bp, Homo sapiens
  Payload ID: 11761
  Gene Symbol: OR2T34
  Gene Name: olfactory receptor, family 2, subfamily T, member 34
  Uniprot ID: Q8NGX1
  ENST ID: ENST00000328782
  CDS Start-End: 1-957
atgtgctcagggaatcagacttctcagaatcaaacagcaagcactgatttcaccctcacgggactctttgctgagagcaagcatgctgccctcctctacaccgtgaccttccttcttttcttgatggccctcactgggaatgccctcctcatcctcctcatccactcagagccccgcctccacacccccatgtacttcttcatcagccagctcgcgctcatggatctcatgtacctatgcgtgactgtgcccaagatgcttgtgggccaggtcactggagatgataccatttccccgtcaggctgtgggatccagatgttcttccacctgaccctggctggagctgaggttttcctcctggctgccatggcctatgaccgatatgctgctgtttgcagacctctccattacccactgctgatgaaccagagggtgtgccagctcctggtgtcagcctgctgggttttgggaatggttgatggtttgttgctcacccccattaccatgagcttccccttttgccagtctaggaaaatcctgagttttttctgtgagactcctgccctgctgaagctctcctgctctgacgtctccctctataagatgctcacgtacctgtgctgcatcctcatgcttctcacccccatcatggtcatctccagctcatacaccctcatcctgcatctcatccacaggatgaattctgccgccggccgcaggaaggccttggccacctgctcctcccacatgatcatagtgctgctgctcttcggtgcttccttctacacctacatgctccggagttcctaccacacagctgagcaggacatgatggtgtctgccttttacaccatcttcactcctgtgctgaaccccctcatttacagtctccgcaacaaagatgtcaccagggctctgaggagcatgatgcagtcaagaatgaaccaagaaaagtag

SEQ ID NO: 162202 - DNA, 972 bp, Homo sapiens
  Payload ID: 11762
  Gene Symbol: OR2T35
  Gene Name: olfactory receptor, family 2, subfamily T, member 35
  Uniprot ID: Q8NGX2
  ENST ID: ENST00000317450
  CDS Start-End: 1-972
atgggcatggagggtcttctccagaactccactaacttcgtcctcacaggcctcatcacccatcctgccttccccgggcttctctttgcagtagtcttctccatctttgtggtggctataacagccaacttggtcatgattctgctcatccacatggactcccgcctccacacacccatgtacttcttgctcagccagctctccatcatggataccatctacatctgtatcactgtccccaagatgctccaggacctcctgtccaaggacaagaccatttccttcctgggctgtgcagttcaaatcttctacctgaccctgattggaggggaattcttcctgctgggtctcatggcctatgaccgctatgtggctgtgtgcaaccctctacggtaccctctcctcatgaaccgcagggtttgcttattcatggtggtcggctcctgggttggtggttccttggatgggttcatgctgactcctgtcactatgagtttccccttctgtagatcccgagagatcaatcactttttctgtgagatcccagccgtgctgaagttgtcttgcacagacacgtcactctatgagaccctgatgtatgcctgctgcgtgctgatgctgcttatccctctatctgtcatctctgtgtcctacacgcacatcctcctgactgtccacaggatgaactctgctgagggccggcgcaaagcctttgctacgtgttcctcccacattatggtggtgagcgttttctacggggcagccttctacaccaacgtgctgccccactcctaccacactccagagaaagataaagtggtgtctgccttctacaccatcctcacccccatgctcaacccactcatctacagcttgaggaataaagatgtggctgcagctctgaggaaagtactagggagatgtggttcctcccagagcatcagggtggcgactgtgatcaggaagggctag

SEQ ID NO: 162203 - DNA, 1047 bp, Homo sapiens
  Payload ID: 11763
  Gene Symbol: OR2T4
  Gene Name: olfactory receptor, family 2, subfamily T, member 4
  Uniprot ID: Q8NH00
  ENST ID: ENST00000366475
  CDS Start-End: 1-1047
atggacaacatcacctggatggccagccacactggatggtcggatttcatcctgatgggactcttcagacaatccaaacatccaatggccaatatcacctggatggccaaccacactggatggtcggatttcatcctgttgggactcttcagacaatccaaacatccagcactactttgtgtggtcatttttgtggttttcctgatggcgttgtctggaaatgctgtcctgatccttctgatacactgtgacgcccacctccacacccccatgtactttttcatcagtcaattgtctctcatggacatggcgtacatttctgtcactgtgcccaagatgctcctggaccaggtcatgggtgtgaataagatctcagcccctgagtgtgggatgcagatgttcttctacgtgacactagcaggttcagaatttttccttctagccaccatggcctatgaccgctacgtggccatctgccatcctctccgttaccctgtcctcatgaaccatagggtgtgtctcttcctgtcatcaggctgctggttcctgggctcagtggatggcttcacattcactcccatcaccatgaccttccccttccgtggatcccgggagattcatcatttcttctgtgaagttcctgctgtattgaatctctcctgctcagacacctcactctatgagattttcatgtacttgtgctgtgtcctcatgctcctcatccctgtggtgatcatttcaagctcctatttactcatcctcctcaccatccacgggatgaactcagcagagggccggaaaaaggcctttgccacctgctcctcccacctgactgtggtcatcctcttctatggggctgccatctacacctacatgctccccagctcctaccacacccctgagaaggacatgatggtatctgtcttctataccatcctcactccagtggtgaaccctttaatctatagtcttaggaataaggatgtcatgggggctctgaagaaaatgttaacagtggaacctgcctttcaaaaagctatggagtag

SEQ ID NO: 162204 - DNA, 1047 bp, Homo sapiens; identical to SEQ ID NO: 162203
  Payload ID: 11763
  Gene Symbol: OR2T4
  Gene Name: olfactory receptor, family 2, subfamily T, member 4
  Uniprot ID: Q8NH00
  ENST ID: ENST00000621754
  CDS Start-End: 1-1047

SEQ ID NO: 162205 - DNA, 1047 bp, Homo sapiens; identical to SEQ ID NO: 162203
  Payload ID: 11763
  Gene Symbol: OR2T4
  Gene Name: olfactory receptor, family 2, subfamily T, member 4
  Uniprot ID: Q8NH00
  ENST ID: ENST00000622637
  CDS Start-End: 1-1047

SEQ ID NO: 162206 - DNA, 948 bp, Homo sapiens
  Payload ID: 11764
  Gene Symbol: OR2T5
  Gene Name: olfactory receptor, family 2, subfamily T, member 5
  Uniprot ID: Q6IEZ7
  ENST ID: ENST00000366473
  CDS Start-End: 1-948
atggccaacatcaccaggatggccaaccacactggaaagttggatttcatcctcatgggactcttcagacgatccaaacatccagctctacttagtgtggtcatctttgtggttttcctgaaggcgttgtctggaaatgctgtcctgatccttctgatacactgtgacgcccacctccacagccccatgtactttttcatcagtcaattgtctctcatggacatggcgtacatttctgtcactgtgcccaagatgctcctggaccaggtcatgggtgtgaataaggtctcagcccctgagtgtgggatgcagatgttcctctatctgacactagcaggttcggaatttttccttctagccaccatggcctatgaccgctacgtggccatctgccatcctctccgttaccctgtcctcatgaaccatagggtctgtcttttcctggcatcgggctgctggttcctgggctcagtggatggcttcatgctcactcccatcaccatgagcttccccttctgcagatcctgggagattcatcatttcttctgtgaagtccctgctgtaacgatcctgtcctgctcagacacctcactctatgagaccctcatgtacctatgctgtgtcctcatgctcctcatccctgtgacgatcatttcaagctcctatttactcatcctcctcaccgtccacaggatgaactcagcagagggccggaaaaaggcctttgccacctgctcctcccacctgactgtggtcatcctcttctatggggctgccgtctacacctacatgctccccagctcctaccacacccctgagaaggacatgatggtatctgtcttctataccatcctcactccggtgctgaaccctttaatctatagtcttaggaataaggatgtcatgggggctctgaagaaaatgttaactgtgagattcgtcctttag

SEQ ID NO: 162207 - DNA, 1034 bp, Homo sapiens
  Payload ID: 11764
  Gene Symbol: OR2T5
  Gene Name: olfactory receptor, family 2, subfamily T, member 5
  Uniprot ID: Q6IEZ7
  ENST ID: ENST00000611272
  CDS Start-End: 26-973
tccttggtggcctaggtgaaacctcatggccaacatcaccaggatggccaaccacactggaaagttggatttcatcctcatgggactcttcagacgatccaaacatccagctctacttagtgtggtcatctttgtggttttcctgaaggcgttgtctggaaatgctgtcctgatccttctgatacactgtgacgcccacctccacagccccatgtactttttcatcagtcaattgtctctcatggacatggcgtacatttctgtcactgtgcccaagatgctcctggaccaggtcatgggtgtgaataaggtctcagcccctgagtgtgggatgcagatgttcctctatctgacactagcaggttcggaatttttccttctagccaccatggcctatgaccgctacgtggccatctgccatcctctccgttaccctgtcctcatgaaccatagggtctgtcttttcctggcatcgggctgctggttcctgggctcagtggatggcttcatgctcactcccatcaccatgagcttccccttctgcagatcctgggagattcatcatttcttctgtgaagtccctgctgtaacgatcctgtcctgctcagacacctcactctatgagaccctcatgtacctatgctgtgtcctcatgctcctcatccctgtgacgatcatttcaagctcctatttactcatcctcctcaccgtccacaggatgaactcagcagagggccggaaaaaggcctttgccacctgctcctcccacctgactgtggtcatcctcttctatggggctgccgtctacacctacatgctccccagctcctaccacacccctgagaaggacatgatggtatctgtcttctataccatcctcactccggtgctgaaccctttaatctatagtcttaggaataaggatgtcatgggggctctgaagaaaatgttaactgtgagattcgtcctttaggaaattataaagtaggaaatttggatataaagatttattttccttttctctacccatcaga

SEQ ID NO: 162208 - DNA, 948 bp, Homo sapiens; identical to SEQ ID NO: 162206
  Payload ID: 11764
  Gene Symbol: OR2T5
  Gene Name: olfactory receptor, family 2, subfamily T, member 5
  Uniprot ID: Q6IEZ7
  ENST ID: ENST00000620813
  CDS Start-End: 1-948

SEQ ID NO: 162209 - DNA, 927 bp, Homo sapiens
  Payload ID: 11765
  Gene Symbol: OR2T6
  Gene Name: olfactory receptor, family 2, subfamily T, member 6
  Uniprot ID: Q8NHC8
  ENST ID: ENST00000355728
  CDS Start-End: 1-927
atgaatgaaaacaatgaaaccttgaccagaggctttaccctcatggggctcttcactcacaataaatgctcaggattctttttcggtgtcatttgtgccgtcttcttcatggccatgatagctaatggggtcatgatcttcctgattaacatagaccctcatctccacacccccatgtacttcctcctcagccacctctccgtcattgacacattatacatctccaccattgtgcccaagatgctggtagattatctcatgggcgaggggaccatctctttcatcgcctgcactgctcagtgctttctctacatgggctttatgggggctgaattcttcctgctggggctcatggcctatgaccgctacgtggccatctgcaacccactgcgctatcctgtcctcatcagctggcgggtctgctggatgatcctggccagctcttggttcggtggggctttggacagttttctcctcacccccattaccatgagtctcccgttctgtgcctctcaccaaatcaatcactttttctgtgaggcacccaccatgctgaggctggcctgtggggacaaaaccacctatgaaacagtgatgtatgtgtgctgcgttgcaatgctgctgatccccttctcggtggtgactgcatcctacaccaggattctcatcacagtgcatcagatgacatcggctgaagggaggaagaaggcctttgccacctgctcttcacacatgatggtggtgacattgttctatggggctgccttgtatacgtatacgcttccccaatcttaccacaccccaatcaaagataaggtcttctctgccttttataccatcctcacacccttattaaaccctctcatctacagtctgaggaacagggatgtgatgggtgccttgaagagagttgtggcaagatgttag

SEQ ID NO: 162210 - DNA, 927 bp, Homo sapiens; identical to SEQ ID NO: 162209
  Payload ID: 11765
  Gene Symbol: OR2T6
  Gene Name: olfactory receptor, family 2, subfamily T, member 6
  Uniprot ID: Q8NHC8
  ENST ID: ENST00000612137
  CDS Start-End: 1-927

SEQ ID NO: 162211 - DNA, 927 bp, Homo sapiens; identical to SEQ ID NO: 162209
  Payload ID: 11765
  Gene Symbol: OR2T6
  Gene Name: olfactory receptor, family 2, subfamily T, member 6
  Uniprot ID: Q8NHC8
  ENST ID: ENST00000621336
  CDS Start-End: 1-927

SEQ ID NO: 162212 - DNA, 927 bp, Homo sapiens
  Payload ID: 11766
  Gene Symbol: OR2T7
  Gene Name: olfactory receptor, family 2, subfamily T, member 7
  Uniprot ID: P0C7T2
  ENST ID: ENST00000626837
  CDS Start-End: 1-927
atgccgactttatccttctgggtttgttcagcaacgcccgtttcccctggcttctttgccctcattctcctggtctttgtgacctccatagccagcaacgtggtcaagatcattctcatccacatagactcccgcctccacacccccatgtacttcctgctcagccagctctccctcagggacatcctgtatatttccaccattgtgcccaaaatgctggtcgaccaggtgatgagccagagagccatttcctttgctggatgcactgcccaacacttcctctacttgaccttagcaggggctgagttcttcctcctaggactcatgtcctgtgatcgctacgtagccatctgcaaccctctgcactatcctgacctcatgagccgcaagatctgctggttgattgtggcggcagcctggctgggagggtctatcgatggtttcttgctcacccccgtcaccatgcagttccccttctgtgcctctcgggagatcaaccacttcttctgcgaggtgcctgcccttctgaagctctcctgcacggacacatcagcctacgagacagccatgtatgtctgctgtattatgatgctcctcatccctttctctgtgatctcgggctcttacacaagaattctcattactgtttataggatgagcgaggcagaggggaggcgaaaggctgtggccacctgctcctcacacatggtggttgtcagcctcttctatggggctgccatgtacacatacgtgctgcctcattcttaccacacccctgagcaggacaaagctgtatctgccttctacaccatcctcactcccatgctcaatccactcatttacagccttaggaacaaggatgtcacgggggccctacagaaggttgttgggaggtgtgtgtcctcaggaaaggtaaccactttctaa

SEQ ID NO: 162213 - DNA, 927 bp, Homo sapiens; identical to SEQ ID NO: 162212
  Payload ID: 11766
  Gene Symbol: OR2T7
  Gene Name: olfactory receptor, family 2, subfamily T, member 7
  Uniprot ID: P0C7T2
  ENST ID: ENST00000626892
  CDS Start-End: 1-927

SEQ ID NO: 162214 - DNA, 939 bp, Homo sapiens
  Payload ID: 11767
  Gene Symbol: OR2T8
  Gene Name: olfactory receptor, family 2, subfamily T, member 8
  Uniprot ID: A6NH00
  ENST ID: ENST00000319968
  CDS Start-End: 1-939
atggaaaatgggagctatacctcttatttcattctcctaggactctttaaccacaccagagcccaccaagtcctcttcatgatggttctgagtatcgttttgacctccctgtttggcaattccctcatgattctcctgattcactgggaccaccggctccacacgcccatgtacttcctcctgagccaactttccctcatggacgtgatgctggtttccaccactgtgcccaaaatggcggctgactacttgaccggaagtaaggccatctcccgcgctggctgtggtgcgcagatcttcttcctccccacactgggtggtggagagtgcttcctcttagcagccatggcctatgaccgctatgcggctgtctgccacccactccgatatcccactctcatgagctggcagctgtgcctgaggatgaacctgtcgtgttggctcctgggtgcagctgacgggctcctgcaggctgttgctaccctgagcttcccatattgcggtgcacacgagatcgatcacttcttctgcgagacccccgtgctggtgcgtttggcttgtgctgacacttcagtcttcgaaaacgccatgtacatctgctgtgtgttaatgctcctggtccccttttccctcatcctgtcctcctatggtctcatcctcgctgctgttctgcacatgcgctctacagaagcccgcaagaaggcctttgccacctgctcttcacatgtggctgtggtgggactcttttatggagctgccatttttacctatatgagacccaaatcccacaggtccactaaccacgacaaggttgtgtcagccttctatactatgttcacccctttactaaaccccctcatctacagtgtgaagaacagtgaggtgaagggagccctgacaaggtgtatgggtcggtgtgtggccttaagtcgtgaataa

SEQ ID NO: 162215 - DNA, 948 bp, Homo sapiens
  Payload ID: 11768
  Gene Symbol: OR2V1
  Gene Name: olfactory receptor, family 2, subfamily V, member 1
  Uniprot ID: Q8NHB1
  ENST ID: ENST00000329365
  CDS Start-End: 1-948
atgggaagatgggtgaaccagtcctacacagatggcttcttcctcttgggcatcttttcccacagccagactgaccttgtcctcttctctgcagttatggtggtcttcacagtggccctctgtgggaatgtcctcctcatcttcctcatctacctggacgctggacttcacacccccatgtacttcttcctcagccagctctccctcatggacctcatgttggtctgtaacattgtgccaaagatggcagccaacttcctgtctggcaggaagtccatctcctttgtgggctgtggcatacaaattggcttttttgtctctcttgtgggatctgaggggctcttgctgggactcatggcttatgaccgctacgtggccgttagccacccacttcactatcccatcctcatgaatcagagggtctgtctccagattactgggagctcctgggcctttgggataatagatggagtgattcagatggtggcagccatgggcttaccttactgtggctcaaggagcgtggatcactttttctgtgaggtacaagctttattgaagctggcctgtgcagacacttccctttttgacaccctcctctttgcttgctgtgtcttcatgcttctccttcccttctccatcatcatggcctcctatgcttgcatcctaggggctgtgctccgaatacgctctgctcaggcctggaaaaaagccctggccacctgctcctcccacctaacagctgtcaccctcttctatggggcagccatgttcatgtacctgaggcctaggcgctaccgggcccctagccatgacaaggtggcctctatcttctacacagtccttactcccatgctgaaccccctcatttacagcttgaggaatggggaggtgatgggggcactgaggaaggggctggaccgctgcaggattggcagccagcactga

SEQ ID NO: 162216 - DNA, 948 bp, Homo sapiens
  Payload ID: 11769
  Gene Symbol: OR2V2
  Gene Name: olfactory receptor, family 2, subfamily V, member 2
  Uniprot ID: Q96R30
  ENST ID: ENST00000328275
  CDS Start-End: 1-948
atggagacgtgggtgaaccagtcctacacagatggcttcttcctcttaggcatcttctcccacagtactgctgaccttgtcctcttctccgtggttatggcggtcttcacagtggccctctgtgggaatgtcctcctcatcttcctcatctacatggaccctcaccttcacacccccatgtacttcttcctcagccagctctccctcatggacctcatgttggtctgtaccaatgtgccaaagatggcagccaacttcctgtctggcaggaagtccatctcctttgtgggctgtggcatacaaattggcctctttgtctgtcttgtgggatctgaggggctcttgctgggactcatggcttatgaccgctatgtggccattagccacccacttcactatcccatcctcatgaatcagagggtctgtctccagattactgggagctcctgggcctttgggataatcgatggcttgatccagatggtggtagtaatgaatttcccctactgtggcttgaggaaggtgaaccatttcttctgtgagatgctatccttgttgaagctggcctgtgtagacacatccctgtttgagaaggtgatatttgcttgctgtgtcttcatgcttctcttcccattctccatcatcgtggcctcctatgctcacattctagggactgtgctgcaaatgcactctgctcaggcctggaaaaaggccctggccacctgctcctcccacctgacagctgtcaccctcttctatggggcagccatgttcatctacctgaggcctaggcactaccgggcccccagccatgacaaggtggcctctatcttctacacggtccttactcccatgctcaaccccctcatttacagcttgaggaacagggaggtgatgggggcactgaggaaggggctggaccgctgcaggatcggcagccagcactga

SEQ ID NO: 162217 - DNA, 1028 bp, Homo sapiens
  Payload ID: 11770
  Gene Symbol: OR2W1
  Gene Name: olfactory receptor, family 2, subfamily W, member 1
  Uniprot ID: Q9Y3N9
  ENST ID: ENST00000377175
  CDS Start-End: 66-1028
ccttgtatcatcatctacctcctcctcctccttttctcactctaggatttagacattgaaggactatggaccaaagcaattatagttctttacatggttttattctgcttggcttctctaaccatccaaaaatggagatgatcctgtcaggagttgtcgccatcttctacttaattacattggtgggtaacacagccatcattcttgcatctctcctggattcccagcttcatacaccaatgtactttttcctcagaaatttatctttcctagatctatgtttcacaaccagcatcatccctcagatgctggtcaacttgtggggacctgataagaccatcagctatgtgggttgtatcatccaactctatgtttacatgtggttgggctcagttgagtgccttctcctggctgttatgtcctatgatcgttttacagctatatgtaagcccttgcattattttgtagtcatgaacccacatctatgtctaaagatgattatcatgatctggagtattagtttggccaattctgtagtattatgtacactcactctgaatttgcccacatgtggaaacaacattctggatcatttcttgtgtgagttgccagctctggtcaagatagcttgtgtagacaccacaacagttgaaatgtctgttttcgctttaggcattataattgtcctcacacctctcatccttattcttatatcctatggctacattgccaaagctgtgctgagaacgaagtcaaaagcaagccagcgaaaagcaatgaatacctgtggatctcatcttactgtagtgtctatgttctatggaactattatctacatgtacctgcaaccaggtaacagggcttccaaagaccagggcaagttcctcaccctcttttacaccgtcatcactccaagtctcaacccgctcatttacaccttaagaaataaggacatgaaggatgccctgaagaaactgatgagatttcaccacaaatctacaaaaataaagaggaattgcaagtcatag

SEQ ID NO: 162218 - DNA, 1028 bp, Homo sapiens; identical to SEQ ID NO: 162217
  Payload ID: 11770
  Gene Symbol: OR2W1
  Gene Name: olfactory receptor, family 2, subfamily W, member 1
  Uniprot ID: Q9Y3N9
  ENST ID: ENST00000383654
  CDS Start-End: 66-1028

SEQ ID NO: 162219 - DNA, 1028 bp, Homo sapiens; identical to SEQ ID NO: 162217
  Payload ID: 11770
  Gene Symbol: OR2W1
  Gene Name: olfactory receptor, family 2, subfamily W, member 1
  Uniprot ID: Q9Y3N9
  ENST ID: ENST00000411447
  CDS Start-End: 66-1028

SEQ ID NO: 162220 - DNA, 1028 bp, Homo sapiens; identical to SEQ ID NO: 162217
  Payload ID: 11770
  Gene Symbol: OR2W1
  Gene Name: olfactory receptor, family 2, subfamily W, member 1
  Uniprot ID: Q9Y3N9
  ENST ID: ENST00000421766
  CDS Start-End: 66-1028

SEQ ID NO: 162221 - DNA, 1028 bp, Homo sapiens; identical to SEQ ID NO: 162217
  Payload ID: 11770
  Gene Symbol: OR2W1
  Gene Name: olfactory receptor, family 2, subfamily W, member 1
  Uniprot ID: Q9Y3N9
  ENST ID: ENST00000420540
  CDS Start-End: 66-1028

SEQ ID NO: 162222 - DNA, 1028 bp, Homo sapiens; identical to SEQ ID NO: 162217
  Payload ID: 11770
  Gene Symbol: OR2W1
  Gene Name: olfactory receptor, family 2, subfamily W, member 1
  Uniprot ID: Q9Y3N9
  ENST ID: ENST00000439723
  CDS Start-End: 66-1028

SEQ ID NO: 162223 - DNA, 1028 bp, Homo sapiens; identical to SEQ ID NO: 162217
  Payload ID: 11770
  Gene Symbol: OR2W1
  Gene Name: olfactory receptor, family 2, subfamily W, member 1
  Uniprot ID: Q9Y3N9
  ENST ID: ENST00000446776
  CDS Start-End: 66-1028

SEQ ID NO: 162224 - DNA, 1028 bp, Homo sapiens; identical to SEQ ID NO: 162217
  Payload ID: 11770
  Gene Symbol: OR2W1
  Gene Name: olfactory receptor, family 2, subfamily W, member 1
  Uniprot ID: Q9Y3N9
  ENST ID: ENST00000421027
  CDS Start-End: 66-1028

SEQ ID NO: 162225 - DNA, 945 bp, Homo sapiens
  Payload ID: 11771
  Gene Symbol: OR2W3
  Gene Name: olfactory receptor, family 2, subfamily W, member 3
  Uniprot ID: Q7Z3T1
  ENST ID: ENST00000360358
  CDS Start-End: 1-945
atggatggaaccaatggcagcacccaaacccatttcatcctactgggattctctgaccgaccccatctggagaggatcctctttgtggtcatcctgatcgcgtacctcctgaccctcgtaggcaacaccaccatcatcctggtgtcccggctggacccccacctccacacccccatgtacttcttcctcgcccacctttccttcctggacctcagtttcaccaccagctccatcccccagctgctctacaaccttaatggatgtgacaagaccatcagctacatgggctgtgccatccagctcttcctgttcctgggtctgggtggtgtggagtgcctgcttctggctgtcatggcctatgaccggtgtgtggctatctgcaagcccctgcactacatggtgatcatgaaccccaggctctgccggggcttggtgtcagtgacctggggctgtggggtggccaactccttggccatgtctcctgtgaccctgcgcttaccccgctgtgggcaccacgaggtggaccacttcctgcgtgagatgcccgccctgatccggatggcctgcgtcagcactgtggccatcgaaggcaccgtctttgtcctggcggtgggtgttgtgctgtcccccttggtgtttatcctgctctcttacagctacattgtgagggctgtgttacaaattcggtcagcatcaggaaggcagaaggccttcggcacctgcggctcccatctcactgtggtctcccttttctatggaaacatcatctacatgtacatgcagccaggagccagttcttcccaggaccagggcatgttcctcatgctcttctacaacattgtcacccccctcctcaatcctctcatctacaccctcagaaacagagaggtgaagggggcactgggaaggttgcttctggggaagagagagctaggaaaggagtaa

SEQ ID NO: 162226 - DNA, 1058 bp, Homo sapiens
  Payload ID: 11772
  Gene Symbol: OR2Y1
  Gene Name: olfactory receptor, family 2, subfamily Y, member 1
  Uniprot ID: Q8NGV0
  ENST ID: ENST00000307832
  CDS Start-End: 42-977
ggcattgcacttccttctgctgttcagacaggcaaaaggccatgggaagtttcaacaccagttttgaagatggcttcattttggtgggattctcagattggccgcaactggagcccatcctgtttgtctttatttttattttctactccctaactctctttggcaacaccatcatcatcgctctctcctggctagaccttcggctgcacacacctatgtacttctttctctctcatctgtccctcctggacctctgcttcaccaccagcaccgtgccccagctcctgatcaacctttgcggggtggaccgcaccatcacccgtggagggtgtgtggctcagctcttcatctacctagccctgggctccacagagtgtgtgctcctggtggtgatggcctttgaccgctatgctgctgtctgtcgtccactccactacatggccatcatgcacccccatctctgccagaccctggctatcgcctcctggggtgcgggtttcgtgaactctctgatccagacaggtctcgcaatggccatgcctctctgtggccatcgactgaatcacttcttctgtgagatgcctgtatttctgaagttggcttgtgcggacacagaaggaacagaggccaagatgtttgtggcccgagtcatagtcgtggctgttcctgcagcacttattctaggctcctatgtgcacattgctcatgcagtgctgagggtgaagtcaacggctgggcgcagaaaggcttttgggacttgtgggtcccacctcctagtagttttccttttttatggctcagccatctacacatatctccaatccatccacaattattctgagcgtgagggaaaatttgttgcccttttttatactataattacccccattctcaatcctctcatttatacactaagaaacaaggacgtgaagggggctctgtggaaagtactatggaggggcagggactcagggtaggaggtgaaaaaatgagcagtaaaattttctgtaatagctcttcaatcacagatctttccctgttccttggagggcagttgg

SEQ ID NO: 162227 - DNA, 1056 bp, Homo sapiens
  Payload ID: 11773
  Gene Symbol: OR2Z1
  Gene Name: olfactory receptor, family 2, subfamily Z, member 1
  Uniprot ID: Q8NG97
  ENST ID: ENST00000324060
  CDS Start-End: 76-1020
ttatttgccaccccatgcaggcttcttgccatagttcagctgttcttcctgcagctaaagtgcattgtgtaaaacatgggggatgtgaatcagtcggtggcctcagacttcattctggtgggcctcttcagtcactcaggatcacgccagctcctcttctccctggtggctgtcatgtttgtcataggccttctgggcaacaccgttcttctcttcttgatccgtgtggactcccggctccacacacccatgtacttcctgctcagccagctctccctgtttgacattggctgtcccatggtcaccatccccaagatggcatcagactttctgcggggagaaggtgccacctcctatggaggtggtgcagctcaaatattcttcctcacactgatgggtgtggctgagggcgtcctgttggtcctcatgtcttatgaccgttatgttgctgtgtgccagcccctgcagtatcctgtacttatgagacgccaggtatgtctgctgatgatgggctcctcctgggtggtaggtgtgctcaacgcctccatccagacctccatcaccctgcattttccctactgtgcctcccgtattgtggatcacttcttctgtgaggtgccagccctactgaagctctcctgtgcagatacctgtgcctacgagatggcgctgtccacctcaggggtgctgatcctaatgctccctctttccctcatcgccacctcctacggccacgtgttgcaggctgttctaagcatgcgctcagaggaggccagacacaaggctgtcaccacctgctcctcgcacatcacggtagtggggctcttttatggtgccgccgtgttcatgtacatggtgccttgcgcctaccacagtccacagcaggataacgtggtttccctcttctatagccttgtcacccctacactcaacccccttatctacagtctgaggaatccggaggtgtggatggctttggtcaaagtgcttagcagagctggactcaggcaaatgtgctgactacatagaaactgctggtgagattccagcggtcct

SEQ ID NO: 162228 - DNA, 948 bp, Homo sapiens
  Payload ID: 11774
  Gene Symbol: OR3A1
  Gene Name: olfactory receptor, family 3, subfamily A, member 1
  Uniprot ID: P47881
  ENST ID: ENST00000323404
  CDS Start-End: 1-948
atgcagccagaatctggggccaatggaacagtcattgctgagttcatcctgctgggcttgctggaggcgccagggctgcagccagttgtctttgtgctcttcctctttgcctacctggtcacggtcaggggcaacctcagcatcctggcagctgtcttggtggagcccaaactccacacccccatgtacttcttcctggggaacctatcagtgctggatgttgggtgcatcagcgtcactgttccatcaatgttgagtcgtctcctgtcccgcaagcgtgcagttccctgtggggcctgccttacccagctcttcttcttccatctgttcgttggagtggactgcttcctgctgaccgccatggcctatgaccgattcctggccatctgccggcccctcacctacagcacccgcatgagtcagacagtccagaggatgttggtggctgcgtcctgggcttgtgctttcaccaacgcactgacccacactgtggccatgtccacgctcaacttctgtggccccaatgtgatcaatcacttctactgtgacctcccacagctcttccagctctcctgctccagcacccaactcaatgagctgctgctttttgctgtgggttttataatggcaggtacccccatggctctcattgtcatctcctatatccacgtggcagctgcagtcctgcgaattcgctctgtagagggcaggaagaaagccttctccacatgtggctcccacctcactgtggttgccatattctatggttcaggtatctttaactatatgcgactgggttcaaccaagctttcagacaaggataaagctgttggaattttcaacactgtcatcaatcccatgctgaacccaatcatctacagcttcagaaaccctgatgtgcagagtgccatctggaggatgctcacagggaggcggtcactggcttga

SEQ ID NO: 162229 - DNA, 966 bp, Homo sapiens
  Payload ID: 11774
  Gene Symbol: OR3A1
  Gene Name: olfactory receptor, family 3, subfamily A, member 1
  ENST ID: ENST00000615105
  CDS Start-End: 1-966
gtttctttgcaggaactcatgcagccagaatctggggccaatggaacagtcattgctgagttcatcctgctgggcttgctggaggcgccagggctgcagccagttgtctttgtgctcttcctctttgcctacctggtcacggtcaggggcaacctcagcatcctggcagctgtcttggtggagcccaaactccacacccccatgtacttcttcctggggaacctatcagtgctggatgttgggtgcatcagcgtcactgttccatcaatgttgagtcgtctcctgtcccgcaagcgtgcagttccctgtggggcctgccttacccagctcttcttcttccatctgttcgttggagtggactgcttcctgctgaccgccatggcctatgaccgattcctggccatctgccggcccctcacctacagcacccgcatgagtcagacagtccagaggatgttggtggctgcgtcctgggcttgtgctttcaccaacgcactgacccacactgtggccatgtccacgctcaacttctgtggccccaatgtgatcaatcacttctactgtgacctcccacagctcttccagctctcctgctccagcacccaactcaatgagctgctgctttttgctgtgggttttataatggcaggtacccccatggctctcattgtcatctcctatatccacgtggcagctgcagtcctgcgaattcgctctgtagagggcaggaagaaagccttctccacatgtggctcccacctcactgtggttgccatattctatggttcaggtatctttaactatatgcgactgggttcaaccaagctttcagacaaggataaagctgttggaattttcaacactgtcatcaatcccatgctgaacccaatcatctacagcttcagaaaccctgatgtgcagagtgccatctggaggatgctcacagggaggcggtcactggcttga

SEQ ID NO: 162230 - DNA, 1076 bp, Homo sapiens
  Payload ID: 11775
  Gene Symbol: OR3A2
  Gene Name: olfactory receptor, family 3, subfamily A, member 2
  Uniprot ID: P47893
  ENST ID: ENST00000408891
  CDS Start-End: 40-1005
taagtgaactgagtgaactgatacctcccctgctgggacatgtccttacagaaactcatggagccagaagctgggaccaataggaccgctgttgctgagttcattctactgggcctagtgcaaacagaagagatgcagccagttgtctttgtgctcctcctctttgcctatctggtcacaactgggggcaacctcagcatcctggcagccgtcttggtggagcccaaactccacgcccccatgtacttcttcctggggaacctgtcagtgctggatgtcggatgtatcactgtcactgttcctgcaatgttgggtcgtctcttgtcccacaagtccacaatttcctatgacgcctgcctctcccagctcttcttcttccaccttctggctgggatggactgcttcctgctgaccgccatggcctatgaccgactcctggccatctgccagcccctcacctacagcacccgcatgagtcagacagtccagaggatgttggtggctgcgtccttggcttgtgccttcaccaacgcactgacccacactgtggccatgtccacgctcaacttctgtggccccaatgaggtcaatcacttctactgtgacctcccacagctcttccagctctcctgctccagcacccaactcaatgagctgctgctctttgctgtgggtttcatcatggcaggcacacctttggttctcatcatcactgcctacagccacgtggcagctgcagttctacgaatccgttcagtggagggccgaaagaaggccttctccacgtgtggctcccacctcaccgtggtttgtcttttctttggaagaggtatcttcaactacatgagactgggttcagaggaggcttcagacaaggataaaggggttggagttttcaacactgttatcaaccctatgctgaaccctcttatctacagcctcagaaaccctgatgttcagggtgctctgtggcaaatatttttggggaggagatcactgacctgagaggtaatggggtccctcctttcctgccttttctggactgaggaaaatttcccatgaagacagtaaccagg

SEQ ID NO: 162231 - DNA, 966 bp, Homo sapiens
  Payload ID: 11776
  Gene Symbol: OR3A3
  Gene Name: olfactory receptor, family 3, subfamily A, member 3
  Uniprot ID: P47888
  ENST ID: ENST00000291231
  CDS Start-End: 1-966
atgtccttacagaaactcatggagccagaagctgggaccaataggaccgctgttgctgagttcattctactgggcctagtgcaaacagaagagatgcagccagttgtctttgtgctcctcctctttgcctatctggtcacaactgggggcaacctcagcatcctggcagccgtcttggtggagcccaaactccacgcccccatgtacttcttcctggggaacctgtcagtgctggatgtcggatgtatcactgtcactgttcctgcaatgttgggtcgtctcttgtcccacaagtccacaatttcctatgacgcctgcctctcccagctcttcttcttccaccttctggctgggatggactgcttcctgctgaccgccatggcctatgaccgactcctggccatctgccagcccctcacctacagcacccgcatgagtcagacagtccagaggatgttggtggctgcgtcctgggcttgtgccttcaccaacgcactgacccacactgtggccatgtccacgctcaacttctgtggccccaatgaggtcaatcacttctactgtgacctcccacagctcttccagctctcctgctccagcacccaactcaatgagctgctgctctttgtagcagcagccttcatggctgtggcacccttggtcttcatcagtgtgtcctatgcccatgtggtagctgctgtgctgcaaatccgctctgctgagggcagaaagaaggccttctccacatgtggctcccacctcactgtggtgggcatcttctatgggacaggtgtcttcagctacatgaggctgggttcagtggaatcttcagacaaggataagggggttggggttttcatgactgtgatcaaccccatgctgaacccacttatctacagcctcagaaatactgatgttcagggcgctctgtgtcagctacttgtggggaagcgatcactgacctga

SEQ ID NO: 162232 - DNA, 1035 bp, Homo sapiens
  Payload ID: 11777
  Gene Symbol: OR4A15
  Gene Name: olfactory receptor, family 4, subfamily A, member 15
  Uniprot ID: Q8NGL6
  ENST ID: ENST00000314706
  CDS Start-End: 1-1035
atggagcttctgacaaataatctcaaatttatcactgacccttttgtttgtaggctccgacacctgagtccaacaccttcagaagaacacatgaaaaataagaacaatgtgactgaatttatcctcttagggctcacacagaaccctgaggggcaaaaggttttatttgtcacattcttactaatctacatggtgacgataatgggcaacctgcttatcatagtgaccatcatggccagccagtccctgggttcccccatgtacttttttctggcttctttatcattcatagataccgtctattctactgcatttgctcccaaaatgattgttgacttgctctctgagaaaaagaccatttcctttcagggttgtatggctcaactttttatggatcatttatttgctggtgctgaagtcattcttctggtggtaatggcctatgatcgatacatggccatctgtaagcctcttcatgaattgatcaccatgaatcgtcgagtctgtgttcttatgctgttggcggcctggattggaggctttcttcactcattggttcaatttctctttatttatcagctccctttctgtggacccaatgtcattgacaacttcctgtgtgatttgtatcccttattgaaacttgcttgcaccaatacctatgtcactgggctttctatgatagctaatggaggagcgatttgtgctgtcaccttcttcactatcctgctttcctatggggtcatattacactctcttaagactcagagtttggaagggaaacgaaaagctttctacacctgtgcatcccacgtcactgtggtcattttattctttgtcccctgtatcttcttgtatgcaaggcccaattctacttttcccattgataaatccatgactgtagttctaacttttataactcccatgctgaacccactaatctataccctgaagaatgcagaaatgaaaagtgccatgaggaaactttggagtaaaaaagtaagcttagctgggaaatggctgtatcactcatga

SEQ ID NO: 162233 - DNA, 987 bp, Homo sapiens
  Payload ID: 11778
  Gene Symbol: OR4A16
  Gene Name: olfactory receptor, family 4, subfamily A, member 16
  Uniprot ID: Q8NH70
  ENST ID: ENST00000314721
  CDS Start-End: 1-987
atgagaccaagcagcaatgttacagaatttgtcctcctgggcctcactcaagatcctgatgtgaaaaaaacattatttgtcatgtttttactcatatacattgtgacaatggtgggaaacctcctcatttgggtgactactattggcagcccctccttgggctccctaatgtacttcttccttgcctacttgtcacttatggatgccatatattccactgccatgtcacccaaattgatgatagacttactctgtgataaaatcgctatttccttgtcagcttgcatgggtcagctcttcatagaacacttacttggtggtgcagaggtcttccttttggtggtgatggcctatgatcgctatgtggctatctctaagccgctgcactatttgaacatcatgaatcgactggtttgcatccttctgttggtggtggccatgattggaggttttgtgcactctgtggttcaaattgtctttctgtacagtctaccaatctgtggccccaatgttattgaccactctgtctgtgacatgtacccattgttggaactgttgtgccttgacacctactttataggactcactgtggttgccaatggtggaataatttgtatggtcatctttacctttctgctaatctcctgtggagtcatcctaaacttccttaaaacttacagtcaggaagagaggcataaagccctgcctacctgcatctcccacatcattgtggttgccctcgtttttgttccctgtatttttatgtatgttagacccgtttccaactttccctttgataaattaatgactgtgttttattcaattatcacactcatgttgaatcctttaatatactcgttgagacaatcagagatgaaaaatgctatgaaaaatctctggtgtgaaaagttaagtatagttagaaaaagagtatctcccacactgaacatatttattcctagttctaaggcaacaaataggcggtaa

SEQ ID NO: 162234 - DNA, 1064 bp, Homo sapiens
  Payload ID: 11779
  Gene Symbol: OR4A47
  Gene Name: olfactory receptor, family 4, subfamily A, member 47
  Uniprot ID: Q6IF82
  ENST ID: ENST00000446524
  CDS Start-End: 77-1006
tgcatttaaagatttccccccttgttttataggtaaactgcttatatgatctgaagtaagcagctgtaaagaatacatggagccaaggaaaaatgtgactgactttgtcctcttgggcttcacacagaatccaaaggagcagaaagtactttttgttatgttcttgctcttctacattttgaccatggtgggcaacctgctcattgtagtgaccgtaactgtcagtgagaccctgggctcaccaatgtacttctttcttgctggcttatcatttatagatatcatttattcttcatccatttcccccagattgatttcaggcttgttctttgggaataattccatatccttccaatcttgcatggcccagctctttatcgagcacattttcggtgggtcagaggtctttctcctgttggtgatggcctatgactgctatgtggccatctgtaagcccttgcattatttggttatcatgagacaatgggtgtgtgttgtgctgctggtagtgtcctgggttggaggatttctgcactcagtatttcaacttagcattatttatgggctcccattctgtggccccaatgtcattgatcattttttctgtgacatgtatcccttattgaaactggtctgcactgacacccatgctattggcctcttagtggtggccaatggaggactggcttgcactattgtgtttctgctcttactcatctcttatggtgtcatcttgcactctttaaagaaccttagtcagaaagggaggcaaaaagccctctcaacctgcagttcccacatgactgtggttgtcttcttctttgttccttgtatttttatgtatgctagacctgctaggaccttccccattgacaaatcagtgagtgtgttttatacagtcataaccccaatgctgaaccccttaatctacactctgagaaattctgagatgacaagtgctatgaagaagctctggagaagagacctcatatcaagtagtacataagtgagttacccaccaggaagagagtcatttgactttacagcctttctccttgggaccc

SEQ ID NO: 162235 - DNA, 948 bp, Homo sapiens
  Payload ID: 11780
  Gene Symbol: OR4A5
  Gene Name: olfactory receptor, family 4, subfamily A, member 5
  Uniprot ID: Q8NH83
  ENST ID: ENST00000319760
  CDS Start-End: 1-948
atgagacagaataacaatattacagaatttgtcctcctgggcttttctcaggatcctggtgtgcaaaaagcattatttgtcatgtttttactcacatacttggtgacagtggtggggaacctgctcattgtggtggatattattgccagcccttccttgggttccccaatgtatttcttccttgcctgcctgtcatttatagatgctgcatattccactaccatttctcccaagttaattgtaggcttattctgtgataaaaagactatttccttccaaggttgcatgggccagctatttatagaccatttctttggtggggctgaggtcttccttctggtggtgatggcctgtgatcgctatgtggccatctgtaagccactgcactatttgaccatcatgaatcgacaggtttgcttccttctgttggtggtggccatgattggaggttttgtacattctgcgtttcaaattgttgtgtacagtctccctttctgtggtcccaatgtcattgttcatttcagttgtgacatgcacccattactggaactggcatgcactgacacctactttataggcctcactgttgttgtcaatagtggagcaatctgtatggtcattttcaaccttctgttaatctcctatggagtcatcctaagctcccttaaaacttacagtcaggaaaagaggggtaaagccttgtctacctgcagctccggcagtaccgttgttgtcctcttttttgtaccctgtattttcatatatgttagacctgtttcaaactttcctactgataagttcatgactgtgttttataccattatcacacacatgctgagtcctttaatatatacgttgagaaattcagagatgagaaatgctatagaaaaactcttgggtaaaaagttaactatatttattataggaggagtgtccgtcctcatgtag

SEQ ID NO: 162236 - DNA, 945 bp, Homo sapiens
  Payload ID: 11781
  Gene Symbol: OR4A8
  Gene Name: olfactory receptor, family 4, subfamily A, member 8 (gene/pseudogene)
  ENST ID: ENST00000418689
  CDS Start-End: 1-945
atgaggcagaataacaatattacagaatttgtcctcctgggcttctctcagtatcctgatgtgcaaaatgcattatttgtcatgtttttactcatatatattgtgactatggtggggaacctgctcattgtggtgtctattattgccagtccctttttgggctccccagtgtacttcttccttgcctgcctgtcatttatagatgctgtgtattccaccaccatttctcctgtattgattgtagacttactctgtgataaaaagactatttccttcccagcttgcatgggtcagctatttatagagcacttgtttggtgatactgacgtcttccttctggtggtgatggcctatgatcgctacgtggccacctgtaagccactgcgctatttgaccatcatgaattgacaggtttgcatccttctgttggtggtggctgtgactggaggttttctgcattctgtgtttcaaattttagttgtgtacagtctccctttctgtggccccaatgtcatttatcactttttctgtaacatataccctttattggacctggaatgcactgacacctacttcgtaggcctcgctgtggttttcaatggtggagcaatctgtatggtcatcttcacccttctactaatctcctatggggtcatcctaaactcccttaaaacttatagtccggaagggaggcataaagctccgtttatctgcagctcccactttatcatggttatcttgttttttgttccctgtattttcttatatgttagacccgtttcaaactttcctattgataaattcctgactgtgttttattcagttatcacacccaagttgaatccttttatatacatgttgagaaattcagagatgagaaatgctatagaaaatctcttgggataccaaagtgggaagacaggatttagatgctccaagctcaat

SEQ ID NO: 162237 - DNA, 971 bp, Homo sapiens
  Payload ID: 11782
  Gene Symbol: OR4B1
  Gene Name: olfactory receptor, family 4, subfamily B, member 1
  Uniprot ID: Q8NGF8
  ENST ID: ENST00000309562
  CDS Start-End: 19-948
cttctctgagtggaatccatggccagtacaagtaatgtgactgagttgattttcactggccttttccaggatccagctgtgcagagtgtatgctttgtggtgtttctccccgtgtaccttgccacggtggtgggcaatggcctcatcgttctgacggtcagtatcagcaagagtctggattctcccatgtacttcttccttagctgcctgtccttggtggagatcagttattcctccactatcgcccctaaattcatcatagacttacttgccaagattaaaaccatctctctggaaggctgtctgactcagatattcttcttccacttctttggggttgctgagatccttttgattgtggtgatggcctatgattgctacgtggccatttgcaagcctcttcattatatgaacattatcagtcgtcaactgtgtcaccttctggtggctggttcctggctggggggcttttgtcactccataattcagattctcgttatcatccaattgcccttctgtggtcccaatgtgattgaccactatttctgtgacctccagcctttattcaagcttgcctgcactgacaccttcatggagggggttattgtgttggccaacagtggattattctctgtcttctccttcctcatcttggtgtcctcttatattgtcattctggtcaacttgaggaaccattctgcagaggggaggcacaaagccctctccacctgtgcttctcacatcacagtggtcatcttgttttttggacctgctatcttcctctacatgcgaccttcttccactttcactgaagataaacttgtggctgtattctacacggtcatcacccccatgctgaaccccatcatttacacactcaggaatgcagaggtgaaaatcgccataagaagattgtggagcaaaaaggagaatccagggagggagtgaaaaaagagcttagggatgaaaaa

SEQ ID NO: 162238 - DNA, 1045 bp, Homo sapiens
  Payload ID: 11783
  Gene Symbol: OR4C11
  Gene Name: olfactory receptor, family 4, subfamily C, member 11
  Uniprot ID: Q6IEV9
  ENST ID: ENST00000302231
  CDS Start-End: 26-958
tggtttcttcacatcaactgaaacaatgcagcaaaataacagtgtgcctgaattcatactgttaggattaacacaggatcccttgaggcagaaaatagtgtttgtaatcttcttaattttctatatgggaactgtggtggggaatatgctcattattgtgaccatcaagtccagccggacactaggaagccccatgtacttctttctattttatttgtcctttgcagattcttgcttttcaacttccacagcccctagattaattgtggatgctctctctgaaaagaaaattataacctacaatgagtgcatgacacaagtctttgcactacatttatttggctgcatggagatctttgtcctcattctcatggctgttgatcgctatgtggccatctgtaagcccttgcgttacccaaccatcatgagccagcaggtctgcatcatcctgattgttcttgcctggatagggtctttaatacactctacagctcagattatcctggccttaagattgcctttctgtggaccctatttgattgatcattattgctgtgatttgcagcccttgttgaaacttgcctgcatggacacttacatgatcaacctgctgttggtgtctaacagtggggcaatttgctcaagtagtttcatgattttgataatttcatatattgtcatcttgcattcactgagaaaccacagtgccaaagggaagaaaaaggctctctccgcttgcacgtctcacataattgtagtcatcttattctttggcccatgtatattcatatatacacgccccccgaccactttccccatggacaagatggtggcagtattttatactattggaacaccctttctcaatccactcatctacacactgaggaatgcagaagtgaaaaatgccatgagaaagttatggcatggcaaaattatttcagaaaacaaaggataaattgagggcctgacctgattactttttcagtcaaatcatgatttaacagagtaagtatagacagcaaataggaaagtacctgaatgc

SEQ ID NO: 162239 - DNA, 1063 bp, Homo sapiens
  Payload ID: 11784
  Gene Symbol: OR4C12
  Gene Name: olfactory receptor, family 4, subfamily C, member 12
  Uniprot ID: Q96R67
  ENST ID: ENST00000335238
  CDS Start-End: 35-964
ccttcctggaggttttatcacccacactacatagatggagaagaaaaagaatgtgactgaattcattttaataggtcttacacagaaccccataatggagaaagtcacgtttgtagtatttttggttctttacatgataacactttcaggcaacctgctcattgtggttaccattaccaccagccaggctctgagctcccccatgtacttcttcctgacccacctttctttgatagacacagtttattcttcttcttcagctcctaagttgattgtggattcctttcaagagaagaaaatcatctcctttaatgggtgtatggctcaagcctatgcagaacacatttttggtgctactgagatcatcctgctgacagtgatggcctgtgactgctatgtggccatctgcaaacctctgaactacacaaccattatgagccacagcctgtgcattctcctggtggcagtggcctgggtgggaggatttcttcatgcaactattcagattctctttacagtatggctgcccttctgtggccccaatgtcataggccacttcatgtgtgacttgtacccattgttaaaacttgtttgcatagacactcatacccttggtctctttgttgctgtgaacagtgggtttatctgcttattaaacttccttatcttggtggtatcctatgtgatcatcttgagatctttaaagaacaatagcttggaggggaggtgtaaagccctctccacctgtatttctcacatcatagtagttgtcttattctttgtgccctgtatatttgtgtatctgcgctcagtgaccactctgcccattgataaagctgttgctgtattttatactatggtggtcccaatgttaaatcccgtggtctacacactcagaaatgctgaggtaaaaagtgcaataaggaagctttggagaaaaaaagtgacttcagataatgattaaataagaccattgagcactcaacatagaggtaataggtatttaagcttcttgatttgtagatgaatatgtcaactctaacaaggggctggctaatgcttg

SEQ ID NO: 162240 - DNA, 1029 bp, Homo sapiens
  Payload ID: 11785
  Gene Symbol: OR4C13
  Gene Name: olfactory receptor, family 4, subfamily C, member 13
  Uniprot ID: Q8NGP0
  ENST ID: ENST00000555099
  CDS Start-End: 33-962
caggtaatgtaattaaccatcatttgaaatacatggcgaatagaaacaatgtgacagagtttattctattggggcttacagagaatccaaaaatgcagaaaatcatatttgttgtgttttctgtcatctacatcaacgccatgataggaaatgtgctcattgtggtcaccatcactgccagcccatcactgagatcccccatgtactttttcctggcctatctctcctttattgatgcctgctattcctctgtcaatacccctaagctgatcacagattcactctatgaaaacaagactatcttattcaatggatgtatgactcaagtctttggagaacattttttcagaggtgttgaggtcatcctacttactgtaatggcctatgaccactatgtggccatctgcaagcccttgcactataccaccgtcatgaagcagcatgtttgtagcctgctagtgggagtgtcatgggtaggaggctttcttcatgcaaccatacagatcctcttcatctgtcaattacctttctgtggtcctaatgtcatagatcactttatgtgtgatctctacactttgatcaatcttgcctgcactaatacccacactctaggactcttcattgctgccaacagtgggttcatatgcctgttaaactgtctcttgctcctggtctcctgcgtggtcatactgtactccttaaagacccacagcttagaggcaaggcacgaagccctctctacctgtgtctcccacatcacagttgtcatcttatcctttataccctgcatatttgtgtacatgagacctccagctactttacccattgataaagcagttgctgtattctacactatgataacttctatgttaaaccccttaatctacaccttgaggaatgctcaaatgaaaaatgccattaggaaattgtgtagtaggaaagctatttcaagtgtcaaataaatgtgactggagcccaacatgattcagctgaggcaagggtcaaaaggacattttgggtaatgccagc

SEQ ID NO: 162241 - DNA, 1113 bp, Homo sapiens
  Payload ID: 11786
  Gene Symbol: OR4C15
  Gene Name: olfactory receptor, family 4, subfamily C, member 15
  Uniprot ID: Q8NGM1
  ENST ID: ENST00000314644
  CDS Start-End: 1-1113
atgttctcaatgacaacagaagcactcaataattttgcacttggatgtaccaacttgttaatgactatgataccacaaattgatctgaagcaaattttcctttgtcctaattgcagactatacatgatccctgttggagctttcatcttttccttgggaaacatgcaaaaccaaagctttgtaactgagtttgtcctcctgggactttcacagaatccaaatgttcaggaaatagtatttgttgtatttttgtttgtctacattgcaactgttgggggcaacatgctaattgtagtaaccattctcagcagccctgctcttctggtgtctcctatgtacttcttcttgggcttcctgtccttcctggatgcgtgcttctcatctgtcatcaccccaaagatgattgtagactccctctatgtgacaaaaaccatctcttttgaaggctgcatgatgcagctctttgctgaacacttctttgctggggtggaggtgattgtcctcacagccatggcctatgatcgttatgtggccatttgcaagcccttgcattactcttctatcatgaacaggaggctctgtggcattctgatgggggtagcctggacagggggcctcttgcattccatgatacaaattctttttactttccagcttcccttttgtggccccaatgtcatcaatcactttatgtgtgacttgtacccgttactggagcttgcctgcactgatactcacatctttggcctcatggtggtcatcaacagtgggtttatctgcatcataaacttctccttgttgcttgtctcctatgctgtcatcttgctctctctgagaacacacagttctgaagggcgctggaaagctctctccacctgtggatctcacattgctgttgtgattttgttctttgtcccatgcatatttgtatatacacgacctccatctgctttttcccttgacaaaatggcggcaatattttatatcatcttaaatcccttgctcaatcctttgatttacactttcaggaataaggaagtaaaacaggccatgaggagaatatggaacagactgatggtggtttctgatgagaaagaaaatattaaactttaa

SEQ ID NO: 162242 - DNA, 933 bp, Homo sapiens; identical to SEQ ID NO: 161882
  Payload ID: 11787
  Gene Symbol: OR4C16
  Gene Name: olfactory receptor, family 4, subfamily C, member 16 (gene/pseudogene)
  Uniprot ID: Q8NGL9
  ENST ID: ENST00000314634
  CDS Start-End: 1-933

SEQ ID NO: 162243 - DNA, 1036 bp, Homo sapiens
  Payload ID: 11788
  Gene Symbol: OR4C3
  Gene Name: olfactory receptor, family 4, subfamily C, member 3
  Uniprot ID: Q8NH37
  ENST ID: ENST00000319856
  CDS Start-End: 22-1011
aacttgcaatgtttttcccccatgcaattagttctattacttatgtttctccttgtctttataggcaatactgcacctgcattctcagtgaccttggaatctatggacataccacaaaatatcacagaatttttcatgctggggctctcacagaactcagaggtacagagagttctctttgtggtctttttgctgatctatgtggtcacggtttgtggcaacatgctcattgtggtcactatcacctccagccccacgctggcttcccctgtgtattttttcctggccaacctatcctttattgacaccttttattcttcttctatggctcctaaactcattgctgactcattgtatgaggggagaaccatctcttatgagtgctgcatggctcagctctttggagctcattttttgggaggtgttgagatcattctgctcacagtgatggcttatgaccgctatgtggccatctgtaagcccctgcacaatactaccatcatgaccaggcatctctgtgccatgcttgtaggggtggcttggcttgggggcttcctgcattcattggttcagctcctcctggtcctttggttgcccttctgtgggcccaatgtgatcaatcactttgcctgtgacttgtaccctttgctggaagttgcctgcaccaatacgtatgtcattggtctgctggtggttgccaacagtggtttaatctgcctgttgaacttcctcatgctggctgcctcctacattgtcatcctgtactccttgaggtcccacagtgcagatgggagatgcaaagccctctccacctgtggagcccacttcattgttgttgccttgttctttgtgccctgtatatttacttatgtgcatccattttctactttacctatagacaaaaatatggcattattttatggtattctgacacctatgttgaatccactcatttataccctgagaaatgaagaggtaaaaaatgccatgagaaagctctttacatggtaagaaattgcaggtggaaaatgagtgg

SEQ ID NO: 162244 - DNA, 597 bp, Homo sapiens
  Payload ID: 11788
  Gene Symbol: OR4C3
  Gene Name: olfactory receptor, family 4, subfamily C, member 3
  ENST ID: ENST00000611380
  CDS Start-End: 1-597
attctgctcacagtgatggcttatgaccgctatgtggccatctgtaagcccctgcacaatactaccatcatgaccaggcatctctgtgccatgcttgtaggggtggcttggcttgggggcttcctgcattcattggttcagctcctcctggtcctttggttgcccttctgtgggcccaatgtgatcaatcactttgcctgtgacttgtaccctttgctggaagttgcctgcaccaatacgtatgtcattggtctgctggtggttgccaacagtggtttaatctgcctgttgaacttcctcatgctggctgcctcctacattgtcatcctgtactccttgaggtcccacagtgcagatgggagatgcaaagccctctccacctgtggagcccacttcattgttgttgccttgttctttgtgccctgtatatttacttatgtgcatccattttctactttacctatagacaaaaatatggcattattttatggtattctgacacctatgttgaatccactcatttataccctgagaaatgaagaggtaaaaaatgccatgagaaagctctttacatgcataatgtcttccagggaaaag

SEQ ID NO: 162245 - DNA, 930 bp, Homo sapiens
  Payload ID: 11789
  Gene Symbol: OR4C46
  Gene Name: olfactory receptor, family 4, subfamily C, member 46
  Uniprot ID: A6NHA9
  ENST ID: ENST00000328188
  CDS Start-End: 1-930
atggagaataggaataacatgacagagtttgttttgctggggcttacagagaatccaaagatgcagaaaatcatatttgttgtgttttttgtcatctatatcatcactgtggtgggatatgtgctcattgtggtcaccatcactgccagcccatcactggggtcccccatgtacctttccctggcctatctctcctttattgatgcctgctattcctctgtcaatacccctaacctgatcacacattcactctatggaaagaaggccatcctattcaatggatgcatgactcaagtctttggagaacatttcttcggaggtgcagagggcatcctacttactgtgatggcctatgaccactatgtggccatctgcaagcccttgcactatatgactatcatgaaccagtgtgtgtgtgccctgctaatgggagtggtgtggatgggaggctttcttcatgcaaccatacagatcctcttcatcttccaattacctttctgtggtcctaatgtcatagatcactttatgtgtgatctgaaccctttgctcaacctcgcctgcactgacacccatatgctggaactcttcattgctgccaacagtggattcatctgcttgttaaactttgccctcctgctggtctcctatgtggtcatcttgtgctccctaaggactcatagcttggaggcaaggcacaaagccctctccacctgtgtctcccacatcacggttgtcatcttattctttgtgccctgcatatttgtgtacatgagacctgcagctactttacctattgataaagcagttgctatattctacactatgataactcctatgttaaaccccttaatctataccttgaagaatgcccagatgaaaaatgccatcaggaaattgtgtagtagaaaggacatttcaggtgacaaataa

SEQ ID NO: 162246 - DNA, 981 bp, Homo sapiens
  Payload ID: 11790
  Gene Symbol: OR4C5
  Gene Name: olfactory receptor, family 4, subfamily C, member 5 (gene/pseudogene)
  Uniprot ID: Q8NGB2
  ENST ID: ENST00000319813
  CDS Start-End: 1-981
atgtatgtgtcaaattgcaatccttgtgctattcacagaaaaatcaattatccaaataccaaactggatttcgagcaagtgaacaacataacggaattcatcttgcttggcctgacacagaacgcagaggcacagaaactcttgtttgctgtgtttacactcatctactttctcaccatggtagacaacctaatcattgtggtgacaatcaccaccagcccagccctggactcccccgtgtatttttttctgtctttcttttccttcatagatggctgctcctcttctaccatggcccccaaaatgatatttgacttactcactgaaaagaaaactatttccttcagtgggtgcatgacccagctctttgtagaacatttctttgggggagttgagatcattctgctcgtggtgatggcctatgactgctatgtggccatctgcaagcccctgtactacctgatcacaatgaacaggcaggtatgtggcctcctggtggccatggcatgggtcgggggatttcttcacgctctgattcaaatgcttttaatagtctggctgcccttctgtggccccaatgtcattgaccatttcatctgtgaccttttccctctgctaaaactctcctgcactgacactcacgtctttggactctttgttgccgccaacagtgggctgatgtgtatgctcattttttctattcttattacctcttacgtcctaatcctctgctcacagcggaaggctctctctacctgcgccttccatatcactgtagtcgtcctattctttgttccctgtatattggtgtaccttcgacccatgatcaccttccctattgataaagctgtgtctgtgttttatactgtggtaacacccatgttaaaccctttaatctacaccctcagaaacacagaggtgaaaaatgccatgaagcagctctggagccaaataatctggggtaacaatttgtgtgattag

SEQ ID NO: 162247 - DNA, 930 bp, Homo sapiens
  Payload ID: 11791
  Gene Symbol: OR4C6
  Gene Name: olfactory receptor, family 4, subfamily C, member 6
  Uniprot ID: Q8NH72
  ENST ID: ENST00000314259
  CDS Start-End: 1-930
atggaaaatcaaaacaatgtgactgaattcattcttctgggtctcacagagaacctggagctgtggaaaatattttctgctgtgtttcttgtcatgtatgtagccacagtgctggaaaatctacttattgtggtaactattatcacaagtcagagtctgaggtcacctatgtatttttttcttaccttcttgtcccttttggatgtcatgttctcatctgtcgttgcccccaaggtgattgtagacaccctctccaagagcactaccatctctctcaaaggctgcctcacccagctgtttgtggagcatttctttggtggtgtggggatcatcctcctcactgtgatggcctatgaccgctacgtggccatctgtaagcccctgcactacacgatcatcatgagtccacgggtgtgctgcctaatggtaggaggggcttgggtggggggatttatgcacgcaatgatacaacttctcttcatgtatcaaatacccttctgtggtcctaatatcatagatcactttatatgtgatttgtttcagttgttgacacttgcctgcacggacacccacatcctgggcctcttagttaccctcaacagtgggatgatgtgtgtggccatctttcttatcttaattgcgtcctacacggtcatcctatgctccctgaagtcttacagctctaaagggcggcacaaagccctctctacctgcagctcccacctcacggtggttgtattgttctttgtcccctgtattttcttgtacatgaggcctgtggtcactcaccccatagacaaggcaatggctgtgtcagactcaatcatcacacccatgttaaatcccttgatctatacactgaggaatgcagaggtgaaaagtgccatgaagaaactctggatgaaatgggaggctttggctgggaaataa

SEQ ID NO: 162248 - DNA, 1024 bp, Homo sapiens
  Payload ID: 11792
  Gene Symbol: OR4D1
  Gene Name: olfactory receptor, family 4, subfamily D, member 1
  Uniprot ID: Q15615
  ENST ID: ENST00000268912
  CDS Start-End: 22-954
aggaacgtgggggaagatcctatggaaccacagaacaccacacaggtatcaatgtttgtcctcttagggttttcacagacccaagagctccagaaattcctgttccttctgttcctgttagtctatgttaccaccattgtgggaaacctccttatcatggtcacagtgacttttgactgccggctccacacacccatgtattttctgctccgaaatctagctctcatagacctctgctattccacagtcacctctccaaagatgctggtggacttcctccatgagaccaagacgatctcctaccagggctgcatggcccagatcttcttcttccaccttttgggaggtgggactgtcttttttctctcagtcatggcctatgaccgctacatagccatctcccagcccctccggtatgtcaccatcatgaacactcaattgtgtgtgggcctggtagtagccgcctgggtggggggctttgtccactccattgtccaactggctctgatacttccactgcccttctgtggccccaatatcctagataacttctactgtgatgttccccaagtactgagacttgcctgcactgatacctccctcctggagttcctcatgatctccaacagtgggctgctagttatcatctggttcctcctccttctgatctcttatactgtcatcctggtgatgctgaggtcccactcgggaaaggcaaggaggaaggcagcttccacctgcaccacccacatcatcgtggtgtccatgatcttcattccctgtatctatatctatacctggcccttcaccccattcctcatggacaaggctgtgtccatcagctacacagtcatgacccccatgctcaaccccatgatctacaccctgagaaaccaggacatgaaagcagccatgaggagattaggcaagtgcctagtaatttgcagggagtaaactttaagtaagttgactttaaatgacaaatttctctggatttttattttcccacatgaaaaatggagga

SEQ ID NO: 162249 - DNA, 1024 bp, Homo sapiens
  Payload ID: 11793
  Gene Symbol: OR4D10
  Gene Name: olfactory receptor, family 4, subfamily D, member 10
  Uniprot ID: Q8NGI6
  ENST ID: ENST00000530162
  CDS Start-End: 58-993
tcccagtgctttcacatgacatggtttaaaaccaaagagaataaagaggatgattgaatggagatggaaaactgcaccagggtaaaagaatttattttccttggcctgacccagaatcgggaagtgagcttagtcttatttcttttcctactcttggtgtatgtgacaactttgctgggaaacctcctcatcatggtcactgttacctgtgaatctcgccttcacacgcccatgtattttttgctccataatttatctattgccgatatctgcttctcttccatcacagtgcccaaggttctggtggaccttctgtctgaaagaaagaccatctccttcaatcattgcttcactcagatgtttctattccaccttattggaggggtggatgtattttctctttcggtgatggcattggatcgatatgtggccatctccaagcccctgcactatgcgactatcatgagtagagaccattgcattgggctcacagtggctgcctggttggggggctttgtccactccatcgtgcagatttccctgttgctcccactccctttctgcggacccaatgttcttgacactttctactgtgatgtccaccgggtcctcaaactggcccatacagacattttcatacttgaactactaatgatttccaacaatggactgctcaccacactgtggtttttcctgctcctggtgtcctacatagtcatattatcattacccaagtctcaggcaggagagggcaggaggaaagccatctccacctgcacctcccacatcactgtggtgaccctgcatttcgtgccctgcatctatgtctatgcccggcccttcactgccctccccatggataaggccatctctgtcaccttcactgtcatctcccctctgctcaaccccttgatctacactctgaggaaccatgagatgaagtcagccatgaggagactgaagagaagacttgtgccttctgatagaaaatagaaaaaaaaatcctcagctcttcatcaccaaa

SEQ ID NO: 162250 - DNA, 936 bp, Homo sapiens
  Payload ID: 11794
  Gene Symbol: OR4D11
  Gene Name: olfactory receptor, family 4, subfamily D, member 11
  Uniprot ID: Q8NGI4
  ENST ID: ENST00000313253
  CDS Start-End: 1-936
atggagttgggaaatgtcaccagagtaaaagaatttatatttctgggacttactcaatcccaagaccagagtttggtcttgtttctttttttatgtcttgtgtacatgacgactctgctgggaaacctcctcatcatggtcaccgtgacctgtgagtctcgccttcacacccccatgtacttcctgctccgcaatctagccatccttgacatctgcttctcctccacaactgctcctaaagtcttgctggaccttctgtcaaagaaaaagaccatatcctatacaagctgcatgacacagatatttctcttccacctccttggtggggcagacattttttctctctctgtgatggcgtttgactgctacatggccatctccaagcccctgcactatgtgaccatcatgagtagagggcaatgcactgccctcatctctgcctcttggatggggggctttgtccactccatcgtgcagatctccctgttgctgcctctccctttctgtggacccaatgttcttgacactttctactgcgatgtcccccaggtcctcaaactcacttgcactgacacttttgctcttgagttcttgatgatttccaacaatggcctggtcactaccctgtggtttatcttcctgcttgtgtcctacacagtcatcctaatgacgctgaggtctcaggcaggagggggcaggaggaaagccatctccacttgcacctcccacatcactgtggtgaccctgcattttgtgccctgcatctatgtctatgcccggcccttcactgccctccccacagaaaaggccatctctgtcaccttcactgtcatctcccctctgctgaaccctttgatctacactctgaggaaccaggaaatgaagtcagccatgagaagactgaagagaagactcgtgccttctgaaagggaatag

SEQ ID NO: 162251 - DNA, 924 bp, Homo sapiens
  Payload ID: 11795
  Gene Symbol: OR4D2
  Gene Name: olfactory receptor, family 4, subfamily D, member 2
  Uniprot ID: P58180
  ENST ID: ENST00000545221
  CDS Start-End: 1-924
atggaaacagggaacctcacgtgggtatcagactttgtcttcctggggctctcgcagactcgggagctccagcgtttcctgtttctaatgttcctgtttgtctacatcaccactgttatgggaaacatccttatcatcatcacagtgacctctgattcccagctccacacacccatgtactttctgctccgaaacctggctgtcctagacctctgtttctcttcagtcactgctcccaaaatgctagtggacctcctctctgagaagaaaaccatctcttaccagggctgcatgggtcagatcttcttcttccactttttgggaggtgccatggtcttcttcctctcagtgatggcctttgaccgcctcattgccatctcccggcccctccgctatgtcaccgtcatgaacactcagctctgggtggggctggtggtagccacctgggtgggaggctttgtccactctattgtccagctggctctgatgctcccactgcccttctgtggccccaacattttggataacttctactgtgatgttccccaagtactgagacttgcctgcactgacacctcactgctggagttcctcaagatctccaacagtgggctgctggatgtcgtctggttcttcctcctcctgatgtcctacttattcatcctggtgatgctgaggtcacatccaggggaggcaagaaggaaggcagcttccacctgcaccacccacatcatcgtggtttccatgatcttcgttccaagcatttacctctatgcccggcccttcactccattccctatggacaagcttgtgtccatcggccacacagtcatgacccccatgctcaaccccatgatctataccctgaggaaccaggacatgcaggcagcagtgagaagattagggagacaccggctggtttga

SEQ ID NO: 162252 - DNA, 1095 bp, Homo sapiens
  Payload ID: 11796
  Gene Symbol: OR4D5
  Gene Name: olfactory receptor, family 4, subfamily D, member 5
  Uniprot ID: Q8NGN0
  ENST ID: ENST00000307033
  CDS Start-End: 75-1031
gagaactttgcagatcccctgaataatatgtccttttttcttagcaggttcattgacaaggtcataccaaccagatgaatccagcaaatcattcccaggtggcaggatttgttctactggggctctctcaggtttgggagcttcggtttgttttcttcactgttttctctgctgtgtattttatgactgtagtgggaaaccttcttattgtggtcatagtgacctccgacccacacctgcacacaaccatgtattttctcttgggcaatctttctttcctggacttttgctactcttccatcacagcacctaggatgctggttgacttgctctcaggcaaccctaccatttcctttggtggatgcctgactcaactcttcttcttccacttcattggaggcatcaagatcttcctgctgactgtcatggcgtatgaccgctacattgccatttcccagcccctgcactacacgctcattatgaatcagactgtctgtgcactccttatggcagcctcctgggtggggggcttcatccactccatagtacagattgcattgactatccagctgccattctgtgggcctgacaagctggacaacttttattgtgatgtgcctcagctgatcaaattggcctgcacagatacctttgtcttagagcttttaatggtgtctaacaatggcctggtgaccctgatgtgttttctggtgcttctgggatcgtacacagcactgctagtcatgctccgaagccactcacgggagggccgcagcaaggccctgtctacctgtgcctctcacattgctgtggtgaccttaatctttgtgccttgcatctacgtctatacaaggccttttcggacattccccatggacaaggccgtctctgtgctatacacaattgtcacccccatgctgaatcctgccatctataccctgagaaacaaggaagtgatcatggccatgaagaagctgtggaggaggaaaaaggaccctattggtcccctggagcacagacccttacattagcagaggcagtgacctgagaatctgaaagatgctacagggtattagcctgctggataggaccctc

SEQ ID NO: 162253 - DNA, 1054 bp, Homo sapiens
  Payload ID: 11797
  Gene Symbol: OR4D6
  Gene Name: olfactory receptor, family 4, subfamily D, member 6
  Uniprot ID: Q8NGJ1
  ENST ID: ENST00000300127
  CDS Start-End: 24-968
cctggaagagagtcatccccatcatggaccagatcaaccacactaatgtgaaggagtttttcttcctggaacttacacgttcccgagagctggagtttttcttgtttgtggtcttctttgctgtgtatgtagcaacagtcctgggaaatgcactcattgtggtcactattacctgtgagtcccgcctacacactcctatgtactttctcctgcggaacaaatcagtcctggacatcgttttttcatctatcaccgtccccaagttcctggtggatcttttatcagacaggaaaaccatctcctacaatgactgcatggcacagatctttttcttccactttgctggtggggcagatatttttttcctctctgtgatggcctatgacagataccttgcaatcgccaagcccctgcactatgtgaccatgatgaggaaagaggtgtgggtggccttggtggtggcttcttgggtgagtggtggtttgcattcaatcatccaggtaattctgatgcttccattccccttctgtggccccaacacactggatgccttctactgttatgtgctccaggtggtaaaactggcctgcactgacacctttgctttggagcttttcatgatctctaacaacggactggtgaccctgctctggttcctcctgctcctgggctcctacactgtcattctggtgatgctgagatcccactctggggaggggcggaacaaggccctctccacgtgcacgtcccacatgctggtggtgactcttcacttcgtgccttgtgtttacatctactgccggcccttcatgacgctgcccatggacacaaccatatccattaataacacggtcattacccccatgctgaaccccatcatctattccctgagaaatcaagagatgaagtcagccatgcagaggctgcagaggagacttgggccttccgagagcagaaaatgggggtgagcagtcagatggagagtggaagtctgtctgacttagttttctcaaaatgctagcctaagagtaacaggtcgctagctcttcttcca

SEQ ID NO: 162254 - DNA, 945 bp, Homo sapiens
  Payload ID: 11798
  Gene Symbol: OR4D9
  Gene Name: olfactory receptor, family 4, subfamily D, member 9
  Uniprot ID: Q8NGE8
  ENST ID: ENST00000329328
  CDS Start-End: 1-945
atggatcagagaaattacaccagagtgaaagaatttaccttcctgggaattactcagtcccgagaactgagccaggtcttatttaccttcctgtttttggtgtacatgacaactctaatgggaaacttcctcatcatggttacagttacctgtgaatctcaccttcatacgcccatgtacttcctgctccgcaacctgtctattcttgacatctgcttttcctccatcacagctcctaaggtcctgatagatcttctatcagagacaaaaaccatctccttcagtggctgtgtcactcaaatgttcttcttccaccttctggggggagcagacgttttttctctctctgtgatggcgtttgaccgctatatagccatctccaagcccctgcactatatgaccatcatgagtagggggcgatgcacaggcctcatcgtggcttcctgggtggggggctttgtccactccatagcgcagatttctctattgctcccactccctttctgtggacccaatgttcttgacactttctactgcgatgtcccccaggtcctcaaacttgcctgcactgacaccttcactctggagctcctgatgatttcaaataatgggttagtcagttggtttgtattcttctttctcctcatatcttacacggtcatcttgatgatgctgaggtctcacactggggaaggcaggaggaaagccatctccacctgcacctcccacatcaccgtggtgaccctgcatttcgtgccctgcatctatgtctatgcccggcccttcactgccctccccacagacactgccatctctgtcaccttcactgtcatctcccctttgctcaatcctataatttacacgctgaggaatcaggaaatgaagttggccatgaggaaactgaagagacggctaggacaatcagaaaggattttaattcaataa

SEQ ID NO: 162255 - DNA, 942 bp, Homo sapiens
  Payload ID: 11799
  Gene Symbol: OR4E2
  Gene Name: olfactory receptor, family 4, subfamily E, member 2
  Uniprot ID: Q8NGC2
  ENST ID: ENST00000408935
  CDS Start-End: 1-942
atggacagtctaaaccaaacaagagtgactgaatttgtcttcttgggactcactgataaccgggtgctggaaatgctgtttttcatggcattctcagccatttatatgctaacgctttcggggaacattctcatcatcattgccacagtctttactccaagtctccatacccccatgtatttcttcctgagcaatctgtcctttattgacatctgccactcatctgtcactgtgcctaagatgttggagggtttgcttttagaaagaaagaccatttcctttgacaactgcatcacacagctcttcttcctacatctctttgcctgtgccgagatctttctgctgatcattatggcgtatgatcgttacgtggctatctgcactccactccactaccccaatgtgatgaacatgagagtctgtatacagcttgtctttgctctctggttggggggtactgttcactcactagggcagaccttcttgactattcgtctaccttactgtggccccaacattattgacagctacttctgtgatgtgcctcttgttatcaagctggcctgcacagatacatacctcacaggaatactgattgtgaccaatagtggaaccatctccctctcctgtttcttggccgtggtcacctcctatatggtcatcctggtttctcttcgaaaacactcagctgaagggcgccggaaagccctgtctacctgctcggcccacttcatggtggttgccctcttctttgggccatgtatcttcatctatactcggccagacaccagcttctccattgacaaggtggtgtctgtcttctacacagtggtcacccctttgctgaatcccttcatttacaccttgaggaatgaggaggtaaaaagtgccatgaagcagctcaggcagagacaagtttttttcacgaaatcatatacataa

SEQ ID NO: 162256 - DNA, 985 bp, Homo sapiens
  Payload ID: 11800
  Gene Symbol: OR4F15
  Gene Name: olfactory receptor, family 4, subfamily F, member 15
  Uniprot ID: Q8NGB8
  ENST ID: ENST00000332238
  CDS Start-End: 25-963
aaactgatcttggagtctgaggcaatgaatggaatgaatcactctgtggtatcagaatttgtattcatgggactcaccaactcacgggagattcagcttctactttttgttttctctttgttgttctactttgcgagcatgatgggaaaccttgtcattgtattcactgtaaccatggatgctcatctgcactcccccatgtatttcctcctggctaacctctcaatcattgatatggcattttgctcaattacagcccctaagatgatttgtgatattttcaagaagcacaaggccatctcctttcggggatgtattactcagatcttctttagccatgctcttgggggcactgagatggtgctgctcatagccatggcctttgacagatacatggccatatgtaaacctctccactacctgaccatcatgagcccaagaatgtgtctatactttttagccacttcctctatcattggccttatccactcattggtccaattagtttttgtggtagatttacctttttgtggtcctaatatctttgacagtttttactgtgatctccctcggctcctcagacttgcctgtaccaacacccaagaactggagttcatggtcactgtcaatagtggactcatttctgtgggctcctttgtcttgctggtaatttcctacatcttcattctgttcactgtttggaaacattcttctggtggtctagccaaggccctctctaccctgtcagctcatgtcactgtggtcatcttgttctttgggccactgatgtttttctacacatggccttctcccacatcacacctggataaatatcttgctatttttgatgcatttattactccttttctgaatccagttatctacacattcaggaacaaagacatgaaagtggcaatgaggagactgtgcagtcgtcttgcgcattttacaaagattttgtaaatggcttggctgtcaagatgtg

SEQ ID NO: 162257 - DNA, 927 bp, Homo sapiens
  Payload ID: 11800
  Gene Symbol: OR4F15
  Gene Name: olfactory receptor, family 4, subfamily F, member 15
  ENST ID: ENST00000536946
  CDS Start-End: 1-927
atggatgaagccaatcactctgtggtctctgagtttgtgttcctgggactctctgactcgcggaagatccagctcctcctcttcctctttttctcagtgttctatgtgtcaagcctgatgggaaatctcctcattgtgctaactgtgacctctgaccctcgtttacagtcccccatgtacttcctgctggccaacctttccatcatcaatttggtattttgttcctccacagctcccaagatgatttatgaccttttcaggaagcacaagaccatctcttttgggggctgtgtagttcagatcttctttatccatgcagttgggggaactgagatggtgctgctcatagccatggcttttgaccgatatgtggccatatgtaagcctctccactacctgaccatcatgagcccaagaatgtgtctatactttttagccacttcctctatcattggccttatccactcattggtccaattagtttttgtggtagatttacctttttgtggtcctaatatctttgacagtttttactgtgatctccctcggctcctcagacttgcctgtaccaacacccaagaactggagttcatggtcactgtcaatagtggactcatttctgtgggctcctttgtcttgctggtaatttcctacatcttcattctgttcactgtttggaaacattcttctggtggtctagccaaggccctctctaccctgtcagctcatgtcactgtggtcatcttgttctttgggccactgatgtttttctacacatggccttctcccacatcacacctggataaatatcttgctatttttgatgcatttattactccttttctgaatccagttatctacacattcaggaacaaagacatgaaagtggcaatgaggagactgtgcagtcgtcttgcgttttacaaa

SEQ ID NO: 162258 - DNA, 939 bp, Homo sapiens
  Payload ID: 11801
  Gene Symbol: OR4F16
  Gene Name: olfactory receptor, family 4, subfamily F, member 16
  Uniprot ID: Q6IEY1
  ENST ID: ENST00000332831
  CDS Start-End: 1-939
atggatggagagaatcactcagtggtatctgagtttttgtttctgggactcactcattcatgggagatccagctcctcctcctagtgttttcctctgtgctctatgtggcaagcattactggaaacatcctcattgtgttttctgtgaccactgaccctcacttacactcccccatgtactttctactggccagtctctccttcattgacttaggagcctgctctgtcacttctcccaagatgatttatgacctgttcagaaagcgcaaagtcatctcctttggaggctgcatcgctcaaatcttcttcatccacgtcgttggtggtgtggagatggtgctgctcatagccatggcctttgacagatatgtggccctatgtaagcccctccactatctgaccattatgagcccaagaatgtgcctttcatttctggctgttgcctggacccttggtgtcagtcactccctgttccaactggcatttcttgttaatttagccttctgtggccctaatgtgttggacagcttctactgtgaccttcctcggcttctcagactagcctgtaccgacacctacagattgcagttcatggtcactgttaacagtgggtttatctgtgtgggtactttcttcatacttctaatctcctacgtcttcatcctgtttactgtttggaaacattcctcaggtggttcatccaaggccctttccactctttcagctcacagcacagtggtccttttgttctttggtccacccatgtttgtgtatacacggccacaccctaattcacagatggacaagtttctggctatttttgatgcagttctcactccttttctgaatccagttgtctatacattcaggaataaggagatgaaggcagcaataaagagagtatgcaaacagctagtgatttacaagaggatctcataa

SEQ ID NO: 162259 - DNA, 1054 bp, Homo sapiens
  Payload ID: 11802
  Gene Symbol: OR4F17
  Gene Name: olfactory receptor, family 4, subfamily F, member 17
  Uniprot ID: Q8NGA8
  ENST ID: ENST00000318050
  CDS Start-End: 37-954
tcctggaatgaatcaacgagtgaaacgaataactctatggtgactgaattcatttttctgggtctctctgattctcagggactccagaccttcctatttatgttgttttttgtattctatggaggaatcgtgtttggaaaccttcttattgtcataacagtggtatctgactcccaccttcactctcccatgtacttcctgctagccaacctctcactcattgatctgtctctgtcttcagtcacagcccccaagatgattactgactttttcagccagcgcaaagtcatctctttcaagggctgccttgttcagatatttctccttcacttctttggtgggagtgagatggtgatcctcatagccatgggctttgacagatatatagcaatatgcaaacccctacactacactacaattatgtgtggcaacgcatgtgtcggcattatggctgtcgcatggggaattggctttctccattcggtgagccagttggcctttgccgtgcacttacccttctgtggtcccaatgaggtcgatagtttttattgtgaccttcctagggtaatcaaacttgcctgtacagatacctacaggctagatattatggtcattgctaacagtggtgtgctcactgtgtgttcttttgttcttctaatcatctcatacactatcatcctaatgaccatccagcatcgccctttagataagtcgtccaaagctctgtccactttgactgctcacattacagtagttcttttgttctttggaccatgtgtctttatttatgcctggccattccccatcaagtcattagataaattccttgctgtattttattctgtgatcacccctctcttgaacccaattatatacacactgaggaacaaagacatgaagacggcaataagacagctgagaaaatgggatgcacattctagtgtaaagttttagatcttatataactgtgagattaatctcagataatgacacaaaatatagtgaagttggtaagttatttagtaaagctcatgaaaattgtgccctccattcc

SEQ ID NO: 162260 - DNA, 1167 bp, Homo sapiens
  Payload ID: 11802
  Gene Symbol: OR4F17
  Gene Name: olfactory receptor, family 4, subfamily F, member 17
  Uniprot ID: Q8NGA8
  ENST ID: ENST00000585993
  CDS Start-End: 150-1067
atctttccccaggtccggtgttttcttacccacctccttccctcctttttataataccagtgaaacttggtttggagcatttctttcacataaaggtaactgcagaggctatttcctggaatgaatcaacgagtgaaacgaataactctatggtgactgaattcatttttctgggtctctctgattctcagggactccagaccttcctatttatgttgttttttgtattctatggaggaatcgtgtttggaaaccttcttattgtcataacagtggtatctgactcccaccttcactctcccatgtacttcctgctagccaacctctcactcattgatctgtctctgtcttcagtcacagcccccaagatgattactgactttttcagccagcgcaaagtcatctctttcaagggctgccttgttcagatatttctccttcacttctttggtgggagtgagatggtgatcctcatagccatgggctttgacagatatatagcaatatgcaaacccctacactacactacaattatgtgtggcaacgcatgtgtcggcattatggctgtcgcatggggaattggctttctccattcggtgagccagttggcctttgccgtgcacttacccttctgtggtcccaatgaggtcgatagtttttattgtgaccttcctagggtaatcaaacttgcctgtacagatacctacaggctagatattatggtcattgctaacagtggtgtgctcactgtgtgttcttttgttcttctaatcatctcatacactatcatcctaatgaccatccagcatcgccctttagataagtcgtccaaagctctgtccactttgactgctcacattacagtagttcttttgttctttggaccatgtgtctttatttatgcctggccattccccatcaagtcattagataaattccttgctgtattttattctgtgatcacccctctcttgaacccaattatatacacactgaggaacaaagacatgaagacggcaataagacagctgagaaaatgggatgcacattctagtgtaaagttttagatcttatataactgtgagattaatctcagataatgacacaaaatatagtgaagttggtaagttatttagtaaagctcatgaaaattgtgccctccattcc

SEQ ID NO: 162261 - DNA, 995 bp, Homo sapiens
  Payload ID: 11803
  Gene Symbol: OR4F21
  Gene Name: olfactory receptor, family 4, subfamily F, member 21
  Uniprot ID: O95013
  ENST ID: ENST00000320901
  CDS Start-End: 20-958
agcccagttggctggaccaatggatggagagaatcactcagtggtatctgagtttttgtttctgggactcactcattcatgggagatccagctcctcctcctagtgttttcctctgtgctctatgtggcaagcattactggaaacatcttcattgtgttttctgtgaccactgaccctcacttacactcccccatgtactttctactggccagtctctccttcattgacttaggagcctgctctgtcacttctcccaagatgatttatgacctgttcagaaagcgcaaagtcatctcctttggaggctgcatcgctcaaatcttcttcatccacgtcattggtggtgtggagatggtgctgctcatagccatggcctttgacagatatgtggccctatgtaagcccctccactatctgaccattatgagcccaagaatgtgcctttcatttctggctgttgcctggacccttggtgtcagtcactccctgttccaactggcatttcttgttaatttagccttctgtggccctaatgtgttggacagcttctactgtgaccttcctcggcttctcagactagcctgtaccgacacctacagattgcagttcatggtcactgttaacagtgggtttatctgtgtgggtactttcttcatacttctaatctcctacgtcttcatcctgtttactgtttggaaacattcctcaggtggttcatccaaggccctttccactctttcagctcacagcacagtggtccttttgttctttggtccacccatgtttgtgtatacacggccacaccctaattcacagatggacaagtttctggctatttttgatgcagttctcactccttttctgaatccagttgtctatacattcaggaataaggagatgaaggcagcaataaagagagtatgcaaacagctagtgatttacaagaagatctcataaatgatacaataagcccttctcgttaaacatgatatgg

SEQ ID NO: 162262 - DNA, 939 bp, Homo sapiens; identical to SEQ ID NO: 162258
  Payload ID: 11804
  Gene Symbol: OR4F29
  Gene Name: olfactory receptor, family 4, subfamily F, member 29
  Uniprot ID: Q6IEY1
  ENST ID: ENST00000426406
  CDS Start-End: 1-939

SEQ ID NO: 162263 - DNA, 995 bp, Homo sapiens
  Payload ID: 11805
  Gene Symbol: OR4F3
  Gene Name: olfactory receptor, family 4, subfamily F, member 3
  Uniprot ID: Q6IEY1
  ENST ID: ENST00000456475
  CDS Start-End: 20-958
agcccagttggctggaccaatggatggagagaatcactcagtggtatctgagtttttgtttctgggactcactcattcatgggagatccagctcctcctcctagtgttttcctctgtgctctatgtggcaagcattactggaaacatcctcattgtgttttctgtgaccactgaccctcacttacactcccccatgtactttctactggccagtctctccttcattgacttaggagcctgctctgtcacttctcccaagatgatttatgacctgttcagaaagcgcaaagtcatctcctttggaggctgcatcgctcaaatcttcttcatccacgtcgttggtggtgtggagatggtgctgctcatagccatggcctttgacagatatgtggccctatgtaagcccctccactatctgaccattatgagcccaagaatgtgcctttcatttctggctgttgcctggacccttggtgtcagtcactccctgttccaactggcatttcttgttaatttagccttctgtggccctaatgtgttggacagcttctactgtgaccttcctcggcttctcagactagcctgtaccgacacctacagattgcagttcatggtcactgttaacagtgggtttatctgtgtgggtactttcttcatacttctaatctcctacgtcttcatcctgtttactgtttggaaacattcctcaggtggttcatccaaggccctttccactctttcagctcacagcacagtggtccttttgttctttggtccacccatgtttgtgtatacacggccacaccctaattcacagatggacaagtttctggctatttttgatgcagttctcactccttttctgaatccagttgtctatacattcaggaataaggagatgaaggcagcaataaagagagtatgcaaacagctagtgatttacaagaggatctcataaatgatataataagcccttctcattaaacatgatatgg

SEQ ID NO: 162264 - DNA, 1054 bp, Homo sapiens
  Payload ID: 11806
  Gene Symbol: OR4F4
  Gene Name: olfactory receptor, family 4, subfamily F, member 4
  Uniprot ID: Q96R69
  ENST ID: ENST00000326183
  CDS Start-End: 37-954
tcctggaatgaatcaacgagtgaaacgaataactctatggtgactgaattcatttttctgggtctctctgattctcaggaactccagaccttcctatttatgttgttttttgtattctatggaggaatcgtgtttggaaaccttcttattgtcataacagtggtatctgactcccaccttcactctcccatgtacttcctgctagccaacctctcactcattgatctgtctctgtcttcagtcacagcccccaagatgattactgactttttcagccagcgcaaagtcatctctttcaagggctgccttgttcagatatttctccttcacttctttggtgggagtgagatggtgatcctcatagccatgggctttgacagatatatagcaatatgcaaacccctacactacactacaattatgtgtggcaacgcatgtgtcggcattatggctgtcgcatggggaattggctttctccattcggtgagccagttggcctttgccgtgcacttacccttctgtggtcccaatgaggtcgatagtttttattgtgaccttcctagggtaatcaaacttgcctgtacagatacctacaggctagatattatggtcattgctaacagtggtgtgctcactgtgtgttcttttgttcttctaatcatctcatacactatcatcctaatgaccatccagcattgccctttagataagtcgtccaaagctctgtccactttgactgctcacattacagtagttcttttgttctttggaccatgtgtctttatttatgcctggccattccccatcaagtcattagataaattccttgctgtattttattctgtgatcacccctctcttgaacccaattatatacacactgaggaacaaagacatgaagacggcaataagacggctgagaaaatgggatgcacattctagtgtaaagttttagatcttatataactgtgagattaatctcagataatgacacaaaatatagtgaagttggtaagttatttagtaaagctcatgaaaattgtgccctccattcc

SEQ ID NO: 162265 - DNA, 918 bp, Homo sapiens
  Payload ID: 11807
  Gene Symbol: OR4F5
  Gene Name: olfactory receptor, family 4, subfamily F, member 5
  Uniprot ID: Q8NH21
  ENST ID: ENST00000335137
  CDS Start-End: 1-918
atggtgactgaattcatttttctgggtctctctgattctcaggaactccagaccttcctatttatgttgttttttgtattctatggaggaatcgtgtttggaaaccttcttattgtcataacagtggtatctgactcccaccttcactctcccatgtacttcctgctagccaacctctcactcattgatctgtctctgtcttcagtcacagcccccaagatgattactgactttttcagccagcgcaaagtcatctctttcaagggctgccttgttcagatatttctccttcacttctttggtgggagtgagatggtgatcctcatagccatgggctttgacagatatatagcaatatgcaagcccctacactacactacaattatgtgtggcaacgcatgtgtcggcattatggctgtcacatggggaattggctttctccattcggtgagccagttggcgtttgccgtgcacttactcttctgtggtcccaatgaggtcgatagtttttattgtgaccttcctagggtaatcaaacttgcctgtacagatacctacaggctagatattatggtcattgctaacagtggtgtgctcactgtgtgttcttttgttcttctaatcatctcatacactatcatcctaatgaccatccagcatcgccctttagataagtcgtccaaagctctgtccactttgactgctcacattacagtagttcttttgttctttggaccatgtgtctttatttatgcctggccattccccatcaagtcattagataaattccttgctgtattttattctgtgatcacccctctcttgaacccaattatatacacactgaggaacaaagacatgaagacggcaataagacagctgagaaaatgggatgcacattctagtgtaaagttttag

SEQ ID NO: 162266 - DNA, 988 bp, Homo sapiens
  Payload ID: 11808
  Gene Symbol: OR4F6
  Gene Name: olfactory receptor, family 4, subfamily F, member 6
  Uniprot ID: Q8NGB9
  ENST ID: ENST00000328882
  CDS Start-End: 22-960
ttgtcacagccgacagaggcaatggatgaagccaatcactctgtggtctctgagtttgtgttcctgggactctctgactcgcggaagatccagctcctcctcttcctctttttctcagtgttctatgtgtcaagcctgatgggaaatctcctcattgtgctaactgtgacctctgaccctcgtttacagtcccccatgtacttcctgctggccaacctttccatcatcaatttggtattttgttcctccacagctcccaagatgatttatgaccttttcaggaagcacaagaccatctcttttgggggctgtgtagttcagatcttctttatccatgcagttgggggaactgagatggtgctgctcatagccatggcttttgaccgatatgtggccatatgtaagcctctccactacctgaccatcatgaacccacaaaggtgcattttgtttttagtcatttcctggattataggtattattcactcagtgattcagttggcttttgttgtagacctgctgttctgtggccctaatgaattagatagtttcttttgtgatcttcctcgatttatcaaactggcttgcatagagacctacacattgggattcatggttactgccaatagtggatttatttctctggcttcttttttaattctcataatctcttacatctttattttggtgactgttcagaaaaaatcttcaggtggtatattcaaggctttctctatgctgtcagctcatgtcattgtggtggttttggtctttgggccattaatctttttctatatttttccatttcccacatcacatcttgataaattccttgccatctttgatgcagttatcactcccgttttgaatccagtcatctatacttttagaaataaagagatgatggtggcaatgagaagacgatgctctcagtttgtgaattacagtaaaatcttttaaatatattgagaatatacaaaaaggcaaa

SEQ ID NO: 162267 - DNA, 1076 bp, Homo sapiens
  Payload ID: 11809
  Gene Symbol: OR4K1
  Gene Name: olfactory receptor, family 4, subfamily K, member 1
  Uniprot ID: Q8NGD4
  ENST ID: ENST00000285600
  CDS Start-End: 60-995
tgccaatcattgtgacatttttctgatttcttttttttaggtaactgaatattggatacatggctcacacaaatgaatcgatggtgtctgagtttgtacttttgggactctctaattcctggggacttcaacttttcttttttgccatcttctctatagtctatgtgacatcagtgctaggcaatgtcttaattattgtcattatttcttttgactcccatttgaactctcctatgtacttcttgctcagtaatctttctttcattgatatctgtcagtctaactttgccacccccaagatgcttgtagacttttttattgagcgcaagactatctcctttgagggttgcatggcccagatattcgttcttcacagttttgttgggagtgagatgatgttgcttgtagctatggcatatgacagatttatagccatatgtaagcctctgcactacagtacaattatgaaccggaggctctgtgtaatttttgtgtctatttcctgggcggtgggcgttcttcattctgtgagccacttggcttttacagtggacctgccattctgtggtcccaatgaggtggatagcttcttttgtgaccttcccttggtgatagagctggcttgcatggatacatatgaaatggaaattatgaccctaacgaacagtggcctgatatcattgagctgtttcctggctttaattatttcctacaccatcattttgatcggtgtccgatgcaggtcctccagtgggtcatctaaggctctttctacattaactgcccacatcacagtggtcattcttttcttcgggccttgcatttatttctatatatggccttttagcagacttcctgtggacaaatttctttctgtgttctacactgtttgtactcccttgttgaaccccatcatctactctctgaggaatgaagatgttaaagcagccatgtggaagctgagaaaccgtcatgtgaactcctggaaaaactagggatcattacgaaggagcataatcctgaattagaatgaagaccctccagtgtatcatagtgtcatgccaaccatctttgcc

SEQ ID NO: 162268 - DNA, 917 bp, Homo sapiens
  Payload ID: 11810
  Gene Symbol: OR4K13
  Gene Name: olfactory receptor, family 4, subfamily K, member 13
  Uniprot ID: Q8NH42
  ENST ID: ENST00000315693
  CDS Start-End: 3-917
atatggaaagagcaaaccattcagtggtatcggaatttattttgttgggactttccaaatctcaaaatcttcagattttattcttcttgggattctctgtggtcttcgtggggattgtgttaggaaacctgctcatcttggtgactgtgacctttgattcgctccttcacacaccaatgtattttctgcttagcaacctctcctgcattgatatgatcctggcttcttttgctacccctaagatgattgtagatttcctccgagaacgtaagaccatctcatggtggggatgttattcccagatgttctttatgcacctcctgggtgggagtgagatgatgttgcttgtagccatggcaatagacaggtatgttgccatatgcaaacccctccattacatgaccatcatgagcccacgggtgctcactgggctactgttatcctcctatgcagttggatttgtgcactcatctagtcaaatggctttcatgttgactttgcccttctgtggtcccaatgttatagacagctttttctgtgaccttccccttgtgattaaacttgcctgcaaggacacctacatcctacagctcctggtcattgctgacagtgggctcctgtcactggtctgcttcctcctcttgcttgtctcctatggagtcataatattctcagttaggtaccgtgctgctagtcgatcctctaaggctttctccactctctcagctcacatcacagttgtgactctgttctttgctccgtgtgtctttatctacgtctggcccttcagcagatactcggtagataaaattctttctgtgttttacacaattttcacacctctcttaaatcctattatttatacattaagaaatcaagaggtaaaagcagccattaaaaaaagactctgcatataa

SEQ ID NO: 162269 - DNA, 934 bp, Homo sapiens
  Payload ID: 11811
  Gene Symbol: OR4K14
  Gene Name: olfactory receptor, family 4, subfamily K, member 14
  Uniprot ID: Q8NGD5
  ENST ID: ENST00000305045
  CDS Start-End: 1-933
atggacccacagaactattccttggtgtcagaatttgtgttgcatggactctgcacttcacgacatcttcaaaattttttctttatatttttctttggggtctatgtggccattatgctgggtaaccttctcattttggtcactgtaatttctgatccctgcctgcactcctcccctatgtacttcctgctggggaacctagctttcctggacatgtggctggcctcatttgccactcccaagatgatcagggatttccttagtgatcaaaaactcatctcctttggaggatgtatggctcaaatcttcttcttgcactttactggtggggctgagatggtgctcctggtttccatggcctatgacagatatgtggccatatgcaaacccttgcattacatgactttgatgagttggcagacttgcatcaggctggtgctggcttcatgggtcgttggatttgtgcactccatcagtcaagtggctttcactgtaaatttgccttactgtggccccaatgaggtagacagcttcttctgtgacctccctctggtgatcaaacttgcctgcatggacacctatgtcttgggtataattatgatctcagacagtgggttgctttccttgagctgttttctgctcctcctgatctcctacaccgtgatcctcctcgctatcagacagcgtgctgccggtagcacatccaaagcactctccacttgctctgcacatatcatggtagtgacgctgttctttggcccttgcatttttgtttatgtgcggcctttcagtaggttctctgtggacaagctgctgtctgtgttttataccatttttactccactcctgaaccccattatctacacattgagaaatgaggagatgaaagcagctatgaagaaactgcaaaaccgacgggtgacttttcaatgaa

SEQ ID NO: 162270 - DNA, 1216 bp, Homo sapiens
  Payload ID: 11812
  Gene Symbol: OR4K15
  Gene Name: olfactory receptor, family 4, subfamily K, member 15
  Uniprot ID: Q8NH41
  ENST ID: ENST00000305051
  CDS Start-End: 76-1122
tgaaaacccagacacatacatagcaataggaattggaattctgaaaagtttaagtgtaattggaaaatcaaacccatgctcacttcattaactgatctctgtttctctcctattcaggtagctgaaattaagtcccttccaaaatcgatgaatgagacaaatcattctcgggtgacagaatttgtgttgctgggactgtctagttcaagggagctccaacctttcttgtttcttacattttcactactttatctagcaattctgttgggcaactttctcatcatcctcactgtgacctcagattcccgccttcacacccccatgtactttctgcttgcaaacctgtcatttatagacgtatgtgttgcctcttttgctacccctaaaatgattgcagactttctggttgagcgcaagactatttcttttgatgcctgcctggcccagattttctttgttcatctcttcactggcagtgaaatggtgctcctagtttccatggcctatgaccgttatgttgctatatgcaaacctctccactacatgacagtcatgagccgtcgtgtatgtgttgtgctcgtcctcatttcatggtttgtgggcttcatccatactaccagccagttggcattcactgttaatctgccattttgtggtcctaataaggtagacagttttttctgtgaccttcctctagtgaccaagttagcctgcatagacacttatgttgtcagcttactaatagttgcagatagtggctttctttctctgagttcctttctcctcttggttgtctcctacactgtaatacttgttacagttaggaatcgctcctctgcaagcatggcgaaggcccgctccacattgactgctcacatcactgtggtcactttattctttggaccatgcattttcatctatgtgtggcccttcagcagttactcagttgacaaagtccttgctgtattctacaccatcttcacgcttattttaaaccctgtaatctacacgctaagaaacaaagaagtgaaggcagctatgtcaaaactgaagagtcggtatctgaagcctagtcaggtttctgtagtcataagaaatgttcttttcctagaaacaaagtaaacttatgagactgttaccactttagccctgtctccatacacttacaagtggattcactgtaatcttaaagcaaatcaacttggcctgtgggaaa

SEQ ID NO: 162271 - DNA, 1032 bp, Homo sapiens
  Payload ID: 11813
  Gene Symbol: OR4K17
  Gene Name: olfactory receptor, family 4, subfamily K, member 17
  Uniprot ID: Q8NGC6
  ENST ID: ENST00000315543
  CDS Start-End: 1-1032
atggctctttatttttcactcatactccatggtatgagtgatcttttctttctctctacaggtcatccaagagcgagctgtaggatggaggccatgaaactattaaatcaatctcaagtgtcagaattcattttgctgggactgaccagctcccaggatgtagagtttcttctctttgccctcttctcggttatctatgtggtcacagttttgggtaaccttcttattatagtcacagtgtttaacacccctaacctgaatactcccatgtattttctccttggtaatctctcttttgtagatatgacccttgcttcttttgccacccctaaggtgattctgaacttgttaaaaaagcagaaggtaatttcttttgctgggtgcttcactcagatatttctccttcacttactgggtggggttgaaatggtactgttggtctccatggcttttgacagatatgtggccatttgtaagcccctacactacatgaccatcatgaacaagaaggtatgtgttttgcttgtagtgacctcatggctcttgggtctccttcactcagggtttcagataccatttgctgtgaacttgcccttttgtggtcccaatgtggtagacagcattttttgtgacctccctttggttactaagcttgcctgtatagacatatattttgtacaggtagtcattgttgccaacagtggcataatctccctgagctgtttcattattttgcttatctcctacagtctgatcctcataaccattaagaaccactctcctactgggcaatctaaagcccgttccactttgactgctcacatcacagtggtgattctcttctttggcccatgcatctttatctacatttggcccttcggcaaccactctgtagataagttccttgctgtgttttataccatcatcactcctatcttgaatccaattatctatactctgagaaacaaagaaatgaagatatccatgaaaaaactctggagagcttttgtgaattctagagaagatacttag

SEQ ID NO: 162272 - DNA, 1078 bp, Homo sapiens
  Payload ID: 11814
  Gene Symbol: OR4K2
  Gene Name: olfactory receptor, family 4, subfamily K, member 2
  Uniprot ID: Q8NGD2
  ENST ID: ENST00000298642
  CDS Start-End: 37-981
tttcgtgatacaggcttctgcctatgaatcaagacaatggatgtgggcaataagtctaccatgtctgaatttgttttgctggggctctctaattcctgggaactacagatgtttttctttatggtgttttcattgctttatgtggcaacaatggtgggtaacagcctcatagtcatcacagttatagtggaccctcacctacactctcctatgtatttcctgcttaccaatctttcaatcattgatatgtctcttgcttctttcgccaccccaaagatgattacagattacctaacaggtcacaaaaccatctcttttgatggctgccttacccagatattctttctccaccttttcactggaactgagatcatcttactcatggccatgtcctttgataggtatattgcaatatgcaagcccctgcactatgcttctgtcattagtccccaggtgtgtgttgctctcgtggtggcttcctggattatgggagttatgcattcaatgagtcaggtcatatttgccctcacgttaccattctgtggtccctatgaggtagacagctttttctgtgaccttcctgtggtgttccagttggcttgtgtggatacttatgttctgggcctctttatgatctcaacaagtggcataattgcgttgtcctgttttattgttttatttaattcatatgttattgtcctggttactgtgaagcatcattcttccagaggatcatctaaggccctttctacttgtacagctcatttcattgttgtcttcttgttctttgggccatgcatcttcatctacatgtggccactaagcagctttctcacagacaagattctgtctgtgttttataccatctttactcccactctgaacccaataatctatactttgaggaatcaagaagtaaagatagccatgaggaaactgaaaaataggtttctaaattttaataaggcaatgccttcatagtttttgtgacacagaacattagacacaatgctgtgttaggcttttctttctagagggttcttaccaaattgtaattgccaagaatttgtgagggctc

SEQ ID NO: 162273 - DNA, 1078 bp, Homo sapiens
  Payload ID: 11815
  Gene Symbol: OR4K5
  Gene Name: olfactory receptor, family 4, subfamily K, member 5
  Uniprot ID: Q8NGD3
  ENST ID: ENST00000315915
  CDS Start-End: 26-997
cagaacaagtttgcagcttggaaccatggataagtccaattcttcagtggtgtctgaatttgtactgttgggactctgtagttctcaaaaactccagcttttctatttttgtttcttctctgtgttgtatacagtcattgtgctgggaaatcttctcattatcctcacagtgacttctgataccagcctgcactcccctatgtactttctcttgggaaacctttcctttgttgacatttgtcaggcttcttttgctacccctaaaatgattgcagattttctgagtgcacacgagaccatatctttcagtggctgcatagcccaaattttctttattcacctttttactggaggggagatggtgctacttgtttcgatggcctatgacaggtatgtagccatatgcaaacccttatactatgtggtcatcatgagccgaaggacatgcactgtcttggtaatgatctcctgggctgtgagcttggtgcacacattaagccagttatcatttactgtgaacctgcctttttgtggacctaatgtagtagacagctttttttgtgatcttcctcgagtcaccaaacttgcctgcctggactcttacatcattgaaatactaattgtggtcaatagtggaattctttccctaagcactttctctctcttggtcagctcctacatcattattcttgttacagtttggctcaagtcttcagctgcaatggcaaaggcattttctacgctggcttcccatattgcagtagtaatattattctttggaccttgcatcttcatctatgtgtggccctttaccatctctcctttggataaatttcttgccatattttacactgttttcacccccgtcctaaaccccattatttatacactaaggaatagggatatgaaggctgccgtaaggaaaattgtgaaccattacctgaggccaaggagaatttctgaaatgtcactagtagtgagaacttcctttcattaagacaaaactccttcaaattcctcaggtcaatacactgtttaatattttaatgtatttttgtggtgtatctcaattgtgggg

SEQ ID NO: 162274 - DNA, 939 bp, Homo sapiens
  Payload ID: 11816
  Gene Symbol: OR4L1
  Gene Name: olfactory receptor, family 4, subfamily L, member 1
  Uniprot ID: Q8NH43
  ENST ID: ENST00000315683
  CDS Start-End: 1-939
atggatcttaaaaatggatctctagtgaccgagtttattttactaggattttttggacgatgggaacttcaaattttcttctttgtgacattttccctgatctacggtgctactgtgatgggaaacattctcattatggtcacagtgacatgtaggtcaacccttcattctcccttgtactttctccttggaaatctctcttttttggacatgtgtctctccactgccacaacacccaagatgatcatagatttgctcactgaccacaagaccatctctgtgtggggctgcgtgacccagatgttcttcatgcacttctttgggggtgctgagatgactcttctgataatcatggcctttgacaggtatgtagccatatgtaaacccctgcactataggacaatcatgagccacaagctgctaaaggggtttgcgatactttcatggataattggttttttacactccataagccagatagttttaacaatgaacttgcctttctgtggccacaatgtcataaacaacatattttgtgatcttccccttgtgatcaagcttgcttgcattgaaacatacaccctggaattatttgtcattgctgacagcgggctgctctctttcacctgtttcatcctcttgcttgtttcttacattgtcatcctggtcagtgtaccaaaaaaatcatcacatgggctctccaaggcgctgtccacattgtctgcccacatcattgtggtcactctgttctttggaccttgtatttttatctatgtttggccattcagtagtttggcaagcaataaaactcttgccgtattttatacagttatcacacccttactgaatccgagtatttataccctgagaaataagaaaatgcaagaggccataagaaaattacggttccaatatgttagttctgcacagaatttctag

SEQ ID NO: 162275 - DNA, 1116 bp, Homo sapiens
  Payload ID: 11817
  Gene Symbol: OR4M1
  Gene Name: olfactory receptor, family 4, subfamily M, member 1
  Uniprot ID: Q8NGD0
  ENST ID: ENST00000315957
  CDS Start-End: 82-1023
aactctagataaatgctatgtggactaattatagtttctttaattttcatagttatattatgaaaagagtaaattgaagaaatggaaactgcaaattacaccaaggtgacagaatttgttctcactggcctatcccagactcgggaggtccaactagtcctatttgttatatttctatccttctatttgttcatcctaccaggaaatatccttatcatttgcaccatcaggctagaccctcatctgacttctcctatgtatttcctgttggctaatctggccctccttgatatttggtactcttccattacagcccctaaaatgctcatagacttctttgtggagaggaagataatttcctttggtggatgcattgcacagctcttcttcttacactttgttggggcttcggagatgttcttgctcacagtgatggcctatgaccgctatgctgctatctgccgacccctccactatgctaccatcatgaatcgacgtctctgctgtatcctggtggctctctcctggatggggggcttcattcattctataatacaggtggctctcattgttcgacttcctttctgtgggcccaatgagttagacagttacttctgtgacatcacacaggttgtccggattgcctgtgccaacaccttcccagaggagttagtgatgatctgtagtagtggtctgatctctgtggtgtgtttcattgctctgttaatgtcctatgccttccttctggccttgctcaagaaacattcaggctcaggtgagaataccaacagggccatgtccacctgctattcccacattaccattgtggtgctaatgtttgggccatccatctacatttatgctcgcccatttgactcattttccctagataaagtggtgtctgtgtttcatactgtaatattccctttacttaatcccattatttacacattgagaaacaaggaagtaaaggcagccatgaggaaggtggtcaccaaatatattttgtgtgaagagaagtgaaagataaattatacattttatagtcctcctgaggatcattgtcctaaagcaggaagtatttgcagtaataatgctgcattcacttcctccgtt

SEQ ID NO: 162276 - DNA, 1133 bp, Homo sapiens
  Payload ID: 11818
  Gene Symbol: OR4M2
  Gene Name: olfactory receptor, family 4, subfamily M, member 2
  Uniprot ID: Q8NGB6
  ENST ID: ENST00000614722
  CDS Start-End: 99-1040
ttttgaaagcagtgatataactctaggtaaatgctatgtctactaattatagtttcttaattttcatagctatattatgaaaagagtaaattgaagaaatggaaactgcaaattacaccaaggtgacagaatttgttctcactggcctatcccagactccagaggtccaactagtcctatttgttatatttctatccttctatttgttcatcctaccaggaaatatccttatcatttgcaccatcagtctagaccctcatctgacctctcctatgtatttcctgttggctaatctggccttccttgatatttggtactcttccattacagcccctgaaatgctcatagacttctttgtggagaggaagataatttcttttgatggatgcattgcacagctcttcttcttacactttgctggggcttcggagatgttcttgctcacagtgatggcctttgacctctacactgctatctgccgacccctccactatgctaccatcatgaatcaacgtctctgctgtatcctggtggctctctcctggagggggggcttcattcattctatcatacaggtggctctcattgttcgacttcctttctgtgggcccaatgagttagacagttacttctgtgacatcacacaggttgtccggattgcctgtgccaacaccttcccagaggagttagtgatgatctgtagtagtggtctgatctctgtggtgtgtttgattgctctgttaatgtcctatgccttccttctggccttgttcaagaaactttcaggctcaggtgagaataccaacagggccatgtccacctgctattcccacattaccattgtggtgctaatgtttgggccatccatctacatttatgctcgcccatttgactcgttttccctagataaagtggtgtctgtgttcaatactttaatattccctttacgtaatcccattatttacacattgagaaacaaggaagtaaaggcagccatgaggaagttggtcaccaaatatattttgtgtaaagagaagtgaaagataaattatacattttatagttcccctgaggatcattgtcctaaagcaggaagtatttgcagtaataatgctgcattgacttcctccttt

SEQ ID NO: 162277 - DNA, 924 bp, Homo sapiens
  Payload ID: 11819
  Gene Symbol: OR4N2
  Gene Name: olfactory receptor, family 4, subfamily N, member 2
  Uniprot ID: Q8NGD1
  ENST ID: ENST00000315947
  CDS Start-End: 1-924
atggaaagcgagaacagaacagtgataagagaattcatcctccttggtctgacccagtctcaagatattcagctcctggtctttgtgctagttttaatattctacttcatcatcctccctggaaattttctcattattttcaccataaagtcagaccctgggctcacagcccccctctatttctttctgggcaacttggccttcctggatgcatcctactccttcattgtggctccccggatgttggtggacttcctctctgcgaagaagataatctcctacagaggctgcatcactcagctctttttcttgcacttccttggaggaggggagggattactccttgttgtgatggcctttgaccgctacatcgccatctgccggcctctgcactatcctactgtcatgaaccctagaacctgctatgcaatgatgttggctctgtggcttgggggttttgtccactccattatccaggtggtcctcatcctccgcttgcctttttgtggcccaaaccagctggacaacttcttctgtgatgtcccacaggtcatcaagctggcctgcaccgacacatttgtggtggagcttctgatggtcttcaacagtggcctgatgacactcctgtgctttctggggcttctggcctcctatgcagtcattctttgtcgcatacgagggtcttcttctgaggcaaaaaacaaggccatgtccacgtgcatcacccatatcattgttatattcttcatgtttggacctggcatcttcatctacacgcgccccttcagggctttcccagctgacaaggtggtttctctcttccacacagtgatttttcctttgttgaatcctgtcatttatacccttcgcaaccaggaagtgaaagcttccatgaaaaaggtgtttaataagcacatagcctga

SEQ ID NO: 162278 - DNA, 565 bp, Homo sapiens
  Payload ID: 11819
  Gene Symbol: OR4N2
  Gene Name: olfactory receptor, family 4, subfamily N, member 2
  ENST ID: ENST00000557414
  CDS Start-End: 501-565
tattaaactttaatgggtagctggtagacaattaacactctgggagggctcaaaccacataaccaaatgtgccaagataatcctgagctcactcattgtcagtcctgaagattttcctcagagaatctttcatctctttgctcctgagactatatattagaggattacagagtggtgttatcacagaatagaacaagtggatttttatctgagatctacaacttaagaagaatataagtgatgtatattctcttctactcttcatgtatggaatagaggggcttgcacagtagactcaagagaattgacatctggtgttaaaaaccaaaaatcatacaaatgactgatatgtatcattttccttattaaatatggaagaaaagggaggaggatgcagaaatggtaggctaaaagctccagagaaaaacttaacagattttatgattttgcagaagataagtccttgacctcttcattttcacattcagcaggccagggaaatggaaagcgagaacagaacagtgataagagaattcatcctccttggtctgacccagtctcaaga

SEQ ID NO: 162279 - DNA, 522 bp, Homo sapiens
  Payload ID: 11819
  Gene Symbol: OR4N2
  Gene Name: olfactory receptor, family 4, subfamily N, member 2
  ENST ID: ENST00000557677
  CDS Start-End: 85-522
aggaaaggtactagctcttctttatgcatctggtagaactcagctgtgaattcctgtgatcctgggctttttctggccagggaaatggaaagcgagaacagaacagtgataagagaattcatcctccttggtctgacccagtctcaagatattcagctcctggtctttgtgctagttttaatattctacttcatcatcctccctggaaattttctcattattttcaccataaagtcagaccctgggctcacagcccccctctatttctttctgggcaacttggccttcctggatgcatcctactccttcattgtggctccccggatgttggtggacttcctctctgcgaagaagataatctcctacagaggctgcatcactcagctctttttcttgcacttccttggaggaggggagggattactccttgttgtgatggcctttgaccgctacatcgccatctgccggcctctgcactatcctactgtcatgaaccctagaacctgctatgcaatgatgttg

SEQ ID NO: 162280 - DNA, 1126 bp, Homo sapiens
  Payload ID: 11820
  Gene Symbol: OR4N4
  Gene Name: olfactory receptor, family 4, subfamily N, member 4
  Uniprot ID: Q8N0Y3
  ENST ID: ENST00000328795
  CDS Start-End: 92-1042
tgtggcataccttgtgtttagttcaagaactataatctagatgtaacacctgaaaataaactcttttattgatattctacaggcagaagaaatgaagatagcaaacaacacagtagtgacagaatttatcctccttggtctgactcagtctcaagatattcagctcttggtctttgtgctgatcttaattttctaccttatcatcctccctggaaattttctcattattttcaccataaggtcagaccctgggctcacagcccccctctatttatttctgggcaacttggccttcctggatgcatcctactccttcattgtggctcccaggatgttggtggacttcctctctgagaaaaaggtaatctcctacagaggctgcatcactcagctctttttcttgcacttccttggaggaggggagggattactccttgttgtgatggcctttgaccgctacatcgccatctgccggcctctgcactgttcaactgtcatgaaccctagagcctgctatgcaatgatgttggctctgtggcttgggggttttgtccactccattatccaggtggtcctcatcctccgcttgcctttttgtggcccaaaccagctggacaacttcttctgtgatgtccgacaggtcatcaagctggcttgcaccgacatgtttgtggtggagcttctaatggtcttcaacagtggcctgatgacactcctgtgctttctggggcttctggcttcctatgcagtcatcctctgccatgttcgtagggcagcttctgaagggaagaacaaggccatgtccacgtgcaccactcgtgtcattattatacttcttatgtttggacctgctatcttcatctacatgtgccctttcagggccttaccagctgacaagatggtttctctctttcacacagtgatctttccattgatgaatcctatgatttatacccttcgcaaccaggaagtgaaaacttccatgaagaggttattgagtcgacatgtagtctgtcaagtggattttataataagaaactgagaaggaggaattctggctggaattcatatcattcatttaacaagtcctgtttttcactgagtacctcccatttgccaggtacca

SEQ ID NO: 162281 - DNA, 927 bp, Homo sapiens
  Payload ID: 11821
  Gene Symbol: OR4N5
  Gene Name: olfactory receptor, family 4, subfamily N, member 5
  Uniprot ID: Q8IXE1
  ENST ID: ENST00000333629
  CDS Start-End: 1-927
atggaaacacagaacctcacagtggtgacagaattcattcttcttggtctgacccagtctcaagatgctcaacttctggtctttgtgctagtcttaattttctaccttatcatcctccctggaaatttcctcatcattttcaccataaagtcagaccctgggctcacagcccccctctatttctttctgggcaacttggccttactggatgcatcctactccttcattgtggttcccaggatgttggtggacttcctctctgagaagaaggtaatctcctatagaagctgcatcactcagctctttttcttgcattttcttggagcgggagagatgttcctcctcgttgtgatggcctttgaccgctacatcgccatctgccggcctttacactattcaaccatcatgaaccctagagcctgctatgcattatcgttggttctgtggcttgggggctttatccattccattgtacaagtagcccttatcctgcacttgcctttctgtggcccaaaccagctcgataacttcttctgtgatgttccacaggtcatcaagctggcctgcaccaatacctttgtggtggagcttctgatggtctccaacagtggcctgctcagcctcctgtgcttcctgggccttctggcctcctatgcagtcatcctctgtcgtataagggagcactcctctgaaggaaagagcaaggctatttccacatgcaccacccatattatcattatatttctcatgtttggacctgctattttcatctacacttgccccttccaggctttcccagctgacaaggtagtttctcttttccatactgtcatctttcctttgatgaaccctgttatttatacgcttcgcaaccaggaggtgaaagcttccatgaggaagttgttaagtcaacatatgttttgctga

SEQ ID NO: 162282 - DNA, 939 bp, Homo sapiens
  Payload ID: 11822
  Gene Symbol: OR4P4
  Gene Name: olfactory receptor, family 4, subfamily P, member 4
  Uniprot ID: Q8NGL7
  ENST ID: ENST00000314612
  CDS Start-End: 1-939
atggaaaaaagcaataatagcactttgtttattctcttggggttttcccaaaataagaacattgaagtcctctgctttgtattatttttgttttgctacattgctatttggatgggaaacttactcataatgatttctatcacgtgcacccagctcattcaccaacccatgtatttcttcctcaattacctctcactctccgacctttgctacacatccacagtgacccccaaattaatggttgacttactggcagaaagaaagaccatttcctataataactgtatgatacaactctttaccacccatttttttggaggcatagagatcttcattctcacagggatggcctatgaccgctatgtggccatttgcaagcccctgcactacaccattattatgagcaggcaaaagtgtaacacaatcatcatagtttgttgtactgggggatttatacattctgccagtcagtttcttctcaccatctttgtaccattttgtggcccaaatgagatagatcactacttctgtgatgtgtatcctttgctgaaattggcctgttctaatatacacatgataggtctcttagtcattgctaattcaggcttaattgctttggtgacatttgttgtcttgttgttgtcttatgtttttatattgtataccatcagagcatactctgcagagagacgcagcaaagctcttgccacttgtagttctcatgtaattgttgtggtcctgttttttgcacctgcattgttcatttacattagaccggtcacaacattctcagaagataaagtgtttgcccttttttataccatcattgctcccatgttcaaccctctcatatacacgctgagaaacacagagatgaagaacgccatgaggaaagtgtggtgttgtcaaatactcctgaaaagaaatcaacttttctga

SEQ ID NO: 162283 - DNA, 944 bp, Homo sapiens
  Payload ID: 11823
  Gene Symbol: OR4Q2
  Gene Name: olfactory receptor, family 4, subfamily Q, member 2 (gene/pseudogene)
  ENST ID: ENST00000541415
  CDS Start-End: 1-944
atggataaaaaccaaacagaagtgatgagagaatttttcttgtcagggttctcacagacaccatctattgaagcagggctatttgtactatttcttttcttctatatgtccatttgggttggcaatgtcctcatcatggtcacagtagcatctgataaatacctgaattcatcacccatgtatttccttcttggcaacctctcatttctggacctatgttattcaacagtaacgacccctaagcttctggctgacttctttaatcatgaaaaactcatttcctatgaccaatgcattgtgcaactcttcttcctgcattttgtaggggcagctgagatgttcctgctcacagtgatggcgtacgatcgctatgttgcaatctgtcgcccgctgcactacaccactgtcatgagtcgggggttatgctgtgtgttggttgctgcctcctggatgggaggatttgtgcactccactgtccagaccattctcactgtccatctacccttttgtgggccaaatcaggtggaaaacttttttttgtgatgttccccctgtcatcaaacttgcttgtgctgacacttttgtcattgaattgctcatggtatctaacagtgggttgatctccaccatctcctttgtggtgctgatttcctcctacaccactatcctagtcaagattcgctccaaggaaggaaggcgaaaggcactctccacgtgtgcctctcacctcatggtggtaacactgttttttggaccctgtattttcatctacgctcgtcctttctctacattttctgtggacaagatggtgtctgtactctacaatgttattaccccaatgctaaaccccctcatctacacacttcggaacaaagaggtaaagtcagccatgcagaagctctgggtcagaaatgggcttacttggaaaaagcaggagacatgag

SEQ ID NO: 162284 - DNA, 921 bp, Homo sapiens
  Payload ID: 11823
  Gene Symbol: OR4Q2
  Gene Name: olfactory receptor, family 4, subfamily Q, member 2 (gene/pseudogene)
  ENST ID: ENST00000622436
  CDS Start-End: 1-921
atggataaaaaccaaacagaagtgatgagagaatttttcttgtcagggttctcacagacaccatctattgaagcagggctatttgtactatttcttttcttctatatgtccatttgggttggcaatgtcctcatcatggtcacagtagcatctgataaatacctgaattcatcacccatgtatttccttcttggcaacctctcatttctggacctatgttattcaacagtaacgacccctaagcttctggctgacttctttaatcatgaaaaactcatttcctatgaccaatgcattgtgcaactcttcttcctgcattttgtaggggcagctgagatgttcctgctcacagtgatggcgtacgatcgctatgttgcaatctgtcgcccgctgcactacaccactgtcatgagtcgggggttatgctgtgtgttggttgctgcctcctggatgggaggatttgtgcactccactgtccagaccattctcactgtccatctacccttttgtgggccaaatcaggtgacttttttttgtgatgttccccctgtcatcaaacttgcttgtgctgacacttttgtcattgaattgctcatggtatctaacagtgggttgatctccaccatctcctttgtggtgctgatttcctcctacaccactatcctagtcaagattcgctccaaggaaggaaggcgaaaggcactctccacgtgtgcctctcacctcatggtggtaacactgttttttggaccctgtattttcatctacgctcgtcctttctctacattttctgtggacaagatggtgtctgtactctacaatgttattaccccaatgctaaaccccctcatctacacacttcggaacaaagaggtaaagtcagccatgcagaagctctgggttaaaataataacttttcaa

SEQ ID NO: 162285 - DNA, 942 bp, Homo sapiens
  Payload ID: 11824
  Gene Symbol: OR4Q3
  Gene Name: olfactory receptor, family 4, subfamily Q, member 3
  Uniprot ID: Q8NH05
  ENST ID: ENST00000331723
  CDS Start-End: 1-942
atgaaaaaagaacaagattctaatgtgacagaatttgttcttctgggcctatcatcttcttgggagctgcagctatttctcttcttactatttttgtttttttacattgctattgtcctgggaaacctcttgatagtggtaacagtgcaagcccatgctcacctgctccaatctcctatgtattattttttaggtcatctctctttcattgacctatgcctgagctgtgttactgtgccaaagatgttaggggatttcctacagcagggcaagagcatctctttttcaggatgcctggcccagatctacttcctccactttctaggagccagtgagatgtttttgctgacagtcatggcctatgacaggtatgttgccatctgtaaccctttgcgctaccttacagtcatgaacccccagctatgcctttggttggttcttgcctgctggtgtgggggttttatccactctatcatgcaggtcatactagtcatccagctgcctttctgtgggcccaatgaactggacaacttctactgtgatgtcccacaagtcatcaagctggcctgcatggacacctatgtggtagaggtgctggtgatagccaacagtggtctgctgtctcttgtctgcttcttggtcttactattctcttatgctatcatcctgatcaccctgagaacacacttctgccagggccagaacaaggtcttctctacctgtgcttctcacctgacagtggtcagcctgatcttcgtgccatgcgtattcatctatttgaggcctttctgcagcttctctgtggataagatattctccttgttttacacagtgattacacctatgttgaaccccctcatctacacactcagaaatactgatatgaagacagctatgaagaagctgaggataaaaccatgtggcattccattgccttgttaa

SEQ ID NO: 162286 - DNA, 930 bp, Homo sapiens
  Payload ID: 11825
  Gene Symbol: OR4S1
  Gene Name: olfactory receptor, family 4, subfamily S, member 1
  Uniprot ID: Q8NGB4
  ENST ID: ENST00000319988
  CDS Start-End: 1-930
atgggtgccaagaacaatgtgactgagtttgttttatttggcctttttgagagcagagagatgcagcatacatgctttgtggtattcttcctctttcatgtgctcactgtcctggggaaccttctggtcatcatcaccatcaatgctagaaagaccctgaagtctcccatgtatttcttcctgagccagttgtcttttgctgacatatgttatccatccactaccatacccaagatgattgctgacacttttgtggagcataagatcatctccttcaatggctgcatgacccagctcttttctgcccacttctttggtggcactgagatcttcctccttacagccatggcctatgaccgctatgtggccatctgtaggcccctgcactacacagccatcatggattgccggaagtgtggcctgctagcgggggcctcctggttagctggcttcctgcattccatcctgcagaccctcctcacggttcagctgcctttttgtgggcccaatgagatagacaacttcttctgtgatgttcatcccctgctcaagttggcctgtgcagacacctacatggtaggtctcatcgtggtggccaacagcggtatgatttctttagcatccttttttatccttatcatttcctatgttatcatcttactgaacctaagaagccagtcatctgaggaccggcgtaaggctgtctccacatgtggctcacacgtaatcactgtccttttggttctcatgccccccatgttcatgtacattcgtccctccaccaccctggctgctgacaaacttatcatcctctttaacattgtgatgccacctttgctgaaccctttgatctatacactaaggaacaacgatgtgaaaaatgccatgaggaagctgtttagggtcaagaggagcttaggggagaagtga

SEQ ID NO: 162287 - DNA, 936 bp, Homo sapiens
  Payload ID: 11826
  Gene Symbol: OR4S2
  Gene Name: olfactory receptor, family 4, subfamily S, member 2
  Uniprot ID: Q8NH73
  ENST ID: ENST00000312422
  CDS Start-End: 1-936
atggaaaaaataaacaacgtaactgaattcattttctggggtctttctcagagcccagagattgagaaagtttgttttgtggtgttttctttcttctacataatcattcttctgggaaatctcctcatcatgctgacagtttgcctgagcaacctgtttaagtcacccatgtatttctttctcagcttcttgtcttttgtggacatttgttactcttcagtcacagctcccaagatgattgttgacctgttagcaaaggacaaaaccatctcctatgtggggtgcatgttgcaactgtttggagtacatttctttggttgcactgagatcttcatccttactgtaatggcctatgatcgttatgtggctatctgtaaacccctacattatatgaccatcatgaaccgggagacatgcaataaaatgttattagggacgtgggtaggtgggttcttacactccattatccaagtggctctggtagtccaactacccttttgtggacccaatgagatagatcactacttttgtgatgttcaccctgtgttgaaacttgcctgcacagaaacatacattgttggtgttgttgtgacagccaacagtggtaccattgctctggggagttttgttatcttgctaatctcctacagcatcatcctagtttccctgagaaagcagtcagcagaaggcaggcgcaaagccctctccacctgtggctcccacattgccatggtcgttatctttttcggcccctgtacttttatgtacatgcgccctgatacgaccttttcagaggataagatggtggctgtattttacaccattatcactcccatgttaaatcctctgatttatacactgagaaatgcagaagtaaagaatgcaatgaagaaactgtggggcagaaatgttttcttggaggctaaagggaaatag

SEQ ID NO: 162288 - DNA, 918 bp, Homo sapiens
  Payload ID: 11827
  Gene Symbol: OR4X1
  Gene Name: olfactory receptor, family 4, subfamily X, member 1 (gene/pseudogene)
  Uniprot ID: Q8NH49
  ENST ID: ENST00000320048
  CDS Start-End: 1-918
atggttgctacaaacaatgtgactgaaataattttcgtgggattttcccagaattggagtgagcagagggtcatttctgtgatgtttctcctcatgtacacagctgttgtgctgggcaatggcctcattgtggtgaccatcctggccagcaaagtgctcacctcccccatgtatttctttctcagctacttatcctttgtggagatctgctactgttctgtcatggcccccaagcttatctttgactcctttatcaagaggaaagtcatttctctcaagggctgcctcacacagatgttttccctccatttctttggtggcactgaggcctttctcctgatggtgatggcctatgaccgctatgtggccatctgcaagcccttgcactacatggccatcatgaaccagcgaatgtgtggtctcctcgtgaggatagcatggggcgggggcctgctgcattctgttgggcaaaccttcctgattttccagctcccgttctgtggccccaacatcatggaccactacttctgtgatgtccacccagtgctggagctggcctgcgcagacaccttcttcattagcctgctgatcatcaccaatggcggctccatctccgtagtcagtttcttcgtgctgatggcttcctacctgatcatcctgcacttcctgagaagccacaacttggaggggcagcacaaggccctctccacctgtgcctctcatgtcacagttgtcgacctgttcttcataccttgctccttggtctatattaggccctgtgtcaccctccctgcagacaagatagttgctgtattttatacagtggtcacacctctcttaaaccctgtgatttactccttcaggaatgctgaagtgaaaaatgccatgaggagatttattgggggaaaagtaatttga

SEQ ID NO: 162289 - DNA, 918 bp, Homo sapiens; identical to SEQ ID NO: 162288
  Payload ID: 11827
  Gene Symbol: OR4X1
  Gene Name: olfactory receptor, family 4, subfamily X, member 1 (gene/pseudogene)
  Uniprot ID: Q8NH49
  ENST ID: ENST00000624144
  CDS Start-End: 1-918

SEQ ID NO: 162290 - DNA, 918 bp, Homo sapiens; identical to SEQ ID NO: 162288
  Payload ID: 11827
  Gene Symbol: OR4X1
  Gene Name: olfactory receptor, family 4, subfamily X, member 1 (gene/pseudogene)
  Uniprot ID: Q8NH49
  ENST ID: ENST00000624797
  CDS Start-End: 1-918

SEQ ID NO: 162291 - DNA, 912 bp, Homo sapiens
  Payload ID: 11828
  Gene Symbol: OR4X2
  Gene Name: olfactory receptor, family 4, subfamily X, member 2 (gene/pseudogene)
  Uniprot ID: Q8NGF9
  ENST ID: ENST00000623137
  CDS Start-End: 1-912
atgactgaattcatttttctggtactttctcccaaccaggaggtgcagagggtttgctttgtgatatttctgttcttgtacacagcaattgtgctggggaatttcctcattgtgctcactgtcatgaccagcagaagccttggttcccccatgtacttcttcctcagctacctctccttcatggagatctgctactcctccgctacagcccccaaactcatctcagatctgctggctgaaaggaaagtcatatcttggtggggctgcatggcacagcttttcttcttgcacttctttggtggcactgagattttcctgctcactgtgatggcctatgaccactatgtggccatctgcaagcccctcagctacaccaccatcatgaactggcaggtgtgtactgtccttgtaggaatagcatgggtgggaggcttcatgcattcctttgcacaaatccttctcatcttccacctgctcttctgtggccccaatgtgatcaatcactatttctgtgacctagttccccttctcaaacttgcctgctctgacaccttcctcattggtctgctgattgttgccaatggaggcaccctgtctgtgatcagttttggggtcctcttagcatcctatatggtcatcttgctccatctgagaacctggagctctgaagggtggtgcaaagccctctccacctgtgggtcccatttcgctgtggttatcttgttctttgggccctgcgtcttcaactctctgaggccttctaccactctgcccatagacaagatggtggctgtgttctacacagtgataaccgcgatcctgaaccctgtcatctactctctgagaaatgctgaaatgaggaaggccatgaagaggctgtggattaggacattgagactaaatgagaaatag

SEQ ID NO: 162292 - DNA, 1051 bp, Homo sapiens
  Payload ID: 11829
  Gene Symbol: OR5A1
  Gene Name: olfactory receptor, family 5, subfamily A, member 1
  Uniprot ID: Q8NGJ0
  ENST ID: ENST00000302030
  CDS Start-End: 26-973
cttgtccttgtggtccacgggaagcatgtccataaccaaagcctggaacagctcatcagtgaccatgttcatcctcctgggattcacagaccatccagaactccaggccctcctctttgtgaccttcctgggcatctatcttaccaccctggcctggaacctggccctcatttttctgatcagaggtgacacccatctgcacacacccatgtacttcttcctaagcaacttatctttcattgacatctgctactcttctgctgtggctcccaatatgctcactgacttcttctgggagcagaagaccatatcatttgtgggctgtgctgctcagttttttttctttgtcggcatgggtctgtctgagtgcctcctcctgactgctatggcatacgaccgatatgcagccatctccagcccccttctctaccccactatcatgacccagggcctctgtacacgcatggtggttggggcatatgttggtggcttcctgagctccctgatccaggccagctccatatttaggcttcacttttgcggacccaacatcatcaaccacttcttctgcgacctcccaccagtcctggctctgtcttgctctgacaccttcctcagtcaagtggtgaatttcctcgtggtggtcactgtcggaggaacatcgttcctccaactccttatctcctatggttacatagtgtctgcggtcctgaagatcccttcagcagagggccgatggaaagcctgcaacacgtgtgcctcgcatctgatggtggtgactctgctgtttgggacagcccttttcgtgtacttgcgacccagctccagctacttgctaggcagggacaaggtggtgtctgttttctattcattggtgatccccatgctgaaccctctcatttacagtttgaggaacaaagagatcaaggatgccctgtggaaggtgttggaaaggaagaaagtgttttcttaggtcatgcgtagaaacttatttatccaaactgctggagaattaaacaatccaagccttcacctccacctctgcctcagg

SEQ ID NO: 162293 - DNA, 1034 bp, Homo sapiens
  Payload ID: 11830
  Gene Symbol: OR5A2
  Gene Name: olfactory receptor, family 5, subfamily A, member 2
  Uniprot ID: Q8NGI9
  ENST ID: ENST00000302040
  CDS Start-End: 24-998
gactttatgcaggaagcaggcctatggctgtaggaaggaacaacacaattgtgacaaaattcattctcctgggactttcagaccatcctcaaatgaagattttccttttcatgttatttctggggctctacctcctgacgttggcctggaacttaagcctcattgccctcattaagatggactctcacctgcacatgcccatgtacttcttcctcagtaacctgtccttcctggacatctgctatgtgtcctccaccgcccctaagatgctgtctgacatcatcacagagcagaaaaccatttcctttgttggctgtgccactcagtactttgtcttctgtgggatggggctgactgaatgctttctcctggcagctatggcctatgaccggtatgctgcaatctgcaaccccttgctttacacagtcctcatatcccatacactttgtttaaagatggtggttggcgcctatgtgggtggattccttagttctttcattgaaacatactctgtctatcagcatgatttctgtgggccctatatgatcaaccactttttctgtgacctccctccagtcctggctctgtcctgctctgataccttcaccagcgaggtggtgaccttcatagtcagtgttgtcgttggaatagtgtctgtgctagtggtcctcatctcttatggttacattgttgctgctgttgtgaagatcagctcagctacaggtaggacaaaggccttcagcacttgtgcctctcacctgactgctgtgaccctcttctatggttctggattcttcatgtacatgcgacccagttccagctactccctaaacagggacaaggtggtgtccatattctatgccttggtgatccccgtggtgaatcccatcatctacagttttaggaataaggagattaaaaatgccatgaggaaagccatggaaagggaccccgggatttctcacggtggaccattcatttttatgaccttgggctaatgtttacaatgaagctgtgagctaggtgaattgtgc

SEQ ID NO: 162294 - DNA, 925 bp, Homo sapiens
  Payload ID: 11831
  Gene Symbol: OR5AC1
  Gene Name: olfactory receptor, family 5, subfamily AC, member 1 (gene/pseudogene)
  ENST ID: ENST00000429239
  CDS Start-End: 1-925
atggcagaagaaaataagattctggtgactcactttgtcctcacaggactcacagatcatccagggctgcaggcgcccctgttcctggtgttcttggtcatctacctcatcaccctggtgggcaaccttggcctgatggctctcatctggaaggacccccaccttcacacccccatatacttatttcttggcagtttagcctttgcagatgcatgcacttcatcctctgtaacttctaagatgcttatcaatttttttatcaaagaatcatatgctatccatggctaagtgtgccacccagttttacttttttggttccaatgcaaccacagaatgcttcctgctggtagtgatggcctatgaccgctatgtagccatatgcaatcccttgctttatccagtggtgatgtccaatagcctctgtactcagtttataggtatttcatattttattggttttctgcattcagcgattcatgtgggtttgttatttagattaactttctgcaggtccaatattatacattatttctactgtgaaattttacagctgttcaaaatttcttgcaccaatcctacagttaatatacttctgattttcatcttttcagcatttatacaagtcttcacttttatgactcttatcgtctcttactcctatattctctctgccatcctgaaaaagaagtctgagaagggtagaagcaaagccttctctacttgcagtgcccatctgctctctgtctctttgttctacggcaccctcttcttcatgtatgtgagttctaggtctggatcagctgcagatcaggccaaaatgtattctttattttacacaataataattcctttactaaatccttttatttacagcctaaggaacaaagaggttatagatgccctgagaagaatcatgaagaaataa

SEQ ID NO: 162295 - DNA, 930 bp, Homo sapiens
  Payload ID: 11832
  Gene Symbol: OR5AC2
  Gene Name: olfactory receptor, family 5, subfamily AC, member 2
  Uniprot ID: Q9NZP5
  ENST ID: ENST00000358642
  CDS Start-End: 1-930
atggatatatcagagggaaataagactcttgtgacagagtttgttctcacaggacttacagatcgaccatggctgcacgtcctcttctttgttgtgtttttggtggtctatctcatcaccatggtgggcaaccttggactgatagttctaatttggaacgacccccatcttcatatgcccatgtacttattccttggtggtttagccttttcagatgcttgtacttcaacctctataacccctaggatgctggtcaatttcttagacaagactgcaatgatatccctagctgagtgcatcacccagttttacttttttgcttccagtgcaactacagaatgcttcctcctggtgatgatggcctatgaccgctatgtagccatatgtaatcccttgctttatccagtgatgatgtccaacaaactcagcgctcagttgctaagtatttcatatgtaattggtttcctgcatcctctggttcatgtgagtttactattgcgactaactttctgcaggtttaacataatacattatttctactgtgaaattttacaactgttcaaaatttcatgcaatggtccatctattaacgcactaatgatatttatttttggtgcttttatacaaatacccactttaatgactatcataatctcttatactcgtgtgctctttgatattctgaaaaaaaagtctgaaaagggcagaagcaaagccttctccacatgcggcgcccatctgctttctgtctcattgtactacggaactctgatcttcatgtatgtgcgtcctgcatctggcttagctgaagaccaagacaaagtgtattctctgttttacacgattataattcccctgctaaacccatttatttacagcttgagaaataaaaaagtcatgcatgcattgagaagagttataaggaagtaa

SEQ ID NO: 162296 - DNA, 996 bp, Homo sapiens
  Payload ID: 11833
  Gene Symbol: OR5AK2
  Gene Name: olfactory receptor, family 5, subfamily AK, member 2
  Uniprot ID: Q8NH90
  ENST ID: ENST00000326855
  CDS Start-End: 43-972
ttctgggtccttctcttggtcatttctagacttttactagccatgacactaggaaacagcactgaagtcactgaattctatcttctgggatttggtgcccagcatgagttttggtgtatcctcttcattgtattccttctcatctatgtgacctccataatgggtaatagtggaataatcttactcatcaacacagattccagatttcaaacactcacgtacttttttctacaacatttggcttttgttgatatctgttacacttctgctatcactcccaagatgctccaaagcttcacagaagaaaagaatttgatgttatttcagggctgtgtgatacaattcttagtttatgcaacatttgcaaccagtgactgttatctcctggctatgatggcagtggatccttatgttgccatctgtaagccccttcactatactgtaatcatgtcccgaacagtctgcatccgtttggtagctggttcatacatcatgggctcaataaatgcctctgtacaaacaggttttacatgttcactgtccttctgcaagtccaatagcatcaatcactttttctgtgatgttccccctattcttgctctttcatgctccaatgttgacatcaacatcatgctacttgttgtctttgtgggatctaacttgatattcactgggttggtcgtcatcttttcctacatctacatcatggccaccatcctgaaaatgtcttctagtgcaggaaggaaaaaatccttctcaacatgtgcttcccacctgaccgcagtcaccattttctatgggacactctcttacatgtatttgcagtctcattctaataattcccaggaaaatatgaaagtggcctttatattttatggcacagttattcccatgttaaatcctttaatctatagcttgagaaataaggaagtaaaagaagctttaaaagtgatagggaaaaagttattttaaatcagccccagttgttaacattca

SEQ ID NO: 162297 - DNA, 1037 bp, Homo sapiens
  Payload ID: 11834
  Gene Symbol: OR5AN1
  Gene Name: olfactory receptor, family 5, subfamily AN, member 1
  Uniprot ID: Q8NGI8
  ENST ID: ENST00000313940
  CDS Start-End: 48-983
gcaatccattctcttgtctcctttctgatattaggagcactgagccaatgactgggggaggaaatattacagaaatcacctatttcatcctgctgggattctcagattttcccaggatcataaaagtgctcttcactatattcctggtgatctacattacatctctggcctggaacctctccctcattgttttaataaggatggattcccacctccatacacccatgtatttcttcctcagtaacctgtccttcatagatgtctgctatatcagctccacagtccccaagatgctctccaacctcttacaggaacagcaaactatcacttttgttggttgtattattcagtactttatcttttcaacgatgggactgagtgagtcttgtctcatgacagccatggcttatgatcgttatgctgccatttgtaaccccctgctctattcatccatcatgtcacccaccctctgtgtttggatggtactgggagcctacatgactggcctcactgcttctttattccaaattggtgctttgcttcaactccacttctgtgggtctaatgtcatcagacatttcttctgtgacatgccccaactgttaatcttgtcctgtactgacactttctttgtacaggtcatgactgctatattaaccatgttctttgggatagcaagtgccctagttatcatgatatcctatggctatattggcatctccatcatgaagatcacttcagctaaaggcaggtccaaggcattcaacacctgtgcttctcatctaacagctgtttccctcttctatacatcaggaatctttgtctatttgagttccagctctggaggttcttcaagctttgacagatttgcatctgttttctacactgtggtcattcccatgttaaatcccttgatttacagtttgaggaacaaagaaattaaagatgccttaaagaggttgcaaaagagaaagtgctgctgagtttacagattctgagatttctgccagatatggcccatcagaatctccctaacc

SEQ ID NO: 162298 - DNA, 951 bp, Homo sapiens
  Payload ID: 11835
  Gene Symbol: OR5AP2
  Gene Name: olfactory receptor, family 5, subfamily AP, member 2
  Uniprot ID: Q8NGF4
  ENST ID: ENST00000302981
  CDS Start-End: 1-951
atgagacttatgaaagaggttcgaggcagaaatcaaacagaagtaacagaatttctcctcttaggactttccgacaatccagatctacaaggagtcctctttgcattgtttctgttgatctatatggcaaacatggtgggcaatttggggatgattgtattgattaagattgatctctgtctccacacccccatgtatttctttctcagtagcctctcttttgtagatgcctcttactcttcttccgtcactcccaagatgctggtgaacctcatggctgagaataaggccatttcttttcatggatgtgctgcccagttctacttctttggctccttcctggggactgagtgcttcctgttggccatgatggcatatgaccgctatgcagccatttggaaccccctgctctacccagttctcgtgtctgggagaatttgctttttgctaatagctacctccttcttagcaggttgtggaaatgcagccatacatacagggatgacttttaggttgtccttttgtggttctaataggatcaaccatttctactgtgacaccccgccactgctcaaactctcttgctctgatacccacttcaatggcattgtgatcatggcattctcaagttttattgtcatcagctgtgttatgattgtcctcatttcctacctgtgtatcttcattgccgtcttgaagatgccttcgttagagggcaggcacaaagccttctccacctgtgcctcttacctcatggctgtcaccatattctttggaacaatcctcttcatgtacttgcgccctacatctagctactcaatggagcaagacaaggttgtctctgtcttttatacagtaataatccctgtgctaaatcccctcatctatagtttaaaaaataaggatgtaaaaaaggccctaaagaagatcttatggaaacacatcttgtag

SEQ ID NO: 162299 - DNA, 1006 bp, Homo sapiens
  Payload ID: 11835
  Gene Symbol: OR5AP2
  Gene Name: olfactory receptor, family 5, subfamily AP, member 2
  ENST ID: ENST00000544374
  CDS Start-End: 30-983
tgtgcatcttctttcttattgcagctcaaatgatgagacttatgaaagaggttcgaggcagaaatcaaacagaagtaacagaatttctcctcttaggactttccgacaatccagatctacaaggagtcctctttgcattgtttctgttgatctatatggcaaacatggtgggcaatttggggatgattgtattgattaagattgatctctgtctccacacccccatgtatttctttctcagtagcctctcttttgtagatgcctcttactcttcttccgtcactcccaagatgctggtgaacctcatggctgagaataaggccatttcttttcatggatgtgctgcccagttctacttctttggctccttcctggggactgagtgcttcctgttggccatgatggcatatgaccgctatgcagccatttggaaccccctgctctacccagttctcgtgtctgggagaatttgctttttgctaatagctacctccttcttagcaggttgtggaaatgcagccatacatacagggatgacttttaggttgtccttttgtggttctaataggatcaaccatttctactgtgacaccccgccactgctcaaactctcttgctctgatacccacttcaatggcattgtgatcatggcattctcaagttttattgtcatcagctgtgttatgattgtcctcatttcctacctgtgtatcttcattgccgtcttgaagatgccttcgttagagggcaggcacaaagccttctccacctgtgcctcttacctcatggctgtcaccatattctttggaacaatcctcttcatgtacttgcgccctacatctagctactcaatggagcaagacaaggttgtctctgtcttttatacagtaataatccctgtgctaaatcccctcatctatagtttaaaaaataaggatgtaaaaaaggccctaaagaagatcttatggaaacacatcttgtagagccatgttacccatcatttgtt

SEQ ID NO: 162300 - DNA, 933 bp, Homo sapiens
  Payload ID: 11836
  Gene Symbol: OR5AR1
  Gene Name: olfactory receptor, family 5, subfamily AR, member 1 (gene/pseudogene)
  Uniprot ID: Q8NGP9
  ENST ID: ENST00000625024
  CDS Start-End: 1-933
atggataaagaaaacagctcaatggtgactgagtttatcttcatgggcatcacccaggaccctcagatggagatcatcttcttcgtggtcttcctcatagtttacctggttaatgtagtggggaatattggtatgattatcctgattacaacagacactcagcttcacacacccatgtattttttcctctgcaacctctcctttgttgacctgggctactcctcagccattgcccccaggatgctggctgacttcctaacaaatcacaaagttatctccttctccagctgtgccacccagtttgctttttttgtaggttttgtggatgctgagtgctatgtcctggcagccatggcctatggtcgttttgtggccatttgtcgacccctccactatagcaccttcatgtccaagcaggtctgcttggctctcatgctgggctcttacctggctggtctagtgagtttagtagcccacactaccctcaccttcagcctgagttactgtggttccaatatcatcaatcatttcttctgcgaaatcccaccactcttggccctctcttgctcagacacctacatcagtgagatcttgctcttcagtctgtgtggcttcattgaattcagcaccatcctcatcatcttcatctcctatacctttatccttgttgcaatcatcagaatgcgttcagctgaaggccgccttaaggctttctccacctgcgggtctcaccttactggcatcaccctcttctatggcacagtcatgtttatgtacctgaggccaacatccagctactccctggaccaagacaagtgggcctctgtgttctacacggttatcatccccatgttaaatcccttgatctacagtttgcggaacaaggatgtgaaagctgctttcaaaaagctaattggaaaaaaatctcaataa

SEQ ID NO: 162301 - DNA, 975 bp, Homo sapiens
  Payload ID: 11837
  Gene Symbol: OR5AS1
  Gene Name: olfactory receptor, family 5, subfamily AS, member 1
  Uniprot ID: Q8N127
  ENST ID: ENST00000313555
  CDS Start-End: 1-975
atgttggagagtaattacaccatgccaactgagttcctatttgttggattcacagattatctacctctcagagtcacactgttcttggtattccttctggtatatacattaactatggtcggaaatatactcttaataattctagttaatattaattcaagccttcaaattcccatgtattattttcttagcaacttatctttcttagacatcagctgttctacagcaatcactcctaaaatgctggcaaacttcttggcatccaggaaaagcatctctccttatgggtgtgcactacaaatgtttttcttcgcttcttttgctgatgctgagtgccttatcctggcagcaatggcttatgaccgctatgcagccatctgcaacccactgctctatactacactgatgtctaggagagtctgtgtctgcttcattgtgttggcatatttcagtggaagtacaacatcactggtccatgtgtgcctcacattcaggctgtcattttgtggctccaatatcgtcaatcattttttctgtgatatcccacctcttctggctttatcatgtacagacactcagatcaaccagcttctgctctttgctttgtgcagcttcatccagaccagcacttttgtggtaatatttatttcttacttctgcatcctcatcactgtgttgagcatcaagtcctcaggtggcagaagcaaaacattctccacttgtgcttcccacctcatagcagtcaccttattctatggagcgctcctgtttatgtacttacagcccaccactagctattccctagacactgataaggtggtggcagtgttttatactgttgtatttcccatgtttaatccaataatttatagtttcagaaacaaggatgtgaaaaatgctctcaaaaagctattagaaagaattggatattcaaatgaatggtatttaaatcgtttaagaatagtcaatatctaa

SEQ ID NO: 162302 - DNA, 1199 bp, Homo sapiens
  Payload ID: 11838
  Gene Symbol: OR5AU1
  Gene Name: olfactory receptor, family 5, subfamily AU, member 1
  Uniprot ID: Q8NGC0
  ENST ID: ENST00000304418
  CDS Start-End: 39-1127
ccaactaaccaaccaaccaaggagaaaagatcctctctatgacagagtttcatctgcaaagccaaatgccctcaataagactcatcttcagaaggctgtccttaggcagaattaaacccagtcagagccccaggtgttcaacctcatttatggtggtgccttctttctccatcgcagagcactggagaaggatgaaaggggcaaacctgagccaagggatggagtttgagctcttgggcctcaccactgacccccagctccagaggctgctcttcgtggtgttcctgggcatgtacacagccactctgctggggaacctggtcatgttcctcctgatccatgtgagtgccaccctgcacacacccatgtactccctcctgaagagcctctccttcttggatttctgctactcctccacggttgtgccccagaccctggtgaacttcttggccaagaggaaagtgatctcttattttggctgcatgactcagatgttcttctatgcgggttttgccaccagtgagtgctatctcatcgctgccatggcctatgaccgctatgccgctatttgtaaccccctgctctactcaaccatcatgtctcctgaggtctgtgcctcgctgattgtgggctcctacagtgcaggattcctcaattctcttatccacactggctgtatctttagtctgaaattctgcggtgctcatgtcgtcactcacttcttctgtgatgggccacccatcctgtccttgtcttgtgtagacacctcactgtgtgagatcctgctcttcatttttgctggtttcaaccttttgagctgcaccctcaccatcttgatctcctacttcttaattctcaacaccatcctgaaaatgagctcggcccagggcaggtttaaggcattttccacctgtgcatcccacctcactgccatctgcctcttctttggcacaacactttttatgtacctgcgccccaggtccagctactccttgacccaggaccgcacagttgctgtcatctacacagtggtgatcccagtgctgaaccccctcatgtactctttgagaaacaaggatgtgaagaaagctttaataaaggtttggggtaggaaaacaatggaatgatttctcaatgcattaccacatatctttagaaagtcaagggaacttttaccttaggtggtgtcaccctgagca

SEQ ID NO: 162303 - DNA, 1054 bp, Homo sapiens
  Payload ID: 11839
  Gene Symbol: OR5B12
  Gene Name: olfactory receptor, family 5, subfamily B, member 12
  Uniprot ID: Q96R08
  ENST ID: ENST00000302572
  CDS Start-End: 23-967
cagggcagctacataattcccaatggagaacaacacagaggtgactgaattcatccttgtggggttaactgatgacccagaactgcagatcccactcttcatagtcttccttttcatctacctcatcactctggttgggaacctggggatgattgaattgattctactggactcctgtctccacacccccatgtacttcttcctcagtaacctctccctggtggactttggttattcctcagctgtcactcccaaggtgatggtggggtttctcacaggagacaaattcatattatataatgcttgtgccacacaattcttcttctttgtagcctttatcactgcagaaagtttcctcctggcatcaatggcctatgaccgctatgcagcattgtgtaaacccctgcattacaccaccaccatgacaacaaatgtatgtgcttgcctggccataggctcctacatctgtggtttcctgaatgcatccattcatactgggaacactttcaggctctccttctgtagatccaatgtagttgaacactttttctgtgatgctcctcctctcttgactctctcatgttcagacaactacatcagtgagatggttattttttttgtggtgggattcaatgacctcttttctatcctggtaatcttgatctcctacttatttatatttatcaccatcatgaagatgcgctcacctgaaggacgccagaaggccttttctacttgtgcttcccaccttactgcagtttccatcttttatgggacaggaatctttatgtacttacgacctaactccagccatttcatgggcacagacaaaatggcatctgtgttctatgccatagtcattcccatgttgaatccactggtctacagcctgaggaacaaagaggttaagagtgcctttaaaaagactgtagggaaggcaaaggcctctataggattcatattttaattataaagaattcacaataagataattttttccacctcatattaatctttgtctaccaagcccaatatttgggcttcctcatggaca

SEQ ID NO: 162304 - DNA, 946 bp, Homo sapiens
  Payload ID: 11840
  Gene Symbol: OR5B17
  Gene Name: olfactory receptor, family 5, subfamily B, member 17
  Uniprot ID: Q8NGF7
  ENST ID: ENST00000357377
  CDS Start-End: 1-945
atggagaataatacagaggtgagtgaattcatcctgcttggtctaaccaatgccccagaactacaggttcccctctttatcatgtttaccctcatctacctcatcactctgactgggaacctggggatgatcatattaatcctgctggactctcatctccacactcccatgtacttttttctcagtaacctgtctcttgcaggcattggttactcctcagctgtcactccaaaggttttaactgggttgcttatagaagacaaagccatctcctacagtgcctgtgctgctcagatgttcttttgtgcagtctttgccactgtggaaaattacctcttgtcctcaatggcctatgaccgctacgcagcagtgtgtaaccccctacattataccaccaccatgacaacacgtgtgtgtgcttgtctggctataggctgttatgtcattggttttctgaatgcttctatccaaattggagatacatttcgcctctctttctgcatgtccaatgtgattcatcactttttctgtgacaaaccagcagtcattactctgacctgctctgagaaacacattagtgagttgattcttgttcttatatcaagttttaatgtcttttttgcacttcttgttaccttgatttcctatctgttcatattgatcaccattcttaagaggcacacaggtaagggataccagaagcctttatctacctgtggttctcacctcattgccattttcttattttatataactgtcatcatcatgtacatacgaccaagttccagtcattccatggacacagacaaaattgcatctgtgttctacactatgatcatccccatgctcagtcctatagtctataccctgaggaacaaagacgtgaagaatgcattcatgaaggttgttgagaaggcaaaatattctctagattcagtcttttaat

SEQ ID NO: 162305 - DNA, 1049 bp, Homo sapiens
  Payload ID: 11841
  Gene Symbol: OR5B2
  Gene Name: olfactory receptor, family 5, subfamily B, member 2
  Uniprot ID: Q96R09
  ENST ID: ENST00000302581
  CDS Start-End: 53-982
ttgctttatttctcattgctacaggtcatcttaagtttctcagataatactgatggagaattgtacggaagtgacaaagttcattcttctaggactaaccagtgtcccagaactacagatccccctctttatcttgttcaccttcatctacctcctcactctgtgtgggaacctggggatgatgttgctgatcctgatggactcttgtctccacacccccatgtactttttcctcagtaacctgtctctggtggactttggatactcctcagctgtcactcccaaggtcatggctgggttccttagaggagacaaggtcatctcctacaatgcatgtgctgttcagatgttcttctttgtagccttggccacggtggaaaattacttgttggcctcaatggcctatgaccgctatgcagcagtgtgcaaacccctacactacaccaccaccatgacggccagtgtaggtgcctgtctggccctaggctcatatgtctgtggcttcctaaatgcctcattccacattgggggcatattcagtctctctttctgtaaatccaatctggtacatcactttttctgtgatgttccagcagtcatggctctgtcttgctctgataaacacactagtgaggtgattctggtttttatgtcaagctttaatatcttttttgttcttctagttatctttatctcctacttgttcatattcatcaccatcttgaagatgcattcagctaagggacaccaaaaagcattgtccacctgtgcctctcacttcactgcagtctccgtcttctatgggacagtaatcttcatctacttgcagcccagctccagccactccatggacacagacaaaatggcatctgtgttctatgctatgatcatccccatgctgaaccctgtggtctacagcctgaggaacagagaagtccagaatgcattcaagaaagtgttgagaaggcaaaaatttctataagtttggaattttaacattgttgtatacacaaaaatgttgtttccctcatctcagactttcctcatgc

SEQ ID NO: 162306 - DNA, 931 bp, Homo sapiens
  Payload ID: 11842
  Gene Symbol: OR5B21
  Gene Name: olfactory receptor, family 5, subfamily B, member 21
  Uniprot ID: A6NL26
  ENST ID: ENST00000360374
  CDS Start-End: 1-930
atggagaatagcacagaagtgacagagtttatcctcttgggattaacagatgaccccaatcttcagatacccctcctcctggcatttttattcatctacctcatcaccctgcttgggaatgggggaatgatggtgatcatccactcagactcccatctccacactccaatgtactttttcctcagtaacctctcccttgtagacttgggttactcatcagctgtagcccccaaaacggtggctgcattgcggtcaggggacaaggccatctcctacgatggatgtgcagctcagttcttcttctttgtggggtttgccactgttgagtgctacctcctggcctccatggcctatgatcgccatgcagcggtatgtaggcctcttcattacaccaccaccatgacagcaggtgtgtgtgccctccttgctactggttcctatgtctctggcttcctcaatgcctctatccatgcagcaggcaccttcagactctccttctgtggttctaatgagattaatcatttcttctgtgacattcccccactcctggctctctcatgctctgacacacgcatcagcaagttggtggtctttgtggcaggcttcaacgtctttttcaccctcctggtcatccttatttcttacttcttcatatgcatcaccattcagaggatgcattctgctgaagggcagaagaaagtcttctccacctgtgcttcccatctcactgctttgtccatcttctatggcacaatcatcttcatgtacttacagcccaactccagccagtccgtggacacagacaaaatagcctctgtgttttacacagtggtgattcccatgctgaatcccttgatatacagccttaggaacaaagaagtgaaaagtgctctctggaaaatactcaacaaactttacccccaatattaaa

SEQ ID NO: 162307 - DNA, 946 bp, Homo sapiens
  Payload ID: 11843
  Gene Symbol: OR5B3
  Gene Name: olfactory receptor, family 5, subfamily B, member 3
  Uniprot ID: Q8NH48
  ENST ID: ENST00000309403
  CDS Start-End: 1-945
atggaaaataagacagaagtaacacaattcattcttctaggactaaccaatgactcagaactgcaggttcccctctttataacgttccccttcatctatattatcactctggttggaaacctgggaattattgtattgatattctgggattcctgtctccacaatcccatgtacttttttctcagtaacttgtctctagtggacttttgctactcttcagctgtcactcccatcgtcatggctggattccttatagaagacaaggtcatctcttacaatgcatgtgctgctcaaatgtatatctttgtagcttttgccactgtggaaaattacctcttggcctcaatggcctatgaccgctatgcagcagtgtgcaaacccctacattacaccacaaccatgacaacaactgtgtgtgctcgtctggccataggctcctacctctgtggtttcctgaatgcctccatccacactggggacacatttagtctctctttctgtaagtccaatgaagtccatcactttttctgtgatattccagcagtcatggttctctcttgctctgatagacatattagcgagcttgttcttatttatgttgtgagcttcaatatctttatagctctcctggttatcttgatatcctacacattcatttttatcaccatcctaaagatgcactcagcttcagtataccagaagcctttgtccacctgtgcctctcatttcattgcagtcggcatcttctatgggactattatcttcatgtacttacaacccagctccagtcactccatggacacagacaaaatggcacctgtgttctatacaatggtcatccccatgctgaaccctctggtctatagtctgaggaacaaggaagtgaagagtgcattcaagaaagttgttgagaaggcaaaattgtctgtaggatggtcagtttaac

SEQ ID NO: 162308 - DNA, 963 bp, Homo sapiens
  Payload ID: 11844
  Gene Symbol: OR5C1
  Gene Name: olfactory receptor, family 5, subfamily C, member 1
  Uniprot ID: Q8NGR4
  ENST ID: ENST00000373680
  CDS Start-End: 1-963
atgaactcagagaacctcacccgggccgcggttgcccctgctgaattcgtcctcctgggcatcacaaatcgctgggacctgcgtgtggccctcttcctgacctgcctgcctgtctacctggtgagcctgctgggaaacatgggcatggcgctgctgatccgcatggatgcccggctccacacacctatgtacttcttcctggccaacctctccctgctggatgcctgctattcctccgccatcggccccaagatgctagtggacctgctgctgccccgagccaccatcccttacacagcctgtgccctccagatgtttgtctttgcaggtctggctgatactgagtgttgcttgctggcagccatggcctatgaccgctacgtggccatcagaaacccacttctctatacaacagctatgtcgcagcgtctatgcctggccttgctgggagcatcaggcctgggtggggcagtgagtgcctttgttcacacaaccctcaccttccgcctgagcttctgccgctcccggaagatcaatagcttcttctgcgatatccctccactgctggccatctcgtgcagtgacaccagtctcaatgaactccttctcttcgccatctgtggcttcatccagacagccacggtgttagctatcacggtgtcttatggcttcatcgctggggctgtgatccacatgcgctcggtcgagggcagtcggcgagcagcctccaccggtggttcccacctcacagccgtggccatgatgtacgggacactcattttcatgtacctgcgccccagctccagctatgccctggacactgacaagatggcctctgtgttctataccctggtcatcccgtctctcaacccactcatctacagcctccgcaataaggaggtcaaggaggccctcaggcagacctggagccgattccactgtccagggcaggggtcccagtga

SEQ ID NO: 162309 - DNA, 945 bp, Homo sapiens
  Payload ID: 11845
  Gene Symbol: OR5D13
  Gene Name: olfactory receptor, family 5, subfamily D, member 13 (gene/pseudogene)
  Uniprot ID: Q8NGL4
  ENST ID: ENST00000361760
  CDS Start-End: 1-945
atgatggcatctgaaagaaatcaaagcagcacacccacttttattctcttgggtttttcagaatacccagaaatccaggttccactctttctggttttcttgttcgtctacacagtcactgtagtggggaacttgggcatgataataatcatcagactcaattcaaaactccatacaatcatgtgctttttccttagtcacttgtccttgacagacttctgtttttccactgtagttacacctaaactgttggagaacttggttgtggaatacagaaccatctctttctctggttgcatcatgcaattttgttttgcttgcatttttggagtgacagaaactttcatgttagcagcgatggcttatgaccgttttgtggcagtttgtaaacccttgctgtataccactattatgtctcagaagctctgtgctcttctggtggctgggtcctatacatgggggatagtgtgctccctgatactcacatattttcttcttgacttatcgttttgtgaatctaccttcataaataattttatctgtgaccactctgtaattgtttctgcctcctactcagacccctatatcagccagaggctatgctttattattgccatattcaatgaggtgagcagcctaattatcattctgacatcatatatgcttattttcactaccattatgaagatgcgatctgcaagtgggcgccagaaaactttctccacctgtgcctcccacctgacagccatcactatcttccatggaactatccttttcctttactgtgttcctaatcctaaaacttctagcctcatagttacagtggcttctgtgttttacacagtggcgattccaatgctgaacccattgatctacagccttaggaacaaagatatcaataacatgtttgaaaaattagttgtcaccaaattgatttaccactga

SEQ ID NO: 162310 - DNA, 945 bp, Homo sapiens
  Payload ID: 11846
  Gene Symbol: OR5D14
  Gene Name: olfactory receptor, family 5, subfamily D, member 14
  Uniprot ID: Q8NGL3
  ENST ID: ENST00000335605
  CDS Start-End: 1-945
atgatgatggttttaaggaatctgagcatggagcccacctttgcccttttaggtttcacagattacccaaagcttcagattcctctcttccttgtgtttctgctcatgtatgttatcacagtggtaggaaaccttgggatgatcataataatcaagattaaccccaaatttcacactcctatgtactttttccttagtcacctctcttttgttgatttttgttactcttccattgtcactcccaagctgcttgagaacttggtaatggcagataaaagcatcttctactttagctgcatgatgcagtacttcctgtcctgcactgctgtggtgacagagtctttcttgctggcagtgatggcctatgaccgctttgtggccatctgcaatcctctgctttatacagtggccatgtcacagaggctctgtgccctgctggtggctgggtcatatctctggggcatgtttggccccttggtactcctttgttatgctctccggttaaacttctctggacctaatgtaatcaaccacttcttttgtgagtatactgctctcatctctgtgtctggctctgatatactcatcccccacctgctgcttttcagcttcgccaccttcaatgagatgtgtacactactgatcatcctcacttcctatgttttcatttttgtgactgtactaaaaatccgttctgttagtgggcgccacaaagccttctccacctgggcctcccacctgacttctatcaccatcttccatgggaccatccttttcctttactgtgtacccaactccaaaaactctcggcaaacagtcaaagtggcctctgtattttacacagttgtcaaccccatgctgaaccctctgatctacagcctaaggaataaagacgtgaaggatgctttctggaagttaatacatacacaagttccatttcactga

SEQ ID NO: 162311 - DNA, 987 bp, Homo sapiens
  Payload ID: 11847
  Gene Symbol: OR5D16
  Gene Name: olfactory receptor, family 5, subfamily D, member 16
  Uniprot ID: Q8NGK9
  ENST ID: ENST00000378396
  CDS Start-End: 1-987
atgtttctgacagagagaaatacgacatctgaggccacattcactctcttgggcttctcagattacctggaactgcaaattcccctcttctttgtatttctggcagtctacggcttcagtgtggtagggaatcttgggatgatagtgatcatcaaaattaacccaaaattgcatacccccatgtattttttcctcaaccacctctcctttgtggatttctgctattcctccatcattgctcccatgatgctggtgaacctggttgtagaagatagaaccatttcattctcaggatgtttggtgcaattctttttcttttgcacctttgtagtgactgaattaattctatttgcggtgatggcctatgaccactttgtggccatttgcaatcctctgctctacacagttgccatctcccagaaactctgtgccatgctggtggttgtattgtatgcatggggagtcgcatgttccctgacactcgcgtgctctgctttaaagttatcttttcatggtttcaacacaatcaatcatttcttctgtgagttatcctccctgatatcactctcttaccctgactcttatctcagccagttgcttcttttcactgttgccacttttaatgagataagcacactactcatcattctgacatcttatgcattcatcattgtcaccaccttgaagatgccttcagccagtgggcaccgcaaagtcttctccacctgtgcctcccacctgactgccatcaccatcttccatggcaccatcctcttcctctactgtgtacccaactccaaaaactccaggcacacagtcaaagtggcctctgtgttttacaccgtggtgatccccttgttgaatcccctgatctacagtctgagaaataaagatgttaaggatgcaatccgaaaaataatcaatacaaaatattttcatattaaacataggcattggtatccatttaattttgttattgaacaataa

SEQ ID NO: 162312 - DNA, 942 bp, Homo sapiens
  Payload ID: 11848
  Gene Symbol: OR5D18
  Gene Name: olfactory receptor, family 5, subfamily D, member 18
  Uniprot ID: Q8NGL1
  ENST ID: ENST00000333976
  CDS Start-End: 1-942
atgctgctgactgatagaaatacaagtgggaccacgttcaccctcttgggcttctcagattacccagaactgcaagtcccactcttcctggtttttctggccatctacaatgtcactgtgctagggaatattgggttgattgtgatcatcaaaatcaaccccaaactgcatacccccatgtactttttcctcagccaactctcctttgtggatttctgctattcctccatcattgctcccaagatgttggtgaaccttgttgtcaaagacagaaccatttcatttttaggatgcgtagtacaattctttttcttctgtacctttgtggtcactgaatcctttttattagctgtgatggcctatgaccgcttcgtggccatttgcaaccctctgctctacacagttaacatgtcccagaaactctgcgtgctgctggttgtgggatcctatgcctggggagtctcatgttccttggaactgacgtgctctgctttaaagttatgttttcatggtttcaacacaatcaatcacttcttctgtgagttctcctcactactctccctttcttgctctgatacttacatcaaccagtggctgctattctttcttgccacctttaatgaaatcagcacactactcatcgttctcacatcttatgcgttcattgttgtaaccatcctcaagatgcgttcagtcagtgggcgccgcaaagccttctccacctgtgcctcccacctgactgccatcaccatcttccatggcaccatcctcttcctttactgtgtgcccaactccaaaaactccaggcacacagtcaaagtggcctctgtgttttacaccgtggtgatccccatgttgaatcccctgatctacagtctgagaaataaagatgtcaaggatacagtcaccgagatactggacaccaaagtcttctcttactga

SEQ ID NO: 162313 - DNA, 945 bp, Homo sapiens
  Payload ID: 11849
  Gene Symbol: OR5F1
  Gene Name: olfactory receptor, family 5, subfamily F, member 1
  Uniprot ID: O95221
  ENST ID: ENST00000278409
  CDS Start-End: 1-945
atgaccagaaaaaattatacctcactgactgagttcgtcctattgggattagcagacacgctggagctacagattatcctctttttgttttttcttgtgatttatacacttacagtactgggaaatctcgggatgatcctcttaatcaggatcgattcccagcttcacacacccatgtatttcttcctggctaacctgtcctttgtggacgtttgtaactcaactaccatcaccccaaagatgctggcagatttattatcagagaagaaaaccatctcttttgctggctgcttcctacagatgtacttctttatctccctggcgacaaccgaatgcatcctctttgggttaatggcctatgacaggtatgcggccatatgtcgcccgctgctttactccttgatcatgtccaggaccgtctacctaaaaatggcagccggggcttttgctgcagggttgctgaacttcatggtcaacacaagccatgtcagcagcttgtcattctgtgactccaatgtcatccatcacttcttctgtgacagtcccccacttttcaagctctcttgttctgacacaatcctgaaagaaagcataagttctattttggctggtgtgaatattgtggggactctgcttgtcatcctctcctcctactcctacgttctcttctccattttttctatgcattcgggggaggggaggcacagagctttctccacgtgtgcctctcacctgacagccataattctgttctatgccacctgcatctatacttacctgagacctagttccagctactccctgaatcaggacaaagtggcttctgtgttctacacagtggtgattcccatgttgaatcctctgatctacagcctcaggagtaaggaagtaaagaaggctttagcgaatgtaattagcaggaaaaggacctcttcctttctgtga

SEQ ID NO: 162314 - DNA, 929 bp, Homo sapiens
  Payload ID: 11850
  Gene Symbol: OR5G3
  Gene Name: olfactory receptor, family 5, subfamily G, member 3 (gene/pseudogene)
  ENST ID: ENST00000435756
  CDS Start-End: 1-929
aaccagacagtagtgactgaatttctcttattgggcctcacagatcatccctatcagaagattgttctcttcttcatgtttctctttgtttatcttatcaccctgggaggtaacttggggatgatcactctcatatggattgatcccagactccacactcctatgtacttttttcttaggcacttgtcctttgtagatatttgttcctcttcttctgttgtgcctaagatgctgtgtaatatctttgcagagaaaaaagacatcacttttctgggttgtgctgcacagatgtggttctttggtctctttgaggcagctgagtgttttctctggctgccatggcatatgaccggtatgtggccatctgcaagcccttgttgtatacgctcattatgtctcagcaggtctgtatgcagctggtggtagggccttatgccatggctcttataagcaccatgactcatacaattttcactttttgcttacccttttgtggttcaaatattatcaatcactttttctgtgatatttttccactgctttccctagcatgtgcagacacctgggtgaataaatttgtgctgtttgtcttggctggagctataggagtactcagtggtctgatcatcatggtctcctatatttgcatcctgatgaccatcttgaagatccagactgctgatgggaagcaaaaagctttcttcacctgtttttctcaccttgcggctgtctccatcctgtatgggactcttttcttgatttatgttcggccaagttcaagttcctccctgggtatctataaagtgatttctctattttatactgtggtaatccccatggttaacccccttatttacagcttgaggaataaggaggtgaaagatgcattcagaagaaaaattgagaggaaaaaatttattataggtagg

SEQ ID NO: 162315 - DNA, 936 bp, Homo sapiens
  Payload ID: 11850
  Gene Symbol: OR5G3
  Gene Name: olfactory receptor, family 5, subfamily G, member 3 (gene/pseudogene)
  ENST ID: ENST00000631283
  CDS Start-End: 1-936
atggaagataagaaccagacagtagtgactgaatttctcttattgggcctcacagatcatccctatcagaagattgttctcttcttcatgtttctctttgtttatcttatcaccctgggaggtaacttggggatgatcactctcatatggattgatcccagactccacactcctatgtacttttttcttaggcacttgtcctttgtagatatttgttcctcttcttctgttgtgcctaagatgctgtgtaatatctttgcagagaaaaaagacatcacttttctgggttgtgctgcacagatgtggttctttggtctctttgaggcagctgagtgttttctctggctgccatggcatatgaccggtatgtggccatctgcaagcccttgttgtatacgctcattatgtctcagcaggtctgtatgcagctggtggtagggccttatgccatggctcttataagcaccatgactcatacaattttcactttttgcttacccttttgtggttcaaatattatcaatcactttttctgtgatatttttccactgctttccctagcatgtgcagacacctgggtgaataaatttgtgctgtttgtcttggctggagctataggagtactcagtggtctgatcatcatggtctcctatatttgcatcctgatgaccatcttgaagatccagactgctgatgggaagcaaaaagctttcttcacctgtttttctcaccttgcggctgtctccatcctgtatgggactcttttcttgatttatgttcggccaagttcaagttcctccctgggtatctataaagtgatttctctattttatactgtggtaatccccatggttaacccccttatttacagcttgaggaataaggaggtgaaagatgcattcagaagaaaaattgagaggaaaaaatttattatag

SEQ ID NO: 162316 - DNA, 942 bp, Homo sapiens
  Payload ID: 11851
  Gene Symbol: OR5H1
  Gene Name: olfactory receptor, family 5, subfamily H, member 1
  Uniprot ID: A6NKK0
  ENST ID: ENST00000354565
  CDS Start-End: 1-942
atggaagaggaaaatgcaacattgctgacagagtttgttctcacaggatttttatatcaaccacagtggaaaatacccctgttcctggcattcttggtaatatatctcatcaccatcatggggaatcttggtctgattgctgtcatctggaaagaccctcaccttcatatcccaatgtacttactccttgggaatttagcttttgtggatgcttggatatcatccacagtgaccccaaagatgctgaataacttcttagctaagagtaagatgatatctctctctgaatgcaagatacagtttttttcgtttgcaatcagtgtaaccacggaatgttttctcttggcaacgatggcatatgatcgctatgtagccatatgcaaacctttactttatccagccattatgaccaatggactgtgcatccggctattaatcttgtcatatgtaggtggtattcttcatgctttaatccatgaaggatttttattcagactaaccttctgtaactccaacatagtacatcacatttactgtgacactatcccattgtctaagatttcttgtactgattcttctattaattttctaatggtttttattttctcaggttcaattcaggtattcagcattgtgactattcttgtatcttatacatttgttctcttcgcaatcttaaaaaagaaatctgataaaggtgtaaggaaagccttttccacctgtggagcccatctcttctctgtctctttatactatggaccccttctcttcatttatgtgggccctgcatctccgcaagcagatgatcaagatatggtggagcctctattctacactgtcatcattcctttgttaaatcctatcatctacagtctgagaaataagcaagtcacagtttcattcacaaaaatgttaaaaaaacatgttaaggtttcatactaa

SEQ ID NO: 162317 - DNA, 1080 bp, Homo sapiens
  Payload ID: 11852
  Gene Symbol: OR5H14
  Gene Name: olfactory receptor, family 5, subfamily H, member 14
  Uniprot ID: A6NHG9
  ENST ID: ENST00000437310
  CDS Start-End: 61-993
tcattgcagatgttccctttcatttgttgcattttattttagaggacatgcagtgaggacatggaagaggaaaatgcaacattgctgacagagtttgttctcacaggatttttatatcaaccacagtggaaaatacccctgttcctggcattcttggtaatatatctcatcaccatcatggggaatcttggtctgattgctgtcatctggaaagaccctcatcttcatatcccaatgtacttactccttgggaatttagcttttgtggatgctttgttatcatcctcagtgactctgaagatgctgatcaacttcttagctaagagtaagatgatatctctctctgaatgcaagatacagttgttttcgtttgcaatcagtgtaaccacggaatgttttctcttggcaacaatggcatatgatcgctatgtagccatatgcaaacccttactttatccagccattatgaccaatggactgtgcatccggctattaatcttgtcatatgtaggtggtcttcttcatgctttaatccatgaaggatttttattcagactaaccttctgtaactccaacataatacaacacttttactgtgacattatcccattgttaaagatttcttatactgattcctctattaactttctaatggtttttatttttgcaggttcaattcaagtttttaccatagggactgttcttatatcttacatatttgtcctctatacaatcttgaaaaagaagtctgtcaaaggtatgagaaaagccttctccacctgtggagctcatctcttatctgtatctttatactatgggcccctcgccttcatgtatatgggctctgcatccccacaggctgatgaccaagatatgatggagtctctattttacactgtcatagttcctttattaaatcccatgatctacagcctgagaaacaagcaagtaatagcttcattcacaaaaatgttcaaaagaaatgatgtttagatcattactaatatctcttttctatttactaaaatgtcacaaaattgtgcaaattagaggtacctatgtttttgccagcattaaaag

SEQ ID NO: 162318 - DNA, 942 bp, Homo sapiens
  Payload ID: 11853
  Gene Symbol: OR5H15
  Gene Name: olfactory receptor, family 5, subfamily H, member 15
  Uniprot ID: A6NDH6
  ENST ID: ENST00000356526
  CDS Start-End: 1-942
atggaagaggaaaatgcaacattgctgacagagtttgttctcacaggatttttatatcaaccacagtggaaaatacccctgttcttggcattcttggtaatatatctcatcaccatcatggggaatcttggtctgattgctgtcatctggaaagaccctcaccttcatatcccaatgtacttactccttgggaatttagcttttgtggatgcttggatatcatccacagtgaccccaaagatgctgaataacttcttagctaagagtaagatgatatctctctctgaatgcaagatacaatttttttccattgcaattggcgtaaccacagaatgttttctcttggcaacaatggcatatgatcgctatgtagccatatgcaaacctttactttatccagccattatgaccaatggactgtgcatccggctattaatcttgtcatatatagctggtattcttcatgctttaatccatgaaggatttttattcagactaaccttctgtaactccaacatagtacatcacatttactgtgacactatcccattgtctaagatttcttgtactgattcttctattaattttctaatggtttttattttctcaggttcaattcaggtattcagcattgtgactattcttatatcttacacatttgttctcttcacagtcttagaaaagaaatctgataagggtgtaaggaaagccttttccacctgtggagcccatctcttctctgtctgtttatactatggcccccttctcttaatgtatgtgggccctgcatctccgcaagcagatggtcaaaatatggtggagcctctattctacactgtcatcattcctttgttaaatcctatcatctacagtctgagaaataagcaagtcatagtttcattcataaaaatgttaaaaagaaatgttaaggtttcatactaa

SEQ ID NO: 162319 - DNA, 933 bp, Homo sapiens
  Payload ID: 11853
  Gene Symbol: OR5H15
  Gene Name: olfactory receptor, family 5, subfamily H, member 15
  ENST ID: ENST00000615035
  CDS Start-End: 1-933
atggaagaggaaaatgcaacattgctgacagagtttgttctcacaggatttttatatcaaccacagtggaaaatacccctgttcttggcattcttggtaatatatctcatcaccatcatggggaatcttggtctgattgctgtcatctggaaagaccctcaccttcatatcccaatgtacttactccttgggaatttagcttttgtggatgcttggatatcatccacagtgaccccaaagatgctgaataacttcttagctaagagtaagatgatatctctctctgaatgcaagatacaatttttttccattgcaattggcgtaaccacagaatgttttctcttggcaacaatggcatatgatcgctatgtagccatatgcaaacctttactttatccagccattatgaccaatggactgtgcatccggctattaatcttgtcatatatagctggtattcttcatgctttaatccatgaaggatttttattcagactaaccttctgtaactccaacatagtacatcacatttactgtgacactatcccattgtctaagatttcttgtactgattcttctattaattttctaatggtttttattttctcaggttcaattcaagttttcaccattgggactgttcttgtatcttatacatttgtcctctctacaatcttgaaaaagaagtctgtcaaaggcataagaaaagacttctccacctgtggagctcatatcttacctgtatctttatactatgggcccctcgccttcatgtatgtgggctctgcatcccaacgggctgatgaccaagatatgatggagtctctattttacactgtcatagttcctttattaaatcccatgatctacagcctgagaaataagcaagtaatagattcattcacaaaaatgttcaaaggaaataatgtttag

SEQ ID NO: 162320 - DNA, 945 bp, Homo sapiens
  Payload ID: 11854
  Gene Symbol: OR5H2
  Gene Name: olfactory receptor, family 5, subfamily H, member 2
  Uniprot ID: Q8NGV7
  ENST ID: ENST00000355273
  CDS Start-End: 1-945
atgtcgaatgaggacatggaacaggataatacaacattgctgacagagtttgttctcacaggacttacatatcagccagagtggaaaatgcccctgttcttggtgttcttggtgatctatctcatcactattgtgtggaaccttggtctgattgctcttatctggaatgacccacaacttcacatccccatgtacttttttcttgggagtttagcctttgttgatgcttggatatcttccacagtaactcccaaaatgttggttaatttcttggccaaaaacaggatgatatctctgtctgaatgcatgattcaatttttttcctttgcatttggtggaactacagaatgttttctcttggcaacaatggcatatgatcgctatgtagccatatgcaaacctttactatatccagtgattatgaacaattcactatgcatacggctgttagccttctcatttttaggtggcttcctccatgccttaattcatgaagtccttatattcagattaaccttctgcaattctaacataatacatcatttttactgtgatattataccactgtttatgatttcctgtactgacccttctattaattttctaatggtttttattttgtctggctcaattcaggtattcaccattgtgacagttcttaattcttacacatttgctcttttcacaatcctaaaaaagaagtctgttagaggcgtaaggaaagccttttccacctgtggagcccatctcttatctgtctctttatattatggcccacttatcttcatgtatttgcgccctgcatctccacaagcagatgaccaagatatgatagactctgtcttttatacaatcataattcctttgctaaatcccattatctacagtctgagaaataaacaagtaatagattcattcacaaaaatggtaaaaagaaatgtttag

SEQ ID NO: 162321 - DNA, 978 bp, Homo sapiens
  Payload ID: 11855
  Gene Symbol: OR5H6
  Gene Name: olfactory receptor, family 5, subfamily H, member 6 (gene/pseudogene)
  Uniprot ID: Q8NGV6
  ENST ID: ENST00000383696
  CDS Start-End: 1-978
atgttcctttacctttgcttcatttttcagaggacatgcagtgaggagatggaagaggaaaatgcaacattgctgacagagtttgttctcacaggatttttacatcaacctgactgtaaaataccgctcttcctggcattcttggtaatatatctcatcaccatcatggggaatcttggtctaattgttctcatctggaaagaccctcaccttcatatcccaatgtacttattccttgggagtttagcctttgtggatgcttcgttatcatccacagtgactccgaagatgctgatcaacttcttagctaagagtaagatgatatctctctctgaatgcatggtacaatttttttcccttgtaaccactgtaaccacagaatgttttctcttggcaacaatggcatatgatcgctatgtagccatttgcaaagctttactttatccagtcattatgaccaatgaactatgcattcagctattagtcttgtcatttataggtggccttcttcatgctttaatccatgaagctttttcattcagattaaccttctgtaattccaacataatacaacacttttactgtgacattatcccattgttaaagatttcctgtactgattcctctattaactttctaatggtttttattttcgcaggttctgttcaagtttttaccattggaactattcttatatcttatacaattatcctctttacaatcttagaaaagaagtctatcaaagggatacgaaaagctgtctccacctgtggggctcatctcttatctgtatctttatactatggccccctcaccttcaaatatctgggctctgcatctccgcaagcagatgaccaagatatgatggagtctctattttacactgtcatagttcctttattaaatcccatgatctacagcctgagaaacaagcaagtaatagcttcattcacaaaaatgttcaaaagcaatgtttag

SEQ ID NO: 162322 - DNA, 978 bp, Homo sapiens; identical to SEQ ID NO: 162321
  Payload ID: 11855
  Gene Symbol: OR5H6
  Gene Name: olfactory receptor, family 5, subfamily H, member 6 (gene/pseudogene)
  Uniprot ID: Q8NGV6
  ENST ID: ENST00000623942
  CDS Start-End: 1-978

SEQ ID NO: 162323 - DNA, 978 bp, Homo sapiens; identical to SEQ ID NO: 162321
  Payload ID: 11855
  Gene Symbol: OR5H6
  Gene Name: olfactory receptor, family 5, subfamily H, member 6 (gene/pseudogene)
  Uniprot ID: Q8NGV6
  ENST ID: ENST00000623332
  CDS Start-End: 1-978

SEQ ID NO: 162324 - DNA, 931 bp, Homo sapiens
  Payload ID: 11856
  Gene Symbol: OR5H8
  Gene Name: olfactory receptor, family 5, subfamily H, member 8 (gene/pseudogene)
  ENST ID: ENST00000394191
  CDS Start-End: 1-931
atggatgacgaaaatgcaacattgctgacagagtttgttctcacaggacttacatatcaatcagagtggaaaatacccctgttcctggcattcttggtaatatatctcatcaccatcatggcaaatcttggtctgattgctgtcatctggaaagactcacaccttcacattccaatgtacttattccttgggagtttagcctttgtggatgcttggttatcatcctcagtgacccctaagatgctgatcagctttttagctaagagtatgattatttctgtctctgaatgcaagatacaatttttttcctttggaatcagtggaaccacagaatgttttctcttggcaacaatggcatatgatcgctatgtagccatatgcaaacctttactttatccagtcattatgaccaatggactgtgtatctggctattagtcttgtcatttataggtggctttcttcatgccttaattcatgaaggtattttattcagattaaccttctgtaattccaacataatacatcacttttactgtgacattatcccattgttaaagatttcctgtactgacccttctattaattttttaatgctttttattttgtctggttcaatacaggtattcactattttgactgttcttgtctcttatacatttgtcctctttacaatcttaaaaaaaaaagtctgccaaagacataaggaaagccttttccacctgtggagcccatctcttatctgtttctttatactatggcccccttctcttcatgtatgtgcaccctgcatctccacaagcagatgatcaagatatggtggagtctctattttacactgtcataattcctttcttaaatcccattatctacagcctgagaaataagcaagtcatagattcactgacaaaaacattaaaaggaaatgtttag

SEQ ID NO: 162325 - DNA, 945 bp, Homo sapiens
  Payload ID: 11857
  Gene Symbol: OR5I1
  Gene Name: olfactory receptor, family 5, subfamily I, member 1
  Uniprot ID: Q13606
  ENST ID: ENST00000301532
  CDS Start-End: 1-945
atggaatttacagatagaaactacacgttggtcactgagtttattctattaggttttccaactcgccctgaactgcagattgtcctgttcctcatgtttctgacattgtatgctataattctgatagggaacattggattgatgctgttgatcaggattgatcctcaccttcaaacccccatgtattttttccttagcaacctatcatttgtagacctttgctatttctcagacattgttcccaaaatgctggtcaatttcctctcggagaacaaatctatttcctattatgggtgtgccctgcagttttattttttctgtacttttgcagatacagaatccttcatcctggccgccatggcctatgatcgctatgtcgccatctgtaaccctttattgtacacagttgtgatgtctaggggcatctgtatgcggttgattgtcttgtcataccttggaggcaacatgagttccctggttcacacatcctttgcctttattctgaaatattgtgacaaaaatgttattaatcattttttctgtgacctccctcccctgcttaaactatcctgcactgacacaacaattaatgagtggctcctctccacatacggcagctcagtggaaatcatttgttttatcatcatcatcatctcctactttttcattcttctctcagtcttaaagatccgctctttcagtgggaggaagaagaccttttctacatgcgcctctcacctgacttcagtgacgatctaccaagggactctcctctttatttactcacggcccagctacctgtattctccaaacactgataaaattatctcagtgttctacaccattttcattccagtgctgaatccgttgatttatagtttgagaaataaagatgtaaaggatgcagctgagaaagttctaagatcaaaggtagattcttcatga

SEQ ID NO: 162326 - DNA, 939 bp, Homo sapiens
  Payload ID: 11858
  Gene Symbol: OR5J2
  Gene Name: olfactory receptor, family 5, subfamily J, member 2
  Uniprot ID: Q8NH18
  ENST ID: ENST00000312298
  CDS Start-End: 1-939
atggctgatgataattttacagttgtcactgagtttattcttttgggattgacagatcatgctgaactaaaagctgtgctttttgtggtgttcctggtgatttacgccattaccttgttgaggaatctgggcatgatcctcttaatccaaatcacctccaaactccacacacccatgtactttttactcagctgtctttcatttgtggatgcctgctattcatctgcaattgcacccaaaatgctggtgaacctcctggttgtgaaggcaacaatttctttctctgcttgcatggtacagcatttgtgtttcggagtgttcatcaccacagaaggcttcttactgtcagtgatggcctatgaccgctatgtggccattgtgagtcccttgctttacactgtagccatgtctgatagaaagtgtgtggagcttgtcacaggatcatggataggtggaatagttaacacattaatccacacaatcagcttgaggagactgtccttttgtaggctaaatgctgtcagccacttcttctgtgacattccttcactgctaaagctgtcatgttctgacacctccatgaatgagttgttgctgttaaccttctccggagtcattgccatggccaccttcttgactgtgatcatttcctacatcttcattgcttttgctagcctaaggatccactcagcatcaggcagacagcaagccttctccacctgtgcctctcacctgactgctgtgaccatattctatggtaccttaatctttagctacattcagccaagctcccagtattttgtggaacaagagaaagtggtttctatgttctatacgctagggattcccatgttaaacctgttgatacacagtttgagaaacaaggacgtaaaggaggcagtgaaaagggccatagaaatgaaacatttcctctgttaa

SEQ ID NO: 162327 - DNA, 1097 bp, Homo sapiens
  Payload ID: 11859
  Gene Symbol: OR5K1
  Gene Name: olfactory receptor, family 5, subfamily K, member 1
  Uniprot ID: Q8NHB7
  ENST ID: ENST00000332650
  CDS Start-End: 98-1024
tgctctccttcctttaagccaaagagacctaaataactgtggcatattataaattagtgccttctttctccacaattttttttcagacaagtcaggaatggctgaagaaaatcataccatgaaaaatgagtttatcctcacaggatttacagatcaccctgagctgaagactctgctgtttgtggtgttctttgccatctatctgatcaccgtggtggggaatattagtttggtggcactgatatttacacaccgtcggcttcacacaccaatgtacatctttctgggaaatctggctcttgtggattcttgctgtgcctgtgctattacccccaaaatgttagagaacttcttttctgagaacaaaaggatttccctctatgaatgtgcagtacagttttattttctttgcactgtggaaactgcagactgctttcttctggcagcaatggcctatgaccgctatgtggccatatgcaacccactgcagtaccacatcatgatgtccaagaaactctgcattcagatgaccacaggggccttcatagctggaaacctgcattccatgattcatgtagggcttgtatttaggttagttttctgtggatcgaatcacatcaaccacttttactgtgatattcttcccttgtatagactctcttgtgttgatccttatatcaatgaactggttctattcatcttctcaggttcagttcaagtctttaccataggtagtgtcttaatatcttatctctatattcttcttactattttcaaaatgaaatccaaagagggaagggccaaagctttttctacctgtgcatcccactttttgtcagtttcattattctatggatctcttttcttcatgtacgttagaccaaatttgcttgaagaaggggataaagatataccagctgcaattttatttacaatagtagttcccttactaaatcctttcatttatagcctgagaaatagggaagtaataagtgtcttaagaaaaattctgatgaagaaataatctcaagaaagatggaaacaagtgacatctactatagcttaatgatttaaatgcagcaaaaacttccatgtga

SEQ ID NO: 162328 - DNA, 1060 bp, Homo sapiens
  Payload ID: 11860
  Gene Symbol: OR5K2
  Gene Name: olfactory receptor, family 5, subfamily K, member 2
  Uniprot ID: Q8NHB8
  ENST ID: ENST00000427338
  CDS Start-End: 78-1028
caaagagacgtcaataattgtggcatattattaattagtgccttattcctctacaatttttttcagagaggtcaggaatggttgaagaaaatcataccatgaaaaatgagtttatcctcacaggatttacagatcaccctgagctgaagactctgctgtttgtggtgttctttgccatctatctgatcaccgtggtggggaatattagtttggtggcactgatatttacacactgtcggcttcacacaccaatgtacatctttctgggaaatctggctcttgtggattcttgctgtgcctgtgctattacccccaaaatgttagagaacttcttttctgagggcaaaaggatttccctctatgaatgtgcagtacagttttattttctttgcactgtggaaactgcagactgctttcttctggcagcagtggcctatgaccgctatgtggccatctgcaacccactgcagtaccacatcatgatgtccaagaaactctgcattcagatgaccacaggcgccttcatagctggaaatctgcattccatgattcatgtagggcttgtatttaggttagttttctgtggattgaatcacatcaaccacttttactgtgatactcttcccttgtatagactctcctgtgttgaccctttcatcaatgaactggttctattcatcttctcaggttcagttcaagtctttaccataggtagtgtcttaatatcttatctctatattcttcttactattttcagaatgaaatccaaggagggaagggccaaagccttttctacttgtgcatcccacttttcatcagtttcattattctatggatctatttttttcctatacattagaccaaatttgcttgaagaaggaggtaatgatataccagctgctattttatttacaatagtagttcccttactaaatcctttcatttatagtctgagaaacaaggaagtaataagtgtcttaagaaaaattctgctgaaaataaaatctcaaggaagtgtgaacaaatgacatctatcctagcttaatggtttaatgctcaa

SEQ ID NO: 162329 - DNA, 966 bp, Homo sapiens
  Payload ID: 11861
  Gene Symbol: OR5K3
  Gene Name: olfactory receptor, family 5, subfamily K, member 3
  Uniprot ID: A6NET4
  ENST ID: ENST00000383695
  CDS Start-End: 1-966
atgaataaggagaatcactccttgatagctgagttcatcctcacaggatttacatatcatccaaagctgaagactgttctgtttgtggtgttctttgccatctatctgatcaccatggtggggaacattggtttggtggcattgatttatatagagcaacgtcttcacacaccaatgtacatatttttaggcaacctagttctgatggattcctgctgttcctctgctattactcccaagatgttagagaacttcttttctgaggacaaaaggattaccctgtatgaatgtatggcacaattttattttctctgtcttgctgaaactacagactgctttcttctggcggcaatggcctatgactgctatgtggccatatgcaacccactgcagtaccacaccatgatgtccaagacactctgcattcagatgactgcaggagcctacctagctggcaacctgcatcccatgattgaagtagagtttctgttgaggttaactttctgtgggtctcatcaaatcaatcattttttctgtgatgttcttccattatatagactttcttgtattaacccttatatcaatgaattggtgttatttatcttggcaggatcaattcaaatctttactatagtcttagtttcttatttctacatccttttcacaatatttacaatgaaatccaaggagggaagaggcaaagctttatctacttgtgcatctcactttctctctgtgtcaatattctgtgattcccttctcttcatgtatgctcgaccaggtgcagttaatgaaggggataaagatatacctgttgctatattttatactttagttattcctttattaaatccttttatttatagcctaagaaataaggaagtaataaatattatgaaaaaaattatgaagaagagaaaattttgtcacattctgaaacaaatgtcatcccctctggcaacttga

SEQ ID NO: 162330 - DNA, 966 bp, Homo sapiens
  Payload ID: 11862
  Gene Symbol: OR5K4
  Gene Name: olfactory receptor, family 5, subfamily K, member 4
  Uniprot ID: A6NMS3
  ENST ID: ENST00000354924
  CDS Start-End: 1-966
atggctagggaaaatcactccttagcagctgaattcatcctcataggatttacaaattatccagagctgaagacgcttctgtttgtggtgttctctgccatctatctggtcaccatggtggggaatcttggtctggtggcattaatttatgtagagcgtcgtcttctcacaccaatgtacatctttctgggcaacctggctctgatggattcctgctgttcctgtgctgttacccccaagatgttagagaatttcttttctgaggatagaattatttccctgtatgaatgtatggcacaattttattttctctgtcttgctgaaaccacagactgctttcttctggcgacaatggcctatgaccgctatgtggccatatgccacccactgcagtaccacaccatgatgtccaagacgctctgcattcggatgaccacaggggccttcaaagctggaaacctgcattccatgattcatgtagggcttttattaaggttaactttctgcaggtctaataaaattcaccactttttctgtgatattcttccactgtatagactctcctgtacagatccttctattaatgaactaatgatatatatcttttcaataccaattcaaatctttaccattgctactgtcttgatctcttatctctgcatccttttgactgttttcaaaatgaaatccaaggagggaagaggtaaagcattttctacctgtgcatcccactttctctctgtctcaatattttacatttgtcttctcatgtatattggaccatctgaagaaggagataaagatacaccagtggcaatattttatgcaatagtaatcccattactaaacccttttatttatagtctgagaaataaggaggtcataaatgttcttaaaaaaattatgaggaattataacattcttaaacaaacttgctctatagcaaatttatttttaatttattaa

SEQ ID NO: 162331 - DNA, 936 bp, Homo sapiens; identical to SEQ ID NO: 161893
  Payload ID: 11863
  Gene Symbol: OR5L1
  Gene Name: olfactory receptor, family 5, subfamily L, member 1 (gene/pseudogene)
  Uniprot ID: Q8NGL2
  ENST ID: ENST00000333973
  CDS Start-End: 1-936

SEQ ID NO: 162332 - DNA, 936 bp, Homo sapiens
  Payload ID: 11864
  Gene Symbol: OR5L2
  Gene Name: olfactory receptor, family 5, subfamily L, member 2
  Uniprot ID: Q8NGL0
  ENST ID: ENST00000378397
  CDS Start-End: 1-936
atgggcaaggaaaactgcaccactgtggctgagttcattctccttggactatcagatgtccctgagttgagagtctgcctcttcctgctgttccttctcatctatggagtcacgttgttagccaatctgggcatgactgcactgattcaggtcagctctcggctccacacccccgtgtactttttcctcagccacttgtcctttgtagatttctgctactcctcaataattgtgccaaagatgttggctaatatctttaacaaggacaaagccatctccttcctagggtgcatggtgcaattctacttgttttgcacatgtggagtcactgaggtcttcctgctggccgtgatggcctatgaccgctttgtggccatctgtaaccccctgctgtacatggtgaccatgtctcagaagctgcgtgtggagctgacctcttgctgctacttctgtgggacggtgtgttctctgattcactcgtccttagctcttaggatcctcttctatagatctaatgtgattaaccacttcttctgtgatctaccccctctcctaagtcttgcttgctctgatgtcactgtgaatgagacactgctgttcctggtggccactttgaatgagagtgttaccatcatgatcatcctcacctcctacctgctaattctcaccactatcctgaagatacactctgcagagagcaggcacaaagctttctccacctgtgcctcccacctcacagccatcactgtctcccatggaacaatcctttacatttattgcaggccgagttcaggcaacagtggagatgttgacaaagtggccaccgtgttctacacagttgtgattcccatgctgaaccccctgatctacagcctgagaaataaggatgtgaacaaagctctcagaaaagtgatgggctccaaaattcactcctag

SEQ ID NO: 162333 - DNA, 948 bp, Homo sapiens
  Payload ID: 11865
  Gene Symbol: OR5M1
  Gene Name: olfactory receptor, family 5, subfamily M, member 1
  Uniprot ID: Q8NGP8
  ENST ID: ENST00000526538
  CDS Start-End: 1-948
atgttctccccaaaccacaccatagtgacagaattcattctcttgggactgacagacgacccagtgctagagaagatcctgtttggggtattccttgcgatctacctaatcacactggcaggcaacctgtgcatgatcctgctgatcaggaccaattcccacctgcaaacacccatgtatttcttccttggccacctctcctttgtagacatttgctattcttccaatgttactccaaatatgctgcacaatttcctctcagaacagaagaccatctcctacgctggatgcttcacacagtgtcttctcttcatcgccctggtgatcactgagttttacatccttgcttcaatggcattggatcgctatgtagccatttgcagccctttgcattacagttccaggatgtccaagaacatctgtgtctgtctggtcactatcccttacatgtatgggtttcttagtgggttctctcagtcactgctaacctttcacttatccttctgtggctcccttgaaatcaatcatttctactgcgctgatcctcctcttatcatgctggcctgctctgacacccgtgtcaaaaagatggcaatgtttgtagttgcaggctttaatctctcaagctctctcttcatcattcttctgtcctatcttttcatttttgcagcgatcttcaggatccgttctgctgaaggcaggcacaaagccttttctacgtgtgcttcccacctgacaatagtcactttgttttatggaaccctcttctgcatgtacgtaaggcctccatcagagaagtctgtagaggagtccaaaataactgcagtcttttatacttttttgagcccaatgctgaacccattgatctatagcctacggaacacagatgtaatccttgccatgcaacaaatgattaggggaaaatcctttcataaaattgcagtttag

SEQ ID NO: 162334 - DNA, 948 bp, Homo sapiens
  Payload ID: 11866
  Gene Symbol: OR5M10
  Gene Name: olfactory receptor, family 5, subfamily M, member 10
  Uniprot ID: Q6IEU7
  ENST ID: ENST00000526812
  CDS Start-End: 1-948
atgttgtccccaaaccacaccatagtgacagaattcattctcttaggactgacagacgacccagtgctagagaagatcctgtttggggtgttcctggcgatctacctaatcacactggcaggcaacctgtgcatgatcctgctgatcaggaccaattcccaactgcaaacacccatgtatttcttccttggtcacctctcctttgtagacatttgctattcttccaatgttactccaaatatgctgcacaatttcctctcagaacagaagaccatctcctacgctggatgcttcacacagtgtcttctcttcatcgccctagtgatcactgagttttacttccttgcttcaatggcattggatcgctatgtagccatttgcagccctttacattacagttccaggatgtccaagaacatttgcatctctctggtcactgtgccttacatgtatggcttccttaatgggctctctcagacactgctgacctttcacttatccttctgtggctcccttgaaatcaatcatttctactgcgctgatcctcctcttatcatgctggcctgctctgacacccgtgtcaaaaagatggcaatgtttgtagttgcaggctttactctctcaagctctctcttcatcattcttctgtcctatcttttcatttttgcagcgatcttcaggatccgttctgctgaaggcaggcacaaagccttttctacgtgtgcttcccacctgacaatagtcactttgttttatggaaccctcttctgcatgtacgtaaggcctccatcagagaagtctgtagaggagtccaaaataattgcagtcttttatacttttttgagcccaatgctgaacccattgatctatagcctacggaacagagatgtaatccttgccatacaacaaatgattaggggaaaatccttttgtaaaattgcagtttag

SEQ ID NO: 162335 - DNA, 918 bp, Homo sapiens
  Payload ID: 11867
  Gene Symbol: OR5M11
  Gene Name: olfactory receptor, family 5, subfamily M, member 11
  Uniprot ID: Q96RB7
  ENST ID: ENST00000528616
  CDS Start-End: 1-918
atgtccaacacaaatggcagtgcaatcacagaattcattttacttgggctcacagattgcccggaactccagtctctgctttttgtgctgtttctggttgtttacctcgtcaccctgctaggcaacctgggcatgataatgttaatgagactggactctcgccttcacacgcccatgtacttcttcctcactaacttagcctttgtggatttgtgctatacatcaaatgcaaccccgcagatgtcgactaatatcgtatctgagaagaccatttcctttgctggttgctttacacagtgctacattttcattgcccttctactcactgagttttacatgctggcagcaatggcctatgaccgctatgtggccatatatgaccctctgcgctacagtgtgaaaacgtccaggagagtttgcatctgcttggccacatttccctatgtctatggcttctcagatggactcttccaggccatcctgaccttccgcctgaccttctgtagatccagtgtcatcaaccacttctactgtgctgacccgccgctcattaagctttcttgttctgatacttatgtcaaagagcatgccatgttcatatctgctggcttcaacctctccagctccctcaccatcgtcttggtgtcctatgccttcattcttgctgccatcctccggatcaaatcagcagagggaaggcacaaggcattctccacctgtggttcccatatgatggctgtcaccctgttttatgggactctcttttgcatgtatataagaccaccaacagataagactgttgaggaatctaaaataatagctgtcttttacacctttgtgagtccggtacttaatccattgatctacagtctgaggaataaagatgtgaagcaggccttgaagaatgtcctgagatga

SEQ ID NO: 162336 - DNA, 924 bp, Homo sapiens
  Payload ID: 11868
  Gene Symbol: OR5M3
  Gene Name: olfactory receptor, family 5, subfamily M, member 3
  Uniprot ID: Q8NGP4
  ENST ID: ENST00000312240
  CDS Start-End: 1-924
atgctcaatttcaccgatgtgacagagttcattcttttggggctaacgagccgtcgagaatggcaagttctcttcttcatcatctttcttgtggtctacatcatcaccatggtgggcaatatcggcatgatggtgttaatcaaggtcagtcctcagcttaacaaccccatgtactttttcctcagtcacttgtcatttgttgatgtgtggttttcttccaatgtcacccctaaaatgttggaaaacctgttatcagataaaaaaacaattacttatgctggttgtttagtacagtgtttcttcttcattgctcttgtccatgtggaaatttttattcttgctgcgatggcctttgatagatacatggcaattgggaatcctctgctttatggcagtaaaatgtcaagggttgtctgtattcgactgattactttcccttacatttatggttttctgacgagtctggcagcaacattatggacttacggcttgtacttctgtggaaaaattgagatcaaccatttctactgtgcagatccacctctcatcaaaatggcctgtgctgggacctttgtaaaagaatatacaatgatcatacttgccggcattaacttcacatattccctgactgtaattatcatctcttacttattcatcctcattgccattctgcgaatgcgctcagcagaaggaaggcagaaggccttttccacatgtgggtcccatctgacagctgtcattatattctatggtactctgatcttcatgtatctcagacgtcccacagaggagtctgtggagcaggggaagatggtggctgtgttctataccacagtgatccccatgttgaatcccatgatctacagtctgaggaacaaggatgtgaaaaaggccatgatgaaagtgatcagcagatcatgttaa

SEQ ID NO: 162337 - DNA, 936 bp, Homo sapiens
  Payload ID: 11869
  Gene Symbol: OR5M8
  Gene Name: olfactory receptor, family 5, subfamily M, member 8
  Uniprot ID: Q8NGP6
  ENST ID: ENST00000327216
  CDS Start-End: 1-936
atgagaagaaactgcacgttggtgactgagttcattctcctgggactgaccagtcgccgggaattacaaattctcctcttcacgctgtttctggccatttacatggtcacggtggcagggaaccttggcatgattgtcctcatccaggccaacgcctggctccacatgcccatgtactttttcctgagccacttatccttcgtggatctgtgcttctcttccaatgtgactccaaagatgctggagattttcctttcagagaagaaaagcatttcctatcctgcctgtcttgtgcagtgttacctttttatcgccttggtccatgttgagatctacatcctggctgtgatggcctttgaccggtacatggccatctgcaaccctctgctttatggcagcagaatgtccaagagtgtgtgctccttcctcatcacggtgccttatgtgtatggagcgctcactggcctgatggagaccatgtggacctacaacctagccttctgtggccccaatgaaattaatcacttctactgtgcggacccaccactgattaagctggcttgttctgacacctacaacaaggagttgtcaatgtttattgtggctggctggaacctttctttttctctcttcatcatatgtatttcctacctttacattttccctgctattttaaagattcgctctacagagggcaggcaaaaagctttttctacctgtggctcccatctgacagctgtcactatattctatgcaacccttttcttcatgtatctcagacccccctcaaaggaatctgttgaacagggtaaaatggtagctgtattttataccacagtaatccctatgctgaaccttataatttatagccttagaaataaaaatgtaaaagaagcattaatcaaagagctgtcaatgaagatatacttttcttaa

SEQ ID NO: 162338 - DNA, 933 bp, Homo sapiens
  Payload ID: 11870
  Gene Symbol: OR5M9
  Gene Name: olfactory receptor, family 5, subfamily M, member 9
  Uniprot ID: Q8NGP3
  ENST ID: ENST00000279791
  CDS Start-End: 1-933
atgcctaatttcacggatgtgacagaatttactctcctggggctgacctgtcgtcaggagctacaggttctcttttttgtggtgttcctagcggtttacatgatcactctgttgggaaatattggtatgatcattttgattagcatcagtcctcagcttcagagtcccatgtactttttcctgagtcatctgtcttttgcggacgtgtgcttctcctccaacgttacccccaaaatgctggaaaacttattatcagagacaaaaaccatttcctatgtgggatgcttggtgcagtgctactttttcattgccgttgtccacgtggaggtctatatcctggctgtgatggcctttgacaggtacatggccggctgcaaccctctgctttatggcagtaaaatgtctaggactgtgtgtgttcggctcatctctgtgccttatgtctatggattctctgtcagcctaatatgcacactatggacttatggcttatacttctgtggaaactttgaaatcaatcacttctattgtgcagatccccctctcatccagattgcctgtgggagagtgcacatcaaagaaatcacaatgattgttattgctggaattaacttcacatattccctctcggtggtcctcatctcctacactctcattgtagtagctgtgctacgcatgcgctctgccgatggcaggaggaaggcgttctccacctgtgggtcccacttgacggctgtttctatgttttatgggacccccatcttcatgtatctcaggagacccactgaggaatccgtagagcagggcaaaatggtggctgtgttttacaccacagtaattcctatgttgaatcccatgatctacagtctgagaaataaggatgtaaaagaagcagtcaacaaagcaatcaccaagacatatgtgaggcagtaa

SEQ ID NO: 162339 - DNA, 1069 bp, Homo sapiens
  Payload ID: 11871
  Gene Symbol: OR5P2
  Gene Name: olfactory receptor, family 5, subfamily P, member 2
  Uniprot ID: Q8WZ92
  ENST ID: ENST00000329434
  CDS Start-End: 32-1000
gggttcatttagtcagcagctacttcgtctcatgaattccctgaaggacgggaatcacaccgctctgacggggttcatcctattgggcttaacagatgatccaatccttcgagtcatcctcttcatgatcatcctatctggtaatctcagcataattattcttatcagaatttcttctcagctccatcatcctatgtatttctttctgagccacttggcttttgctgacatggcctattcatcttctgtcacacccaacatgcttgtaaacttcctggtggagagaaatacagtctcctaccttggatgtgccatccagcttggttcagcggctttctttgcaacagtcgaatgcgtccttctggctgccatggcctatgaccgctttgtggcaatttgcagtccactgctttattcaaccaaaatgtccacacaagtcagtgtccagctactcttagtagtttacatagctggttttctcattgctgtctcctatactacttccttctattttttactcttctgtggaccaaatcaagtcaatcattttttctgtgatttcgctcccttacttgaactctcctgttctgatatcagtgtctccacagttgttctctcattttcttctggatccatcattgtggtcactgtgtgtgtcatagccgtctgctacatctatatcctcatcaccatcctgaagatgcgctccactgaggggcaccacaaggccttctccacctgcacttcccacctcactgtggttaccctgttctatgggaccattaccttcatttatgtgatgcccaattttagctactcaactgaccagaacaaggtggtgtctgtgttgtacacagtggtgattcccatgttgaaccccctgatctacagcctcaggaacaaggagattaagggggctctgaagagagagcttgttagaaaaatactttctcatgatgcttgttattttagtagaacttcaaataatgatattacatagaaccctatctcttctcttgagaatactcaatgcacgtgtagatacagatttagtgtttgctttcttgac

SEQ ID NO: 162340 - DNA, 1069 bp, Homo sapiens; identical to SEQ ID NO: 162339
  Payload ID: 11871
  Gene Symbol: OR5P2
  Gene Name: olfactory receptor, family 5, subfamily P, member 2
  Uniprot ID: Q8WZ92
  ENST ID: ENST00000611603
  CDS Start-End: 32-1000

SEQ ID NO: 162341 - DNA, 1069 bp, Homo sapiens; identical to SEQ ID NO: 162339
  Payload ID: 11871
  Gene Symbol: OR5P2
  Gene Name: olfactory receptor, family 5, subfamily P, member 2
  Uniprot ID: Q8WZ92
  ENST ID: ENST00000625920
  CDS Start-End: 32-1000

SEQ ID NO: 162342 - DNA, 936 bp, Homo sapiens
  Payload ID: 11872
  Gene Symbol: OR5P3
  Gene Name: olfactory receptor, family 5, subfamily P, member 3
  Uniprot ID: Q8WZ94
  ENST ID: ENST00000328375
  CDS Start-End: 1-936
atggggactggaaatgacaccactgtggtagagtttactcttttggggttatctgaggatactacagtttgtgctattttatttcttgtgtttctaggaatttatgttgtcaccttaatgggtaatatcagcataattgtattgatcagaagaagtcatcatcttcatacacccatgtacattttcctctgccatttggcctttgtagacattgggtactcctcatcagtcacacctgtcatgctcatgagcttcctaaggaaagaaacctctctccctgttgctggttgtgtggcccagctctgttctgtagtgacgtttggtacggccgagtgcttcctgctggctgccatggcctatgatcgctatgtggccatctgctcacccctgctctactctacctgcatgtcccctggagtctgcatcatcttagtgggcatgtcctacctgggtggatgtgtgaatgcttggacattcattggctgcttattaagactgtccttctgtgggccaaataaagtcaatcactttttctgtgactattcaccacttttgaagcttgcttgttcccatgattttacttttgaaataattccagctatctcttctggatctatcattgtggccactgtgtgtgtcatagccatatcctacatctatatcctcatcaccatcctgaagatgcactccaccaagggccgccacaaggccttctccacctgcacctcccacctcactgcagtcactctgttctatgggaccattaccttcatttatgtgatgcccaagtccagctactcaactgaccagaacaaggtggtgtctgtgttctacaccgtggtgattcccatgttgaaccccctgatctacagcctcaggaacaaggagattaagggggctctgaagagagagcttagaataaaaatattttcttga

SEQ ID NO: 162343 - DNA, 936 bp, Homo sapiens; identical to SEQ ID NO: 162342
  Payload ID: 11872
  Gene Symbol: OR5P3
  Gene Name: olfactory receptor, family 5, subfamily P, member 3
  Uniprot ID: Q8WZ94
  ENST ID: ENST00000619725
  CDS Start-End: 1-936

SEQ ID NO: 162344 - DNA, 936 bp, Homo sapiens
  Payload ID: 11872
  Gene Symbol: OR5P3
  Gene Name: olfactory receptor, family 5, subfamily P, member 3
  Uniprot ID: Q8WZ94
  ENST ID: ENST00000630502
  CDS Start-End: 1-936
atggggactggaaatgacaccactgtggtagagtttactcttttgggattatccgaggatactacagtttgtgctattttatttcttgtgtttctaggaatttatgttgtcaccttaatgggtaatatcagcataattgtattgatcagaagaagtcatcatcttcatacacccatgtacattttcctctgccatttggcctttgtagacattgggtactcctcatcagtcacacctgtcatgctcatgagcttcctaaggaaagaaacctctctccctgttgctggttgtgtggcccagctctgttctgtggtgacgtttggtacggccgagtgcttcctgctggctgccatggcctatgatcgctatgtggccatctgctcacccctgctctactctacctgcatgtcccctggagtctgcatcatcttagtgggcatgtcctacctgggtggatgtgtgaatgcttggacattcattggctgcttattaagactgtccttctgtgggccaaataaagtcaatcactttttctgtgactattcaccacttttgaagcttgcttgttcccatgattttacttttgaaataattccagctatctcttctggatctatcattgtggccactgtgtgtgtcatagccatatcctacatctatatcctcatcaccatcctgaagatgcactccaccaagggccgccacaaggccttctccacctgcacctcccacctcactgcagtcactctgttctatgggaccattaccttcatttatgtgatgcccaagtccagctactcaactgaccagaacaaggtggtgtctgtgttctacaccgtggtgattcccatgttgaaccccctgatctacagcctcaggaacaaggagattaagggggctctgaagagagagcttagaataaaaatattttcttga

SEQ ID NO: 162345 - DNA, 975 bp, Homo sapiens; identical to SEQ ID NO: 161895
  Payload ID: 11873
  Gene Symbol: OR5R1
  Gene Name: olfactory receptor, family 5, subfamily R, member 1 (gene/pseudogene)
  Uniprot ID: Q8NH85
  ENST ID: ENST00000312253
  CDS Start-End: 1-975

SEQ ID NO: 162346 - DNA, 981 bp, Homo sapiens
  Payload ID: 11874
  Gene Symbol: OR5T1
  Gene Name: olfactory receptor, family 5, subfamily T, member 1
  Uniprot ID: Q8NG75
  ENST ID: ENST00000313033
  CDS Start-End: 1-981
atgtcagggttgccttcagatatggatctatacaagcttcaattaaacaattttactgaagtcaccatgtttatattaataagcttcacagaagaatttgatgtgcaagtcttcctatttttattatttttagcaatctatctattcactctaataggcaatttagggctggttgtaccgatcattggggatttctggcttcacagcccaatgtactattttcttggtgttttatcattcttggatgtctgctattctacagttgtcactccaaaaatgttggtcaatttcctggcaaaaaataaatctatttcatttcttggatgtgcaacacagatgtttcttgcttgtacttttggaaccacagaatgctttctcttggctgcaatggcttatgatcgctatgtagccatctacaaccctctcctgtattcagtgagcatgtcacccagagtctatgtgccactcatcactgcttcctatgttgctagcattttacatgctactatacatacagtggctacatttagcctgtccttctgtggatccaatgaaattaggcatgtcttttgtaatatgcctcctctgcttgctatttcttgttctgacactcacgtaatccagcttctattcttctactttgtgggctctattgagatagtcactatcctgattgtcctgatctcctatggttttattctgttggccattctgaagatgcagtctgctgaagggaggagaaaagtcttctctacatgtggagctcacctaactggagtgacaatttatcatgggacaatcctcttcatgtatgtgagaccaagttccagctacacttcggacaatgacatgatagtgtcaatattttataccattgtgattcccatgctgaatcccatcatctacagtttgcggaacaaagatgtaaaggaggcaatcaaaagattgcttgtgagaaattggttcataaataagttatag

SEQ ID NO: 162347 - DNA, 981 bp, Homo sapiens; identical to SEQ ID NO: 162346
  Payload ID: 11874
  Gene Symbol: OR5T1
  Gene Name: olfactory receptor, family 5, subfamily T, member 1
  Uniprot ID: Q8NG75
  ENST ID: ENST00000576733
  CDS Start-End: 1-981

SEQ ID NO: 162348 - DNA, 1080 bp, Homo sapiens
  Payload ID: 11875
  Gene Symbol: OR5T2
  Gene Name: olfactory receptor, family 5, subfamily T, member 2
  Uniprot ID: Q8NGG2
  ENST ID: ENST00000313264
  CDS Start-End: 1-1080
atgtcgtacagtatatacaagagcacagttaacatccccttgagtcatggtgttgttcattctttttgtcataatatgaactgtaactttatgcatatcttcaagtttgttctagatttcaacatgaagaatgtcactgaagttaccttatttgtactgaagggcttcacagacaatcttgaactgcagactatcttcttcttcctgtttctagcaatctacctcttcactctcatgggaaatttaggactgattttagtggtcattagggattcccagctccacaaacccatgtactattttctgagtatgttgtcttctgtggatgcctgctattcctcagttattaccccaaatatgttagtagattttacgacaaagaataaagtcatttcattccttggatgtgtagcacaggtgtttcttgcttgtagttttggaaccacagaatgctttctcttggctgcaatggcttatgatcgctatgtagccatctacaaccctctcctgtattcagtgagcatgtcacccagagtctacatgccactcatcaatgcttcctatgttgctggcattttacatgctactatacatacagtggctacatttagcctatccttctgtggagccaatgaaattaggcgtgtcttttgtgatatccctcctctccttgctatttcttattctgacactcacacaaaccagcttctactcttctactttgtgggctctatcgagctggtcactatcctgattgttctgatctcctatggtttgattctgttggccattctgaagatgtattctgctgaagggaggagaaaagtcttctccacatgtggagctcacctaactggagtgtcaatttattatgggacaatcctcttcatgtatgtgagaccaagttccagctatgcttcggaccatgacatgatagtgtcaatattttacaccattgtgattcccttgctgaatcccgtcatctacagtttgaggaacaaagatgtaaaagactcaatgaaaaaaatgtttgggaaaaatcaggttatcaataaagtatattttcatactaaaaaataa

SEQ ID NO: 162349 - DNA, 1080 bp, Homo sapiens; identical to SEQ ID NO: 162348
  Payload ID: 11875
  Gene Symbol: OR5T2
  Gene Name: olfactory receptor, family 5, subfamily T, member 2
  Uniprot ID: Q8NGG2
  ENST ID: ENST00000573647
  CDS Start-End: 1-1080

SEQ ID NO: 162350 - DNA, 1023 bp, Homo sapiens
  Payload ID: 11876
  Gene Symbol: OR5T3
  Gene Name: olfactory receptor, family 5, subfamily T, member 3
  Uniprot ID: Q8NGG3
  ENST ID: ENST00000303059
  CDS Start-End: 1-1023
atggactccactttcacaggctataacctttataacctgcaagtaaaaactgaaatggacaagttgtcatcaggtttggatatatacaggaatccactgaagaacaagactgaagtcaccatgtttatattgacaggcttcacagatgattttgagctgcaagtcttcctatttttactattttttgcaatctatctctttaccttgataggcaatttagggctggttgtgttggtcattgaggattcctggctccacaaccccatgtattattttcttagtgttttatcattcttggatgcttgctattctacagttgtcactccaaaaatgttggtcaatttcctggcaaaaaataaatccatttcatttatcggatgtgcaacacagatgcttctttttgttacttttggaactacagaatgttttctcttggctgcaatggcttatgatcactatgtagccatctacaaccctctcctgtattcagtgagcatgtcacccagagtctatgtgccactcatcactgcttcctacgttgctggcattttacatgctactatacatatagtggctacatttagcctgtccttctgtggatccaatgaaattaggcatgtcttttgtgatatgcctcctctccttgctatttcttgttctgacactcacacaaaccagcttctactcttctactttgtgggttctattgagatagtcactatcctgattgtcctcatttcctgtgatttcattctgttgtccattctgaagatgcattctgctaagggaaggcaaaaggccttctctacatgtggctctcacctaactggagtgacaatttatcatggaacaattctcgtcagttatatgagaccaagttccagctatgcttcagaccatgacatcatagtgtcaatattttacacaattgtgattcccaagttgaatcccatcatctatagtttgaggaacaaagaagtaaaaaaggcagtgaagaaaatgttgaaattggtttacaaatga

SEQ ID NO: 162351 - DNA, 1023 bp, Homo sapiens; identical to SEQ ID NO: 162350
  Payload ID: 11876
  Gene Symbol: OR5T3
  Gene Name: olfactory receptor, family 5, subfamily T, member 3
  Uniprot ID: Q8NGG3
  ENST ID: ENST00000575738
  CDS Start-End: 1-1023

SEQ ID NO: 162352 - DNA, 1048 bp, Homo sapiens
  Payload ID: 11877
  Gene Symbol: OR5V1
  Gene Name: olfactory receptor, family 5, subfamily V, member 1
  Uniprot ID: Q9UGF6
  ENST ID: ENST00000230223
  CDS Start-End: 83-1048
gtcatgctattgcagcatatgattcatttttataatctggtcttctctttgcccaattcctgaaaggaaaccaggcgacatcatggaaagaaagaatcaaacagctataactgaattcatcatcttgggattctccaacctaaatgaatggcagtttttactattcaccatcttctttctgacttatttctgtactttgggaggaaatatattaattatcttgacgactgtgactgatccacacctgcatacacctatgtattattttctagggaacttggcctttattgacatctgctacaccaccagcaatgtcccccagatgatggtgcacctcctctcaaagaaaaaaagcatttcttatgtggggtgtgtggttcaactttttgcatttgttttctttgtaggatcagagtgtctcctactggcagcaatggcatatgatcgttacattgcaatctgcaatcctttaaggtattcagttattctgagcaaggttctatgcaatcaattagcagcctcatgctgggctgctggtttccttaactcagtggtgcatacagtgttgacattctgcctgcccttctgtggcaacaatcagattaattacttcttctgtgacatcccccctttgctgatcttgtcttgtggaaacacttctgtcaatgagttggcactgctatccactggggtcttcattggttggactcctttcctttgtatcgtactttcctacatttgcataatctccaccatcttgaggatccagtcctcagagggaagacgaaaagccttttctacatgtgcctcccacctggccattgtctttctcttttatggcagcgccatctttacatatgtacggcccatctcaacttactcattaaagaaagataggttggtttcagtgttgtacagtgttgttacccccatgctaaaccctataatttacacattgaggaataaggacatcaaagaagctgtcaaaactatagggagcaagtggcagccaccaatttcctctttggatagtaaactcacttattga

SEQ ID NO: 162353 - DNA, 1266 bp, Homo sapiens
  Payload ID: 11877
  Gene Symbol: OR5V1
  Gene Name: olfactory receptor, family 5, subfamily V, member 1
  Uniprot ID: Q9UGF6
  ENST ID: ENST00000377154
  CDS Start-End: 301-1266
gagctgaaggtaggaaattccaacattctgaagtcttcagcaaatcttagcagatcatctcctcctcacagtcctgtctttagagaacagggtcgatatttcggcttctgcgaactcagatgtcatcttttcttccctaaagtttttaaagttcctattgatatattcccctgcctagagggtttggtggtcgttttcttcctcttaactttattaaggtcatgctattgcagcatatgattcatttttataatctggtcttctctttgcccaattcctgaaaggaaaccaggcgacatcatggaaagaaagaatcaaacagctataactgaattcatcatcttgggattctccaacctaaatgaattgcagtttttactattcaccatcttctttctgacttatttctgtactttgggaggaaatatattaattatcttgacgactgtgactgatccacacctgcatacacctatgtattattttctagggaacttggcctttattgacatctgctacaccaccagcaatgtcccccagatgatggtgcacctcctctcaaagaaaaaaagcatttcttatgtggggtgtgtggttcaactttttgcatttgttttctttgtaggatcagagtgtctcctactggcagcaatggcatatgatcgttacattgcaatctgcaatcctttaaggtattcagttattctgagcaaggttctatgcaatcaattagcagcctcatgctgggctgctggtttccttaactcagtggtgcatacagtgttgacattctgcctgcccttctgtggcaacaatcagattaattacttcttctgtgacatcccccctttgctgatcttgtcttgtggaaacacttctgtcaatgagttggcactgctatccactggggtcttcattggttggactcctttcctttgtatcgtactttcctacatttgcataatctccaccatcttgaggatccagtcctcagagggaagacgaaaagccttctctacatgtgcctcccacctggccattgtctttctcttttatggcagcgccatctttacatatgtacggcccatctcaacttactcattaaagaaagataggttggtttcagtgttgtacagtgttgttacccccatgctaaaccctataatttacacattgaggaataaggacatcaaagaagctgtcaaaactatagggagcaagtggcagccaccaatttcctctttggatagtaaactcacttattga

SEQ ID NO: 162354 - DNA, 1266 bp, Homo sapiens
  Payload ID: 11877
  Gene Symbol: OR5V1
  Gene Name: olfactory receptor, family 5, subfamily V, member 1
  Uniprot ID: Q9UGF6
  ENST ID: ENST00000400698
  CDS Start-End: 301-1266
gagctgaaggtaggaaattccaacattctgaagtcttcagcaaatcttagcagatcatctcctcctcacagtcctgtctttagagaacagggtcgatatttcggcttctgcgaactcagatgtcatcttttcttccctaaagtttttaaagttcctattgatatattcccctgcctagagggtttggtggtcgttttcttcctcttaactttattaaggtcatgctattgcagcatatgattcatttttataatctggtcttctctttgcccaattcctgaaaggaaaccaggcgacatcatggaaagaaagaatcaaacagctataactgaattcatcatcttgggattctccaacctaaatgaatggcagtttttactattcaccatcttctttctgacttatttctgtactttgggaggaaatatattaattatcttgacgactgtgactgatccacacctgcatacacctatgtattattttctagggaacttggcctttattgacatctgctacaccaccagcaatgtcccccagatgatggtgcacctcctctcaaagaaaaaaagcatttcttatgtggggtgtgtggttcaactttttgcatttgttttctttgtaggatcagagtgtctcctactggcagcaatggcatatgatcgttacattgcaatctgcaatcctttaaggtattcagttattctgagcaaggttctatgcaatcaattagcagcctcatgctgggctgctggtttccttaactcagtggtgcatacagtgttgacattctgcctgcccttctgtggcaacaatcagattaattacttcttctgtgacatcccccctttgctgatcttgtcttgtggaaacacttctgtcaatgagttggcactgctatccactggggtcttcattggttggactcctttcctttgtatcgtactttcctacatttgcataatctccaccatcttgaggatccagtcctcagagggaagacgaaaagccttttctacatgtgcctcccacctggccattgtctttctcttttatggcagcgccatctttacatatgtacggcccatctcaacttactcattaaagaaagataggttggtttcagtgttgtacagtgttgttacccccatgctaaaccctataatttacacattgaggaataaggacatcaaagaagctgtcaaaactatagggagcaagtggcagccaccaatttcctctttggatagtaaactcacttattga

SEQ ID NO: 162355 - DNA, 1266 bp, Homo sapiens
  Payload ID: 11877
  Gene Symbol: OR5V1
  Gene Name: olfactory receptor, family 5, subfamily V, member 1
  Uniprot ID: Q9UGF6
  ENST ID: ENST00000446761
  CDS Start-End: 301-1266
gagctgaaggtaggaaattccaacattctgaagtcttcagcaaatcttagcagatcatctcctcctcacagtcctgtctttagagaacagggtcgatatttcggcttctgcgaactcagatgtcatcttttcttccctaaagtttttaaagttcctattgatatattcccctgcctagagggtttggtggtcgttttcttcctcttaactttattaaggtcatgctattgcagcatatgattcatttttataatctggtcttctctttgcccaattcctgaaaggaaaccaggcgacatcatggaaagaaagaatcaaacagctataactgaattcatcatcttgggattctccaacctaaatgaattgcagtttttactattcaccatcttctttctgacttatttctgtactttgggaggaaatatattaattatcttgacgactgtgactgatccacacctgcatacacctatgtattattttctagggaacttggcctttattgacatctgctacaccaccagcaatgtcccccagatgatggtgcacctcctctcaaagaaaaaaagcatttcttatgtggggtgtgtggttcaactttttgcatttgttttctttgtaggatcagagtgtctcctactggcagcaatggcatatgatcgttacattgcaatctgcaatcctttaaggtattcagttattctgagcaaggttctatgcaatcaattagcagcctcatgctgggctgctggtttccttaactcagtggtgcatacagtgttgacattctgcctgcccttctgtggcaacaatcagattaattacttcttctgtgacatcccccctttgctgatcttgtcttgtggaaacacttctgtcaatgagttggcactgctatccactggggtcttcattggttggactcctttcctttgtatcgtactttcctacatttgcataatctccaccatcttgaggatccagtcctcagagggaagacgaaaagccttttctacatgtgcctcccacctggccattgtctttctcttttatggcagcgccatctttacatatgtacggcccatctcaacttactcattaaagaaagataggttggtttcagtgttgtacagtgttgttacccccatgctaaaccctataatttacacattgaggaataaggacatcaaagaagctgtcaaaactatagggagcaagtggcagccaccaatttcctctttggatagtaaactcacttattga

SEQ ID NO: 162356 - DNA, 1117 bp, Homo sapiens
  Payload ID: 11877
  Gene Symbol: OR5V1
  Gene Name: olfactory receptor, family 5, subfamily V, member 1
  Uniprot ID: Q9UGF6
  ENST ID: ENST00000441440
  CDS Start-End: 152-1117
gaaatacgttgtgaacttcccagcacatctgttagaaaggaggtccagaaaaagagcacaaagagaatggtcatgctattgcagcatatgattcatttttataatctggtcttctctttgcccaattcctgaaaggaaaccaggcgacatcatggaaagaaagaatcaaacagctataactgaattcatcatcttgggattctccaacctaaatgaattgcagtttttactattcaccatcttctttctgacttatttctgtactttgggaggaaatatattaattatcttgacgactgtgactgatccacacctgcatacacctatgtattattttctagggaacttggcctttattgacatctgctacaccaccagcaatgtcccccagatgatggtgcacctcctctcaaagaaaaaaagcatttcttatgtggggtgtgtggttcaactttttgcatttgttttctttgtaggatcagagtgtctcctactggcagcaatggcatatgatcgttacattgcaatctgcaatcctttaaggtattcagttattctgagcaaggttctatgcaatcaattagcagcctcatgctgggctgctggtttccttaactcagtggtgcatacagtgttgacattctgcctgcccttctgtggcaacaatcagattaattacttcttctgtgacatcccccctttgctgatcttgtcttgtggaaacacttctgtcaatgagttggcactgctatccactggggtcttcattggttggactcctttcctttgtatcgtactttcctacatttgcataatctccaccatcttgaggatccagtcctcagagggaagacgaaaagccttttctacatgtgcctcccacctggccattgtctttctcttttatggcagcgccatctttacatatgtacggcccatctcaacttactcattaaagaaagataggttggtttcagtgttgtacagtgttgttacccccatgctaaaccctataatttacacattgaggaataaggacatcaaagaagctgtcaaaactatagggagcaagtggcagccaccaatttcctctttggatagtaaactcacttattga

SEQ ID NO: 162357 - DNA, 1117 bp, Homo sapiens
  Payload ID: 11877
  Gene Symbol: OR5V1
  Gene Name: olfactory receptor, family 5, subfamily V, member 1
  Uniprot ID: Q9UGF6
  ENST ID: ENST00000458372
  CDS Start-End: 152-1117
gaaatacgttgtgaacttcccagcacatctgttagaaaggaggtccagaaaaagagcacaaagagaatggtcatgctattgcagcatatgattcatttttataatctggtcttctctttgcccaattcctgaaaggaaaccaggcgacatcatggaaagaaagaatcaaacagctataactgaattcatcatcttgggattctccaacctaaatgaattgcagtttttactattcaccatcttctttctgacttatttctgtactttgggaggaaatatattaattatcttgacgactgtgactgatccacacctgcatacacctatgtattattttctagggaacttggcctttattgacatctgctacaccaccagcaatgtcccccagatgatggtgcacctcctctcaaagaaaaaaagcatttcttatgtggggtgtgtggttcaactttttgcgtttgttttctttgtaggatcagagtgtctcctactggcagcaatggcatatgatcgttacattgcaatctgcaatcctttaaggtattcagttattctgagcaaggttctatgcaatcaattagcagcctcatgctgggctgctggtttccttaactcagtggtgcatacagtgttgacattctgcctgcccttctgtggcaacaatcagattaattacttcttctgtgacatcccccctttgctgatcttgtcttgtggaaacacttctgtcaatgagttggcactgctatccactggggtcttcattggttggactcctttcctttgtatcgtactttcctacatttgcataatctccaccatcttgaggatccagtcctcagagggaagacgaaaagccttttctacatgtgcctcccacctggccattgtctttctcttttatggcagcgccatctttacatatgtacggcccatctcaacttactcattaaagaaagataggttggtttcagtgttgtacagtgttgttacccccatgctaaaccctataatttacacattgaggaataaggacatcaaagaagctgtcaaaactatagggagcaagtggcagccaccaatttcctctttggatagtaaactcacttattga

SEQ ID NO: 162358 - DNA, 1266 bp, Homo sapiens
  Payload ID: 11877
  Gene Symbol: OR5V1
  Gene Name: olfactory receptor, family 5, subfamily V, member 1
  Uniprot ID: Q9UGF6
  ENST ID: ENST00000444009
  CDS Start-End: 301-1266
gagctgaaggtaggaaattccaacattctgaagtcttcagcaaatcttagcagatcatctcctcctcacagtcctgtctttagagaacagggtcgatatttcggcttctgcgaactcagatgtcatcttttcttccctaaagtttttaaagttcctattgacatattcccctgcctagagggtttggtggtcgttttcttcctcttaactttattaaggtcatgctattgcagcatatgattcatttttataatctggtcttctctttgcccaattcctgaaaggaaaccaggcgacatcatggaaagaaagaatcaaacagctataactgaattcatcatcttgggattctccaacctaaatgaattgcagtttttactattcaccatcttctttctgacttatttctgtactttgggaggaaatatattaattatcttgacgactgtgactgatccacacctgcatacacctatgtattattttctagggaacttggcctttattgacatctgctacaccaccagcaatgtcccccagatgatggtgcacctcctctcaaagaaaaaaagcatttcttatgtggggtgtgtggttcaactttttgcgtttgttttctttgtaggatcagagtgtctcctactggcagcaatggcatatgatcgttacattgcaatctgcaatcctttaaggtattcagttattctgagcaaggttctatgcaatcaattagcagcctcatgctgggctgctggtttccttaactcagtggtgcatacagtgttgacattctgcctgcccttctgtggcaacaatcagattaattacttcttctgtgacatcccccctttgctgatcttgtcttgtggaaacacttctgtcaatgagttggcactgctatccactggggtcttcattggttggactcctttcctttgtatcgtactttcctacatttgcataatctccaccatcttgaggatccagtcctcagagggaagacgaaaagccttttctacatgtgcctcccacctggccattgtctttctcttttatggcagcgccatctttacatatgtacggcccatctcaacttactcattaaagaaagataggttggtttcagtgttgtacagtgttgttacccccatgctaaaccctataatttacacattgaggaataaggacatcaaagaagctgtcaaaactatagggagcaagtggcagccaccaatttcctctttggatagtaaactcacttattga

SEQ ID NO: 162359 - DNA, 1266 bp, Homo sapiens
  Payload ID: 11877
  Gene Symbol: OR5V1
  Gene Name: olfactory receptor, family 5, subfamily V, member 1
  Uniprot ID: Q9UGF6
  ENST ID: ENST00000421859
  CDS Start-End: 301-1266
gagctgaaggtaggaaattccaacattctgaagtcttcagcaaatcttagcagatcatctcctcctcacagtcctgtctttagagaacagggtcgatatttcggcttctgcgaactcagatgtcatcttttcttccctaaagtttttaaagttcctattgatatattcccctgcctagagggtttggtggtcgttttcttcctcttaactttattaaggtcatgctattgcagcatatgattcatttttataatctggtcttctctttgcccaattcctgaaaggaaaccaggcgacatcatggaaagaaagaatcaaacagctataactgaattcatcatcttgggattctccaacctaaatgaattgcagtttttactattcaccatcttctttctgacttatttctgtactttgggaggaaatatattaatgatcttgacgactgtgactgatccacacctgcatacacctatgtattattttctagggaacttggcctttattgacatctgctacaccaccagcaatgtcccccagatgatggtgcacctcctctcaaagaaaaaaagcatttcttatgtggggtgtgtggttcaactttttgcatttgttttctttgtaggatcagagtgtctcctactggcagcaatggcatatgatcgttacattgcaatctgcaatcctttaaggtattcagttattctgagcaaggttctatgcaatcaattagcagcctcatgctgggctgctggtttccttaactcagtggtgcatacagtgttgacattctgcctgcccttctgtggcaacaatcagattaattacttcttctgtgacatcccccctttgctgatcttgtcttgtggaaacacttctgtcaatgagttggcactgctatccactggggtcttcattggttggactcctttcctttgtatcgtactttcctacatttgcataatctccaccatcttgaggatccagtcctcagagggaagacgaaaagccttttctacatgtgcctcccacctggccattgtctttctcttttatggcagcgccatctttacatatgtacggcccatctcaacttactcattaaagaaagataggttggtttcagtgttgtacagtgttgttacccccatgctaaaccctataatttacacattgaggaataaggacatcaaagaggctgtcaaaactatagggagcaagtggcagccaccaatttcctctttggatagtaaactcacttattga

SEQ ID NO: 162360 - DNA, 1117 bp, Homo sapiens
  Payload ID: 11877
  Gene Symbol: OR5V1
  Gene Name: olfactory receptor, family 5, subfamily V, member 1
  Uniprot ID: Q9UGF6
  ENST ID: ENST00000418692
  CDS Start-End: 152-1117
gaaatacgttgtgaacttcccagcacatctgttagaaaggaggtccagaaaaagagcacaaagagaatggtcatgctattgcagcatatgattcatttttataatctggtcttctctttgcccaattcctgaaaggaaaccaggcgacatcatggaaagaaagaatcaaacagctataactgaattcatcatcttgggattctccaacctaaatgaattgcagtttttactattcaccatcttctttctgacttatttctgtactttgggaggaaatatattaatgatcttgacgactgtgactgatccacacctgcatacacctatgtattattttctagggaacttggcctttattgacatctgctacaccaccagcaatgtcccccagatgatggtgcacctcctctcaaagaaaaaaagcatttcttatgtggggtgtgtggttcaactttttgcatttgttttctttgtaggatcagagtgtctcctactggcagcaatggcatatgatcgttacattgcaatctgcaatcctttaaggtattcagttattctgagcaaggttctatgcaatcaattagcagcctcatgctgggctgctggtttccttaactcagtggtgcatacagtgttgacattctgcctgcccttctgtggcaacaatcagattaattacttcttctgtgacatcccccctttgctgatcttgtcttgtggaaacacttctgtcaatgagttggcactgctatccactggggtcttcattggttggactcctttcctttgtatcgtactttcctacatttgcataatctccaccatcttgaggatccagtcctcagagggaagacgaaaagccttttctacatgtgcctcccacctggccattgtctttctcttttatggcagcgccatctttacatatgtacggcccatctcaacttactcattaaagaaagataggttggtttcagtgttgtacagtgttgttacccccatgctaaaccctataatttacacattgaggaataaggacatcaaagaggctgtcaaaactatagggagcaagtggcagccaccaatttcctctttggatagtaaactcacttattga

SEQ ID NO: 162361 - DNA, 1048 bp, Homo sapiens
  Payload ID: 11877
  Gene Symbol: OR5V1
  Gene Name: olfactory receptor, family 5, subfamily V, member 1
  Uniprot ID: Q9UGF6
  ENST ID: ENST00000543825
  CDS Start-End: 83-1048
gtcatgctattgcagcatatgattcatttttataatctggtcttctctttgcccaattcctgaaaggaaaccaggcgacatcatggaaagaaagaatcaaacagctataactgaattcatcatcttgggattctccaacctaaatgaattgcagtttttactattcaccatcttctttctgacttatttctgtactttgggaggaaatatattaattatcttgacgactgtgactgatccacacctgcatacacctatgtattattttctagggaacttggcctttattgacatctgctacaccaccagcaatgtcccccagatgatggtgcacctcctctcaaagaaaaaaagcatttcttatgtggggtgtgtggttcaactttttgcatttgttttctttgtaggatcagagtgtctcctactggcagcaatggcatatgatcgttacattgcaatctgcaatcctttaaggtattcagttattctgagcaaggttctatgcaatcaattagcagcctcatgctgggctgctggtttccttaactcagtggtgcatacagtgttgacattctgcctgcccttctgtggcaacaatcagattaattacttcttctgtgacatcccccctttgctgatcttgtcttgtggaaacacttctgtcaatgagttggcactgctatccactggggtcttcattggttggactcctttcctttgtatcgtactttcctacatttgcataatctccaccatcttgaggatccagtcctcagagggaagacgaaaagccttctctacatgtgcctcccacctggccattgtctttctcttttatggcagcgccatctttacatatgtacggcccatctcaacttactcattaaagaaagataggttggtttcagtgttgtacagtgttgttacccccatgctaaaccctataatttacacattgaggaataaggacatcaaagaagctgtcaaaactatagggagcaagtggcagccaccaatttcctctttggatagtaaactcacttattga

SEQ ID NO: 162362 - DNA, 1048 bp, Homo sapiens
  Payload ID: 11877
  Gene Symbol: OR5V1
  Gene Name: olfactory receptor, family 5, subfamily V, member 1
  Uniprot ID: Q9UGF6
  ENST ID: ENST00000550240
  CDS Start-End: 83-1048
gtcatgctattgcagcatatgattcatttttataatctggtcttctctttgcccaattcctgaaaggaaaccaggcgacatcatggaaagaaagaatcaaacagctataactgaattcatcatcttgggattctccaacctaaatgaattgcagtttttactattcaccatcttctttctgacttatttctgtactttgggaggaaatatattaattatcttgacgactgtgactgatccacacctgcatacacctatgtattattttctagggaacttggcctttattgacatctgctacaccaccagcaatgtcccccagatgatggtgcacctcctctcaaagaaaaaaagcatttcttatgtggggtgtgtggttcaactttttgcgtttgttttctttgtaggatcagagtgtctcctactggcagcaatggcatatgatcgttacattgcaatctgcaatcctttaaggtattcagttattctgagcaaggttctatgcaatcaattagcagcctcatgctgggctgctggtttccttaactcagtggtgcatacagtgttgacattctgcctgcccttctgtggcaacaatcagattaattacttcttctgtgacatcccccctttgctgatcttgtcttgtggaaacacttctgtcaatgagttggcactgctatccactggggtcttcattggttggactcctttcctttgtatcgtactttcctacatttgcataatctccaccatcttgaggatccagtcctcagagggaagacgaaaagccttttctacatgtgcctcccacctggccattgtctttctcttttatggcagcgccatctttacatatgtacggcccatctcaacttactcattaaagaaagataggttggtttcagtgttgtacagtgttgttacccccatgctaaaccctataatttacacattgaggaataaggacatcaaagaagctgtcaaaactatagggagcaagtggcagccaccaatttcctctttggatagtaaactcacttattga

SEQ ID NO: 162363 - DNA, 1048 bp, Homo sapiens
  Payload ID: 11877
  Gene Symbol: OR5V1
  Gene Name: olfactory receptor, family 5, subfamily V, member 1
  Uniprot ID: Q9UGF6
  ENST ID: ENST00000548546
  CDS Start-End: 83-1048
gtcatgctattgcagcatatgattcatttttataatctggtcttctctttgcccaattcctgaaaggaaaccaggcgacatcatggaaagaaagaatcaaacagctataactgaattcatcatcttgggattctccaacctaaatgaattgcagtttttactattcaccatcttctttctgacttatttctgtactttgggaggaaatatattaatgatcttgacgactgtgactgatccacacctgcatacacctatgtattattttctagggaacttggcctttattgacatctgctacaccaccagcaatgtcccccagatgatggtgcacctcctctcaaagaaaaaaagcatttcttatgtggggtgtgtggttcaactttttgcatttgttttctttgtaggatcagagtgtctcctactggcagcaatggcatatgatcgttacattgcaatctgcaatcctttaaggtattcagttattctgagcaaggttctatgcaatcaattagcagcctcatgctgggctgctggtttccttaactcagtggtgcatacagtgttgacattctgcctgcccttctgtggcaacaatcagattaattacttcttctgtgacatcccccctttgctgatcttgtcttgtggaaacacttctgtcaatgagttggcactgctatccactggggtcttcattggttggactcctttcctttgtatcgtactttcctacatttgcataatctccaccatcttgaggatccagtcctcagagggaagacgaaaagccttttctacatgtgcctcccacctggccattgtctttctcttttatggcagcgccatctttacatatgtacggcccatctcaacttactcattaaagaaagataggttggtttcagtgttgtacagtgttgttacccccatgctaaaccctataatttacacattgaggaataaggacatcaaagaggctgtcaaaactatagggagcaagtggcagccaccaatttcctctttggatagtaaactcacttattga

SEQ ID NO: 162364 - DNA, 1048 bp, Homo sapiens
  Payload ID: 11877
  Gene Symbol: OR5V1
  Gene Name: olfactory receptor, family 5, subfamily V, member 1
  Uniprot ID: Q9UGF6
  ENST ID: ENST00000549299
  CDS Start-End: 83-1048
gtcatgctattgcagcatatgattcatttttataatctggtcttctctttgcccaattcctgaaaggaaaccaggcgacatcatggaaagaaagaatcaaacagctataactgaattcatcatcttgggattctccaacctaaatgaattgcagtttttactattcaccatcttctttctgacttatttctgtactttgggaggaaatatattaattatcttgacgactgtgactgatccacacctgcatacacctatgtattattttctagggaacttggcctttattgacatctgctacaccaccagcaatgtcccccagatgatggtgcacctcctctcaaagaaaaaaagcatttcttatgtggggtgtgtggttcaactttttgcatttgttttctttgtaggatcagagtgtctcctactggcagcaatggcatatgatcgttacattgcaatctgcaatcctttaaggtattcagttattctgagcaaggttctatgcaatcaattagcagcctcatgctgggctgctggtttccttaactcagtggtgcatacagtgttgacattctgcctgcccttctgtggcaacaatcagattaattacttcttctgtgacatcccccctttgctgatcttgtcttgtggaaacacttctgtcaatgagttggcactgctatccactggggtcttcattggttggactcctttcctttgtatcgtactttcctacatttgcataatctccaccatcttgaggatccagtcctcagagggaagacgaaaagccttttctacatgtgcctcccacctggccattgtctttctcttttatggcagcgccatctttacatatgtacggcccatctcaacttactcattaaagaaagataggttggtttcagtgttgtacagtgttgttacccccatgctaaaccctataatttacacattgaggaataaggacatcaaagaagctgtcaaaactatagggagcaagtggcagccaccaatttcctctttggatagtaaactcacttattga

SEQ ID NO: 162365 - DNA, 933 bp, Homo sapiens
  Payload ID: 11878
  Gene Symbol: OR5W2
  Gene Name: olfactory receptor, family 5, subfamily W, member 2
  Uniprot ID: Q8NH69
  ENST ID: ENST00000344514
  CDS Start-End: 1-933
atggactgggaaaattgctcctcattaactgatttttttctcttgggaattaccaataacccagagatgaaagtgaccctatttgctgtattcttggctgtttatatcattaatttctcagcaaatcttggaatgatagttttaatcagaatggattaccaacttcacacaccaatgtatttcttcctcagtcatctgtctttctgtgatctctgctattctactgcaactgggcccaagatgctggtagatctacttgccaagaacaagtcaatacccttctatggctgtgctctgcaattcttggtcttctgtatctttgcagattctgagtgtctactgctgtcagtgatggcctttgatcggtacaaggccatcatcaaccccctgctctatacagtcaacatgtctagcagagtgtgctatctactcttgactggggtttatctggtgggaatagcagatgctttgatacatatgacactggccttccgcctatgcttctgtgggtctaatgagattaatcatttcttctgtgatatccctcctctcttattactctctcgctcagatacacaggtcaatgagttagtgttattcaccgtctttggttttattgaactgagtaccatttcaggagttttcatttcttattgttatatcatcctatcagtcttggagatacactctgctgaggggaggttcaaagctctctctacatgcacttcccacttatctgcggttgcaattttccagggaactctgctctttatgtatttccggccaagttcttcctattctctagatcaagataaaatgacctcattgttttacacccttgtggttcccatgttgaaccccctgatttatagcctgaggaacaaggatgtgaaagaggccctgaaaaaactgaaaaataaaattttattttaa

SEQ ID NO: 162366 - DNA, 942 bp, Homo sapiens
  Payload ID: 11879
  Gene Symbol: OR51A2
  Gene Name: olfactory receptor, family 51, subfamily A, member 2
  Uniprot ID: Q8NGJ7
  ENST ID: ENST00000380371
  CDS Start-End: 1-942
atgtccattatcaacacatcatatgttgaaatcaccaccttcttcttggttgggatgccagggctagaatatgcacacatctggatctctatccccatctgcagcatgtatcttattgctattctaggaaatggcaccattctttttatcatcaagacagagccctccttgcatgggcccatgtactattttctttccatgttggctatgtcagacttgggtttgtctttatcatctctgcccactgtgttaagcatcttcctgttcaatgcccctgaaacttcttctagtgcctgctttgcccaggaattcttcattcatggattctcagtactggagtcctcagtcctcctgatcatgtcatttgatagattcctagccatccacaatcctctgagatacacctcaatcctgacaactgtcagagttgcccaaatagggatagtattctcctttaagagcatgctcctggttcttcccttccctttcactttaagaagcttgagatattgcaagaaaaaccaattatcccattcctactgtctccaccaggatgtcatgaagttggcctgttctgacaacagaattgatgttatctatggcttttttggagcactctgccttatggtagactttattctcattgctgtgtcttacaccctgatcctcaagactgtaccgggaattgcatccaaaaaggaggagcttaaggctctcaatacttgtgtttcacacatctgtgcagtgatcatcttctacctgcccatcatcaacctggccgttgtccaccgctttgccgggcatgtctctcccctcattaatgttctcatggcaaatgttctcctacttgtacctccgctgatgaaaccaattgtttattgtgtaaaaactaaacagattagagtgagagttgtagcaaaattgtgtcaatggaagatttaa

SEQ ID NO: 162367 - DNA, 942 bp, Homo sapiens
  Payload ID: 11880
  Gene Symbol: OR51A4
  Gene Name: olfactory receptor, family 51, subfamily A, member 4
  Uniprot ID: Q8NGJ6
  ENST ID: ENST00000380373
  CDS Start-End: 1-942
atgtccattatcaacacatcatatgttgaaatcaccaccttcttcttggttgggatgccagggctagaatatgcacacatctggatctctatccccatctgcagcatgtatcttattgctattctaggaaatggcaccattctttttatcatcaagacagagccctccttgcatgagcccatgtactattttctttccatgttggctatgtcagacttgggtttgtctttatcatctctgcccactgtgttaagcatcttcctgttcaatgctcctgaaatttcatccaatgcctgctttgcccaggaattcttcattcatggattctcagtactggagtcctcagtcctcctgatcatgtcatttgatagattcctagccatccacaaccctctgagatacacctcaatcctgacaactgtcagagttgcccaaatagggatagtattctcctttaagagcatgctcctggttcttcccttccctttcactttaagaaacttgagatattgcaagaaaaaccaattatcccattcctactgtctccaccaggatgtcatgaagttggcctgttctgacaacagaattgatgttatctatggcttttttggagcactctgccttatggtagactttattctcattgctgtgtcttacaccctgatcctcaagactgtactgggaattgcatccaaaaaggagcagcttaaggctctcaatacttgtgtttcacacatctgtgcagtgatcatcttctacctgcccatcatcaacctggccgttgtccaccgctttgcccggcatgtctctcccctcattaatgttctcatggcaaatgttctcctacttgtacctccactgacgaacccaattgtttattgtgtaaaaactaaacagattagagtgagagttgtagcaaaattgtgtcaacggaagatttaa

SEQ ID NO: 162368 - DNA, 939 bp, Homo sapiens
  Payload ID: 11881
  Gene Symbol: OR51A7
  Gene Name: olfactory receptor, family 51, subfamily A, member 7
  Uniprot ID: Q8NH64
  ENST ID: ENST00000359350
  CDS Start-End: 1-939
atgtctgttctcaataactccgaagtcaagcttttccttctgattgggatcccaggactggaacatgcccacatttggttctccatccccatttgcctcatgtacctgcttgccatcatgggcaactgcaccattctctttattataaagacagagccctcgcttcatgagcccatgtattatttccttgccatgttggctgtctctgacatgggcctgtccctctcctcccttcctaccatgttgagggtcttcttgttcaatgccatgggaatttcacctaatgcctgctttgctcaagaattcttcattcatggattcactgtcatggaatcctcagtacttctaattatgtctttggaccgctttcttgccattcacaatcccttaagatacagttctatcctcactagcaacagggttgctaaaatgggacttattttagccattaggagcattctcttagtgattccatttcccttcaccttaaggagattaaaatattgtcaaaagaatcttctttctcactcatactgtcttcatcaggataccatgaagctggcctgctctgacaacaagaccaatgtcatctatggcttcttcattgctctctgtactatgctggacttggcactgattgttttgtcttatgtgctgatcttgaagactatactcagcattgcatctttggcagagaggcttaaggccctaaatacctgtgtctcccacatctgtgctgtgctcaccttctatgtgcccatcatcaccctggctgccatgcatcactttgccaagcacaaaagccctcttgttgtgatccttattgcagatatgttcttgttggtgccgccccttatgaaccccattgtgtactgtgtaaagactcgacaaatctgggagaagatcttggggaagttgcttaatgtatgtgggagataa

SEQ ID NO: 162369 - DNA, 939 bp, Homo sapiens
  Payload ID: 11882
  Gene Symbol: OR51B2
  Gene Name: olfactory receptor, family 51, subfamily B, member 2 (gene/pseudogene)
  Uniprot ID: Q9Y5P1
  ENST ID: ENST00000328813
  CDS Start-End: 1-939
atgtggcccaatattactgcagccccttttttgctgactggctttccagggctggaggcagctcatcactggatctccatccccttctttgctgtttatgtgtgcatccttctgggcaatggcatgctcctctacctcatcaagcatgaccacagtcttcatgagcccatgtactacttcctcaccatgctggcaggcacagacctcatggtgacattgaccacgatgcctactgtaatgggcatcctatgggtgaatcacagggagattagcagtgtgggctgcttcctacaggcttactttattcactccctttctgttgtggaatcaggttccctcctggcaatggcatatgattgtttcattgccatccgcaatcctttgagatatgcttccattctcaccaatactagagtcatagcgttaggagtgggagtgtttctaaggggttttgtatccatcctgcctgtaattttgcgtcttttttcattttcatattgcaaatctcatgttatcacacgtgctttctgcctccaccaagaaatcatgagactggcttgtgctgacataactttcaatagactttaccctgtaattttgatctctttaacaatcttcctagactgtctgatcatcctcttctcctatattctaattcttaatactgtcataggcattgcttctggtgaagagagagccaaagccctcaatacctgtatctcccacattagttgtgttcttatcttctatgttacagtgatgggtttgacattcatttacagatttgggaagaatgtgccagaggttgtccacattatcatgagttacatctacttcctctttcctcctttaatgaaccctgtcatctacagcatcaaaaccaagcaaatacaatatggcattatccgccttttatctaaacataggtttagtagttaa

SEQ ID NO: 162370 - DNA, 939 bp, Homo sapiens; identical to SEQ ID NO: 162369
  Payload ID: 11882
  Gene Symbol: OR51B2
  Gene Name: olfactory receptor, family 51, subfamily B, member 2 (gene/pseudogene)
  Uniprot ID: Q9Y5P1
  ENST ID: ENST00000624187
  CDS Start-End: 1-939

SEQ ID NO: 162371 - DNA, 1042 bp, Homo sapiens
  Payload ID: 11882
  Gene Symbol: OR51B2
  Gene Name: olfactory receptor, family 51, subfamily B, member 2 (gene/pseudogene)
  Uniprot ID: Q9Y5P1
  ENST ID: ENST00000624064
  CDS Start-End: 56-994
ggaggctcctggtttcaaggtttcaagaaatctgatctttaccggtggatacactatgtggcccaatattactgcagccccttttttgctgactggctttccagggctggaggcagctcatcactggatctccatccccttctttgctgtttatgtgtgcatccttctgggcaatggcatgctcctctacctcatcaagcatgaccacagtcttcatgagcccatgtactacttcctcaccatgctggcaggcacagacctcatggtgacattgaccacgatgcctactgtaatgggcatcctatgggtgaatcacagggagattagcagtgtgggctgcttcctacaggcttactttattcactccctttctgttgtggaatcaggttccctcctggcaatggcatatgattgtttcattgccatccgcaatcctttgagatatgcttccattctcaccaatactagagtcatagcgttaggagtgggagtgtttctaaggggttttgtatccatcctgcctgtaattttgcgtcttttttcattttcatattgcaaatctcatgttatcacacgtgctttctgcctccaccaagaaatcatgagactggcttgtgctgacataactttcaatagactttaccctgtaattttgatctctttaacaatcttcctagactgtctgatcatcctcttctcctatattctaattcttaatactgtcataggcattgcttctggtgaagagagagccaaagccctcaatacctgtatctcccacattagttgtgttcttatcttctatgttacagtgatgggtttgacattcatttacagatttgggaagaatgtgccagaggttgtccacattatcatgagttacatctacttcctctttcctcctttaatgaaccctgtcatctacagcatcaaaaccaagcaaatacaatatggcattatccgccttttatctaaacataggtttagtagttaaactcggatctggagaatcagacacagacataaaaatgaagccagaatg

SEQ ID NO: 162372 - DNA, 983 bp, Homo sapiens
  Payload ID: 11883
  Gene Symbol: OR51B4
  Gene Name: olfactory receptor, family 51, subfamily B, member 4
  Uniprot ID: Q9Y5P0
  ENST ID: ENST00000380224
  CDS Start-End: 51-983
ttggaggtcatcacccctaaaaaatatcttctccacctgcaaaacctaccatgtggtataacaacagtgctggccccttcttgctgactggcttcttgggctcagaggcagttcactaccggatctctatgtccttctttgtcatctacttctccgtcctttttggaaatggcactcttcttgtcctcatttggaatgatcacagcctccatgagcccatgtactacttcctggctatgctggcagacacggaccttgggatgacattcactacaatgcccacagtcctgggtgtcctgctgctagaccagagggagattgcccatgctgcctgtttcacccaatccttcattcattcactggccattgtagaatcaggtatcttgcttgttttggcctatgactgtttcattgccatccgcacaccactgaggtacaactgcattcttaccaattcccgagtgatgaacataggactgggggtactgatgagaggttttatgtccattttgcccataattctttcactctactgctacccatattgtggttcccgtgccctcttgcacacattttgcctccatcaagatgtcataaaactcgcctgtgctgatatcacgtttaatcacatatatccaattattcagacttctttgactgtctttttagatgctctaatcatcatcttttcttatatactaatcctcaagacagtgatgggcattgcgtctggacaagaggaagctaaatctctcaacacttgtgtctcccatattagctgtgtcctagtatttcacatcactgtgatgggactgtcattcattcacaggtttgggaaacatgcacctcatgtggtccccattaccatgagctatgtccattttctctttcctccattcgtgaatcctatcatttatagcatcaagaccaagcagattcaaagaagcattattcgcctattttctgggcagagtagggcttga

SEQ ID NO: 162373 - DNA, 939 bp, Homo sapiens
  Payload ID: 11884
  Gene Symbol: OR51B5
  Gene Name: olfactory receptor, family 51, subfamily B, member 5
  Uniprot ID: Q9H339
  ENST ID: ENST00000300773
  CDS Start-End: 1-939
atgtcgtccagcggcagctcccatcccttcctattgactggttttccaggcttggaggaagctcatcactggatttccgtatttttcttgttcatgtatatatccatcctttttggcaatggcaccctccttcttctcattaaggaagatcacaatcttcatgagcccatgtacttctttctggccatgctggctgccacagacctggggctggccctgaccacaatgcccacggtgctgggagtcctctggctggatcacagggagattggaagtgcggcctgcttttcccaggcctactttatacactcactttcctttctcgagtctggcattctgcttgccatggcctatgaccgttttattgccatctgcaaccctcttagatatacctctgtacttactaatactcgagtagtgaagattgggctgggagttctgatgaggggatttgtatccgttgttcccccaatcaggcccctctatttttttctgtattgtcactcccatgttctttcacatgcattctgccttcaccaggatgtcattaaactcgcctgtgctgataccaccttcaaccgactgtacccagctgtgcttgtagtctttatatttgtgctggattatctgattatcttcatctcctatgtgttgatactcaagactgtcctgagcattgcctccagagaggagagggccaaggctctcattacctgtgtctcccatatctgctgtgtcctggttttttatgtcacagtgattggattgtctctgattcatcgttttggaaagcaggttccacatattgttcacctcattatgagctatgcctattttctgttccctccactaatgaatcctataacatatagtgtcaagaccaagcagattcagaatgccattcttcacctttttactacccatagaattggaacctga

SEQ ID NO: 162374 - DNA, 939 bp, Homo sapiens
  Payload ID: 11885
  Gene Symbol: OR51B6
  Gene Name: olfactory receptor, family 51, subfamily B, member 6
  Uniprot ID: Q9H340
  ENST ID: ENST00000380219
  CDS Start-End: 1-939
atggggctcaataagtctgcttccaccttccagcttactggcttcccaggcatggagaaggcacatcactggatattcatcccattattggcagcctacatctccatacttcttggcaatggcactcttctctttctcatcaggaatgatcataacctccatgagcccatgtactatttcttagctatgttggcagctacagacctcggagtgacattgaccacaatgcccacagtgctaggtgttctgtggttagatcacagggagattggccatggagcctgcttctctcaggcctattttatccatactctttctgtcatggagtcaggtgtcttgcttgccatggcttatgactgtttcattaccatccgcagccccttaagatatacctctatcctgaccaacacccaggtaatgaagattggtgtgcgggtattgacaagggctggtctgtccattatgccaatagttgttcgcctacactggtttccctactgtcgatcccatgtactctcccatgctttctgtctacaccaagatgtcatcaagctagcctgtgctgacatcaccttcaaccgtctctatccagttgtagttttatttgcaatggtcttgttggactttctcatcatctttttctcctacattttgattctcaagactgtcatgggcattggttctggaggagaaagggccaaggccctcaacacatgtgtctctcatatctgctgcatcctggtcttctatgtcactgtagtttgtctgacatttattcataggtttggaaagcatgttcctcatgtcgttcacatcacaatgagctacatccacttccttttcccaccttttatgaacccatttatctatagcattaaaactaagcagattcagagtggcatacttcgtttattctctctgcctcactctagagcatga

SEQ ID NO: 162375 - DNA, 1124 bp, Homo sapiens
  Payload ID: 11886
  Gene Symbol: OR51D1
  Gene Name: olfactory receptor, family 51, subfamily D, member 1
  Uniprot ID: Q8NGF3
  ENST ID: ENST00000357605
  CDS Start-End: 77-1051
cctttctctcctctgagccacaactaaatgatgtttctacttttccctttctactttcctagaccctggattttgtatgcagaagccccagctcttggtccctatcatagccacttcaaatggaaatctggtccacgcagcatacttccttttggtgggtatccctggcctggggcctaccatacacttttggctggctttcccactgtgttttatgtatgccttggccaccctgggtaacctgaccattgtcctcatcattcgtgtggagaggcgactgcatgagcccatgtacctcttcctggccatgctttccactattgacctagtcctctcctctatcaccatgcccaagatggccagtcttttcctgatgggcatccaggagatcgagttcaacatttgcctggcccagatgttccttatccatgctctgtcagccgtggagtcagctgtcctgctggccatggcttttgaccgctttgtggccatttgccacccattgcgccatgcttctgtgctgacagggtgtactgtggccaagattggactatctgccctgaccagggggtttgtattcttcttcccactgcccttcatcctcaagtggttgtcctactgccaaacacatactgtcacacactccttctgtctgcaccaagatattatgaagctgtcctgtactgacaccagggtcaatgtggtttatggactcttcatcatcctctcagtcatgggtgtggactctctcttcattggcttctcatatatcctcatcctgtgggctgttttggagctgtcctctcggagggcagcactcaaggctttcaacacctgcatctcccacctctgtgctgttctggtcttctatgtacccctcattgggctctcggtggtgcataggctgggtggtcccacctccctcctccatgtggttatggctaatacctacttgctgctaccacctgtagtcaacccccttgtctatggagccaagaccaaagagatctgttcaagggtcctctgtatgttctcacaaggtggcaagtgagacaccttagtgtctcgcttctactactactacagaagatgggaatattaggatcctattgaatgccttggtg

SEQ ID NO: 162376 - DNA, 3612 bp, Homo sapiens
  Payload ID: 11887
  Gene Symbol: OR51E1
  Gene Name: olfactory receptor, family 51, subfamily E, member 1
  Uniprot ID: Q8TCB6
  ENST ID: ENST00000396952
  CDS Start-End: 651-1607
aattccacgcttagcaaggacctaaacagtgtcccccaaatgagagaagggaggacagaaagaacacttcaggatggaaatgggctgacacttaaccgtggagtgtctctgcaaacttcctttgccattctcctgtttgagtttgataaacctgagaagagacttggataaagaccgtcacgaagactacactaatgagtttcttctagcttttttctactcactttccctatctatccttcacattgggagttggcatgaggatcccagcagcccatcaggggaggactctagagatccctttccccattgcctctcctccccatacccccaggcatatcctcccagggcacggaagctgagaagcagtccagaaccacagtgggctagtgaggggtacctgctgatgtaccctttggacagcattctgccccaccctgcaggaagaagcagaaggagggagagggtgaggcagagaataaataaccctgaccagggaggtccaagggagtaggcggagacagagaggctgtatttcagtgcagcctgccagacctcttctggaggaagactggacaaagggggtcacacattccttccatacggttgagcctctacctgcctggtgctggtcacagttcagcttcttcatgatggtggatcccaatggcaatgaatccagtgctacatacttcatcctaataggcctccctggtttagaagaggctcagttctggttggccttcccattgtgctccctctaccttattgctgtgctaggtaacttgacaatcatctacattgtgcggactgagcacagcctgcatgagcccatgtatatatttctttgcatgctttcaggcattgacatcctcatctccacctcatccatgcccaaaatgctggccatcttctggttcaattccactaccatccagtttgatgcttgtctgctacagatgtttgccatccactccttatctggcatggaatccacagtgctgctggccatggcttttgaccgctatgtggccatctgtcacccactgcgccatgccacagtacttacgttgcctcgtgtcaccaaaattggtgtggctgctgtggtgcggggggctgcactgatggcaccccttcctgtcttcatcaagcagctgcccttctgccgctccaatatcctttcccattcctactgcctacaccaagatgtcatgaagctggcctgtgatgatatccgggtcaatgtcgtctatggccttatcgtcatcatctccgccattggcctggactcacttctcatctccttctcatatctgcttattcttaagactgtgttgggcttgacacgtgaagcccaggccaaggcatttggcacttgcgtctctcatgtgtgtgctgtgttcatattctatgtacctttcattggattgtccatggtgcatcgctttagcaagcggcgtgactctccgctgcccgtcatcttggccaatatctatctgctggttcctcctgtgctcaacccaattgtctatggagtgaagacaaaggagattcgacagcgcatccttcgacttttccatgtggccacacacgcttcagagccctaggtgtcagtgatcaaacttcttttccattcagagtcctctgattcagattttaatgttaacattttggaagacagtattcagaaaaaaaatttccttaataaaaatacaactcagatccttcaaatatgaaactggttggggaatctccattttttcaatattattttcttctttgttttcttgctacatataattattaataccctgactaggttgtggttggagggttattacttttcattttaccatgcagtccaaatctaaactgcttctactgatggtttacagcattctgagataagaatggtacatctagagaacatttgccaaaggcctaagcacggcaaaggaaaataaacacagaatataataaaatgagataatctagcttaaaactataacttcctcttcagaactcccaaccacattggatctcagaaaaatgctgtcttcaaaatgacttctacagagaagaaataatttttcctctggacactagcacttaaggggaagattggaagtaaagccttgaaaagagtacatttacctacgttaatgaaagttgacacactgttctgagagttttcacagcatatggaccctgtttttcctatttaattttcttatcaaccctttaattaggcaaagatattattagtaccctcattgtagccatgggaaaattgatgttcagtggggatcagtgaattaaatggggtcatacaagtataaaaattaaaaaaaaaagacttcatgcccaatctcatatgatgtggaagaactgttagagagaccaacagggtagtgggttagagatttccagagtcttacattttctagaggaggtatttaatttcttctcactcatccagtgttgtatttaggaatttcctggcaacagaactcatggctttaatcccactagctattgcttattgtcctggtccaattgccaattacctgtgtcttggaagaagtgatttctaggttcaccattatggaagattcttattcagaaagtctgcatagggcttatagcaagttatttatttttaaaagttccataggtgattctgataggcagtgaggttagggagccaccagttatgatgggaagtatggaatggcaggtcttgaagataacattggccttttgagtgtgactcgtagctggaaagtgagggaatcttcaggaccatgctttatttggggctttgtgcagtatggaacagggactttgagaccaggaaagcaatctgacttaggcatgggaatcaggcatttttgcttctgaggggctattaccaagggttaataggtttcatcttcaacaggatatgacaacagtgttaaccaagaaactcaaattacaaatactaaaacatgtgatcatatatgtggtaagtttcattttctttttcaatcctcaggttccctgatatggattcctataacatgctttcatccccttttgtaatggatatcatatttggaaatgcctatttaatacttgtatttgctgctggactgtaagcccatgagggcactgtttattattgaatgtcatctctgttcatcattgactgctctttgctcatcattgaatcccccagcaaagtgcctagaacataatagtgcttatgcttgacaccggttatttttcatcaaacctgattccttctgtcctgaacacatagccaggcaattttccagccttctttgagttgggtattattaaattctggccattacttccaatgtgagtggaagtgacatgtgcaatttctatacctggctcataaaaccctcccatgtgcagcctttcatgttgacattaaatgtgacttgggaagctatgtgttacacagagtaaatcaccagaagcctggatttctgaaaaaactgtgcagagccaaacctctgtcatttgcaactcccacttgtatttgtacgaggcagttggataagtgaaaaataaagtactattgtgtcaagtctctgaaaa

SEQ ID NO: 162377 - DNA, 455 bp, Homo sapiens
  Payload ID: 11887
  Gene Symbol: OR51E1
  Gene Name: olfactory receptor, family 51, subfamily E, member 1
  ENST ID: ENST00000530215
  CDS Start-End: 42-260
agcctctacctgcctggtgctggtcacagttcagcttcttcatgatggtggatcccaatggcaatgaatccagtgctacatacttcatcctaataggcctccctggtttagaagaggctcagttctggttggccttcccattgtgctccctctaccttattgctgtgctagcaagcggcgtgactctccgctgcccgtcatcttggccaatatctatctgctggttcctcctgtgctcaacccaattgtctatggagtgaagacaaaggagattcgacagcgcatccttcgacttttccatgtggccacacacgcttcagagccctaggtgtcagtgatcaaacttcttttccattcagagtcctctgattcagattttaatgttaacattttggaagacagtattcagaaaaaaaatttccttaataaaaatacaactcagatccttcaaatat

SEQ ID NO: 162378 - DNA, 2781 bp, Homo sapiens
  Payload ID: 11888
  Gene Symbol: OR51E2
  Gene Name: olfactory receptor, family 51, subfamily E, member 2
  Uniprot ID: Q9H255
  ENST ID: ENST00000396950
  CDS Start-End: 241-1203
ctccacaccctgaagacacagtgagttagcaccaccaccaggaattggcctttcagctctgtgcctgtctccagtcaggctggaataagtctcctcatatttgcaagctcggccctcccctggaatctaaagcctcctcagccttctgagtcagcctgaaaggaacaggccgaactgctgtatgggctctactgccagtgtgacctcaccctctccagtcacccctcctcagttccagctatgagttcctgcaacttcacacatgccacctttgtgcttattggtatcccaggattagagaaagcccatttctgggttggcttccccctcctttccatgtatgtagtggcaatgtttggaaactgcatcgtggtcttcatcgtaaggacggaacgcagcctgcacgctccgatgtacctctttctctgcatgcttgcagccattgacctggccttatccacatccaccatgcctaagatccttgcccttttctggtttgattcccgagagattagctttgaggcctgtcttacccagatgttctttattcatgccctctcagccattgaatccaccatcctgctggccatggcctttgaccgttatgtggccatctgccacccactgcgccatgctgcagtgctcaacaatacagtaacagcccagattggcatcgtggctgtggtccgcggatccctcttttttttcccactgcctctgctgatcaagcggctggccttctgccactccaatgtcctctcgcactcctattgtgtccaccaggatgtaatgaagttggcctatgcagacactttgcccaatgtggtatatggtcttactgccattctgctggtcatgggcgtggacgtaatgttcatctccttgtcctattttctgataatacgaacggttctgcaactgccttccaagtcagagcgggccaaggcctttggaacctgtgtgtcacacattggtgtggtactcgccttctatgtgccacttattggcctctcagtggtacaccgctttggaaacagccttcatcccattgtgcgtgttgtcatgggtgacatctacctgctgctgcctcctgtcatcaatcccatcatctatggtgccaaaaccaaacagatcagaacacgggtgctggctatgttcaagatcagctgtgacaaggacttgcaggctgtgggaggcaagtgacccttaacactacacttctccttatctttattggcttgataaacataattatttctaacactagcttatttccagttgcccataagcacatcagtacttttctctggctggaatagtaaactaaagtatggtacatctacctaaaggactattatgtggaataatacatactaatgaagtattacatgatttaaagactacaataaaaccaaacatgcttataacattaagaaaaacaataaagatacatgattgaaaccaagttgaaaaatagcatatgccttggaggaaatgtgctcaaattactaatgatttagtgttgtccctactttctctctcttttttctttcttttttttttattatggttagctgtcacatacaactttttttttttttgagatggggtctcgctctgtcaccaggctggagtgcagtggcgcgatctcggctcactgcaacctccacatcccatgttgaagtaattcttctgcctcagcctcccgagtagctgggactagaggaacgtgccaccatgactggctaattttctgtattttttagtagagacagagtttcaccatgttggccaggatggtctcgatctcctgaccttgtgatccacccgcctcagcctcccaaagtgttgggattacaggtgtgaaccactgtgcccggcctgtgtacaactttttaaatagggaatatgatagcttcgcatggtggtgtgcacctatagcccccactgcctggaaagctgaggtgggagaatcgcttgagtccaggagtttgaggttacagtgatccacgatcgtaccactacactccagcctgggcaacagagcaagaccctgtctcaaagcataaaatggaataacatatcaaatgaaacagggaaaatgaagctgacaatttatggaagccagggcttgtcacagtctctactgttattatgcattacctgggaatttatataagcccttaataataatgccaatgaacatctcatgtgtgctcacaatgttctggcactattataagtgcttcacaggttttatgtgttcttcgtaactttatggagtaggtaccatttgtgtctctttattataagtgagagaaatgaagtttatattatcaaggggactaaagtcacacggcttgtgggcactgtgccaagatttaaaattaaatttgatggttgaatacagttacttaatgaccatgttatattgcttcctgtgtaacatctgccatttatttcctcagctgtacaaatcctctgttttctctctgttacacactaacatcaatggctttgtacttgtgatgagagataaccttgccctagttgtgggcaacacatgcagaataatcctgttttacagctgcctttcgtgatcttattgcttgcttttttccagattcagggagaatgttgttgtctatttgtctcttacatctccttgatcatgtcttcattttttaatgtgctctgtacctgtcaaaaattttgaatgtacaccacatgctattgtctgaacttgagtataagataaaataaaattttattttaaatttt

SEQ ID NO: 162379 - DNA, 582 bp, Homo sapiens
  Payload ID: 11888
  Gene Symbol: OR51E2
  Gene Name: olfactory receptor, family 51, subfamily E, member 2
  ENST ID: ENST00000532598
  CDS Start-End: 332-582
tcttctgggaatctccacaccctgaagacacagtgagttagcaccaccaccaggaattggcctttcagctctgtgcctgtctccagtcaggctggaataagtctcctcatatttgcaagctcggccctcccctggaatctaaagcctcctcagccttctgagtcagcctgaaaggaacaggccgaactgctgtatgggctctgggacacgtcactggaagacagccatcaagcatcatgaggtactgaggatacctcaatatcctggagaaggtagttgggactgccagtgtgacctcaccctctccagtcacccctcctcagttccagctatgagttcctgcaacttcacacatgccacctttgtgcttattggtatcccaggattagagaaagcccatttctgggttggcttccccctcctttccatgtatgtagtggcaatgtttggaaactgcatcgtggtcttcatcgtaaggacggaacgcagcctgcacgctccgatgtacctctttctctgcatgcttgcagccattgacctggccttatccacatccaccatgcctaagatccttgccctttt

SEQ ID NO: 162380 - DNA, 939 bp, Homo sapiens; identical to SEQ ID NO: 161888
  Payload ID: 11889
  Gene Symbol: OR51F1
  Gene Name: olfactory receptor, family 51, subfamily F, member 1 (gene/pseudogene)
  ENST ID: ENST00000343430
  CDS Start-End: 1-939

SEQ ID NO: 162381 - DNA, 1029 bp, Homo sapiens
  Payload ID: 11890
  Gene Symbol: OR51F2
  Gene Name: olfactory receptor, family 51, subfamily F, member 2
  Uniprot ID: Q8NH61
  ENST ID: ENST00000322110
  CDS Start-End: 1-1029
atgactgaaacatccctgtcttctcagtgcttccctatgtcggtcctcaataataccattgctgagcctctgatcttcctcctgatgggcattccaggcctgaaagccacccagtactggatctccatccctttttgtctcctatatgttgttgccgtctctggaaatagcatgatcctgtttgtggtcctctgtgaacggagcctccataagcctatgtactatttcctctctatgctttcagccacagacctgagcttgtccctgtgtacactttctactacccttggtgtcttctggtttgaagcccgagaaatcaacctaaatgcctgcattgcccagatgttctttctacacggatttactttcatggagtctggggttctactggccatggcctttgatcgttttgtggccatctgttacccactgagatacactaccatccttaccaatgcccgaattgccaagattgggatgagcatgttgataagaaatgttgccgtcatgttgccagtcatgctctttgtcaagaggttgtccttctgcagttctatggtcctttcacattcttactgctaccatgttgatctcatccaactctcctgcacagacaataggatcaacagcatccttggtctgtttgcgcttttgtccactacagggtttgactgcccttgcatcctgctctcctatatcctgatcattcgatctgtcctcagcattgcttcctcagaagagaggcggaaagccttcaacacctgcacatcccacatcagtgctgtttccatcttctacctccctctcatcagtttgtctcttgtccatcgctatggccattcagcacctccatttgtccacatcatcatggccaatgtctttctgctaatccctcctgtgctcaaccctattatttacagtgtaaagattaagcagattcaaaaggccattatcaaggtcttaattcagaagcactccaaatctaatcatcagctatttctgattagagataaagccatttatgaataa

SEQ ID NO: 162382 - DNA, 966 bp, Homo sapiens
  Payload ID: 11891
  Gene Symbol: OR51G1
  Gene Name: olfactory receptor, family 51, subfamily G, member 1 (gene/pseudogene)
  Uniprot ID: Q8NGK1
  ENST ID: ENST00000321961
  CDS Start-End: 1-966
atgacaattcttcttaatagcagcctccaaagagccactttcttcctgacgggcttccaaggtctagaaggtctccatggctggatctctattcccttctgcttcatctacctgacagttatcttggggaacctcaccattctccacgtcatttgtactgatgccactctccatggacccatgtactatttcttgggcatgctagctgtcacagacttaggcctttgcctttccacactgcccactgtgctgggcattttctggtttgataccagagagattggcatccctgcctgtttcactcagctcttcttcatccacaccttgtcttcaatggagtcatcagttctgttatccatgtccattgaccgctacgtggccgtctgcaacccactgcatgactccaccgtcctgacacctgcatgtattgtcaagatggggctaagctcagtgcttagaagtgctctcctcatcctccccttgccattcctcctgaagcgcttccaatactgccactcccatgtgctggctcatgcttattgtcttcacctggagatcatgaagctggcctgctctagcatcattgtcaatcacatctatgggctctttgttgtggcctgcaccgtgggtgtggactccctgctcatctttctctcatacgccctcatccttcgcaccgtgctcagcattgcctcccaccaggagcgactccgagccctcaacacctgtgtctctcatatctgtgctgtactgctcttctacatccccatgattggcttgtctcttgtgcatcgctttggtgaacatctgccccgcgttgtacacctcttcatgtcctatgtgtatctgctggtaccaccccttatgaaccccatcatctacagcatcaagaccaagcaaattcgccagcgcatcattaagaagtttcagtttataaagtcacttaggtgtttttggaaggattaa

SEQ ID NO: 162383 - DNA, 945 bp, Homo sapiens
  Payload ID: 11892
  Gene Symbol: OR51G2
  Gene Name: olfactory receptor, family 51, subfamily G, member 2
  Uniprot ID: Q8NGK0
  ENST ID: ENST00000322013
  CDS Start-End: 1-945
atgaccctgggatccctgggaaacagcagcagcagcgtttctgctaccttcctgctgagtggcatccctgggctggagcgcatgcacatctggatctccatcccactgtgcttcatgtatctggtttccatcccgggcaactgcacaattctttttatcattaaaacagagcgctcacttcatgaacctatgtatctcttcctgtccatgctggctctgattgacctgggtctctccctttgcactctccctacagtcctgggcatcttttgggttggagcacgagaaattagccatgatgcctgctttgctcagctctttttcattcactgcttctccttcctcgagtcctctgtgctactgtctatggcctttgaccgctttgtggctatctgccaccccttgcactatgtttccattctcaccaacacagtcattggcaggattggcctggtctctctgggtcgtagtgtagcactcatttttccattaccttttatgctcaaaagattcccctattgtggctccccagttctctcacattcttattgtctccaccaagaagtgatgaaattggcctgtgccgacatgaaggccaacagcatctacggcatgtttgtcatcgtctctacagtgggtatagactcactgctcatcctcttctcttatgctctgatcctgcgcaccgtgctgtccatcgcctccagggctgagagattcaaggcccttaacacctgtgtttcccacatctgtgctgtgctgctcttctacactcccatgattggcctctctgtcatccatcgctttggaaagcaggcaccccacctggtccaggtggtcatgggtttcatgtatcttctctttcctcctgtgatgaatcccattgtctacagtgtgaagaccaaacagatccgggatcgagtgacgcatgccttttgttactaa

SEQ ID NO: 162384 - DNA, 909 bp, Homo sapiens
  Payload ID: 11893
  Gene Symbol: OR51H1
  Gene Name: olfactory receptor, family 51, subfamily H, member 1
  Uniprot ID: Q8NH63
  ENST ID: ENST00000322059
  CDS Start-End: 1-909
atgacgaacttgaatgcatcacaggccaaccaccgtaacttcattctgacaggtatcccaggaacgccagacaagaacccatggttggcctttcccctgggatttctctacacactcacactcctgggaaatggtaccatcctagctgtcatcaaggtggagccaagtctccatgagcccacgtattacttcctttctatcttggctctcactgacgttagtctctccatgtccaccttgccctccatgctcagcatctactggtttaatgcccctcagattgtttttgatgcatgcatcatgcagatgttcttcatccatgtatttggaatagtagaatcaggagtcctagtgtccatggcctttgacagatttgtggccatccgaaacccattacactatgtttccatcctcactcacgatgttattcgaaagactggaatagctgtcctcacccgggcagtctgtgtggtattccctgtgcccttccttataaagtgcctacccttctgccattccaatgtcttgtctcattcatactgtcttcaccaaaacatgatgcggctagcttgtgccagcacccgcatcaacagcctctacggcctcatcgtcgtcatcttcacactggggctcgatgttctcctcactctactgtcttatgtactcaccctgaagactgtgctgggcattgtctccagaggtgaaaggctgaaaaccctcagcacatgcctctctcacatgtctaccgtgctcctcttctatgttccttttatgggtgctgcctccatgatccacagattttgggagcatttatcaccagtagtgcacatggtcatggctgatatatacctactgctcccgcctgtgctaaaccccattgtctacagtgtgaagaccaagcaaatttga

SEQ ID NO: 162385 - DNA, 945 bp, Homo sapiens
  Payload ID: 11894
  Gene Symbol: OR51I1
  Gene Name: olfactory receptor, family 51, subfamily I, member 1
  Uniprot ID: Q9H343
  ENST ID: ENST00000380211
  CDS Start-End: 1-945
atgctgggtctcaatggcacccccttccagccagcaacactccagctgacaggcattcctgggatacaaacaggcctcacctgggttgccctgattttctgcatcctctacatgatctccattgtaggtaacctcagcattctcactctggtgttttgggagcctgctctgcatcagcccatgtactacttcctctctatgctcgctctcaatgatctgggagtgtccttttctacacttcccactgtgatttctactttctgcttcaactacaaccatgttgcgtttaatgcttgcctggtccagatgttcttcatccacactttctccttcatggagtcaggcatactgctggccatgagcttggatcgctttgtggctatttgttatccattacgctatgtcactgtgctcactcacaaccgtatattggctatgggtctgggcatccttaccaagagtttcaccactctcttccctttcccttttgtggtgaaacgactgcccttctgcaaaggcaatgttttgcatcactcctactgtctccatccagatctcatgaaagtagcatgtggagacatccatgttaacaacatttatgggctcttggtgatcatttttacctatggtatggactcaactttcatcctgctttcctacgcattgatcctgagagccatgctggtcatcatatcccaggaacagcggctcaaggcactcaacacctgcatgtcacacatctgtgcagtgctggccttttatgtgcccataattgctgtctccatgattcaccgcttctggaaaagtgctccacctgttgttcatgtcatgatgtccaatgtctacctgtttgtaccacccatgctcaaccctatcatctacagtgtgaaaaccaaggagatccgcaaagggattctcaagttcttccataaatcccaggcctga

SEQ ID NO: 162386 - DNA, 939 bp, Homo sapiens
  Payload ID: 11895
  Gene Symbol: OR51I2
  Gene Name: olfactory receptor, family 51, subfamily I, member 2
  Uniprot ID: Q9H344
  ENST ID: ENST00000341449
  CDS Start-End: 1-939
atggggttgttcaatgtcactcaccctgcattcttcctcctgactggtatccctggtctggagagctctcactcctggctgtcagggcccctctgcgtgatgtatgctgtggcccttgggggaaatacagtgatcctgcaggctgtgcgagtggagcccagcctccatgagcccatgtactacttcctgtccatgttgtccttcagtgatgtggccatatccatggccacactgcccactgtactccgaaccttctgcctcaatgcccgcaacatcacttttgatgcctgtctaattcagatgtttcttattcacttcttctccatgatggaatcaggtattctgctggccatgagttttgaccgctatgtggccatttgtgaccccttgcgctatgcaactgtgctcaccactgaagtcattgctgcaatgggtttaggtgcagctgctcgaagcttcatcacccttttccctcttccctttcttattaagaggctgcctatctgcagatccaatgttctttctcactcctactgcctgcacccagacatgatgaggcttgcctgtgctgatatcagtatcaacagcatctatggactctttgttcttgtatccacctttggcatggacctgttttttatcttcctctcctatgtgctcattctgcgttctgtcatggccactgcttcccgtgaggaacgcctcaaagctctcaacacatgtgtgtcacatatcctggctgtacttgcattttatgtgccaatgattggggtctccacagtgcaccgctttgggaagcatgtcccatgctacatacatgtcctcatgtcaaatgtgtacctatttgtgcctcctgtgctcaaccctctcatttatagcgccaagacaaaggaaatccgccgagccattttccgcatgtttcaccacatcaaaatatga

SEQ ID NO: 162387 - DNA, 951 bp, Homo sapiens
  Payload ID: 11896
  Gene Symbol: OR51J1
  Gene Name: olfactory receptor, family 51, subfamily J, member 1 (gene/pseudogene)
  Uniprot ID: Q9H342
  ENST ID: ENST00000332043
  CDS Start-End: 1-951
atgaaaatttctaataactctttggggtttttacctacgactttcattttggttggcatcccagggctggagtcagagcacctctggatatccgtccccttctccctgatatacatcatcattttccttgggaatggcatcattcttcacgtcatcagaacagatattgccctacatcaacccatgtacctcttccttgccatgttggcactggccgaggttcgtgtctctgcatccaccctgcctacagtgttaggcatattcctttttggaaatactgaaattagtcttgaagcttgtctttttccagatgttctccatccattctttatccatgatggagccagctgtgctgctggccatgtctttggaccgctttatagccatctacagcccactgagctacacagctatcctgacactgcccagggtctttggcacaggagctattatcgtactgaaaagcattatgctcatggctccgttgcccattctcttatggcgtctgcccttctgtggccacaatgccctctcacattcctattgtctgcaccccaatcttatctatcttgtgggaacatttctgttaacaatatctatgggattttcattgttacctctacttttgggctggattcgttgctgattgtgatctcctatgggctcatactccacactgtattgggtattgccactggagaagggaggaagaaggcactcaacacatgtggctcacacgtctgtgctgtgcttgcttactatgtgcctatgattggcttgtctatagtgcaccgccttggacatcgtgtgtcccctctgctgcaagccatgatggccaatgcctacctcttcttcccacctgttgtcaatcctattgtctacagcattaagaccaaggagatccatggtgccattgtccgaatgctattagagaaaagacgcagagtgtag

SEQ ID NO: 162388 - DNA, 948 bp, Homo sapiens
  Payload ID: 11897
  Gene Symbol: OR51L1
  Gene Name: olfactory receptor, family 51, subfamily L, member 1
  Uniprot ID: Q8NGJ5
  ENST ID: ENST00000321543
  CDS Start-End: 1-948
atgggagactggaataacagtgatgctgtggagcccatatttatcctgaggggttttcctggactggagtatgttcattcttggctctccatcctcttctgtcttgcatatttggtagcatttatgggtaatgttaccatcctgtctgtcatttggatagaatcctctctccatcagcccatgtattactttatttccatcttagcagtgaatgacctggggatgtccctgtctacacttcccaccatgcttgctgtgttatggttggatgctccagagatccaggcaagtgcttgctatgctcagctgttcttcatccacacattcacattcctggagtcctcagtgttgctggccatggcctttgaccgttttgttgctatctgccatccactgcactaccccaccatcctcaccaacagtgtaattggcaaaattggtttggcctgtttgctacgaagcttgggagttgtacttcccacacctttgctactgagacactatcactactgccatggcaatgccctctctcacgccttctgtttgcaccaggatgttctaagattatcctgtacagatgccaggaccaacagtatttatgggctttgtgtagtcattgccacactaggtgtggattcaatcttcatacttctttcttatgttctgattcttaatactgtgctggatattgcatctcgtgaagagcagctaaaggcactcaacacatgtgtatcccatatctgtgtggtgcttatcttctttgtgccagttattggggtgtcaatggtccatcgctttgggaagcatctgtctcccatagtccacatcctcatggcagacatctaccttcttcttcccccagtccttaaccctattgtctatagtgtcagaacaaagcagattcgtctaggaattctccacaagtttgtcctaaggaggaggttttaa

SEQ ID NO: 162389 - DNA, 981 bp, Homo sapiens
  Payload ID: 11898
  Gene Symbol: OR51M1
  Gene Name: olfactory receptor, family 51, subfamily M, member 1
  Uniprot ID: Q9H341
  ENST ID: ENST00000328611
  CDS Start-End: 1-981
atgtcagtccaatattcgctcagtcctcaattcatgctgctatccaacattactcagtttagccccatattctatctcaccagctttcctggattggaaggcatcaaacactggattttcatcccctttttctttatgtacatggttgccatctcaggcaattgtttcattctgatcattattaagaccaaccctcgtctgcacacacccatgtactatctactatccttgctggccctcactgacctggggctgtgtgtgtccacgttgcccaccactatggggatcttctggtttaactcccatagtatctactttggagcgtgtcaaatccagatgttctgcatccactctttttccttcatggagtcctcagtgctcctcatgatgtcctttgaccgccttgtggccatctgccaccctctgaggtattcggtcattatcactggccagcaagtggtcagagcaggcctaattgtcatcttccggggacctgtggccactatccctattgtcctcctcctgaaggcttttccctactgtggatctgtggtcctctcccactcattttgcctgcaccaggaagtgatacagctggcctgcacagatatcaccttcaataatctgtatggactgatggtggtagttttcactgtgatgctggacctggtgctcatcgcactgtcctatggactcatcctgcacacagtagcaggcctggcctcccaagaggagcagcgccgtgcctttcagacatgcaccgctcctctctgtgctgtgctagtattctttgtgcccatgatggggctgtccctggtgcaccgttttgggaagcatgccccacctgctattcatcttcttatggccaatgtctacctttttgtgcctcccatgcttaacccaatcatatacagcattaagaccaaggagatccaccgtgccattatcaagttcctaggtcttaaaaaggccagtaaatga

SEQ ID NO: 162390 - DNA, 1096 bp, Homo sapiens
  Payload ID: 11899
  Gene Symbol: OR51Q1
  Gene Name: olfactory receptor, family 51, subfamily Q, member 1 (gene/pseudogene)
  Uniprot ID: Q8NH59
  ENST ID: ENST00000300778
  CDS Start-End: 91-1044
ttggattaaatggggcaaagagatattatttctaatgtttctttttctccctgagtgaagatcctgaatctgaagacacattcatcagtcatgtcccaggtgactaacaccacacaagaaggcatctacttcatcctcacggacatccctggatttgaggcctcccacatctggatctccatccccgtctgctgtctctacaccatctccatcatgggcaataccaccatcctcactgtcattcgcacagagccatctgtccaccagcgcatgtatctgtttctctccatgctggccctgacggacctgggtctcaccctcaccaccctacccacagtcatgcagcttctctggttcaacgttcgtagaatcagctctgaggcctgttttgctcagtttttcttccttcatggattctcctttatggagtcttctgtcctcctggctatgtccgttgactgctatgtggccatctgctgtcccctccattatgcctccatcctcaccaatgaagtcattggtagaactgggttagccatcatttgctgctgtgttctggcggttcttccctcccttttcttactcaagcgactgcctttctgccactcccaccttctctctcgctcctattgcctccaccaggatatgatccgcctggtctgtgctgacatcaggctcaacagctggtatggatttgctcttgccttgctcattattatcgtggatcctctgctcattgtgatctcctatacacttattctgaaaaatatcttgggcacagccacctgggctgagcgactccgtgccctcaataactgcctgtcccacattctagctgtcctggtcctctacattcccatggttggtgtatctatgactcatcgctttgccaagcatgcctctccactggtccatgttatcatggccaatatctacctgctggcacccccggtgatgaaccccatcatttacagtgtaaagaacaagcagatccaatggggaatgttaaatttcctttccctcaaaaatatgcattcaagatgagggaatgcatttcttaaattactgacaagtatgagtcataggcttaaggggg

SEQ ID NO: 162391 - DNA, 972 bp, Homo sapiens
  Payload ID: 11900
  Gene Symbol: OR51S1
  Gene Name: olfactory receptor, family 51, subfamily S, member 1
  Uniprot ID: Q8NGJ8
  ENST ID: ENST00000322101
  CDS Start-End: 1-972
atgtcaacattaccaactcagatagcccccaatagcagcacttcaatggcccccaccttcttgctggtgggcatgccaggcctatcaggtgcaccctcctggtggacattgcccctcattgctgtctaccttctctctgcactgggaaatggcaccatcctctggatcattgccctgcagcccgccctgcaccgcccaatgcacttcttcctcttcttgcttagtgtgtctgatattggattggtcactgccctgatgcccacactgctgggcatcgcccttgctggtgctcacactgtccctgcctcagcctgccttctacagatggtttttatccatgtcttttctgtcatggagtcctctgtcttgctcgccatgtccattgatcgggcactggccatctgccgacctctccactacccagcgctcctcaccaatggtgtaattagcaaaatcagcctggccatttcttttcgatgcctgggtctccatctgcccctgccattcctgctggcctacatgccctactgcctcccacaggtcctaacccattcttattgcttgcatccagatgtggctcgtttggcctgcccagaagcttggggtgcagcctacagcctatttgtggttctttcagccatgggtttggaccccctgcttattttcttctcctatggcctgattggcaaggtgttgcaaggtgtggagtccagagaggatcgctggaaggctggtcaaacctgtgctgcccacctctctgcagtgctcctcttctatatccctatgatcctcctggcactgattaaccatcctgagctgccaatcactcagcatacccatactcttctatcctatgtccatttccttcttcctccattgataaaccctattctctatagtgtcaagatgaaggagattagaaagagaatactcaacaggttgcagcccaggaaggtgggtggtgctcagtga

SEQ ID NO: 162392 - DNA, 984 bp, Homo sapiens
  Payload ID: 11901
  Gene Symbol: OR51T1
  Gene Name: olfactory receptor, family 51, subfamily T, member 1
  Uniprot ID: Q8NGJ9
  ENST ID: ENST00000322049
  CDS Start-End: 1-984
atggcaatattcaataacaccacttcgtcttcctcaaacttcctcctcactgcattccctgggctggaatgtgctcatgtctggatctccattccagtctgctgtctctacaccattgccctcttgggaaacagtatgatctttcttgtcatcattactaagcggagactccacaaacccatgtattatttcctctccatgctggcagctgttgatctatgtctgaccattacgacccttcccactgtgcttggtgttctctggtttcatgcccgggagatcagctttaaagcttgcttcattcaaatgttctttgtgcatgctttctccttgctggagtcctcggtgctggtagccatggcctttgaccgcttcgtggctatctgtaacccactgaactatgctactatcctcacagacaggatggtcctggtgatagggctggtcatctgcattagaccagcagttttcttacttccccttcttgtagccataaacactgtgtcttttcatgggggtcacgagctttcccatccattttgctaccacccagaagtgatcaaatacacatattccaaaccttggatcagcagtttttggggactgtttcttcagctctacctgaatggcactgacgtattgtttattcttttctcctatgtcctgatcctccgtactgttctgggcattgtggcccgaaagaagcaacaaaaagctctcagcacttgtgtctgtcacatctgtgcagtcactattttctatgtgccactgatcagcctctctttggcacaccgcctcttccactccaccccaagggtgctctgtagcactttggccaatatttatctgctcttaccacctgtgctgaaccctatcatttacagcttgaagaccaagacaatccgccaggctatgttccagctgctccaatccaagggttcatggggttttaatgtgaggggtcttaggggaagatgggattga

SEQ ID NO: 162393 - DNA, 1065 bp, Homo sapiens
  Payload ID: 11901
  Gene Symbol: OR51T1
  Gene Name: olfactory receptor, family 51, subfamily T, member 1
  ENST ID: ENST00000380378
  CDS Start-End: 1-1065
atgactaataaaatgtatgctatatatataaagaatcttaattatttttctttcctcatagttcagtgtcttcaaccaaccatggcaatattcaataacaccacttcgtcttcctcaaacttcctcctcactgcattccctgggctggaatgtgctcatgtctggatctccattccagtctgctgtctctacaccattgccctcttgggaaacagtatgatctttcttgtcatcattactaagcggagactccacaaacccatgtattatttcctctccatgctggcagctgttgatctatgtctgaccattacgacccttcccactgtgcttggtgttctctggtttcatgcccgggagatcagctttaaagcttgcttcattcaaatgttctttgtgcatgctttctccttgctggagtcctcggtgctggtagccatggcctttgaccgcttcgtggctatctgtaacccactgaactatgctactatcctcacagacaggatggtcctggtgatagggctggtcatctgcattagaccagcagttttcttacttccccttcttgtagccataaacactgtgtcttttcatgggggtcacgagctttcccatccattttgctaccacccagaagtgatcaaatacacatattccaaaccttggatcagcagtttttggggactgtttcttcagctctacctgaatggcactgacgtattgtttattcttttctcctatgtcctgatcctccgtactgttctgggcattgtggcccgaaagaagcaacaaaaagctctcagcacttgtgtctgtcacatctgtgcagtcactattttctatgtgccactgatcagcctctctttggcacaccgcctcttccactccaccccaagggtgctctgtagcactttggccaatatttatctgctcttaccacctgtgctgaaccctatcatttacagcttgaagaccaagacaatccgccaggctatgttccagctgctccaatccaagggttcatggggttttaatgtgaggggtcttaggggaagatgggattga

SEQ ID NO: 162394 - DNA, 966 bp, Homo sapiens
  Payload ID: 11902
  Gene Symbol: OR51V1
  Gene Name: olfactory receptor, family 51, subfamily V, member 1
  Uniprot ID: Q9H2C8
  ENST ID: ENST00000321255
  CDS Start-End: 1-966
atgtttctcagttccagaatgattacttcagtaagccctagcaccagcacgaattcttcctttcttctcactggattttctggcatggagcagcaatacccctggctttccatccccttctcctcaatctatgccatggtgcttttgggcaattgcatggttctccatgtgatatggactgagccaagcctgcaccagcctatgttttacttcctgtccatgctggccctcactgacctgtgcatggggctgtccactgtgtacacagtgctggggatcctgtgggggatcattcgagagatcagcttggattcctgcattgcccagtcctatttcatccatggtctgtccttcatggagtcctctgtcctcctcactatggcctttgaccggtacattgcaatttgcaatccactacgttattcctccatcctgactaattccagaattatcaaaattgggctcactataataggtaggagttttttctttattacaccccccatcatctgtctgaaattttttaattactgtcatttccacatcctttctcactctttctgcctgcaccaggatcttctccgcttagcctgttcagacatccgattcaatagttactatgccctgatgctggttatttgcatactgttgttggatgctatactcatccttttctcctacatcctgattcttaagtcagtcctggcagttgcctctcaggaagagaggcataaattatttcagacctgcatctcccacatctgtgctgtccttgtgttctacatccctatcattagcctcacaatggtgcaccgttttggcaagcacctttcccccgtggcccacgttctcattggcaacatctacatccttttcccacctttaatgaatcccatcatctacagtgtcaagacccaacagattcataccagaatgcttagactcttttctctgaaaagatattga

SEQ ID NO: 162395 - DNA, 939 bp, Homo sapiens
  Payload ID: 11903
  Gene Symbol: OR52A1
  Gene Name: olfactory receptor, family 52, subfamily A, member 1
  Uniprot ID: Q9UKL2
  ENST ID: ENST00000328942
  CDS Start-End: 1-939
atgtccatttccaacatcacagtctacatgccctctgtgttgacactagtagggatcccaggcctagaatctgtgcagtgctggattgggattccattctgtgccatttatctcattgctatgattggaaattccttgcttctgagcatcatcaaatctgagcgcagtctccatgagcccttgtacattttcttaggcatgctaggagccacagacattgcacttgctagcagcattatgccaaagatgcttggaatattctggtttaatgtgcctgaaatctattttgattcctgcttgcttcaaatgtggttcatccacacattgcagggtatagagtcaggcatccttgtggccatggccctggaccgttatgtggccatctgttatccactaagacatgccaacatcttcacccaccagcttgtcattcagataggaactatggtcgtactcagggctgctattcttgtagccccatgcctagtactgataaagtgccggtttcaattttatcacacaacagtcatctcccactcctactgtgagcatatggccattgtgaaactagcagcagcaaatgttcaagtcaacaaaatctatggtttgtttgtggccttcactgtagcaggatttgacctcacattcatcacattgtcctacatccagatatttatcacagtttttcgtttgccccagaaggaggctaggtttaaagcattcaatacctgcattgctcacatctgtgtcttcctccagttctacctccttgccttcttctccttcttcacacataggtttgggtctcacatctccccttatatccatattctcttttctagcatttacttgctggtccctccatttctcaatccacttgtctatggtgcaaagaccacacagattcgcattcatgtggtaaaaatgttctgttcataa

SEQ ID NO: 162396 - DNA, 1779 bp, Homo sapiens
  Payload ID: 11903
  Gene Symbol: OR52A1
  Gene Name: olfactory receptor, family 52, subfamily A, member 1
  Uniprot ID: Q9UKL2
  ENST ID: ENST00000380367
  CDS Start-End: 419-1357
aaaagaagtataaatagttccagatttcctaatctctttgcatttattttgtctcctctcaacctgctaaatatcttcaggattctagaaaatgcaagtctggaaagaaataacagactggccagtagtccaatcccctgtccaggtgattttgctggttctaatgtatttggattgccatgcacataacatcctattatggcacagtgcctgtgaatgccccacctgaaaacagtgatgtatctccatgaatccatcttttcctttcaaaactgtgaataagatggatgattttagagttatacccaaatcagacagactcaatataatgagtttggagaaaatcagaaagcagaagaggaacagtaacactgactgagaaacttcttttgtttgcatcaggagacccaacgacactatgtccatttccaacatcacagtctacatgccctctgtgttgacactagtagggatcccaggcctagaatctgtgcagtgctggattgggattccattctgtgccatttatctcattgctatgattggaaattccttgcttctgagcatcatcaaatctgagcgcagtctccatgagcccttgtacattttcttaggcatgctaggagccacagacattgcacttgctagcagcattatgccaaagatgcttggaatattctggtttaatgtgcctgaaatctattttgattcctgcttgcttcaaatgtggttcatccacacattgcagggtatagagtcaggcatccttgtggccatggccctggaccgttatgtggccatctgttatccactaagacatgccaacatcttcacccaccagcttgtcattcagataggaactatggtcgtactcagggctgctattcttgtagccccatgcctagtactgataaagtgccggtttcaattttatcacacaacagtcatctcccactcctactgtgagcatatggccattgtgaaactagcagcagcaaatgttcaagtcaacaaaatctatggtttgtttgtggccttcactgtagcaggatttgacctcacattcatcacattgtcctacatccagatatttatcacagtttttcgtttgccccagaaggaggctaggtttaaagcattcaatacctgcattgctcacatctgtgtcttcctccagttctacctccttgccttcttctccttcttcacacataggtttgggtctcacatctccccttatatccatattctcttttctagcatttacttgctggtccctccatttctcaatccacttgtctatggtgcaaagaccacacagattcgcattcatgtggtaaaaatgttctgttcataaaatccaccttaattaatgcctacatgcttttttcttttgcagtagtaaccatatcaaaacaaaacaaaaaacatattatttgagatgctgggtttgtgaaatctgccagcacaatagctggttttagatcatcatggctcatatcaatcagtgggattgtgaattctacgtgactaatgaaagtgagaagtgtgaaatgagtgaagtagtgaatatatattattttttctcttttattctttagcccctggttgagttattcttctaagaatatttctccaggaggatttataaattatgcctttgtcactgaatttaaatgcacctaaggctcgttgttctgaaacatccagggactcaatgaaaacaagttgttgactctcattttcttgatcatccctgccttaaaaaaaaaaatcaaa

SEQ ID NO: 162397 - DNA, 951 bp, Homo sapiens
  Payload ID: 11904
  Gene Symbol: OR52A5
  Gene Name: olfactory receptor, family 52, subfamily A, member 5
  Uniprot ID: Q9H2C5
  ENST ID: ENST00000307388
  CDS Start-End: 1-951
atgccgacattcaatggctcagtcttcatgccctctgcgtttatactaattgggattcctggtctggagtcagtgcagtgttggattgggattcctttctctgccatgtatcttattggtgtgattggaaattccctaattttagttataatcaaatatgaaaacagcctccatatacccatgtacatttttttggccatgttggcagccacagacattgcacttaacacctgcattcttcccaaaatgttaggcatcttctggtttcatttgccagagatttcttttgatgcctgtctttttcaaatgtggcttattcactcattccaggcaattgaatcgggtatccttctggcaatggccctggatcgctatgtggccatctgtatccccttgagacatgccaccatcttttcccagcagttcttaactcatattggacttggggtgacactcagggctgccattcttataataccttccttagggctcatcaaatgctgtctgaaacactatcgaactacagtcatctctcactcttactgtgagcacatggccatcgtgaagctggctactgaagatatccgagtcaacaagatatatggcctatttgttgcctttgcaatcctagggtttgacataatatttataaccttgtcctatgtccaaatttttatcactgtctttcagctgccccagaaggaggcacgattcaaggcctttaatacatgcattgcccacatttgtgtcttcctacagttctaccttcttgccttcttctctttcttcacacacaggtttggttcacacataccaccatatattcatatcctcttgtcaaatctttacctgttagtcccaccttttctcaaccctattgtctatggagtgaagaccaagcaaattcgtgaccatattgtgaaagtgtttttcttcaaaaaagtaacttga

SEQ ID NO: 162398 - DNA, 1079 bp, Homo sapiens
  Payload ID: 11905
  Gene Symbol: OR52B2
  Gene Name: olfactory receptor, family 52, subfamily B, member 2
  Uniprot ID: Q96RD2
  ENST ID: ENST00000530810
  CDS Start-End: 83-1054
ttcgggagtgctttctgtttctatcactttcagtagactcatcagcttctaagtcattatagagaggaccataaagtgcatcatgagtcacaccaatgttaccatcttccatcctgcagtttttgtccttcctggcatccctgggttggaggcttatcacatttggctgtcaatacctctttgcctcatttacatcactgcagtcctgggaaacagcatcctgatagtggttattgtcatggaacgtaaccttcatgtgcccatgtatttcttcctctcaatgctggccgtcatggacatcctgctgtctaccaccactgtgcccaaggccctagccatcttttggcttcaagcacataacattgcttttgatgcctgtgtcacccaaggcttctttgtccatatgatgtttgtgggggagtcagctatcctgttagccatggcctttgatcgctttgtggccatttgtgccccactgagatatacaacagtgctaacatggcctgttgtggggaggattgctctggccgtcatcacccgaagcttctgcatcatcttcccagtcatattcttgctgaagcggctgcccttctgcctaaccaacattgttcctcactcctactgtgagcatattggagtggctcgtttagcctgtgctgacatcactgttaacatttggtatggcttctcagtgcccattgtcatggtcatcttggatgttatcctcatcgctgtgtcttactcactgatcctccgagcagtgtttcgtttgccctcccaggatgctcggcacaaggccctcagcacttgtggctcccacctctgtgtcatccttatgttttatgttccatccttctttaccttattgacccatcattttgggcgtaatattcctcaacatgtccatatcttgctggccaatctttatgtggcagtgccaccaatgctgaaccccattgtctatggtgtgaagactaagcagatacgtgagggtgtagcccaccggttctttgacatcaagacttggtgctgtacctcccctctgggctcatgaatcttcatgtccagctccttcaagg

SEQ ID NO: 162399 - DNA, 1124 bp, Homo sapiens
  Payload ID: 11906
  Gene Symbol: OR52B4
  Gene Name: olfactory receptor, family 52, subfamily B, member 4 (gene/pseudogene)
  Uniprot ID: Q8NGK2
  ENST ID: ENST00000408920
  CDS Start-End: 92-1036
agctcctggtgacatcgcaaagaatgttgcagattttatcttcttctacctctgtgagtaggaggtgaggttctgaaagttctccccagctatgcctactgtaaaccacagtggcactagccacacagtcttccacttgctgggcatccctggcctacaggaccagcacatgtggatttctatcccattcttcatttcctatgtcaccgcccttcttgggaacagcctgctcatcttcattatcctcacaaagcgcagcctccatgaacccatgtacctcttcctctgcatgctggctggagcagacattgtcctctccacgtgcaccattcctcaggccttagctatcttctggttccgtgctggggacatctccctggatcgttgcatcactcagctcttcttcatccattccaccttcatctctgagtcagggatcttgctggtgatggcctttgaccactatattgccatatgctacccactgaggtacaccaccattcttacaaatgctctgatcaagaaaatttgtgtgactgtctctctgagaagttatggtacaattttccctatcatatttcttttaaaaagattgactttctgccagaataatattattccacacaccttttgtgaacacattggcctagccaaatatgcatgtaatgacattcgaataaacatttggtatgggttttccattctaatgtcgacggtggtcttagatgttgtactaatttttatttcctatatgctgattctccatgctgtcttccacatgccttctccagatgcttgccacaaagctctcaacacatttggctcccatgtctgcatcatcatcctcttttatgggtctggcatcttcacaatccttacccagaggtttggacgccacattccaccttgtatccacatcccgttggctaatgtctgcattctggctccacctatgctgaatcccattatttatgggatcaaaaccaagcaaatccaggaacaggtggttcagtttttgtttataaaacagaaataactttggtttaagaactgagttttcagaatctctagctatctggtaagtgggtatgaaagtggtagatgggagaggtcagctgataccg

SEQ ID NO: 162400 - DNA, 1124 bp, Homo sapiens; identical to SEQ ID NO: 162399
  Payload ID: 11906
  Gene Symbol: OR52B4
  Gene Name: olfactory receptor, family 52, subfamily B, member 4 (gene/pseudogene)
  Uniprot ID: Q8NGK2
  ENST ID: ENST00000624801
  CDS Start-End: 92-1036

SEQ ID NO: 162401 - DNA, 1008 bp, Homo sapiens
  Payload ID: 11907
  Gene Symbol: OR52B6
  Gene Name: olfactory receptor, family 52, subfamily B, member 6
  Uniprot ID: Q8NGF0
  ENST ID: ENST00000345043
  CDS Start-End: 1-1008
atggcacaggtgagggcgctgcataaaatcatggcccttttttctgctaacagcataggtgctatgaacaactctgacactcgcatagcaggctgcttcctcactggcatccctgggctggagcaactacatatctggctgtccatccccttctgcatcatgtacatcactgccctggaaggcaatggcatcctaatttgtgtcatcctctcccaggcaatcctgcatgagcccatgtacatattcttatctatgctggccagtgctgatgtcttgctctctaccaccaccatgcctaaggccctggccaatttgtggctaggttatagcctcatttcctttgatggctgcctcactcagatgttcttcattcacttcctcttcattcactctgctgtcctgctggccatggcctttgaccgctatgtggccatctgctcccccctgcgatatgtcacaatcctcacaagcaaggtcattgggaagatcgtcactgccgccctgagccacagcttcatcattatgtttccatccatctttctccttgagcacctgcactattgccagatcaatatcattgcacacacattttgtgagcacatgggcattgcccatctgtcctgttctgatatctccatcaatgtctggtatgggttggcagctgctcttctctccacaggcctagacatcatgcttattactgtttcctacatccacatcctccaagcagtcttccgcctcctttctcaagatgcccgctccaaggccctgagtacctgtggatcccatatctgtgtcatcctactcttctatgtccctgcgcttttttctgtctttgcctacaggtttggtgggagaagcgtcccatgctatgtccatattctcctggccagcctctacgttgtcattcctcctatgctcaatcccgttatttatggagtgaggactaagccaatactggaaggggctaagcagatgttttcaaatcttgccaaaggatctaaataa

SEQ ID NO: 162402 - DNA, 1065 bp, Homo sapiens
  Payload ID: 11908
  Gene Symbol: OR52D1
  Gene Name: olfactory receptor, family 52, subfamily D, member 1
  Uniprot ID: Q9H346
  ENST ID: ENST00000322641
  CDS Start-End: 23-979
agcccttcatttgccaggaagaatgtcagattccaacctcagtgataaccatcttccagacaccttcttcttaacagggatcccagggctggaggctgcccacttctggattgccatccctttctgtgccatgtatcttgtagcactggttggaaatgctgccctcatcctggtcattgccatggacaatgctcttcatgcacctatgtacctcttcctctgccttctctcactcacagacctggctctcagttctaccactgtgcccaagatgctggccattttgtggctccatgctggtgagatttcctttggtggatgcctggcccagatgttttgtgtccattctatctatgctctggagtcctcaattctacttgccatggcctttgataggtatgtggctatctgtaacccattaaggtacacaaccattctcaaccatgctgtcataggcagaattggctttgttgggctattccgtagtgtggctattgtctcccccttcatcttcttgctgaggcgactcccctactgtggtcaccgtgtcatgacacacacatactgtgagcatatgggcattgcccgactggcctgtgccaacatcactgtcaatattgtctatgggctaactgtggctctgctggccatgggactggattccattctcattgccatttcctatggctttatcctccatgcagtctttcatcttccatctcatgatgcccagcacaaagctctgagtacctgtggctcccacattggcatcatcctggttttctacatccctgccttcttctccttcctcacccaccgctttggtcaccacgaagtccccaagcatgtgcacatctttctggctaatctctatgtgctggtgcctcctgtactcaatcctattctctatggagctagaaccaaggagattcggagtcgacttctaaaactgcttcacctggggaagacttcaatatgaatgctgagcagaagttggagatttaaaaaaaagtgtaggatggctgtctagatacatttacatggacacacagtgatgatgtgaaa

SEQ ID NO: 162403 - DNA, 978 bp, Homo sapiens
  Payload ID: 11909
  Gene Symbol: OR52E2
  Gene Name: olfactory receptor, family 52, subfamily E, member 2
  Uniprot ID: Q8NGJ4
  ENST ID: ENST00000321522
  CDS Start-End: 1-978
atgttccttcccaatgacacccagtttcacccctcctccttcctgttgctggggatcccaggactagaaacacttcacatctggatcggctttcccttctgtgctgtgtacatgatcgcactcatagggaacttcactattctacttgtgatcaagactgacagcagcctacaccagcccatgttctacttcctggccatgttggccaccactgatgtgggtctctcaacagctaccatccctaagatgcttggaatcttctggatcaacctcagagggatcatctttgaagcctgcctcacccagatgttttttatccacaacttcacacttatggagtcagcagtccttgtggcaatggcttatgacagctatgtggccatctgcaatccactccaatatagcgccatcctcaccaacaaggttgtttctgtgattggtcttggtgtgtttgtgagggctttaattttcgtcattccctctatacttcttatattgcggttgcccttctgtgggaatcatgtaattccccacacctactgtgagcacatgggtcttgctcatctatcttgtgccagcatcaaaatcaatattatttatggtttatgtgccatttgtaatctagtgtttgacatcacagtcattgccctttcttatgtgcatattctttgtgctgttttccgtcttcctactcatgaagcccgactcaagtccctcagcacatgtggttcacatgtgtgtgtaatccttgccttctatacaccagccctcttttcctttatgactcatcgctttggccgaaatgtgccccgctatatccatatactcctagccaatctctatgttgtggtgccaccaatgctcaatcctgtcatatatggagtcagaaccaagcagatctataaatgtgtgaagaaaatattattgcaggaacaaggaatggaaaaggaagagtacctaatacatacgaggttctga

SEQ ID NO: 162404 - DNA, 1030 bp, Homo sapiens
  Payload ID: 11910
  Gene Symbol: OR52E4
  Gene Name: olfactory receptor, family 52, subfamily E, member 4
  Uniprot ID: Q8NGH9
  ENST ID: ENST00000316987
  CDS Start-End: 23-961
ttcagtgacacttgctgggagaatgccttctatcaatgacacccacttctatccccccttcttcctcctgctaggaataccaggactggacactttacatatctggatttctttcccattctgtattgtgtacctgattgccattgtggggaatatgaccattctctttgtgatcaaaactgaacatagtctacaccagcccatgttctacttcctggccatgttgtctatgattgatctgggtctgtccacatccactatccccaaaatgctaggaatcttctggttcaacctccaagagatcagctttgggggatgccttcttcagatgttctttattcacatgtttacaggcatggagactgttctgttggtggtcatggcttatgaccgctttgttgccatctgcaaccctctccagtacaccatgatcctcaccaataaaaccatcagtatcctagcttctgtggttgttggaagaaatttagttcttgtaaccccatttgtgtttctcattctgcgtctgccattctgtgggcataacatcgtacctcacacatactgtgagcacaggggtctggccgggttggcctgtgcacccattaagatcaacataatctatgggctcatggtgatttcttatattattgtggatgtgatcttaattgcctcttcctatgtgcttatccttagagctgtttttcgccttccctctcaagatgtccgactaaaggccttcaatacctgtggttctcatgtctgtgttatgctgtgcttttacacaccagcatttttttcttttatgacacatcgttttggccaaaacattccccactatatccatattcttttggctaacctgtatgtggttgtcccacctgcccttaaccctgtcatttatggagtcaggaccaagcagatccgagagcaaattgtgaaaatatttgtacagaaagaataattctgtattaaagtttggataaatatatctatatacaacccaaattatcatcatctgagctcccttttt

SEQ ID NO: 162405 - DNA, 1314 bp, Homo sapiens
  Payload ID: 11911
  Gene Symbol: OR52E5
  Gene Name: olfactory receptor, family 52, subfamily E, member 5
  Uniprot ID: Q8NH55
  ENST ID: ENST00000610445
  CDS Start-End: 1-984
atgcttcataccaacaatacacagtttcacccttccaccttcctcgtagtgggggtcccagggctggaagatgtgcatgtatggattggcttccccttctttgcagtgtatctaacagcccttctagggaacatcattatcctgtttgtgatacagactgaacagagcctccaccaacccatgttttacttcctagccatgttggccggcactgatctgggcttgtctacagcaaccatccccaagatgctgggaattttctggtttaatcttggagagattgcatttggtgcctgcatcacacagatgtataccattcatatatgcactggcctggagtctgtggtactgacagtcacgggcatagatcgctatattgccatctgcaaccccctgagatatagcatgatccttaccaacaaggtaatagccattctgggcatagtcatcattgtcaggactttggtatttgtgactccattcacatttctcatcctgagattgcctttctgtggtgtccggattatccctcatacctattgtgaacacatgggcttggcaaagttagcttgtgccagtattaatgttatatatggattgattgccttctcagtgggatacattgacatttctgtgattggattttcctatgtccagatcctccgagctgtcttccatctcccagcctgggatgcccggcctaaggcactcagcacatgtggctctcacgtctgtgttatgttggctttctacctgccagccctcttttccttcatgacacaccgctttggccacaacatccctcattacatccacattcttctggccaatctgtatgtggtttttccccctgctcttaactctgttatctatggggtcaaaacaaaacagatacgagagcaggtacttaggatactcaaccctaaaagcttttggcattttgaccccaagaggatcttccacaacaattcagttagacaataatgagatcataacaaaataaacactggaaacattttttttactacttctcttgcattcccacatgagccaatagcattatatcccctacaacgtctcatgatttcagtacggtctgttggaagttatagctcaaagattccaaaacaatctctctgtttcacccattaaaagtgcaaaaagtactcacacttaagccccatgatactacaaaatgcctaaagagaaacaaaggctttgtaaaagttattgcccagtaattgtcttgaatagcctttccacatgaagattctctgtatttacatatccaaagctgaagttcatgacgattaa

SEQ ID NO: 162406 - DNA, 970 bp, Homo sapiens
  Payload ID: 11912
  Gene Symbol: OR52E6
  Gene Name: olfactory receptor, family 52, subfamily E, member 6
  Uniprot ID: Q96RD3
  ENST ID: ENST00000329322
  CDS Start-End: 1-942
atgcctatagctaacgacacccagttccatacttcttcattcctactgctgggtatcccagggctagaagatgtgcacatctggattggattcccttttttctctgtgtatcttattgcactcctgggaaatgctgctatcttctttgtgatccaaactgagcagagtctccatgagcccatgtactactgcctggccatgttggattccattgacctgagcttgtctacggccaccattcccaaaatgctgggcatcttctggttcaatatcaaggaaatatcttttggaggctacctttctcagatgttcttcatccatttcttcactgtcatggagagcatcgtattggtggccatggcctttgaccgctacattgccatttgcaaacctctttggtacaccatgatcctcaccagcaaaatcatcagcctcattgcaggcattgctgtcctgaggagcttgtacatggtcattccactggtgtttctcctcttaaggttgcccttctgtggacatcgtatcatccctcatacttactgtgagcacatgggcattgcccgtctggcctgtgccagcatcaaagtcaacattatgtttggtcttggcagtatttctctcttgttattggatgtgctccttattattctctcccatatcaggatcctctatgctgtcttctgcctgccctcctgggaagctcgactcaaagctctcaacacctgtggctctcacattggtgttatcttagccttttctacaccagcatttttctctttctttacacactgctttggccatgatattccccaatatatccacattttcttggctaatctatatgtggttgttcctcccaccctcaatcctgtaatctatggggtcagaaccaaacatattagggagacagtgctgaggattttcttcaagacagatcactaaccagttggagtttggagggtctctctta

SEQ ID NO: 162407 - DNA, 954 bp, Homo sapiens
  Payload ID: 11912
  Gene Symbol: OR52E6
  Gene Name: olfactory receptor, family 52, subfamily E, member 6
  ENST ID: ENST00000379946
  CDS Start-End: 1-954
atggaaaaaagaatgcctatagctaacgacacccagttccatacttcttcattcctactgctgggtatcccagggctagaagatgtgcacatctggattggattcccttttttctctgtgtatcttattgcactcctgggaaatgctgctatcttctttgtgatccaaactgagcagagtctccatgagcccatgtactactgcctggccatgttggattccattgacctgagcttgtctacggccaccattcccaaaatgctgggcatcttctggttcaatatcaaggaaatatcttttggaggctacctttctcagatgttcttcatccatttcttcactgtcatggagagcatcgtattggtggccatggcctttgaccgctacattgccatttgcaaacctctttggtacaccatgatcctcaccagcaaaatcatcagcctcattgcaggcattgctgtcctgaggagcttgtacatggtcattccactggtgtttctcctcttaaggttgcccttctgtggacatcgtatcatccctcatacttactgtgagcacatgggcattgcccgtctggcctgtgccagcatcaaagtcaacattatgtttggtcttggcagtatttctctcttgttattggatgtgctccttattattctctcccatatcaggatcctctatgctgtcttctgcctgccctcctgggaagctcgactcaaagctctcaacacctgtggctctcacattggtgttatcttagccttttctacaccagcatttttctctttctttacacactgctttggccatgatattccccaatatatccacattttcttggctaatctatatgtggttgttcctcccaccctcaatcctgtaatctatggggtcagaaccaaacatattagggagacagtgctgaggattttcttcaagacagatcactaa

SEQ ID NO: 162408 - DNA, 1061 bp, Homo sapiens
  Payload ID: 11913
  Gene Symbol: OR52E8
  Gene Name: olfactory receptor, family 52, subfamily E, member 8
  Uniprot ID: Q6IFG1
  ENST ID: ENST00000537935
  CDS Start-End: 33-986
ataatcgtcgctggtgtgcccagcagctttatatggcaggaagaatgtctacgtctaatcacacccagttccatccttcttcattcctactgctgggtatcccagggctagaagatgtgcacatttggattggagtcccttttttctttgtgtatcttgttgcactcctgggaaacactgctctcttgtttgtgatccagactgagcagagtctccatgagcctatgtactacttcctggccatgttggattccattgacctgggcttgtctacagccaccatccccaaaatgttgggcatcttctggttcaataccaaagaaatatcttttggaggctgcctttctcacatgttcttcatccatttcttcactgctatggagagcattgtgttggtggccatggcctttgaccgctacattgccatttgcaaacctcttcggtacaccatgatcctcaccagcaaaatcatcagcctcattgcaggcattgctgtcctgaggagcctgtacatggttgttccactggtgtttctccttctgaggctgcccttctgtgggcatcgtatcatccctcatacttattgtgagcacatgggcattgcccgtctggcctgtgccagcatcaaagtcaacattaggtttggccttggcaacatatctctcttgttactggatgttatccttattattctctcctatgtcaggatcctgtatgctgtcttctgcctgccctcctgggaagctcgactcaaagctctcaacacctgtggttctcatattggtgttatcttagccttttttacaccagcatttttttcattcttgacacatcgttttggccataatatcccacagtatatacatattatattagccaacctgtatgtggttgtcccaccagccctcaatcctgtaatctatggagtcaggacaaagcagattcgagagagagtgctgaggatttttctcaagaccaatcactaaccagttggaggttggagagtctgtcactctaacctaatagaaagcagaaaaacagaagggaatgctgcagccaat

SEQ ID NO: 162409 - DNA, 963 bp, Homo sapiens
  Payload ID: 11914
  Gene Symbol: OR52H1
  Gene Name: olfactory receptor, family 52, subfamily H, member 1
  Uniprot ID: Q8NGJ2
  ENST ID: ENST00000322653
  CDS Start-End: 1-963
atgccatctgcctctgccatgatcattttcaacctgagcagttacaatccaggacccttcattctggtagggatcccaggcctggagcaattccatgtgtggattggaattcccttctgtatcatctacattgtagctgttgtgggaaactgcatccttctctacctcattgtggtggagcatagtcttcatgaacccatgttcttctttctctccatgctggccatgactgacctcatcttgtccacagctggtgtgcctaaagcactcagtatcttttggctaggggctcgcgaaatcacattcccaggatgccttacacaaatgttcttccttcactataactttgtcctggattcagccattctgatggccatggcatttgatcactatgtagctatctgttctcccttgagatataccaccatcttgactcccaagaccatcatcaagagtgctatgggcatctcctttcgaagcttctgcatcatcctgccagatgtattcttgctgacatgcctgcctttctgcaggacacgcatcataccccacacatactgtgagcatataggtgttgcccagctcgcctgtgctgatatctccatcaacttctggtatggcttttgtgttcccatcatgacggtcatctcagatgtgattctcattgctgtttcctacgcacacatcctctgtgctgtctttggccttccctcccaagatgcctgccagaaagccctcggcacttgtggttctcatgtctgtgtcatcctcatgttttatacacctgcctttttctccatcctcgcccatcgctttggacacaatgtctctcgcaccttccacatcatgtttgccaatctctacattgttatcccacctgcactcaaccccatggtttacggagtgaagaccaagcagatcagagataaggttatacttttgttttctaagggtacaggatga

SEQ ID NO: 162410 - DNA, 1050 bp, Homo sapiens
  Payload ID: 11915
  Gene Symbol: OR52I1
  Gene Name: olfactory receptor, family 52, subfamily I, member 1
  ENST ID: ENST00000450052
  CDS Start-End: 1-1050
tgcaaaagagtattagaagactgcaccattctcttacatcatctatacattaataggcaagaagtctcacctgtgatgctgggtccagcttacaaccacacaatggaaacccctgcctccttcctccttgtgggtatcccaggactgcaatcttcacatctttggctggctatctcactgagtgccatgtacatcacagccctgttaggaaacaccctcatcgtgactgcaatctggatggattccactcggcatgagcccatgtattgctttctgtgtgttctggctgctgtggacattgttatggcctcctccgtggtacccaagatggtgagcatcttctgctcgggagacagctccatcagctttagtgcttgtttcactcagatgttttttgtccacttagccacagctgtggagacggggctgctgctgaccatggcttttgaccgctatgtagccatctgcaagcctctacactacaagagaattctcacgcctcaagtgatgctgggaatgagtatggccgtcaccatcagagctgtcacattcatgactccactgagttggatgatgaatcatctacctttctgtggctccaatgtggttgtccactcctactgtaagcacatagctttggccaggttagcatgtgctgaccccgtgcccagcagtctctacagtctgattggttcctctcttatggtgggctctgatgtggccttcattgctgcctcctatatcttaattctcagggcagtatttgatctctcctcaaagactgctcagttgaaagcattaagcacatgtggctcccatgtgggggttatggctttgtactatctacctgggatggcatccatctatgcggcctggttggggcaggatatagtgcccttgcacacccaagtgctgctagctgacctgtacgtgatcatcccagccactttaaatcccatcatctatggcatgaggaccaaacaattgctggagggaatatggagttatctgatgcacttcctctttgaccactccaacctgggttcatga

SEQ ID NO: 162411 - DNA, 975 bp, Homo sapiens
  Payload ID: 11915
  Gene Symbol: OR52I1
  Gene Name: olfactory receptor, family 52, subfamily I, member 1
  Uniprot ID: Q8NGK6
  ENST ID: ENST00000530443
  CDS Start-End: 1-975
atgctgggtccagcttacaaccacacaatggaaacccctgcctccttcctccttgtgggtatcccaggactgcaatcttcacatctttggctggctatctcactgagtgccatgtacatcacagccctgttaggaaacaccctcatcgtgactgcaatctggatggattccactcggcatgagcccatgtattgctttctgtgtgttctggctgctgtggacattgttatggcctcctccgtggtacccaagatggtgagcatcttctgctcgggagacagctccatcagctttagtgcttgtttcactcagatgttttttgtccacttagccacagctgtggagacggggctgctgctgaccatggcttttgaccgctatgtagccatctgcaagcctctacactacaagagaattctcacgcctcaagtgatgctgggaatgagtatggccgtcaccatcagagctgtcacattcatgactccactgagttggatgatgaatcatctacctttctgtggctccaatgtggttgtccactcctactgtaagcacatagctttggccaggttagcatgtgctgaccccgtgcccagcagtctctacagtctgattggttcctctcttatggtgggctctgatgtggccttcattgctgcctcctatatcttaattctcagggcagtatttgatctctcctcaaagactgctcagttgaaagcattaagcacatgtggctcccatgtgggggttatggctttgtactatctacctgggatggcatccatctatgcggcctggttggggcaggatatagtgcccttgcacacccaagtgctgctagctgacctgtacgtgatcatcccagccactttaaatcccatcatctatggcatgaggaccaaacaattgctggagggaatatggagttatctgatgcacttcctctttgaccactccaacctgggttcatga

SEQ ID NO: 162412 - DNA, 1115 bp, Homo sapiens
  Payload ID: 11916
  Gene Symbol: OR52I2
  Gene Name: olfactory receptor, family 52, subfamily I, member 2
  Uniprot ID: Q8NH67
  ENST ID: ENST00000312614
  CDS Start-End: 23-1075
ccttaggttttcccagcaccacatgtgtcaacaaatcttacgggattgcattcttctcatacatcatttgtgcattaacaggaaaaaagtctcacttgtgatgctgggtccagcttataaccacacaatggaaacccctgcctccttcctccttgtgggtatcccaggactgcaatcttcacatctttggctggctatctcactgagtgccatgtacatcatagccctgttaggaaacaccatcatcgtgactgcaatctggatggattccactcggcatgagcccatgtattgctttctgtgtgttctggctgctgtggacattgttatggcctcctcggtggtacccaagatggtgagcatcttctgctcaggagacagctcaatcagctttagtgcttgtttcactcagatgttttttgtccacttagccacagctgtggagacggggctgctgctgaccatggcttttgaccgctatgtagccatctgcaagcctctacactacaagagaattctcacgcctcaagtgatgctgggaatgagtatggccatcaccatcagagctatcatagccataactccactgagttggatggtgagtcatctacctttctgtggctccaatgtggttgtccactcctactgtgagcacatagctttggccaggttagcatgtgctgaccccgtgcccagcagtctctacagtctgattggttcctctcttatggtgggctctgatgtggccttcattgctgcctcctatatcttaattctcaaggcagtatttggtctctcctcaaagactgctcagttgaaagcattaagcacatgtggctcccatgtgggggttatggctttgtactatctacctgggatggcatccatctatgcggcctggttggggcaggatgtagtgcccttgcacacccaagtcctgctagctgacctgtacgtgatcatcccagccaccttaaatcccatcatctatggcatgaggaccaaacaactgcgggagagaatatggagttatctgatgcatgtcctctttgaccattccaacctgggttcatgaacacaatatctgttcagatccagccaatttcaaagatgcc

SEQ ID NO: 162413 - DNA, 936 bp, Homo sapiens
  Payload ID: 11917
  Gene Symbol: OR52J3
  Gene Name: olfactory receptor, family 52, subfamily J, member 3
  Uniprot ID: Q8NH60
  ENST ID: ENST00000380370
  CDS Start-End: 1-936
atgttttatcacaacaagagcatatttcacccagtcacatttttcctcattggaatcccaggtctggaagacttccacatgtggatctccgggcctttctgctctgtttaccttgtggctttgctgggcaatgccaccattctgctagtcatcaaggtagaacagactctccgggagcccatgttctacttcctggccattctttccactattgatttggccctttctacaacctctgtgcctcgcatgctgggtatcttctggtttgatgctcacgagattaactatggagcttgtgtggcccagatgtttctgatccatgccttcactggcatggaggctgaggtcttactggctatggcttttgaccgttatgtggccgtctgtgctccactacattacgcaaccatcttgacatcccaagtgttggtgggcattagcatgtgcattgtaattcgtcccgttttacttacacttcccatggtctatcttatctaccgcctacccttttgtcaggctcacataatagcccattcctactgtgagcacatgggcattgcaaaattgtcctgtggaaacattcgtatcaatggtatctatgggctttttgtagtttctttctttgttctgaacctggtgctcattggcatctcgtatgtttacattctccgtgctgtcttccgcctcccatcacatgatgctcagctaaaagccctaagcacgtgtggcgctcatgttggagtcatctgtgttttctatatcccttcagtcttctctttccttactcatcgatttggacaccaaataccaggttacattcacattcttgttgccaatctctatttgattatcccaccctctctcaaccccatcatttatggggtgaggaccaaacagattcgagaacgagtgctctatgtttttactaaaaaataa

SEQ ID NO: 162414 - DNA, 1030 bp, Homo sapiens
  Payload ID: 11918
  Gene Symbol: OR52K1
  Gene Name: olfactory receptor, family 52, subfamily K, member 1
  Uniprot ID: Q8NGK4
  ENST ID: ENST00000307632
  CDS Start-End: 23-967
gacaaggagatttccaggagccatgcttccctctaatatcacctcaacacatccagctgtctttttgttggtaggaattcctggtttggaacacctgcatgcctggatctccatccccttctgctttgcttatactctggccctgctaggcaactgtacccttctcttcattatccaggctgatgcagccctccatgaacccatgtacctctttctggccatgttggcaaccattgacttggttctttcttctacaacgctgcccaaaatgcttgccatattctggttcagggatcaggagatcaacttctttgcctgtctggtccagatgttcttccttcactccttctccatcatggagtcagcagtgctgctggccatggcctttgaccgctatgtggccatctgcaagccattgcactacacgacggtcctgactgggtccctcatcaccaagattggcatggctgctgtggcccgggctgtgacactaatgactccactccccttcctgctcagacgcttccactactgccgaggcccagtgattgcccattgctactgtgaacacatggctgtggtaaggctggcgtgtggggacactagcttcaacaatatctatggcattgctgtggccatgtttattgtggtgttggacctgctctttgttatcctgtcttatgtcttcatccttcaggcagttctccagcttgcctctcaggaggcccgctacaaggcatttgggacatgtgtgtctcacataggtgccatcctgtccacctacactccagtagtcatctcttcagtcatgcaccgtgtagcccgccatgctgcccctcgtgtccacatactccttgctattttctatctccttttcccacccatggtcaatcctatcatatatggagtcaagaccaagcagattcgtgagtatgtgctcagtctattccagagaaagaacatgtagatggatagttctctttttttatcccacttgccaagtaatgagaatgctggattggggttgagg

SEQ ID NO: 162415 - DNA, 1067 bp, Homo sapiens
  Payload ID: 11919
  Gene Symbol: OR52K2
  Gene Name: olfactory receptor, family 52, subfamily K, member 2
  Uniprot ID: Q8NGK3
  ENST ID: ENST00000325719
  CDS Start-End: 46-990
gggccctgtggaagcagataaggaggaagagaattcccaggagccatgtcagcctccaatatcaccttaacacatccaactgccttcttgttggtggggattccaggcctggaacacctgcacatctggatctccatccctttctgcttagcatatacactggccctgcttggaaactgcactctccttctcatcatccaggctgatgcagccctccatgaacccatgtacctctttctggccatgttggcagccatcgacctggtcctttcctcctcagcactgcccaaaatgcttgccatattctggttcagggatcgggagataaacttctttgcctgtctggcccagatgttcttccttcactccttctccatcatggagtcagcagtgctgctggccatggcctttgaccgctatgtggctatctgcaagccactgcactacaccaaggtcctgactgggtccctcatcaccaagattggcatggctgctgtggcccgggctgtgacactaatgactccactccccttcctgctgagatgtttccactactgccgaggcccagtgatcgctcactgctactgtgaacacatggctgtggtgaggctggcgtgtggggacactagcttcaacaatatctatggcatcgctgtggccatgtttattgtggtgttggacctgctccttgttatcctgtcttatatctttattcttcaggcagttctactgcttgcctctcaggaggcccgctacaaggcatttgggacatgtgtctctcatataggtgccatcttagccttctacacaactgtggtcatctcttcagtcatgcaccgtgtagcccgccatgctgcccctcatgtccacatcctccttgccaatttctatctgctcttcccacccatggtcaatcccataatctatggtgtcaagaccaagcaaatccgtgagagcatcttgggagtattcccaagaaaggatatgtagagggtgaggtggagaaagaatgggttggcttgtctgctggagttggagacaggctatggtagaatgtgcacggctgc

SEQ ID NO: 162416 - DNA, 1094 bp, Homo sapiens
  Payload ID: 11920
  Gene Symbol: OR52L1
  Gene Name: olfactory receptor, family 52, subfamily L, member 1
  Uniprot ID: Q8NGH7
  ENST ID: ENST00000332249
  CDS Start-End: 56-1045
ggatgatggttgccccatttggacaatgtgataatgtagcaggaatgcagaaatcatgactttggtttcttttttctctttcctctccaagccattgataatgctccttagcaattcaagctggaggctatcccagccttcttttctcctggtagggattccaggtttagaggaaagccagcactggattgcactgcccctgggcatcctttacctccttgctttagtgggcaatgttaccattctcttcatcatctggatggacccatccttgcaccaatctatgtacctcttcctgtccatgctagctgccatcgacctggttctggcctcctccactgcacccaaagcccttgcagtgctcctggttcatgcccacgagattgggtacatcgtctgcctgatccagatgttcttcatccatgcattctcctccatggagtcaggggtacttgtggccatggctctggatcgctatgtagccatttgtcaccccttgcaccattccacaatcctgcatccaggggtcatagggcgcatcggaatggtggtgctggtgaggggattactactccttatccccttccccattttgttgggaacacttatcttctgccaagccaccatcataggccatgcctattgtgaacatatggctgttgtgaaacttgcctgctcagaaaccacagtcaatcgagcttatgggctgactatggccttgcttgtgattgggctggatgttctggccattggtgtttcctatgcccacatcctccaggcagtgctgaaggtaccagggagtgaggcccgacttaaggcgtttagcacatgtggctctcatatttgtgtcatcctggtcttctatgtccctggaattttctccttcctcactcaccgctttggtcatcatgtaccccatcatgtccatgttcttctggccacacggtatctcctcatgccacctgcgctcaatcctcttgtctatggagtgaagactcagcagatccgccagcgagtgctcagagtgtttacacaaaaggattgatctgaacatattctcattgtttccttcggaggcttcttctgcggaccac

SEQ ID NO: 162417 - DNA, 954 bp, Homo sapiens
  Payload ID: 11921
  Gene Symbol: OR52M1
  Gene Name: olfactory receptor, family 52, subfamily M, member 1
  Uniprot ID: Q8NGK5
  ENST ID: ENST00000360213
  CDS Start-End: 1-954
atgctcacttttcataatgtctgctcagtacccagctccttctggctcactggcatcccagggctggagtccctacacgtctggctctccatcccctttggctccatgtacctggtggctgtggtggggaatgtgaccatcctggctgtggtaaagatagaacgcagcctgcaccagcccatgtactttttcttgtgcatgttggctgccattgacctggttctgtctacttccactatacccaaacttctgggaatcttctggttcggtgcttgtgacattggcctggacgcctgcttgggccaaatgttccttatccactgctttgccactgttgagtcaggcatcttccttgccatggcttttgatcgctacgtggccatctgcaacccactacgtcatagcatggtgctcacttatacagtggtgggtcgtttggggcttgtttctctcctccggggtgttctctacattggacctctgcctctgatgatccgcctgcggctgcccctttataaaacccatgttatctcccactcctactgtgagcacatggctgtagttgccttgacatgtggcgacagcagggtcaataatgtctatgggctgagcatcggctttctggtgttgatcctggactcagtggctattgctgcatcctatgtgatgattttcagggccgtgatggggttagccactcctgaggctaggcttaaaaccctggggacatgcgcttctcacctctgtgccatcctgatcttttatgttcccattgctgtttcttccctgattcaccgatttggtcagtgtgtgcctcctccagtccacactctgctggccaacttctatctcctcattcctccaatcctcaatcccattgtctatgctgttcgcaccaagcagatccgagagagccttctccaaataccaaggatagaaatgaagattagatga

SEQ ID NO: 162418 - DNA, 963 bp, Homo sapiens
  Payload ID: 11922
  Gene Symbol: OR52N1
  Gene Name: olfactory receptor, family 52, subfamily N, member 1
  Uniprot ID: Q8NH53
  ENST ID: ENST00000317078
  CDS Start-End: 1-963
atgtcatttctaaatggcaccagcctaactccagcttcattcatcctaaatggcatccctggtttggaagatgtgcatttgtggatctccttcccactgtgtaccatgtacagcattgctattacagggaacttcggccttatgtacctcatctactgtgatgaggccttacacagacctatgtatgtcttccttgcccttctttccttcacagatgtgctcatgtgcaccagcacccttcccaacactctcttcatattgtggtttaatctcaaggagattgattttaaagcctgcctcgcccagatgttctttgtgcacaccttcacagggatggagtctggggtgctcatgctcatggccctggaccactgtgtggccatctgcttccctctgcgttatgccaccatcctcactaattcagtcattgctaaagctgggttcctcacttttcttaggggtgtgatgcttgttatcccttccactttcctcaccaagcgccttccatactgcaagggcaacgtcataccccacacctactgtgaccacatgtctgtggccaagatatcttgtggtaatgtcagggttaacgccatctatggtttgatagttgccctgctgattgggggctttgatatcctgtgcattacaatctcctacactatgattcttcaagcagttgtgagtctatcatcagcagatgctcgacagaaggccttcagcacctgcactgcccacttctgtgccatagtcctcacctatgttccagccttctttaccttctttacacaccattttgggggacacaccattcctctacacatacatattattatggctaatctctacctactaatgcctcccacaatgaaccctattgtgtatggggtgaaaaccaggcaggtacgagaaagtgtcattaggttctttcttaagggaaaggacaattctcataacttttaa

SEQ ID NO: 162419 - DNA, 1035 bp, Homo sapiens
  Payload ID: 11923
  Gene Symbol: OR52N2
  Gene Name: olfactory receptor, family 52, subfamily N, member 2
  Uniprot ID: Q8NGI0
  ENST ID: ENST00000317037
  CDS Start-End: 23-988
tgctctcctcctgtcagccatcatgtctggggacaacagctccagcctgaccccaggattctttatcttgaatggcgttcctgggctggaagccacacacatctggatctccctgccattctgctttatgtacatcattgctgtcgtggggaactgtgggctcatctgcctcatcagccatgaggaggccctgcaccggcccatgtactacttcctggccctgctctccttcactgatgtcaccttgtgcaccaccatggtacctaatatgctgtgcatattctggttcaacctcaaggagattgactttaacgcctgcctggcccagatgttttttgtccatatgctgacagggatggagtctggggtgctcatgctcatggccctggaccgctatgtggccatctgctaccccttacgctatgccaccatccttaccaaccctgtcatcgccaaggctggtcttgccaccttcttgaggaatgtgatgctcatcatcccattcactctcctcaccaagcgcctgccctattgccgggggaacttcatcccccacacctactgtgaccatatgtctgtggccaaggtatcctgtggcaatttcaaggtcaatgctatttatggtctgatggttgctctcctgattggtgtgtttgatatctgctgtatctctgtatcttacactatgattttgcaggctgttatgagcctgtcatcagcagatgctcgtcacaaagccttcagcacctgcacatctcacatgtgttccattgtgatcacctatgttgctgcttttttcacttttttcactcatcgttttgtaggacacaatatcccaaaccacatacacatcatcgtggccaacctttatctgctactgcctcctaccatgaacccaattgtttatggagtcaagaccaagcagattcaggaaggtgtaattaaatttttacttggagacaaggttagttttacctatgacaaatgaaacatagaatagacatattgtttcaggtggtgagaaaataatggaga

SEQ ID NO: 162420 - DNA, 1037 bp, Homo sapiens
  Payload ID: 11924
  Gene Symbol: OR52N4
  Gene Name: olfactory receptor, family 52, subfamily N, member 4 (gene/pseudogene)
  Uniprot ID: Q8NGI2
  ENST ID: ENST00000317254
  CDS Start-End: 49-1014
gaaagcccagacaaattttgagctatttcataacctaccagacttatcatgctaacactgaataaaacagacctaataccagcttcatttattctgaatggagtcccaggactggaagacacacaactctggatttccttcccattctgctctatgtatgttgtggctatggtagggaattgtggactcctctacctcattcactatgaggatgccctgcacaaacccatgtactacttcttggccatgctttcctttactgaccttgttatgtgctctagtacaatccctaaagccctctgcatcttctggtttcatctcaaggacattggatttgatgaatgccttgtccagatgttcttcacccacaccttcacagggatggagtctggggtgcttatgcttatggccctggatcgctatgtggccatctgctaccccttacgctattcaactatcctcaccaatcctgtaattgcaaaggttgggactgccaccttcctgagaggggtattactcattattccctttactttcctcaccaagctcctgccctactgcagaggcaatatacttccccatacctactgtgaccacatgtctgtagccaaattgtcctgtggtaatgtcaaggtcaatgccatctatggtctgatggttgccctcctgatttggggctttgacatactgtgtatcaccaactcctataccatgattctccgggcagtggtcagcctctcctcagcagatgctcggcagaaggcctttaatacctgcactgcccacatttgtgccattgttttctcctatactccagctttcttctccttcttttcccaccgctttggggaacacataatccccccttcttgccacatcattgtagccaatatttatctgctcctaccacccactatgaaccctattgtctatggggtgaaaaccaaacagatacgagactgtgtcataaggatcctttcaggttctaaggataccaaatcctacagcatgtgaatgaacacttgccaggagtgaga

SEQ ID NO: 162421 - DNA, 1034 bp, Homo sapiens
  Payload ID: 11925
  Gene Symbol: OR52N5
  Gene Name: olfactory receptor, family 52, subfamily N, member 5
  Uniprot ID: Q8NH56
  ENST ID: ENST00000317093
  CDS Start-End: 34-1008
ttctcttcaggatgaaacttctggaaaaatagaatgcctctatttaattcattatgctggtttccaacaattcatgtgactcctccatcttttattcttaatggaatacctggtctggaaagagtacatgtatggatctccctcccactctgcacaatgtacatcatcttccttgtggggaatcttggtcttgtgtacctcatttattatgaggagtccttacatcatccgatgtattttttttttggccatgctctctccctcattgacctccttacctgcaccaccactctacccaatgcactctgcatcttctggttcagtctcaaagaaattaacttcaatgcttgcttggcccagatgttctttgttcatgggttcacaggtgtggagtctggggtgctcatgctcatggctctagaccgctatgtagccatttgctaccctttgcgttatgctaccacactcaccaaccctatcattgccaaggctgagcttgccaccttcctgaggggtgtattgctgatgattcctttcccattcttggttaagcgtttgcctttctgccaaagcaatattatctcccatacgtactgcgaccacatgtctgtagtaaagctatcttgtgccagcatcaaggtcaatgtaatctatggtctaatggttgctctcctgattggagtgtttgacatttgttgtatatctttgtcttacactttgatcctcaaggcagcgatcagcctctcttcatcagatgctcggcagaaggctttcagcacctgcactgcccatatatctgccatcatcatcacctatgttccagcattcttcactttctttgcccaccgttttgggggacacacaattcccccttctcttcacatcattgtggctaatctttatcttcttcttcccccaactctaaaccctattgtttatggagtaaagacaaaacagatacgcaagagtgtcataaagttcttccagggtgataagggtgcaggttgattcaaggcaacttaattcagatggaa

SEQ ID NO: 162422 - DNA, 948 bp, Homo sapiens; identical to SEQ ID NO: 161889
  Payload ID: 11926
  Gene Symbol: OR52R1
  Gene Name: olfactory receptor, family 52, subfamily R, member 1 (gene/pseudogene)
  Uniprot ID: Q8NGF1
  ENST ID: ENST00000356069
  CDS Start-End: 1-948

SEQ ID NO: 162423 - DNA, 1114 bp, Homo sapiens
  Payload ID: 11927
  Gene Symbol: OR52W1
  Gene Name: olfactory receptor, family 52, subfamily W, member 1
  Uniprot ID: Q6IF63
  ENST ID: ENST00000311352
  CDS Start-End: 79-1041
gacccccaaaatctctccccttatcttccctgtcaggagtcatgcccccatgagccctcaagttgtgcccaccacagaatggcagaaactctacaactcaattccaccttcctacacccaaacttcttcatactgactggctttccagggctaggaagtgcccagacttggctgacactggtctttgggcccatttatctgctggccctgctgggcaatggagcactgccggcagtggtgtggatagactccacactgcaccagcccatgtttctactgttggccatcctggcagccacagacctgggcttagccacatctatagccccagggttgctggctgtgctgtggcttgggccccgatctgtgccatatgctgtgtgcctggtccagatgttctttgtacatgcactgactgccatggaatcaggtgtgcttttggccatggcctgtgatcgtgctgcggcaatagggcgtccactgcactaccctgtcctggtcaccaaagcctgtgtgggttatgcagccttggccctggcactgaaagctgtggctattgttgtacctttcccactgctggtggcaaagtttgagcacttccaagccaagaccataggccatacctattgtgcacacatggcagtggtagaactggtggtgggtaacacacaggccaccaacttatatggtctggcactttcactggccatctcaggtatggatattctgggtatcactggctcctatggactcattgcccatgctgtgctgcagctacctacccgggaggcccatgccaaggcctttggtacatgtagttctcacatctgtgtcattctggccttctacatacctggtctcttctcctacctcacacaccgctttggtcatcacactgtcccaaagcctgtgcacatccttctctccaacatctacttgctgctgccacctgccctcaaccccctcatctatggggcccgcaccaagcagatcagagaccgactcctggaaaccttcacattcagaaaaagcccgttgtaatgtccagtggtaacaatggagcctaagagtggaggtgaggggacaatcggaggggagtctgggggtgtggatc

SEQ ID NO: 162424 - DNA, 897 bp, Homo sapiens
  Payload ID: 11928
  Gene Symbol: OR52Z1
  Gene Name: olfactory receptor, family 52, subfamily Z, member 1 (gene/pseudogene)
  ENST ID: ENST00000510471
  CDS Start-End: 1-897
atgggaatcccagggctggaaggcttgcatacctggatctccatccctttttcttttatgtacattgtggctgttgcaggcaatatcttcttgatcttcctgatcatgactgagcgcagtctccatgagcccatgtatctcttcctatccatgctggcctcagccgacttcctgctcgccactgctgcagcccctaaggtgctggctatcctctggttccactccatggacatatcctttggtagttgtgtgtctcagatgttcttcatacatttcatctttgtggcagaatctgctattctcctggcaatggcatttgaccgctatgtggccatctgttacccactgagatacaccattttaacctcatcagccgtcaggaagattggcatagcagctgtggtcaggagctttttcatctgctgtccgttcatcttcctggtataccgacttacatattgtgggagaaacatcattcctcattcctactgtgagcacattgccagattggcttgtggcaatatcaatgtcaatatcatttatggcctcactgtggccctactctctacaggactggatatagtgcttatcattatatcctacacaatgatccttcactcagtgtttcagatatcttcctgggctgccaggttcaaggcccttagtacgtgcggctctcatatctgtgtcatatttatgttctataccccagcattcttttcatttcttgcccatcgctttggaggtaaaaccatccctcaccacattcacatcctagtgggcagtctctatgtgttagtgccccctatgctaaaccccatcatttatggggtgaagaccaaacaaattaaagatcgagtgattttgcttttctctcctatcagtgtatgctgttaa

SEQ ID NO: 162425 - DNA, 1071 bp, Homo sapiens
  Payload ID: 11929
  Gene Symbol: OR56A1
  Gene Name: olfactory receptor, family 56, subfamily A, member 1
  Uniprot ID: Q8NGH5
  ENST ID: ENST00000316650
  CDS Start-End: 38-994
tgcccataaacatagtcatcagaagcctactcagctcatgattcagcctatggcgtcacccagcaacagctccactgtcccagtctctgaattcctcctcatctgcttccccaacttccagagttggcagcactggctctccctgcccctcagccttctcttcctcctggccatgggagctaacaccaccctcctgatcaccatccagctggaggcctctctgcaccagcccctgtactacctgctcagcctcctctccctgctggacatcgtgctctgcctcaccgtcatccccaaggtcctggccatcttctggtatgatcttaggtcgatcagcttccctgcctgcttcctccagatgttcatcatgaacagtttcctccccatggagtcctgcacgtttatggtcatggcctatgaccgttatgtggccatctgccacccactgcggtacccatccatcatcactaatcaatttgtggccaaagctagtgtcttcattgtggtgcggaatgcgcttcttactgcacccattcctatcctcacttccctgctccattactgtggggaaaatgtcattgagaactgcatctgtgccaacttgtctgtgtccaggctctcctgtgataatttcacccttaacagaatctaccaatttgtggctggttggaccttgctgggctcagatttattcctcatcttcctctcttacaccttcattctaagagctgtgcttagattcaaagcagagggggcggcagtgaaggccctgagcacatgtggctcccacttcatcctcattcttttcttcagcaccatactgctggttgtggtgttgacaaacgtggccagaaagaaggtccccatggacatcctgatcctgctgaacgtccttcatcaccttattcctcctgcattgaaccctattgtgtatggggttcggaccaaagagataaaacagggaattcagaagttactgcagagagggaggtgaatatgtaaagcatttctaatacctcctgttcttcctcttcagtgattttacctaggcagcgaagtagagaaatgtca

SEQ ID NO: 162426 - DNA, 1022 bp, Homo sapiens
  Payload ID: 11930
  Gene Symbol: OR56A3
  Gene Name: olfactory receptor, family 56, subfamily A, member 3
  Uniprot ID: Q8NH54
  ENST ID: ENST00000329564
  CDS Start-End: 8-955
ggaaaatatgacaacacaccgaaatgacaccctctccactgaagcttcagacttcctcttgaattgttttgtcagatcccccagctggcagcactggctgtccctgcccctcagcctccttttcctcttggccgtaggggccaacaccaccctcctgatgaccatctggctggaggcctctctgcaccagcccctgtactacctgctcagcctcctctccctgctggacatcgtgctctgcctcactgtcatccccaaggtcctgaccatcttctggtttgacctcaggcccatcagcttccctgcctgcttcctccagatgtacatcatgaattgtttcctagccatggagtcttgcacattcatggtcatggcctatgatcgttatgtagccatctgccacccactgagatatccatcaatcatcactgatcactttgtagtcaaggctgccatgtttattttgaccagaaatgtgcttatgactctgcccatccccatcctttcagcacaactccgttattgtggaagaaatgtcattgagaactgcatctgtgccaatatgtctgtttccagactctcctgcgatgatgtcaccatcaatcacctttaccaatttgctggaggctggactctgctaggatctgacctcatccttatcttcctctcctacaccttcattctgcgagctgtgctgagactcaaggcagagggtgccgtggcaaaggccctaagcacatgtggctcccacttcatgctcatcctcttcttcagcaccatccttctggtttttgtcctcacacatgtggctaagaagaaagtctcccctgatgtgccagtcttgctcaatgttctccaccatgtcattcctgcagcccttaaccccatcatttacggggtgagaacccaagaaattaagcagggaatgcagaggttgttgaagaaagggtgctaacaaggaccactggatctctgaatatctaaaataagataatttattaatcacttaatgagtgagtggg

SEQ ID NO: 162427 - DNA, 1209 bp, Homo sapiens
  Payload ID: 11931
  Gene Symbol: OR56A4
  Gene Name: olfactory receptor, family 56, subfamily A, member 4
  Uniprot ID: Q8NGH8
  ENST ID: ENST00000330728
  CDS Start-End: 47-1144
cattgtggctggcatatgatacatacttggttaaatataagggaggatgatgacagtgattttaaaaactttattgggacagatacagggcctcagtggaaacccacactctactacgtctagaatgtactttttatgtttctgtacttctctactacgttttaaggtacactgggtctccagattgatcaggaaactttacatggcatctcccagcaatgactccactgccccagtctctgaattcctcctcatctgcttccccaacttccagagctggcagcactggttgtctctgcccctcagccttctcttcctcctggccatgggagctaacaccaccctcctgatcaccatccagctggaggcctctctgcaccagcccctgtactacctgctcagcctcctctccctgctggacatcgtgctctgcctcaccgtcatccccaaggtcctggccatcttctggtttgacctcaggtcgatcagcttcccagcctgcttcctccagatgttcatcatgaacagttttttgaccatggagtcctgcacgttcatggtcatggcctatgaccgttatgtggccatctgccatccattgagatacccgtctatcatcactgaccagtttgtggctagggccgtggtctttgttatagcccggaatgcctttgtttctcttcctgttcccatgctttctgccaggctcagatactgtgcaggaaacataatcaagaactgcatctgcagtaacctgtctgtgtccaaactctcttgtgatgacatcactttcaatcagctctaccagtttgtggcaggctggactctgttgggctctgatcttatccttattgttatctcctattcttttatattgaaagttgtgcttaggatcaaggccgagggtgctgtggccaaggccttgagcacgtgtggttcccacttcatcctcatcctcttcttcagcacagtcctgctggttctggtcatcactaacctggccaggaagagaattcctccagatgtccccatcctgctcaacatcctgcaccacctcattcccccagctctgaaccccattgtttatggtgtgagaaccaaggagatcaagcagggaatccaaaacctgctgaagaggttgtaagaataaaaaggattagatccacctttagagttgttaattgttagtgaaaattgggaaatagggaa

SEQ ID NO: 162428 - DNA, 738 bp, Homo sapiens
  Payload ID: 11932
  Gene Symbol: OR56A5
  Gene Name: olfactory receptor, family 56, subfamily A, member 5
  ENST ID: ENST00000340110
  CDS Start-End: 1-738
ctctccctgctggacatcgtactctgcctcaccgtcatccccaaggtcctggccatcttctggtttgacctcagatcaatcagcttccctgcctgcttccttcaggtgttcatcatgaacagttttctgactatggagtcctgcacattcatgatcatggcctatgaccgctatgtggccatctgcaagcccctacagtactcatccatcatcactgatcaatttgtcgctagggctgccatctttgttgtggccaggaatggccttcttactatgcctatccccatactttcttctcgactcagatactgtgcaggacacatcatcaagaactgcatctgtactaacgtgtctgtgtctaaactctcttgtgatgacatcaccttgaatcagagctaccagtttgttataggttggaccctgctgggctctgacctcatccttattgttctctcttacttttttatcttgaaaactgtgctaaggattaagggtgagggagatatggccaaagctctaggtacttgtggttcccacttcatcctcatcctcttcttcaccacagtcctgctggttctggtcatcactaacctggccaggaagagaattcctccggatgtccccatcctgctcaacatcctgcaccaccttattcccccagctctgaaccccattgtttatggtgtgagaaccaaggagatcaagcagggaatccagaacctgctgaggaggttatgt

SEQ ID NO: 162429 - DNA, 942 bp, Homo sapiens
  Payload ID: 11932
  Gene Symbol: OR56A5
  Gene Name: olfactory receptor, family 56, subfamily A, member 5
  Uniprot ID: P0C7T3
  ENST ID: ENST00000532411
  CDS Start-End: 1-942
atgacattacccagcaacaactccacttccccagtctttgaattcttcctcatttgtttccccagtttccagagctggcagcactggctgtctctgcccctcagcctcctcttcctcctggccatgggggccaatgccacccttctgatcaccatctatctggaagcctctctgcaccagcccctgtactacctgctcagcctcctctccctgctggacatcgtactctgcctcaccgtcatccccaaggtcctggccatcttctggtttgacctcagatcaatcagcttccctgcctgcttccttcaggtgttcatcatgaacagttttctgactatggagtcctgcacattcatgatcatggcctatgaccgctatgtggccatctgcaagcccctacagtactcatccatcatcactgatcaatttgtcgctagggctgccatctttgttgtggccaggaatggccttcttactatgcctatccccatactttcttctcgactcagatactgtgcaggacacatcatcaagaactgcatctgtactaacgtgtctgtgtctaaactctcttgtgatgacatcaccttgaatcagagctaccagtttgttataggttggaccctgctgggctctgacctcatccttattgttctctcttacttttttatcttgaaaactgtgctaaggattaagggtgagggagatatggccaaagctctaggtacttgtggttcccacttcatcctcatcctcttcttcaccacagtcctgctggttctggtcatcactaacctggccaggaagagaattcctccggatgtccccatcctgctcaacatcctgcaccaccttattcccccagctctgaaccccattgtttatggtgtgagaaccaaggagatcaagcagggaatccagaacctgctgaggaggttgtaa

SEQ ID NO: 162430 - DNA, 975 bp, Homo sapiens
  Payload ID: 11933
  Gene Symbol: OR56B1
  Gene Name: olfactory receptor, family 56, subfamily B, member 1
  Uniprot ID: Q8NGI3
  ENST ID: ENST00000317121
  CDS Start-End: 1-975
atgaatcatatgtctgcatctctcaaaatctccaatagctccaaattccaggtctctgagttcatcctgctgggattcccgggcattcacagctggcaacactggctatctctgcccctggcactactgtatctctcagcacttgctgcaaacaccctcatcctcatcatcatctggcagaacccttctttacagcagcccatgtatattttccttggcatcctctgtatggtagacatgggtctggccactactatcatccctaagatcctggccatcttctggtttgatgccaaggttattagcctccctgagtgctttgctcagatttatgccattcacttctttgtgggcatggagtctggtatcctactctgcatggcttttgatagatatgtggctatttgtcaccctcttcgctatccatcaattgtcaccagttccttaatcttaaaagctaccctgttcatggtgctgagaaatggcttatttgtcactccagtgcctgtgcttgcagcacagcgtgattattgctccaagaatgaaattgaacactgcctgtgctctaaccttggggtcacaagcctggcttgtgatgacaggaggccaaacagcatttgccagttggttctggcatggcttggaatggggagtgatctaagtcttattatactgtcatatattttgattctgtactctgtacttagactgaactcagctgaagctgcagccaaggccctgagcacttgtagttcacatctcaccctcatccttttcttttacactattgttgtagtgatttcagtgactcatctgacagagatgaaggctactttgattccagttctacttaatgtgttgcacaacatcatccccccttccctcaaccctacagtttatgcacttcagaccaaagaacttagggcagccttccaaaaggtgctgtttgcccttacaaaagaaataagatcttag

SEQ ID NO: 162431 - DNA, 1152 bp, Homo sapiens
  Payload ID: 11934
  Gene Symbol: OR56B4
  Gene Name: olfactory receptor, family 56, subfamily B, member 4
  Uniprot ID: Q8NH76
  ENST ID: ENST00000316529
  CDS Start-End: 96-1055
acaggcatgaaccacgatgctcagccccttagctgaacttttaaacagagatttcttctatttcagacagacactgagactgaggcacccattccatggatacctccaccagtgttacctatgactccagcctccagatttcccagttcatcctgatgggattaccaggcattcatgagtggcagcactggctctccctgcccctgactctgctctacctcttagctcttggtgccaatctcctcatcataatcaccattcaacatgagaccgtgctacatgaacccatgtaccatttgctgggcatattagcagtggtggacattggcctggccaccaccatcatgcccaagatcctggccatcttctggtttgatgccaaggccattagcctccccatgtgttttgctcagatctatgccatccactgcttcttctgcatagagtcaggcatctttctctgcatggcagtagacagatacatagccatctgtcgccctcttcagtacccctccatagtcactaaagcttttgtcttcaaagccacagggttcatcatgctcaggaatggcctgttgaccatcccagtgcctatactggctgcccagagacactactgttccaggaatgaaatcgagcactgcctctgctctaacttgggggttatcagcctggcttgtgatgacatcactgtgaacaaattttaccaactgatgctagcatgggtcttggttgggagtgatatggctctggtattttcttcctatgctgtaatccttcactctgtgctgaggctgaactcagcagaagcaatgtccaaggctctgagcacttgtagctcccacctcatcctcatcctcttccacacaggtatcattgtgctgtctgtcacacaccttgcagagaaaaagattccccttattcctgtgttccttaatgtgctgcacaatgtcatcccccctgcactcaaccccctggcctgtgcactcaggatgcacaaactcagactgggctttcagagactgcttggactgggtcaggacgtgtccaagtaactccagctttaggaatccagtaagatgttaggaaatgacagaggttttagttctcaatagatcagggttataatctgcacttaccacactccctagg

SEQ ID NO: 162432 - DNA, 1157 bp, Homo sapiens
  Payload ID: 11935
  Gene Symbol: OR6A2
  Gene Name: olfactory receptor, family 6, subfamily A, member 2
  Uniprot ID: O95222
  ENST ID: ENST00000332601
  CDS Start-End: 76-1059
ggctgggttcttgttgtggcctactgaagactctctactctcatctcctgaagagcagtaagagagaccaatgacatggagtggcggaaccatagtgggagagtgagtgagtttgtgttgctgggcttccctgctcctgcgccactacaggtactattgtttgcccttttgctgctggcctatgtgttggtgctgactgagaacacactcatcattatggcaattaggaaccattctaccctccacaaacccatgtacttttttctagctaatatgtcctttctggagatctggtatgtcactgtcactattcccaagatgcttgctggctttgttggatccaaacaggatcatggacagctaatctcctttgagggatgcatgacacagctctactttttccttggcttgggctgcactgagtgtgtccttctcgctgttatggcctatgatcgctatatggccatctgctatcctctccactacccagtcattgtcagtggccggctgtgtgtgcagatggctgctggctcttgggctggaggttttggcatctccatggtcaaagtttttcttatttctggcctctcttactgtggccccaacatcatcaaccactttttctgtgatgtctctccattgctcaacctctcatgcactgatatgtccacagcagagcttacagatttcatcctggccatttttattcttctagggccactctctgtcactggggcctcctatgtggccattactggtgctgtgatgcacattccttcggctgctggacgctataaggccttttccacctgtgcctctcatctcactgttgtgataatcttctatgcagccagtatcttcatctatgctcggccaaaggcactctcagcttttgacaccaacaagttggtctctgtactgtatgctgtcattgtaccattgctcaatcccatcatttactgcctgcgcaatcaagaggtcaagagagccctatgctgtactctgcacctgtaccagcaccaggatcctgaccccaagaaagctagcagaaatgtatagaagggatgtgtgaaatctgataaaatgctattaaacttgggatcaatgtgttctatgaagtccagtggagttcttagggcctaaattgggggccagag

SEQ ID NO: 162433 - DNA, 1055 bp, Homo sapiens
  Payload ID: 11936
  Gene Symbol: OR6B1
  Gene Name: olfactory receptor, family 6, subfamily B, member 1
  Uniprot ID: O95007
  ENST ID: ENST00000408922
  CDS Start-End: 69-1004
tagctgggccatggagtctgatcaaatgatttttcctccccaggagagctaagccctgtgtctccaatatggagttggagaaccagacacgagtcaccaagttcattctggtgggattccctgggagcttgagtatgcgggcagccatgtttctgatattccttgtggcctatattctgacagtggctgaaaacgtgatcatcatcctattggtgctgcaaaatcggccactgcacaagcctatgtacttcttcctggccaacctgtccttcttggagacctggtacatctctgtgactgtgcccaagttactgtttagtttttggtctgtgaacaacagcatctctttcacactctgtatgatacaactgtacttcttcattgctctcatgtgcacagaatgtgtgcttctggccgccatggcctatgaccggtatgtggccatctgtcgcccactccactacccaaccataatgagccatgggctctgcttccgcctcgctcttggttcctgggccattggctttggcatctccctggcgaagatctacttcatctcctgcctcagcttctgtggtcccaatgtcatcaaccacttcttctgtgacatctctccagtacttaatctctcctgcacagacatgtccataactgagttggtagactttatcctggcactggtcatcttcctattcccactctttattactgtcctgtcctacggatgcattctggccaccatattatgcatgcccacaggaaagcagaaagcgttctccacttgtgcctcccatcttgtggtggtcaccattttctattcagccattattttcatgtatgctcgacctcgagttatccatgccttcaacatgaacaaaattatttccatcttctatgccattgtcactccttctctcaaccctttcatttattgcctaagaaaccgagaggtcaaggaagctctgaagaaactggcatattgccaggccagcagatctgactagtcaattacagctgattagaaagaaaggtctgagtgggtgcctgtatgtctt

SEQ ID NO: 162434 - DNA, 1492 bp, Homo sapiens
  Payload ID: 11937
  Gene Symbol: OR6B2
  Gene Name: olfactory receptor, family 6, subfamily B, member 2
  Uniprot ID: Q6IFH4
  ENST ID: ENST00000402971
  CDS Start-End: 28-966
aggcctgcagctcccaagcacagaggcatgagtggggagaatgtcaccaaggtcagcaccttcatcctggtgggcctccccacggccccagggctgcagtacctgctcttcctcctcttcctgctcacctacctctttgtcctggtggagaacctggccatcatcctcatcgtctggagcagcacctccctccacaggcccatgtactactttctgagctccatgtctttcctggagatctggtacgtgtctgacatcacccccaagatgctggagggcttcctcctccagcagaaacgcatctctttcgtcgggtgcatgacgcagctctacttcttcagctccctggtgtgcaccgagtgtgtgcttctggcctccatggcctacgaccgctacgtggccatctgccacccgctgcgctaccacgtccttgtgaccccggggctgtgcctccagctggtgggcttctcctttgtgagtggcttcaccatctccatgatcaaggtctgttttatctccagcgtcacgttctgtggctccaacgtcttgaaccacttcttctgtgacatttcccccatcctcaagctggcctgcacggacttctccactgcagagctggtggatttcatcctggccttcatcatcctggtgtttccgctcctggccaccatactgtcatattggcacatcaccctggctgtcctgcgcatcccctcggccaccggctgctggagagccttctctacctgcgcctctcacctcaccgtggtcaccgtcttctatacagccttgcttttcatgtatgtccggccccaagccattgattcccagagctccaacaagctcatctctgccgtgtacactgttgtcacgccaataattaaccctttgatttactgcctgaggaacaaggaatttaaggacgccttgaaaaaggccttgggcttgggtcaaacttcacactaagacaactaaatgtcctagagtaaaatctgtagtgatgaaacaacattgtatgtggcactttgtgctctttaaattaatttttaagttaaatttaacaaacctacagaactaagtgaaatttaacaaacctacacaactgtgcacaagtaacaagccttcgtctgcatatgttttcacaaaaggactgtgctcatggaaccagctcccagatcaagaactagaagctgccttcacgccctctcccagtcattaacccttctccacaaaaagcactgtcctgacttccaaaaccagatgctagcattggtgtttctgaggggcttacacataaagtatgtgccctgttatgttcagcttctttcattcaccgtgttgcttgagtgaatccttgatgtttttgcatgtaacaataattcatgcattctcattgctatccaatattcataataaataatacatttatactgtataatacacaatgcataatacattcatactgggataatacatatactgggataatgca

SEQ ID NO: 162435 - DNA, 996 bp, Homo sapiens
  Payload ID: 11938
  Gene Symbol: OR6B3
  Gene Name: olfactory receptor, family 6, subfamily B, member 3
  Uniprot ID: Q8NGW1
  ENST ID: ENST00000319423
  CDS Start-End: 1-996
atgagtggggagaatgtcaccagggtcggcaccttcatcctggtgggcttccccacggccccagggctgcagtacctgctcttcctcctcttcctgctcacctacctctttgtcctggtggagaacctggccatcatcctcaccgtctggagcagcacctccctccacaggcccatgtactactttctgagctccatgtctttcctagagatctggtacgtgtctgacatcacccccaagatgctggagggcttcctcctccagcagaaacgcatctctttcgtcgggtgcatgacgcagctctacttcttcagctccctggtgtgcaccgagtgtgtgcttctggcctccatggcctacgaccgctacgtggccatctgccacccgctgcgctaccacgtccttgtgaccccggggctgtgcctccagctggtgggcttctcctttgtgagtggcttcaccatctccatgatcaaggtctgttttatctccagcgtcacgttctgtggctccaacgtcttgaaccacttcttctgtgacatttcccccatcctcaagctggcctgcacggacttctccactgcagagctggtggatttcattctggccttcatcatcctggtgtttccactcctggccaccatgctgtcatatgcgcacatcaccctggctgtcctgcgcatcccctcggccaccggctgctggagagccttcttcacctgcgcctctcacctcaccgtggtcaccgtcttctatacagccttgcttttcatgtatgtccggccccaggccattgattcccggagctccaacaagctcatctctgttttgtacacagttatcacccccatcttgaaccccttgatatactgcctgaggaataaggaatttaagaatgccttgaaaaaagccttcggcttgacgagctgcgccgtagaggggaggctttctagtcttctggaacttcatctccaaatacacagccagcctctctga

SEQ ID NO: 162436 - DNA, 1064 bp, Homo sapiens
  Payload ID: 11939
  Gene Symbol: OR6C1
  Gene Name: olfactory receptor, family 6, subfamily C, member 1
  Uniprot ID: Q96RD1
  ENST ID: ENST00000379668
  CDS Start-End: 40-978
ttgtaggtctggcaggggaaaaaagaaagcaactgaagaatgagaaaccatacagaaataacagagtttattcttctgggattaacagatgacccaaattttcaggttgtaatctttgtcttcctgctcatcacctacatgctcagcatcactgggaacctgacccttatcacaattaccctgctggattcccacctgcagacccccatgtatttcttcctcagaaatttctccatattagaaatttcgttcacaaccgtcagtatacccaagtttctgggtaacattatttcaggagataaaaccatttcctttaataattgcatagttcagttatttttcttcattctcttgggagtcacagagttttaccttctggctgccatgtcctatgaccgctatgtggccatctgcaagcctctgcattgcttgagtatcatgaatcgaagagtctgcacactgcttgtttttacttcttggctggtttcattcttaatcatattcccagcactcatgttgcttttaaagcttcattactgtaggtctaatattattgaccattttacctgtgattattttccactgctgcaacttgcttgttcagacacaaaattcttagaggtgatgggattttcttgtgctgcgtttactctaatgttcactttggcattaatatttctgtcctacatatacattatcagaacaattttgagaattccttctactagtcagaggacaaaggccttttccacatgttcttcccacatggttgttgtctccatctcttatggcagctgcatttttatgtacattaaaccctcagcaaaagatagagtgtccttgagcaagggagtggcaatactaaacacctcagtagcccccatgatgaacccctttatttacagcctaagaaatcagcaagtcaagcaagctttcattaacatggcaaggaagactgtatttttcacaagcacatgaaatggtatggtgtgatgaattagaggcacaggaaaggacaatatgaattttcagtagcttcttcaatcaaaatggcctccttgcag

SEQ ID NO: 162437 - DNA, 939 bp, Homo sapiens
  Payload ID: 11940
  Gene Symbol: OR6C2
  Gene Name: olfactory receptor, family 6, subfamily C, member 2
  Uniprot ID: Q9NZP2
  ENST ID: ENST00000322678
  CDS Start-End: 1-939
atgaaaaaccacacagtaataagaacttttatcctgctgggactgacaggtgacccacacctgcaagttctgctttttatctttctatttctcacctacatgttgagtgtaacagggaacctgactattatcaccctcacattggtggaccaccaccttaaaactcctatgtacttctttctcagaaatttttccttcttagaagtctcatttactacagtctgcattcccagattcttgtacaatatatcaatgggggacaataccattacctacaatgcttgtgccagtcaaatattctttgttattctctttggagcaacagaattttttctcttggcagccatgtcctatgaccgctatgtggccatctgtaaaccccttcattatgtggtcatcatgaacaacagggtgtgtaccttattagttctctgctgttgggtggctggcttgatgatcattgttccaccacttagcttaggcctccagctcgaattctgtgactccaatgccattgatcattttagctgtgatgcaggtcctctcctaaagatctcatgctcagatacatgggtaatagaacagatggttatacttatggctgtatttgcactcattatcaccctagtttgtgtgattctgtcctacttgtacatagtcagaacaattctgaagttcccttctgttcagcaaaggaaaaaggccttttctacctgttcatcccacatgattgtggtttccattgcctatggaagctgcatcttcatctatatcaagccctctgcaaaagatgaggtggccataaataaaggagtttcagttcttactacttctgtcgcacccttgttgaaccccttcatttacaccttgaggaacaagcaagtgaaacaagctttcagtgactctataaagaggattgcatttctctcaaagaagtag

SEQ ID NO: 162438 - DNA, 936 bp, Homo sapiens
  Payload ID: 11941
  Gene Symbol: OR6C3
  Gene Name: olfactory receptor, family 6, subfamily C, member 3
  Uniprot ID: Q9NZP0
  ENST ID: ENST00000379667
  CDS Start-End: 1-936
atgaaccacacaatggtcacagagtttgtcctcctgggcctttctgatgatcctgaccttcagattgtgatttttctctttttatttatcacgtatatattaagtgttactggaaacctgactatcatcaccctaacctttgtggactcccatctgcagacacctatgtatttcttcctccggaacttctctttcttagaaatctcatttacaaccgtatgcatccccagatttctgggggcaattatcaccaggaataagactatttcctataacaactgtgcagcccaactctttttctttatcttcatgggggtgactgaattttacattttaactgccatgtcctatgaccgctatgttgccatctgcaagccccttcattacacatccatcatgaacaggaaactctgcactctacttgtgctgtgtgcctggctaagtgggtttctgaccattttcccaccccttatgcttctcctccagctggattactgtgcttccaacgtcattgatcactttgcatgtgactattttcccctcttacaactatcttgttcagatacatggctcctagaagtaattggtttttactttgctttggttactttgctgttcactttggcattagtgattttatcttacatgtacattatcaggaccattttgagaatcccgtctgccagtcaaagaaaaaaggctttctccacttgttcttctcacatgattgtcatttccatttcttatggaagctgtatattcatgtatgctaatccatctgcaaaagaaaaggcatcattgacaaaaggaatagctattctcaatacatctgttgcccccatgctgaaccccttcatttacactctgagaaaccagcaagtaaaacaagccttcaaaaatgtggtccacaaagttgtgttttatgcaaatcaatga

SEQ ID NO: 162439 - DNA, 1046 bp, Homo sapiens
  Payload ID: 11942
  Gene Symbol: OR6C4
  Gene Name: olfactory receptor, family 6, subfamily C, member 4
  Uniprot ID: Q8NGE1
  ENST ID: ENST00000394256
  CDS Start-End: 29-958
ttgcctttaggttttccgaaggtcaacaatgaaaaacagaaccatgtttggtgagtttattctactgggccttacaaatcaacctgaactccaagtgatgatattcatctttctgttcctcacctacatgctaagtatcctaggaaatctgactattatcaccctcaccttactagacccccacctccagacccccatgtatttcttcctccggaatttctccttcttagaaatttccttcacatccatttttattcccagatttctgaccagcatgacaacaggaaataaagttatcagctttgctggctgcttgactcagtatttttttgctatatttcttggagctaccgagttttacctcctggcctccatgtcttatgatcgttatgtggccatctgcaaacccttgcattacctgactattatgagcagcagagtctgcatacaactagtgttctgctcctggttggggggattcctagcaatcttaccaccaatcatcctgatgacccaggtagatttctgtgtctccaacattctgaatcactattactgtgactatgggcctctcgtggagcttgcctgctcagacacaagcctcttagaactgatggtcatcctcttggccgttgtgactctcatggttactctggtgctggtgacactttcttacacatacattatcaggactattctgaggatcccttctgcccagcaaaggacaaaggccttttccacttgttcctcccacatgattgtcatctccctctcttatggcagctgcatgtttatgtacattaatccttctgcaaaagaaggaggtgctttcaacaaaggaatagctgtactcattacttcggttactcccttactgaatcccttcatatatactttaagaaatcagcaagtgaaacaagctttcaaggactcagtcaaaaagattgtgaaactttaaaaaaggagattacacttcaaaatacattttcacttaacaaatatgcattgaatgtctatatttcaagtgctaaattggcccttgaaga

SEQ ID NO: 162440 - DNA, 945 bp, Homo sapiens
  Payload ID: 11943
  Gene Symbol: OR6C6
  Gene Name: olfactory receptor, family 6, subfamily C, member 6
  Uniprot ID: A6NF89
  ENST ID: ENST00000358433
  CDS Start-End: 1-945
atgaagaacaaatcaatggaaatagagttcattctcctaggattgacagatgacccacagttgcaaattgtgattttcctgtttctatttctcaactacaccttgagcctgatggggaacttaatcatcatcatcctcaccctgctggatccccggctcaagacgccaatgtatttctttctccgtaatttctcctttttggaagtaatattcacaacagtgtgtattcctagattcttgataaccattgtgactagagacaaaaccatttcttataataattgtgcaactcaattattttttatccttttaccgggagttactgagttttacctcctggctgccatgtcctatgaccgctacgttgccatctgcaaaccactgcattatccaatcattatgagcagcaaagtctgctaccaacttgtacttagctcttgggtaactggattcttaatcatatttcccccattggtcatgggactcaagctggatttttgtgcttccaaaactattgaccactttatgtgtgaaacttctcctattctgcagatctcctgcacagatacccatgtcctagaattgatgtcttttaccttagctgtggtgacacttgtggtcacactggtattagtgattctctcttacacttgcattattaagaccattctgaaattctcttctgcacagcaaaggaacaaagcattttccacctgtacttcccacatgattgttgtctccatgacatacggtagctgtatctttatgtatattaaaccatctgcaaaagaaagagtgactgtatccaaaggtgtagctttgctctatacctcaattgcccctttactaaatcccttcatttatactctcagaaaccagcaggtgaaagaagtcttctgggatgtattacaaaagaatttgtgtttttctaaaagaccattttaa

SEQ ID NO: 162441 - DNA, 1076 bp, Homo sapiens
  Payload ID: 11944
  Gene Symbol: OR6C65
  Gene Name: olfactory receptor, family 6, subfamily C, member 65
  Uniprot ID: A6NJZ3
  ENST ID: ENST00000379665
  CDS Start-End: 100-1038
tgcagaataagagcaatcctagtgtatttgaaatcaaatcacgtattgacattcactcttctttttatctacagacctatcagaattcagaactaagccatgccaaatatgacatcaattagagaattcattcttctgggatttacagataacccagagttacaagttgtgatattcttctttatgttgatcacatacttattgagtgtaagtggaaacatgatcatcattatgttaacattgtcaaatattcatttgaaaactcctatgtatttcttcctcaggaatttctctttcttagaaatttcatttacgacagtcttcattcctagatttctgatcaacattgctacaggagacacaaccatttcctataatgcttccatggcccaagtattttttttaattcttttgggatcaacagaattttttcttctggctgtcatgtcttatgatcgctatgtggctatctgcaaacctctacattatacaaccatcatgagtaacaaagtctgtaattggcttgtaatcagctcctggctggctggttttctcattatttttccccccgtgattatgggcctccaactggatttttgtgactccagcactattgaccatttcatctgtgattcttcccctatgctgctgattgcttgcacagacacacagtttctagagcttatggcatttttgctagcagtattcacactcatggtaactttggccttggtggttctctcctacacactcatccttaaaacaattctgaagattccctctgcccagcaaaggaaaaaggctttttcaacttgttcctcccatatgattgtggtttctgtttcttatgggagttgcatttttatgtgtgtaaaaacatctgcaaaagaaggtatggctttgagcaaaggtgtagcagtgcttaatacctctgttgctcctatgttgaatccctttatttataccttaagaaaccagcaggtgaaacaggcccttagggaattcaccaaaaaaatattatcattgaacaagcaataatgataactaaatctgtggctgaaacacaaataagccaa

SEQ ID NO: 162442 - DNA, 939 bp, Homo sapiens
  Payload ID: 11945
  Gene Symbol: OR6C68
  Gene Name: olfactory receptor, family 6, subfamily C, member 68
  Uniprot ID: A6NDL8
  ENST ID: ENST00000548615
  CDS Start-End: 1-939
atgagaaaacacacagcaataacaacattcatccttctgggactgacagaagatcctcagctgcaggttctgcttttcatgtttctatttatcacctacatgttgagtgtaacagggaaactgaccattatcgccctcaccatgttggatccccacctgaaaacacccatgtatttttttctccaaaatttatctttcttagaaatctcatttacagctacctgtgttccaagattcttatacagtatctcaactgggaacaaaataataacgtataatgcatgtgtcattcagctattttttgcagacctctttggggtaactgaattttttcttttggctaccatgtcatatgatcgctatgtggccatctgcaaacccttgcattatatggcaatcatgagcaacaaagtgtgcaaaacaatggttatttgttgttggatggcagcacttatgattatcctcccaccacttagcttaggttttcatctagaattctgtgactctaatgtcatcaatcattttggctgtgatgcattgcctattctgaaaataccatgctcagacacatcattaattgagcagatggttgtagcctctgctgtattaacctttattatcactcttgtatgtgtagttctgtcctacacatatatcataagaacaattctaaaattcccttctgttcaacaaaagaaaaaagccttttctacctgttcttcacatattactgtggtttccatcacttatggcagctgcatcttcatctatatcaagccatctgcaaaagaagaggtaaacattaataaaggtgtgtcagtgcttatttcatccatatcacctatgttgaattctttcatatatactcttaggaatgagcaagttaaacaagcctttcatgactcactcaaaaaaattgcatttcgtttaaaaaagtaa

SEQ ID NO: 162443 - DNA, 939 bp, Homo sapiens
  Payload ID: 11946
  Gene Symbol: OR6C70
  Gene Name: olfactory receptor, family 6, subfamily C, member 70
  Uniprot ID: A6NIJ9
  ENST ID: ENST00000327335
  CDS Start-End: 1-939
atgaagaatcatacaaggcagatagaatttattcttctgggactgacggataattctcagttacagattgtaattttcttatttctacttctaaattgtgtgttgagcatgatagggaacttcactatcattgccctcattctgctggattcccagctcaagactccaatgtatttcttcctccgtaatttctcttttctggaaatttcattcacaactgcttgcattcccagattcctaatcaccattgttaccagggaaaagaccatttcctgtaatggttgcatatctcagttgtttttttacatattcttgggggttacagaatttttccttctagctgctctgtcctatgatcgctatgttgccatctgcaaacctttgcgttatatgtccatcatgagtaacaaagtttgctaccagcttgtattcagttcttgggtaactggattcctgatcattttcactccactgattttaggtcttaacttggatttctgtgcttcaaatatcattgatcatttcatttgtgacatttctcttatcctacaactttcttgctcagacacacatttactggaactgattgcctttttattagctgtgatgacacttattgtcacattgtttttagtaatcctttcttactcttacatcatcaagacaattctgaaattcccttcagctcagcaaaagaagaaagccttttccacctgctcttctcacatgattgttgtctccatcacttatggtagttgtatgtttatctacataaagccatcagcgaatgaaagagttgctttaagcaaaggagtaactgtgctcaatacttcagttgccccgttgttaaacccatttatttatactctgaggaatcagcaagttaaacaagccttcaaagctgtatttagaaagatattttctgcttcagacaagtaa

SEQ ID NO: 162444 - DNA, 1105 bp, Homo sapiens
  Payload ID: 11947
  Gene Symbol: OR6C74
  Gene Name: olfactory receptor, family 6, subfamily C, member 74
  Uniprot ID: A6NCV1
  ENST ID: ENST00000343870
  CDS Start-End: 91-1029
tggtggatttcaagaaaaatgggtatctcatgcagacctttcctcttctgttctaatttttcttcttatttttaaaaatagaaatcaactatgagaaaccatacaacagtagcaaactttattcttcttggactgacagatgatccacaattacaggtgattatttttcttctcctttttttcacctacatgttgagcatcactgggaatctaaccatcatcactctcaccctactggatttgcatctcaagacacccatgtatttcttcctccgaaatttctcatttttagaagtctcattcacaactgtctacattcccaaatttcttgttagtatggcaacaggtgataagaccatttcttacaacgattgtgcagcacagctgtttttcactattctcttgggggcaactgaattttttcttctggctgccatgtcctatgagcgctatgtggccatctgcaaacccctgcattacaccaccatcatgagcagcagagtttgcagcttgctggtctttgcttcatggatggctggcttcctaataatttttccgccactcctgatgggtctccagcttgatttctgtgcagccaacactgtagatcatttcttctgtgatgtttctcctatactgcagctctcttgcacagacactgacataatagaattaatgatgcttctctcagccattttgacgctcctggttacactggtattagtgattctctcctacacaaatattatcaggactattctgaaaataccttcttctcaacagagaaaaaaagcattttctacatgttcttcccacatggtggtcgtgtccatttcttatggcagctgcatcttcatgtatgtgaaaccctcagcaaaagaaagagtgtcattaaataaagggatagctctgctcagcacttctgttgcccccatgttgaatccctttatttatacactgagaaacaaacaagtaaaagatgtttttaagcacacagtcaaaaagattgaacttttctcaatgaaatgaatcactttaacgatattattaaggttattagtaaaataaaacaagaagagtggagtatgtgcaaagtttttcaatg

SEQ ID NO: 162445 - DNA, 939 bp, Homo sapiens
  Payload ID: 11948
  Gene Symbol: OR6C75
  Gene Name: olfactory receptor, family 6, subfamily C, member 75
  Uniprot ID: A6NL08
  ENST ID: ENST00000343399
  CDS Start-End: 1-939
atgagaaattccacagcagtaacagactttattcttcttggattgacaagtgacccacagtggcaggttgtacttttcatatttcttcttgttacctacatgttaagtgtgactgggaacctgatcattatcaccctcaccctttcagatccccatctgcagactcccatgtatttcttccttcggaacttctcattcctggaaatttcattcacgtctgtctgcattcccagattccttgtcactgttgtgacaggaaacagaaccatttcttataatgggtgtgtggctcagctattttttttcatcttcttgggggtgacagaattttaccttctggctgccatgtcctatgaccgctgcatggccatctgcaaacctcttcattacacaatcatcatgagcaccagagtgtgtacccttcttgtctttagctcctggcttgcagggtttctgatcatctttccaccagtaatgcttctgctgcagttggatttctgtgcctccaatgtaattgatcattttatctgtgactcttctccaatgctgcagctctcttgcacaaacactcactttctagaactcatggcattttttttagctgtggtaacactgatggtcaccttgacattagttattctctcctacacaaacatcatccggacaattctgaaaattccttctatgagtcaaaggaaaaaagccttttccacttgctcctcccatatgatagttgtctccatctcttacagtagctgtatcttcatgtacattaagacttctgccagagaaagggtgactttaagcaaaggagtagctgtgctcaatacctcagtggctcctctcttgaatcccttcatatacacactgagaaataagcaagtgaagcaagccttcaagagcatggtccagaagatgattttttctttaaataaatga

SEQ ID NO: 162446 - DNA, 939 bp, Homo sapiens
  Payload ID: 11949
  Gene Symbol: OR6C76
  Gene Name: olfactory receptor, family 6, subfamily C, member 76
  Uniprot ID: A6NM76
  ENST ID: ENST00000328314
  CDS Start-End: 1-939
atgaaaaatagaacatcagtgacagatttcatccttctgggtctgacggataatccgcaactgcaggttgtgattttctcgttcctatttcttacgtatgtactgagtgttactggaaatctaactatcatctcccttaccctgctggattcccacctgaagacccccatgtatttcttcctcaggaatttctccttggaaatttcatttacttctgtctgtaatcctagatttctgatcagcattctaacaggggacaaatccatatcttataatgcttgtgcagctcagctatttttctttatcttccttggctcaacggagtttttcctcctggcctctatgtcctatgattgctatgtggctatatgtaagcctctgcattatacaaccatcatgagtgacaggatctgttatcagcttataatcagctcttggctggctggtttcttggtaatttttccaccactggccatgggcttacagctggatttctgtgactccaatgtcattgaccactttacctgtgactctgctcctttgctgcaaatctcttgcacagacacaagtactctagagctcatgagctttattttagctctgtttactcttatatccactttgatattagtaattctctcctatacttacatcatcagaactattctgagaatcccctcagcacagcaaagaaaaaaagccttttcaacctgctcctcacatgtgattgttgtctctatctcttatggaagctgcatcttcatgtatgtgaaaacatcagcaaaggaaggagttgctttgacaaaaggagtagctatactcaatacctctgtcgctcctatgctgaatccatttatttacactctaagaaaccagcaggtgaaacaagcatttaaggatgttctgagaaagatttcccacaaaaaaaaaaaacactga

SEQ ID NO: 162447 - DNA, 927 bp, Homo sapiens
  Payload ID: 11950
  Gene Symbol: OR6F1
  Gene Name: olfactory receptor, family 6, subfamily F, member 1
  Uniprot ID: Q8NGZ6
  ENST ID: ENST00000302084
  CDS Start-End: 1-927
atggacacaggcaacaaaactctgccccaggactttctcttactgggctttcctggttctcaaactcttcagctctctctctttatgctttttctggtgatgtacatcctcacagttagtggtaatgtggctatcttgatgttggtgagcacctcccatcagttgcatacccccatgtacttctttctgagcaacctctccttcctggagatttggtataccacagcagcagtgcccaaagcactggccatcctactggggagaagtcagaccatatcatttacaagctgtcttttgcagatgtactttgttttctcattaggctgcacagagtacttcctcctggcagccatggcttatgaccgctgtcttgccatctgctatcctttacactacggagccatcatgagtagcctgctctcagcgcagctggccctgggctcctgggtgtgtggtttcgtggccattgcagtgcccacagccctcatcagtggcctgtccttctgtggcccccgtgccatcaaccacttcttctgtgacattgcaccctggattgccctggcctgcaccaacacacaggcagtagagcttgtggcctttgtgattgctgttgtggttatcctgagttcatgcctcatcacctttgtctcctatgtgtacatcatcagcaccatcctcaggatcccctctgccagtggccggagcaaagccttctccacgtgctcctcgcatctcaccgtggtgctcatttggtatgggtccacagttttccttcacgtccgcacctctatcaaagatgccttggatctgatcaaagctgtccacgtcctgaacactgtggtgactccagttttaaaccccttcatctatacgcttcgtaataaggaagtaagagagactctgctgaagaaatggaagggaaaataa

SEQ ID NO: 162448 - DNA, 1044 bp, Homo sapiens
  Payload ID: 11951
  Gene Symbol: OR6J1
  Gene Name: olfactory receptor, family 6, subfamily J, member 1 (gene/pseudogene)
  Uniprot ID: Q8NGC5
  ENST ID: ENST00000540461
  CDS Start-End: 1-1044
atgggtaactggactgcagcggtgactgagtttgttctgctggggttttccctgagcagggaggtggagctgctgctcctggtgctcctgctgcccacgttcctgctgactcttctggggaacctgctcatcatctccactgtgctgtcctgctcccgcctccacacccccatgtacttcttcttgtgcaacctctctatcctggacatcctcttcacctcagtcatctctccaaaagtgttggccaacttaggatctagggataaaaccatctcctttgccggatgtatcacccagtgctatttctactttttcttgggcacagttgagttcctcctgctgacggtcatgtcctatgaccgttatgccaccatctgctgccccctgcggtacaccaccatcatgagaccttctgtctgcattgggaccgttgtattctcttgggtgggaggcttcctgtctgtgctctttccaaccatcctcatctcccagctgcccttctgtggctccaatatcattaaccacttcttctgtgacagtggacccttgctggccctggcctgtgcagacaccactgccatcgagctgatggattttatgctttcttccatggtcatcctctgctgcatagtcctcgtggcctattcctatacgtacatcatcttgaccatagtgcgcattccttctgcaagtggaaggaagaaggcctttaatacctgtgcttcccacctgaccatagtcatcatttctagtggcatcactgtgtttatctatgtgactccctcccagaaagaatatctggagatcaacaagatccctttggttctgagcagtgtggtgactccattcctcaacccctttatatatactctgaggaatgacacagtgcagggagtcctcagggatgtgtgggtcagggttcgaggagtttttgaaaagaggatgagggcagtgctgagaagcagattatcctccaacaaagaccaccaaggaagggcttgctcttctccaccatgtgtctattctgtaaagctccagtgttag

SEQ ID NO: 162449 - DNA, 975 bp, Homo sapiens
  Payload ID: 11952
  Gene Symbol: OR6K2
  Gene Name: olfactory receptor, family 6, subfamily K, member 2
  Uniprot ID: Q8NGY2
  ENST ID: ENST00000359610
  CDS Start-End: 1-975
atggagagccccaatcgaaccaccattcaggagtttatcttctccgctttcccttattcctgggttaagtctgttgtctgctttgttccactgctcttcatctatgctttcattgttgttggaaacctggtcatcatcacagtggtccagttgaatactcacctccacactcccatgtatacttttatcagtgctctttctttcctggagatttggtataccacagccacaatcccaaagatgctgtctagcctgcttagtgagaggagcatttccttcaatggttgtctcctgcagatgtatttcttccattccaccggcatctgtgaggtgtgtctcttgacagttatggcctttgaccactacctggccatatgcagccctcttcattatccctctatcatgacccccaagctatgtacccaactgactttaagttgctgtgtttgtggctttatcacaccccttcctgagattgcctggatctctacactgccattttgtggttcgaatcaccttgaacatatcttctgtgacttcctcccagtgctgcgtctggcctgcacagacacacgagccatcgtcatgattcaggtagtggatgtcattcatgcagtggagattattacagctgtgatgctcatcttcatgtcctacgatggtattgtggctgtaattctacgtattcattcagctggaggccgccgcacagcattttccacgtgtgtctctcacttcattgtcttttcgctcttctttggcagtgtgactctcatgtacctacgcttctctgccacctactctttgttctgggatatagccattgctctggcctttgcagttttgtctcccttcttcaaccccattatctatagcctgaggaataaagaaataaaagaagctataaaaaagcacataggtcaagctaagatatttttttccgtaagaccagggacctcaagtaagatattttag

SEQ ID NO: 162450 - DNA, 948 bp, Homo sapiens
  Payload ID: 11953
  Gene Symbol: OR6K3
  Gene Name: olfactory receptor, family 6, subfamily K, member 3
  ENST ID: ENST00000368145
  CDS Start-End: 1-948
atggagagcggaaaccaatcaacagtgactgaatttatcttcactggattccctcagcttcaggatggtagtctcctgtacttctttcctttacttttcatctatacttttattatcattgataacttattaatcttctctgctgtaaggctggacacccatctccacaaccccatgtataattttatcagtatattttcctttctggagatctggtacaccacagccaccattcccaagatgctctccaacctcatcagtgaaaagaaggccatctcaatgactggctgcatcttgcagatgtatttcttccactcacttgaaaactcagaggggatcttgctgaccaccatggccattgacagatacgttgccatctgcaaccctcttcgctatcaaatgatcatgaccccccggctctgtgctcaactctctgcaggttcctgcctcttcggtttccttatcctgcttcccgagattgtgatgatttccacactgcctttctgtgggcccaaccaaatccatcagatcttctgtgacttggtccctgtgctaagcctggcctgtacagacacgtccatgattctgattgaggatgtgattcatgctgtgaccatcatcattaccttcctaatcattgccctgtcctatgtaagaattgtcactgtgatattgaggattccctcttctgaagggaggcaaaaggctttttctacctgtgcaggccacctcatggtcttcccgatattctttggcagtgtatcactcatgtacttgcgtttcagcgacacttatccaccagttttggacacagccattgcactgatgtttactgtacttgctccattcttcaatcccatcatttatagcctgagaaacaaggacatgaacaatgcgattaaaaaactgttctgtcttcaaaaagtgttgaacaagcctggaggttaa

SEQ ID NO: 162451 - DNA, 996 bp, Homo sapiens
  Payload ID: 11953
  Gene Symbol: OR6K3
  Gene Name: olfactory receptor, family 6, subfamily K, member 3
  Uniprot ID: Q8NGY3
  ENST ID: ENST00000368146
  CDS Start-End: 1-996
atgtgctggactatgccctctccatttacaggtagctctactagaaatatggagagcggaaaccaatcaacagtgactgaatttatcttcactggattccctcagcttcaggatggtagtctcctgtacttctttcctttacttttcatctatacttttattatcattgataacttattaatcttctctgctgtaaggctggacacccatctccacaaccccatgtataattttatcagtatattttcctttctggagatctggtacaccacagccaccattcccaagatgctctccaacctcatcagtgaaaagaaggccatctcaatgactggctgcatcttgcagatgtatttcttccactcacttgaaaactcagaggggatcttgctgaccaccatggccattgacagatacgttgccatctgcaaccctcttcgctatcaaatgatcatgaccccccggctctgtgctcaactctctgcaggttcctgcctcttcggtttccttatcctgcttcccgagattgtgatgatttccacactgcctttctgtgggcccaaccaaatccatcagatcttctgtgacttggtccctgtgctaagcctggcctgtacagacacgtccatgattctgattgaggatgtgattcatgctgtgaccatcatcattaccttcctaatcattgccctgtcctatgtaagaattgtcactgtgatattgaggattccctcttctgaagggaggcaaaaggctttttctacctgtgcaggccacctcatggtcttcccgatattctttggcagtgtatcactcatgtacttgcgtttcagcgacacttatccaccagttttggacacagccattgcactgatgtttactgtacttgctccattcttcaatcccatcatttatagcctgagaaacaaggacatgaacaatgcgattaaaaaactgttctgtcttcaaaaagtgttgaacaagcctggaggttaa

SEQ ID NO: 162452 - DNA, 1172 bp, Homo sapiens
  Payload ID: 11954
  Gene Symbol: OR6K6
  Gene Name: olfactory receptor, family 6, subfamily K, member 6
  Uniprot ID: Q8NGW6
  ENST ID: ENST00000368144
  CDS Start-End: 97-1128
cagatgattttggcatggaggtaaagcttaagagatatttctaactggtttcttcaggattccagaatcagcttgagtaactcattacagaaaggaatgaagcaatattcagtgggtaatcaacattccaattataggagtctcttgtttccttttctgtgttcacagatgacacagttgacggccagtgggaatcagacaatggtgactgagttcctcttctctatgttcccgcatgcgcacagaggtggcctcttattctttattcccttgcttctcatctacggatttatcctaactggaaacctaataatgttcattgtcatccaggtgggcatggccctgcacacccctttgtatttctttatcagtgtcctctccttcctggagatctgctataccacaaccaccatccccaagatgctgtcctgcctaatcagtgagcagaagagcatttccgtggctggctgcctcctgcagatgtactttttccactcacttggtatcacagaaagctgtgtcctgacagcaatggccattgacaggtacatagctatctgcaatccactccgttacccaaccatcatgattcccaaactttgtatccagctgacagttggatcctgcttttgtggcttcctccttgtgcttcctgagattgcatggatttccaccttgcctttctgtggctccaaccagatccaccagatattctgtgatttcacacctgtgctgagcttggcctgcacagatacattcctagtggtcattgtggatgccatccatgcagcggaaattgtagcctccttcctggtcattgctctatcctacatccggattattatagtgattctgggaatgcactcagctgaaggtcatcacaaggccttttccacctgtgctgctcaccttgctgtgttcttgctattttttggcagtgtggctgtcatgtatttgagattctcagccacctactcagtgttttgggacacagcaattgctgtcacttttgttatccttgctccctttttcaaccccatcatctatagcctgaaaaacaaggacatgaaagaggctattggaaggcttttccactatcagaagagggctggttgggctgggaaatagatacagatcctggagactctaaaaagcctcttggaagagcaaaa

SEQ ID NO: 162453 - DNA, 1053 bp, Homo sapiens
  Payload ID: 11955
  Gene Symbol: OR6M1
  Gene Name: olfactory receptor, family 6, subfamily M, member 1
  Uniprot ID: Q8NGM8
  ENST ID: ENST00000309154
  CDS Start-End: 39-980
ttcttcagggaaaccctgcccaccatatagtagttgtcatgggaaactggagcactgtgactgaaatcaccctaattgccttcccagctctcctggagattcgaatatctctcttcgtggttcttgtggtaacttacacattaacagcaacaggaaacatcaccatcatctccctgatatggattgatcatcgcctgcaaactccaatgtacttcttcctcagtaatttgtcctttctggatatcttatacaccactgtcattaccccaaagttgttggcctgcctcctaggagaagagaaaaccatatcttttgctggttgcatgatccaaacatatttctacttctttctggggacggtggagtttatcctcttggcggtgatgtcctttgaccgctacatggctatctgcgacccactgcactacacggtcatcatgaacagcagggcctgccttctgctggttctgggatgctgggtgggagccttcctgtctgtgttgtttccaaccattgtagtgacaaggctaccttactgtaggaaagaaattaatcatttcttctgtgacattgcccctcttcttcaggtggcctgtataaatactcacctcattgagaagataaactttctcctctctgcccttgtcatcctgagctccctggcattcactactgggtcctacgtgtacataatttctaccatcctgcgtatcccctccacccagggccgtcagaaagctttttctacctgtgcttctcacatcactgttgtctccattgcccacgggagcaacatctttgtgtatgtgagacccaatcagaactcctcactggattatgacaaggtggccgctgtcctcatcacagtggtgacccctctcctgaacccttttatctacagcttgaggaatgagaaggtacaggaagtgttgagagagacagtgaacagaatcatgaccttgatacaaaggaaaacttgacactggtatacactacattaaatacatttctttttttattattttttttaagttccagggtacatgtgcagga

SEQ ID NO: 162454 - DNA, 939 bp, Homo sapiens
  Payload ID: 11956
  Gene Symbol: OR6N1
  Gene Name: olfactory receptor, family 6, subfamily N, member 1
  Uniprot ID: Q8NGY5
  ENST ID: ENST00000335094
  CDS Start-End: 1-939
atggacacagggaactggagccaggtagcagaattcatcatcttgggcttcccccatctccagggtgtccagatttatctcttcctcttgttgcttctcatttacctcatgactgtgttgggaaacctgctgatattcctggtggtctgcctggactcccggcttcacacacccatgtaccactttgtcagcattctctccttctcagagcttggctatacagctgccaccatccctaagatgctggcaaacttgctcagtgagaaaaagaccatttcattctctgggtgtctcctgcagatctatttctttcactcccttggagcgactgagtgctatctcctgacagctatggcctacgataggtatttagccatctgccggcccctccactacccaaccctcatgaccccaacactttgtgcagagattgccattggctgttggttgggaggcttggctgggccagtagttgaaatttccttgatttcacgcctcccattctgtggccccaatcgcattcagcacgtcttttgtgacttccctcctgtgctgagtttggcttgcactgatacgtctataaatgtcctagtagattttgttataaattcctgcaagatcctagccaccttcctgctgatcctctgctcctatgtgcagatcatctgcacagtgctcagaattccctcagctgccggcaagaggaaggccatctccacgtgtgcctcccacttcactgtggttctcatcttctatgggagcatcctttccatgtatgtgcagctgaagaagagctactcactggactatgaccaggccctggcagtggtctactcagtgctcacacccttcctcaaccccttcatctacagcttgcgcaacaaggagatcaaggaggctgtgaggaggcagctaaagagaattgggatattggcatga

SEQ ID NO: 162455 - DNA, 954 bp, Homo sapiens
  Payload ID: 11957
  Gene Symbol: OR6N2
  Gene Name: olfactory receptor, family 6, subfamily N, member 2
  Uniprot ID: Q8NGY6
  ENST ID: ENST00000339258
  CDS Start-End: 1-954
atggatcaatacaaccattcaagcctggctgaatttgtgttccttggctttgccagtgtgggctatgtcaggggctggctttttgtcctgctgctattggcatacctgttcaccatctgtggtaacatgctcatcttctcagtcatccgactggatgcagctctgcacacacctatgtaccactttgtcagtgttctttccttcttggagttgtggtatacagctaccactatccctaagatgttgtctaatattctcagtgagaagaaaaccatttcttttgcaggatgcctccttcagacctacttcttccactccttgggagcgtctgaatgctaccttcttacagccatggcctatgatagatacctggccatttgtcggcccctccactaccctataattatgaccaccacactctgtgccaagatggctgctgcttgttggacttgtggcttcctgtgtcccatttctgaggtcatccttgcctcccagctcccattttgtgcttacaatgaaatccaacacattttctgtgactttccacctttgctgagcttggcctgcaaggacacatctgctaacattctggtggactttgccattaatgctttcataattcttatcactttcttctttatcatgatttcttatgcaaggatcattggggctgtgctgaagataaaaacagcatcaggaagaaagaaggccttttctacctgtgcctcacatcttgctgtggtcctcatcttctttgggagcatcatcttcatgtatgtgcggctaaagaagagctattccctgacccttgaccgaacacttgctatagtttactccgtactaacaccaatggtcaatccaattatctacagtcttcgtaacaaggaaatcattaaagctatcaagaggaccatcttccagaagggagataaagctagtcttgctcatctttga

SEQ ID NO: 162456 - DNA, 954 bp, Homo sapiens
  Payload ID: 11958
  Gene Symbol: OR6P1
  Gene Name: olfactory receptor, family 6, subfamily P, member 1
  Uniprot ID: Q8NGX9
  ENST ID: ENST00000334632
  CDS Start-End: 1-954
atgagaaatttgagtggaggccatgtcgaggagtttgtcttggtgggtttccctaccacgcctcccctccagctgctcctctttgtccttttttttgcaatttaccttctgacattgttggagaatgcacttattgtcttcacaatatggcttgctccaagccttcatcgtcccatgtactttttccttggccatctctctttcctggagctatggtacatcaatgtcaccattcctcggctcttggcagcctttcttacccaggatggtagagtctcctacgtaggttgcatgacccaactgtacttctttattgccttagcctgtactgaatgtgtgctgttggcagttatggcctatgatcgctacctggccatctgtggacccctcctttaccctagtctcatgccttccagtctggccactcgccttgctgctgcctcttggggcagtggcttcttcagctccatgatgaagcttctttttatttcccaattgtcctactgtggacccaacattatcaaccactttttctgtgatatttccccactactcaacctcacctgctctgacaaggagcaagcagagctagtagacttccttctggccctggtgatgattctactccctctattggctgtggtttcatcatacactgccatcattgcagccatcctgaggatccctacgtccaggggacgccacaaagccttttccacttgtgccgctcatctggcagtggttgttatctactactcctccactctcttcacctatgcacggccccgggccatgtacaccttcaaccacaacaagattatctctgtgctctacactatcattgtaccattcttcaacccagccatctactgcctgaggaacaaggaggtgaaggaggccttcaggaagacagtgatgggcagatgtcactatcctagggatgttcaggactga

SEQ ID NO: 162457 - DNA, 954 bp, Homo sapiens
  Payload ID: 11959
  Gene Symbol: OR6Q1
  Gene Name: olfactory receptor, family 6, subfamily Q, member 1 (gene/pseudogene)
  Uniprot ID: Q8NGQ2
  ENST ID: ENST00000623976
  CDS Start-End: 1-954
atgcaaccatataccaaaaactggacccaggtaactgaatttgtcatgatgggctttgctggcatccatgaagcacacctcctcttcttcatactcttcctcaccatgtacctgttcaccttggtggagaatttggccatcattttagtggtgggtttggaccaccgactacggagacccatgtatttcttcctgacacacttgtcctgccttgaaatctggtacacttctgttacagtgcccaagatgctggctggttttattggggtggatggtggcaagaatatctcttatgctgattgcctatcccagctcttcatcttcacctttcttggggcaactgagtgtttcctactggctgccatggcctatgatcgttatgtggccatttgtatgcctctccactatggggcttttgtgtcctggggcacctgcatccgtctggcagctgcctgttggctggtaggtttcctcacacccatcttgccaatctacctcttgtctcagctaacattttatggcccaaatgtcattgaccatttctcctgtgatgcctcacccttgctagccttgtcgtgctcagatgtcacttggaaggagactgtggatttcctggtgtctctggctgtgctactggcctcctctatggtcattgctgtgtcctatggcaacatcgtctggacactgctgcacatccgctcagctgctgagcgctggaaggccttctctacctgtgcagctcacctgactgtggtgagcctcttctatggcactcttttctttatgtatgtccagaccaaggtgacctcctccatcaacttcaacaaggtggtatctgtcttctactctgttgtcacgcccatgctcaatcctctcatctacagtcttaggaacaaggaagtgaagggagctctgggtcgagtcttttctctcaacttttggaagggacagtga

SEQ ID NO: 162458 - DNA, 996 bp, Homo sapiens
  Payload ID: 11960
  Gene Symbol: OR6S1
  Gene Name: olfactory receptor, family 6, subfamily S, member 1
  Uniprot ID: Q8NH40
  ENST ID: ENST00000320704
  CDS Start-End: 1-996
atgagtcctgatgggaaccacagtagtgatccaacagagttcgtcctggcagggctcccaaatctcaacagcgcaagagtggaattattttctgtgtttcttcttgtctatctcctgaatctgacaggcaatgtgttgattgtgggggtggtaagggctgatactcgactacagacccctatgtacttctttctgggtaacctgtcctgcctagagatactgctcacttctgtcatcattccaaagatgctgagcaatttcctctcaaggcaacacactatttcctttgctgcatgtatcacccaattctatttctacttctttctcggggcctccgagttcttactgttggctgtcatgtctgcggatcgctacctggccatctgtcatcctctgcgctaccccttgctcatgagtggggctgtgtgctttcgtgtggccttggcctgctgggtggggggactcgtccctgtgcttggtcccacagtggctgtggccttgcttcctttctgtaagcagggtgctgtggtacagcacttcttctgcgacagtggcccactgctccgcctggcttgcaccaacaccaagaagctggaggagactgactttgtcctggcctccctcgtcattgtatcttccttgctgatcactgctgtgtcctacggcctcattgtgctggcagtcctgagcatcccctctgcttcaggccgtcagaaggccttctctacctgtacctcccacttgatagtggtgaccctcttctatggaagtgccatttttctctatgtgcggccatcgcagagtggttctgtggacactaactgggcagtgacagtaataacgacatttgtgacaccactgttgaatccattcatctatgccttacgtaatgagcaagtcaaggaagctttgaaggacatgtttaggaaggtagtggcaggcgttttagggaatcttttacttgataaatgtctcagtgagaaagcagtaaagtaa

SEQ ID NO: 162459 - DNA, 1089 bp, Homo sapiens
  Payload ID: 11961
  Gene Symbol: OR6T1
  Gene Name: olfactory receptor, family 6, subfamily T, member 1
  Uniprot ID: Q8NGN1
  ENST ID: ENST00000321252
  CDS Start-End: 36-1007
gagttctgtttcatttcccctgcaggtgactgaagatgaaccctgaaaactggactcaggtaacaagctttgtccttctgggtttccccagtagccacctcatacagttcctggtgttcctggggttaatggtgacctacattgtaacagccacaggcaagctgctaattattgtgctcagctggatagaccaacgcctgcacatacagatgtacttcttcctgcggaatttctccttcctggagctgttgctggtaactgttgtggttcccaagatgcttgtcgtcatcctcacgggggatcacaccatctcatttgtcagctgcatcatccagtcctacctctacttctttctaggcaccactgacttcttcctcttggccgtcatgtctctggatcgttacctggcaatctgccgaccactccgctatgagaccctgatgaatggccatgtctgttcccaactagtgctggcctcctggctagctggattcctctgggtcctttgccccactgtcctcatggccagcctgcctttctgtggccccaatggtattgaccacttctttcgtgacagttggcccttgctcaggctttcttgtggggacacccacctgctgaaactggtggctttcatgctctctacgttggtgttactgggctcactggctctgacctcagtttcctatgcctgcattcttgccactgttctcagggcccctacagctgctgagcgaaggaaagcgttttccacttgcgcctcgcatcttacagtggtggtcatcatctatggcagttccatctttctctacattcgtatgtcagaggctcagtccaaactgctcaacaaaggtgcctccgtcctgagctgcatcatcacacccctcttgaacccattcatcttcactctccgcaatgacaaggtgcagcaagcactgagagaagccttggggtggcccaggctcactgctgtgatgaaactgagggtcacaagtcaaaggaaatgatcttattaaatgggagattaaatgtttattgaaaattttttaaatgtgcaagaagtttaagggatgtaggcaacactgttca

SEQ ID NO: 162460 - DNA, 1028 bp, Homo sapiens
  Payload ID: 11962
  Gene Symbol: OR6V1
  Gene Name: olfactory receptor, family 6, subfamily V, member 1
  Uniprot ID: Q8N148
  ENST ID: ENST00000418316
  CDS Start-End: 22-963
cagggccccatactgtggatcatggcaaatctgagccagccctccgaatttgtcctcttgggcttctcctcctttggtgagctgcaggcccttctgtatggccccttcctcatgctttatcttctcgccttcatgggaaacaccatcatcatagttatggtcatagctgacacccacctacatacacccatgtacttcttcctgggcaatttttccctgctggagatcttggtaaccatgactgcagtgcccaggatgctctcagacctgttggtcccccacaaagtcattaccttcactggctgcatggtccagttctacttccacttttccctggggtccacctccttcctcatcctgacagacatggcccttgatcgctttgtggccatctgccacccactgcgctatggcactctgatgagccgggctatgtgtgtccagctggctggggctgcctgggcagctcctttcctagccatggtacccactgtcctctcccgagctcatcttgattactgccatggcgacgtcatcaaccacttcttctgtgacaatgaacctctcctgcagttgtcatgctctgacactcgcctgttggaattctgggactttctgatggccttgacctttgtcctcagctccttcctggtgaccctcatctcctatggctacatagtgaccactgtgctgcggatcccctctgccagcagctgccagaaggctttctccacttgcgggtctcacctcacactggtcttcatcggctacagtagtaccatctttctgtatgtcaggcctggcaaagctcactctgtgcaagtcaggaaggtcgtggccttggtgacttcagttctcaccccctttctcaatccctttatccttaccttctgcaatcagacagttaaaacagtgctacaggggcagatgcagaggctgaaaggcctttgcaaggcacaatgatgagcccagggcccaggggaacctggcctgcctccattgagcagttctgtggggagggagacctc

SEQ ID NO: 162461 - DNA, 1028 bp, Homo sapiens; identical to SEQ ID NO: 162460
  Payload ID: 11962
  Gene Symbol: OR6V1
  Gene Name: olfactory receptor, family 6, subfamily V, member 1
  Uniprot ID: Q8N148
  ENST ID: ENST00000615548
  CDS Start-End: 22-963

SEQ ID NO: 162462 - DNA, 1058 bp, Homo sapiens
  Payload ID: 11963
  Gene Symbol: OR6X1
  Gene Name: olfactory receptor, family 6, subfamily X, member 1
  Uniprot ID: Q8NH79
  ENST ID: ENST00000327930
  CDS Start-End: 28-966
gcttgtctttctagggtatcaagggacatgagaaatggcacagtaatcacagaattcatcctgctaggctttcctgttatccaaggcctacaaacacctctctttattgcaatctttctcacctacatattaacccttgcaggcaatgggcttattattgccactgtgtgggctgagcccaggctacaaattccaatgtacttcttcctttgtaacttgtctttcttagaaatctggtacaccaccacagtcatccccaaactgctaggaacctttgtagtggcaagaacagtaatctgcatgtcctgctgcctgctgcaggccttcttccacttcttcgtgggcaccaccgagttcttgatcctcactatcatgtcttttgaccgctacctcaccatctgcaatccccttcaccaccccaccatcatgaccagcaaactctgcctgcagctggccctgagctcctgggtggtgggcttcaccattgtcttttgtcagacgatgctgctcatccagttgccattctgtggcaataatgttatcagtcatttctactgtgatgttgggcccagtttgaaagccgcctgcatagacaccagcattttggaactcctgggcgtcatagcaaccatccttgtgatcccagggtcacttctctttaatatgatttcttatatctacattctgtccgcaatcctacgaattccttcagccactggccaccaaaagactttctctacctgtgcctcgcacctgacagttgtctccctgctctacggggctgttctgttcatgtacctaagacccacagcacactcctcctttaagattaataaggtggtgtctgtgctaaatactatcctcaccccccttctgaatccctttatttatactattagaaacaaggaggtgaagggagccttaagaaaggcaatgacttgcccaaagactggtcatgcaaagtaaaacatgcaacacatcaaagtgagcttaatgcagataaaaacaatgaaagttgagagaggattttggagaagtttggtaaaacaggctccccc

SEQ ID NO: 162463 - DNA, 978 bp, Homo sapiens
  Payload ID: 11964
  Gene Symbol: OR6Y1
  Gene Name: olfactory receptor, family 6, subfamily Y, member 1
  Uniprot ID: Q8NGX8
  ENST ID: ENST00000302617
  CDS Start-End: 1-978
atgaccaccataattctggaagtagataatcatacagtgacaacacgtttcattcttctggggtttccaacacgaccagccttccagcttctctttttctccattttcctggcaacctatctgctgacactgctggagaatcttcttatcatcttagctatccacagtgatgggcagctgcataagcccatgtacttcttcttgagccacctctccttcctggagatgtggtatgtcacagtcatcagccccaagatgcttgttgacttcctcagtcatgacaagagtatttccttcaatggctgcatgactcaactttacttttttgtgacctttgtctgcactgagtacatccttcttgctatcatggcctttgaccgctatgtagccatttgtaatccactacgctacccagtcatcatgaccaaccagctctgtggcacactggctggaggatgctggttctgtggactcatgactgccatgattaagatggtttttatagcacaacttcactactgtggcatgcctcagatcaatcactacttttgtgatatctctccactccttaacgtctcctgtgaggatgcctcacaggctgagatggtggacttcttcttggccctcatggtcattgctattcctctttgtgttgtggtggcatcctacgctgctatccttgccaccatcctcaggatcccttctgctcagggccgccaaaaggcattctccacctgtgcctcccacctgaccgtcgtaattctcttctattccatgacacttttcacctatgcccgtcccaaactcatgtatgcctacaattccaacaaagtggtatctgttctctacactgtcattgttccactcctcaaccccatcatttactgtctgaggaaccatgaagtaaaggcagccctcagaaagaccatacattgcagaggaagtgggccccagggaaatggggctttcagtagttaa

SEQ ID NO: 162464 - DNA, 930 bp, Homo sapiens
  Payload ID: 11965
  Gene Symbol: OR7A10
  Gene Name: olfactory receptor, family 7, subfamily A, member 10
  Uniprot ID: O76100
  ENST ID: ENST00000248058
  CDS Start-End: 1-930
atgaaatcatggaacaatacaataattttagaatttcttctcctgggaatttcagaggaaccagaattgcaggccttcctctttgggctgttcctgtccatgtacctggtcactgtgctcgggaacctgctcatcatcctggccacaatctcagactcccacctccacacccccatgtacttcttcctctccaacctgtccttcgtagacatctgttttgtctctaccactgtcccgaagatgctggtgaacatccagacacacaacaaagtcatcacctatgcaggctgcatcacccagatgtgctttttcttactctttgtaggattggataacttccttctgaccgtgatggcctatgaccggtttgtggccatctgtcaccctctgcactacatggtcattatgaaccctcaactctgtggactgctggttctggcatcctggatcatgagtgttctgaattccatgttacaaagcttaatggtgttgccactgcccttttgtacacacatggaaatccctcattttttctgtgaaattaatcaggtggtccaccttgcctgttctgacacctttcttaatgacatagtgatgtattttgcagtagcgctgctgggcggtggtcccctcactgggatcctgtactcttactctaagatagtttcctccatacgtgcaatctcatcagctcaggggaagtataaggcattttccacctgtgcatctcacctctcagttgtctccttattttatggtacatgcttaggggtgtaccttagttctgctgccacccacaattcacacacaggtgctgcagcctcagtgatgtacactgtggtcacccccatgctgaaccccttcatctacagtctgaggaataaacacataaagggtgctatgaaaacattcttcagaggaaagcaatag

SEQ ID NO: 162465 - DNA, 1027 bp, Homo sapiens
  Payload ID: 11966
  Gene Symbol: OR7A17
  Gene Name: olfactory receptor, family 7, subfamily A, member 17
  Uniprot ID: O14581
  ENST ID: ENST00000327462
  CDS Start-End: 98-1027
ggttcagaccagcgttggcaacagagtgagagaccctgtctatgttaataaataaataaataaataaataaataaataaataaatagaaaaaaaaagatggaaccagagaatgacacagggatttcagaatttgttcttctgggactttctgaggaaccagaattgcagcccttcctctttgggctgtttctgtccatgtacctggtcactgtgctcgggaatctgctcatcatcctggccacaatctcagactcccacctccacacccccatgtacttcttcctctccaacctgtcctttgcagacatctgtttcatctccactacaatcccaaagatgctcattaacatccagacacagagcagagtcatcacctatgcaggctgcatcacccagatgtgcttttttgtactttttggagggttagacagcttactcctggctgtgatggcctatgatcggtttgtggccatctgtcatcctctgcactacacagtcatcatgaaccctcggctctgtggactcctggttctggcatcctggatgattgctgccctgaattccttgtcacaaagcttaatggtattgtggctgtccttctgcacagacttggaaatcccccactttttctgtgaacttaatcaggtcatccaccttgcctgttctgacacctttcttaatgacatggggatgtattttgcagcagggctgctggctggtggtccccttgtggggatcctttgctcttactctaagatagtttcctccatacgtgcaatctcatcagctcaggggaagtacaaggcattttccacctgtgcatcacacctctcagttgtctctttattttgttgtacgggcctaggtgtgtaccttacttctgctgcaacccacaactcacacacaagtgcaacagcctcagtgatgtacactgtggccacccccatgctgaacccctttatctacagtctgaggaataaagacataaagagggctctgaaaatgtccttcagaggaaagcaataa

SEQ ID NO: 162466 - DNA, 1048 bp, Homo sapiens
  Payload ID: 11967
  Gene Symbol: OR7A5
  Gene Name: olfactory receptor, family 7, subfamily A, member 5
  Uniprot ID: Q15622
  ENST ID: ENST00000322301
  CDS Start-End: 89-1048
agtctccaccatcaatcatccagtgaggaatttgcacttacacaaggaactcttcctcggagagatcccctcctgtcacttcaatcaaatggaaccaggaaatgatacacaaatttcagaatttcttcttctgggattttcacaagaacctggactgcaacccttcctctttgggctgttcctgtccatgtacctggtcactgtgctcgggaacctgctcatcatcctggccacaatctcagactcccacctccacacccccatgtacttcttcctctccaacctgtcctttgctgacatttgtgttacttccaccaccattccaaaaatgctgatgaacatccagacacagaacaaagtcatcacctacatagcctgcctcatgcagatgtattttttcatactctttgctggatttgaaaacttcctcctgtccgtgatggcctatgaccggtttgtggccatctgtcaccccctgcactacatggtcattatgaaccctcacctctgtggactgctggttctagcatcctggaccatgagtgctctgtattccttgctacaaatcttaatggtagtacggctgtccttctgcacagccttagaaatcccccactttttctgtgaacttaatcaggtcatccaacttgcttgttctgatagctttcttaatcacatggtgatatattttacagttgcgctgctgggtggaggtcccctgactgggatcctttactcttactctaagataatttcttccatacatgcaatctcatcagctcaggggaagtacaaggcattttccacctgtgcatctcacctctcagttgtctccttattttatggtgcaatcctaggggtgtaccttagttctgctgccacccgcaactcacactcaagtgcaacagcctcagtgatgtacactgtggtcacccccatgctgaacccctttatctatagtctgaggaataaagacataaagagggctctgggaatacatttgttgtggggaacaatgaaagggcaatttttcaagaagtgcccatga

SEQ ID NO: 162467 - DNA, 1029 bp, Homo sapiens
  Payload ID: 11967
  Gene Symbol: OR7A5
  Gene Name: olfactory receptor, family 7, subfamily A, member 5
  Uniprot ID: Q15622
  ENST ID: ENST00000594432
  CDS Start-End: 59-1018
tgcatgcctgtctcgtttccctctttctctctctctctctgatagtcacttcaatcaaatggaaccaggaaatgatacacaaatttcagaatttcttcttctgggattttcacaagaacctggactgcaacccttcctctttgggctgttcctgtccatgtacctggtcactgtgctcgggaacctgctcatcatcctggccacaatctcagactcccacctccacacccccatgtacttcttcctctccaacctgtcctttgctgacatttgtgttacttccaccaccattccaaaaatgctgatgaacatccagacacagaacaaagtcatcacctacatagcctgcctcatgcagatgtattttttcatactctttgctggatttgaaaacttcctcctgtccgtgatggcctatgaccggtttgtggccatctgtcaccccctgcactacatggtcattatgaaccctcacctctgtggactgctggttctagcatcctggaccatgagtgctctgtattccttgctacaaatcttaatggtagtacggctgtccttctgcacagccttagaaatcccccactttttctgtgaacttaatcaggtcatccaacttgcttgttctgatagctttcttaatcacatggtgatatattttacagttgcgctgctgggtggaggtcccctgactgggatcctttactcttactctaagataatttcttccatacatgcaatctcatcagctcaggggaagtacaaggcattttccacctgtgcatctcacctctcagttgtctccttattttatggtgcaatcctaggggtgtaccttagttctgctgccacccgcaactcacactcaagtgcaacagcctcagtgatgtacactgtggtcacccccatgctgaacccctttatctatagtctgaggaataaagacataaagagggctctgggaatacatttgttgtggggaacaatgaaagggcaatttttcaagaagtgcccatgattgcagggctc

SEQ ID NO: 162468 - DNA, 1066 bp, Homo sapiens
  Payload ID: 11968
  Gene Symbol: OR7C1
  Gene Name: olfactory receptor, family 7, subfamily C, member 1
  Uniprot ID: O76099
  ENST ID: ENST00000248073
  CDS Start-End: 76-1038
ccaaatttccatgttgccagtgtgttgataattgactgttgcttttttctctcttgtggcagttattttatccccatggaaacaggaaatcaaacacatgcccaagaatttctcctcctgggattttcagcaacgtcagagattcagttcattctctttgggctgttcctctccatgtacctagtcactttcaccgggaacctgctcatcatcctggccatatgctcagactcccacctccacacccccatgtacttcttcctctccaacctgtcttttgctgacctctgttttacctccacgactgtcccaaagatgttactgaatatactgacacagaacaaattcataacatatgcaggctgtctcagtcagattttttttttcacttcatttggatgcctggacaatttactcttgaccgtgatggcctatgaccgcttcgtggccgtctgtcaccccctgcactatacggtcatcatgaacccccagctctgtggactgctggttctggggtcctggtgcatcagtgtcatgggttccctgctcgagaccttgactgttttgaggctgtccttctgcaccgaaatggaaattccacactttttttgtgatctacttgaagtcctgaagctcgcctgttctgacaccttcattaataacgtggtgatatactttgcaactggcgtcctgggtgtgatttccttcactggaatatttttctcttactataaaattgttttctctatactgaggatttcctcagctgggagaaagcacaaagcgttttccacctgtggttcccacctctcagtggtcaccttgttctatggcacgggctttggggtctatctcagttctgcagccacaccatcttctaggacaagtctggtggcctcagtgatgtacaccatggtcacccccatgctgaaccccttcatctacagcctgaggaacacggacatgaagagggccctggggagactcctcagtagggcaacattttttaatggtgacatcactgcaggactttcataagtagcaaggcttggaccattgggaggca

SEQ ID NO: 162469 - DNA, 960 bp, Homo sapiens
  Payload ID: 11969
  Gene Symbol: OR7C2
  Gene Name: olfactory receptor, family 7, subfamily C, member 2
  Uniprot ID: O60412
  ENST ID: ENST00000248072
  CDS Start-End: 1-960
atggaaagaggaaaccaaacagaagttggaaactttctcctcctgggattcgcagaggactctgacatgcagcttctcctccatgggctgttcctctccatgtacctggttaccatcatcggaaacctgctcatcatcctgaccatcagttcagactcccacctccacacccccatgtacttcttcctctccaacctgtcctttgctgacatctgtttcacatccacgactgtcccaaagatgctggtgaatatccaaacacaaagcaaaatgatcacttttgcaggctgcctcactcagatattttttttcattgcatttggatgcctggacaatttgctcctgaccatgacggcctatgaccgcttcgtggccatctgttaccccctgcactacacggtcatcatgaacccccggctctgtggactgctggttctggggtcctggtgcatcagtgtcatgggttccttgcttgagaccttgaccattttgaggctgtccttctgcacaaatatggaaattccgcactttttttgtgatccttccgaagtcctgaagctggcctgttctgacaccttcatcaataacatcgtgatgtattttgtgaccattgtcctgggtgtttttcctctctgtggaatcctattctcttattctcagattttctcctccgtcctaagagtatctgccagaggccagcacaaagccttttccacctgtggttcccacctctcagtggtcagcttgttctatggcactggccttggggtctatctcagttctgcagttacaccaccttctaggacaagtctggcagcctcggtgatgtacaccatggtcacccccatgctgaaccccttcatctacagcctgaggaacaaggacatgaaggggtcactggggagactcctcctcagggcaacgtctctcaaagaggggaccattgctaagctctcatga

SEQ ID NO: 162470 - DNA, 3224 bp, Homo sapiens
  Payload ID: 11970
  Gene Symbol: OR7D2
  Gene Name: olfactory receptor, family 7, subfamily D, member 2
  Uniprot ID: Q96RA2
  ENST ID: ENST00000344248
  CDS Start-End: 189-1127
ttattttttgagacagttctccctctattgcccaggctggagtgcagtggtgtaaacatagctccctgcagttgcaaattcctgggctcaagtgatccttccatctcagcctcccgagtagctgggactacaggtgtccaccaccatgcctggctaatgacctcttcttttgtagatacatcagctacatggaagcaggaaaccaaacaggatttttagagtttatccttctcggactctctgaggatccagaactacagccgttcatatttgggctgttcctgtccatgtacctggtgacggtgctgggaaacctgctcatcatcctggccatcagctctgactcccacctccacacccccatgtacttcttcctctccaacctgtcctgggttgacatctgtttcagcacttgcatcgtccccaagatgctggtgaacatccagaccgagaacaaagccatctcctacatggactgcctcacacaggtctatttctccatgttttttcctattctggacacgctactcctgaccgtgatggcctatgaccggtttgtggctgtctgccaccctctgcactatatgatcatcatgaacccccacctctgtggcctcctggtttttgtcacctggctcattggtgtcatgacatccctcctccatatttctctgatgatgcatctaatcttctgtaaagattttgaaattccacattttttctgcgaactgacgtacatcctccagctggcctgctctgataccttcctgaacagcacgttgatatactttatgacgggtgtgctgggcgtttttcccctccttgggatcattttctcttattcacgaattgcttcatccataaggaagatgtcctcatctgggggaaaacaaaaagcactttccacctgtgggtctcacctctccgtcgtttctttattttatgggacaggcattggggtccacttcacttctgcggtgactcactcttcccagaaaatctccgtggcctcggtgatgtacactgtggtcacccccatgttgaaccccttcatctacagcctgaggaacaaggatgtgaagggagccctggggagtctcctcagcagggcagcctcttgtttgtgatggatcccttggccccaggactaagaagttttgtgagcaccaatggcaaaaatgttttattttgaaattcttactctttaaaattaaaaacatttttttatactttgagagtacaaatgcagatttcttaacatgcatttgcataagggtgaagtctgagcttttggcgtaccaattacctgaatagtgaacataaggcacttttttttcttttttgagacggagtctcactctgtctcccaggctggagtgcagtggagtgatctcggctcactgcaacctccgcctcccgggttcaagtgattcttctgtctcagcctcctgagtagctgagattacaggtgtgtgccacccatgccttttagtagagacggggtttcaccatcttggccaggctggtctcgaactcctgaccttgtgatccacctgccttggcctctcaaagtgctgggattacaggtgtgagccaccacgcccggccaaggcagtttttaaactctcactcccctctcaccttttgcagtctccagtgtccattattctgttataatgcccatgcgtatacattgtttagctcccaattataagtgagatcatgcagcatttgactttgtttctttactaccttacttaagagaatggcttccagtcccatcgatgttgctgcaaaagacatgatttcatccttttttatggctgagtagtactccattgtatatatcctcgatatctatatagatatagacatatgtagatacataccatgttttctttttttaaaaaaatttatttttatgtcagtagtttttggggtacatgtggtttttcattacacggatgagttctttagtggtgacttctgagtttttagtgtacccgtcacccaagtggtagtagtctcttattcctcacccccctcccaacctttctcccttcaagtcaccaaagttcattatattgttcatatccctttgtgtcctcatagcttagctcccacttataactgagaacatacgatatgttcatatggatcttatgtatgttggttgaacatacaaacaagtccaggtttttcattcctgagttacttcacctagagtaatgacctccagttccatccaagttgctacaaaagacattatttggttcctttttatggataagtagtattccatgctgtacatataccacaatctttatcactcattggttgatgggcacttaggttggttccatgcctttgtaattgctaattatgttgctataaacatgcaggtgtatgtgtctttttcacataatgactttgtttcctttgggtagatacccagtagtggaactgctggactgaaaggtagttctacttttagttcttttttttgttttttttttaagacagagtctcactctgttgcccaggctggagtgcagtggcgcgatctcatctcactgcaacctccacctcccaggttcaagcgattctcctgcctcaacctcctgagtagctgggactacaggcacctgccaccccacccagctaattcttctatttttagtagagacagggtttcaccatgttggccaggctggtcttgaactcctgacctcaggtgatacgcccacctcggcctcccaaagtgctgggattacaggtgtgagccactgtgcctggccttctagttctttaagataccactttaaaaaaagtccagtcctccattgatggacacgtaggttgattccatatctttgctaatgtgaatagtgccgtgataaacatgggggtgtaagttaacaattaatctccaagtaatttccttgatggcacttctgtcctatgtgctattcaaaaattgtgtccttgatcatcgttcttaattctccattagtgagttctgaacttgggtttgaagcatttgctatagctttgttatctcaagtggtggcacagagttcttaagctattgattgttcactgactttatttctatgtgtttgcatgtgggtttttgttgtttgtgtgttcgatcatgaacagatcaacagtgtttatttgttttcctactggatgaagtatgattaaaatacgtatttaaatat

SEQ ID NO: 162471 - DNA, 1022 bp, Homo sapiens
  Payload ID: 11971
  Gene Symbol: OR7D4
  Gene Name: olfactory receptor, family 7, subfamily D, member 4
  Uniprot ID: Q8NG98
  ENST ID: ENST00000308682
  CDS Start-End: 35-973
tttttcctccttccccagcagacacaacagctacatggaagcagaaaaccttacagaattatcaaaatttctcctcctgggactctcagatgatcctgaactgcagcccgtcctctttgggctgttcctgtccatgtacctggtcacggtgctggggaacctgctcatcattctggccgtcagctctgactcccacctccacacccccatgtacttcttcctctccaacctgtcctttgttgacatctgtttcatctccaccacagtccccaagatgctagtgagcatccaggcacggagcaaagacatctcctacatggggtgcctcactcaggtgtattttttaatgatgtttgctggaatggatactttcctactggccgtgatggcctatgaccggtttgtggccatctgccacccactgcactacacggtcatcatgaacccctgcctctgtggcctcctggttctggcatcttggttcatcattttctggttctccctggttcatattctactgatgaagaggttgaccttctccacaggcactgagattccgcatttcttctgtgaaccggctcaggtcctcaaggtggcctgctctaacaccctcctcaataacattgtcttgtatgtggccacggcactgctgggtgtgtttcctgtagctgggatcctcttctcctactctcagattgtctcctccttaatgggaatgtcctccaccaagggcaagtacaaagccttttccacctgtggatctcacctctgtgtggtctccttgttctatggaacaggacttggggtctatctgagttctgctgtgacccattcttcccagagcagctccaccgcctcagtgatgtacgccatggtcacccccatgctgaaccccttcatctacagcctgaggaacaaggatgtgaagggggccctggaaagactcctcagcagggccgactcttgtccatgacaaatcagggcctcagaactaagaggacacactgcgtacccctaaggca

SEQ ID NO: 162472 - DNA, 1550 bp, Homo sapiens
  Payload ID: 11972
  Gene Symbol: OR7E24
  Gene Name: olfactory receptor, family 7, subfamily E, member 24
  Uniprot ID: Q6IFN5
  ENST ID: ENST00000456448
  CDS Start-End: 115-1134
tgggtttgtcacaactgagaactattgctgagggtgtataatcctatgtgaaaacttaatttcttaattgcttgtatccaaaatatagacacagtgctagatgctggtttacttatgtcctattttccaattctctttttttttttcctcaaaaggtgtccgagctacacagagccacagaatctcacaggtgtctcagaattcctcctcctgggactctcagaggatccagaactgcagccggtcctcgctgggctgttcctgtccatgtacctggtcacggtgctggggaacctgctcatcatcctggctgtcagctctgactcccacctccacacccccatgtacttcttcctctccaacctgtccttggctgacatcggtttcacctccaccacggtccccaagatgattgtggacatgcaaactcacagcagagtcatctcctatgaaggctgcctgactcagatgtctttttttgtcctttttgcatgtatggatgacatgctcctgagtgtgatggcctatgaccggtttgtggccatctgtcaccccctgcactaccgaatcatcatgaacccacgcctctgtggcttcttaatcttgttgtctttttttattagtcttttggactcccagttgcacaatttgattatgttacagctcacctgcttcaaggatgtggacatttctaatttcttctgtgacccttctcaactcctccaccttaggtgttccgacaccttcatcaatgaaatggtcatatatttcatgggtgccatatttggctgtctccctatctcagggatccttttctcttactataaaattgtttcccccattctgagagttccaacatcagatgggaagtataaagccttctccacctgtggctctcacctggcagttgtttgcttattttatggaacagggcttgtagggtacctcagttcagctgtgttaccatcccccaggaagagtatggtggcttcagtgatgtacactgtggtcacccccatgctgaaccccttcatctacagcctgaggaacaaggacattcaaagtgccctgtgcaggctgcatggcagaatcatcaaatctcatcatctccatcctttttgttatatgggatagaaatggcagcaaaatttaacacctaggcctgcaaattctgcctccttggtcacattattttggttgcttgatggctttcattcctctctgggtttcgtatgtgaatattgcttgctttgttttgtctttaattgcaatgggtgagtattctggtatcctttgttcatcatacacatcatgaatgattccaatatacctagacagcctcctttagtatctgtgcaatgaccttgatatccaggtgcaatcacaatcttttctgatagacttgaaatcctcacttaactttgtcaagaggtttttggaaactgcaactttaaaaaaaaagcgcagcaggtcctgaaataagttcattttgttcaatgttgtttagttttaattttggtgagaaatgaataaattggtttcatggttca

SEQ ID NO: 162473 - DNA, 936 bp, Homo sapiens
  Payload ID: 11973
  Gene Symbol: OR7G1
  Gene Name: olfactory receptor, family 7, subfamily G, member 1
  Uniprot ID: Q8NGA0
  ENST ID: ENST00000541538
  CDS Start-End: 1-936
atgggacccagaaaccaaacagctgtttcagaatttcttctcatgaaagtgacagaggacccagaactgaagttaatccctttcagcctgttcctgtccatgtacctggtcaccatcctggggaacctgctcattctcctggctgtcatctctgactcccacctccacacccccatgtacttccttctctttaatctctcctttactgacatctgtttaaccacaaccacagtcccaaagatcctagtgaacatccaagctcagaatcagagtatcacttacacaggctgcctcacccagatctgtcttgtcttggtttttgctggcttggaaagttgctttcttgcagtcatggcctacgaccgctatgtggccatttgccacccactgaggtacacagtcctcatgaatgtccatttctggggcttgctgattcttctctccatgttcatgagcactatggatgccctggttcagagtctgatggtattgcagctgtccttctgcaaaaacgttgaaatccctttgttcttctgtgaagtcgttcaggtcatcaagctcgcctgttctgacaccctcatcaacaacatcctcatatattttgcaagtagtgtatttggtgcaattcctctctctggaataattttctcttattctcaaatagtcacctctgttctgagaatgccatcagcaagaggaaagtataaagcgttttccacctgtggctgtcacctctctgttttttccttgttctatgggacagcttttggggtgtacattagttctgctgttgctgagtcttcccgaattactgctgtggcttcagtgatgtacactgtggtccctcaaatgatgaaccccttcatctacagcctgagaaataaggagatgaagaaagctttgaggaaacttattggtaggctgtttcctttttag

SEQ ID NO: 162474 - DNA, 1038 bp, Homo sapiens
  Payload ID: 11974
  Gene Symbol: OR7G2
  Gene Name: olfactory receptor, family 7, subfamily G, member 2
  Uniprot ID: Q8NG99
  ENST ID: ENST00000305456
  CDS Start-End: 1-1038
atgccgatgcagctgctgcttacagattttattatcttttccatcagattcatcatcaacagcatggaagcgagaaaccaaacagctatttcaaaattccttctcctgggactgatagaggatccggaactgcagcccgtccttttcagcctgttcctgtccatgtacttggtcaccatcctggggaacctgctcatcctcttggctgtcatctctgactctcacctccacacccccatgtacttcttcctctccaatctctcctttttggacatttgtttaagcacaaccacgatcccaaagatgctggtgaacatccaagctcagaatcggagcatcacgtactcaggctgcctcacccagatctgctttgtcttgttttttgctggcttggaaaattgtctccttgcagcaatggcctatgaccgctatgtggccatttgtcacccccttagatacacagtcatcatgaacccccgcctctgtggcctgctgattcttctctctctgttgactagtgttgtgaatgcccttcttctcagcctgatggtgttgaggctgtccttctgcacagacctggaaatcccgctcttcttctgtgaactggctcaggtcatccaactcacctgttcagacaccctcatcaataacatcctgatatattttgcagcttgcatatttggtggtgttcctctgtctggaatcattttgtcttacactcagatcacctcctgtgttttgagaatgccatcagcaagtggaaagcacaaagcagtttccacctgtgggtctcacctctccattgttctcttgttctatggggcaggtttgggggtgtacattagttctgtggttactgactcacctaggaagactgcagtggcttcagtgatgtattctgtgttccctcaaatggtgaacccctttatctatagtctgaggaataaggacatgaaaggaaccttgaggaagttcatagggaggataccttctcttctgtggtgtgccatttgctttggattcaggtttctagagtaa

SEQ ID NO: 162475 - DNA, 939 bp, Homo sapiens
  Payload ID: 11975
  Gene Symbol: OR7G3
  Gene Name: olfactory receptor, family 7, subfamily G, member 3
  Uniprot ID: Q8NG95
  ENST ID: ENST00000305444
  CDS Start-End: 1-939
atgaaagcaggaaacttctcagacactccagaattctttctcttgggattgtcaggggatccggagctgcagcccatcctcttcatgctgttcctgtccatgtacctggccacaatgctggggaacctgctcatcatcctggccgtcaactctgactcccacctccacacccccatgtacttcctcctctctatcctgtccttggtcgacatctgtttcacctccaccacgatgcccaagatgctggtgaacatccaggcacaggctcaatccatcaattacacaggctgcctcacccaaatctgctttgtcctggtttttgttggattggaaaatggaattctggtcatgatggcctatgatcgatttgtggccatctgtcacccactgaggtacaatgtcatcatgaaccccaaactctgtgggctgctgcttctgctgtccttcatcgttagtgtcctggatgctctgctgcacacgttgatggtgctacagctgaccttctgcatagacctggaaattccccactttttctgtgaactagctcatattctcaagctcgcctgttctgatgtcctcatcaataacatcctggtgtatttggtgaccagcctgttaggtgttgttcctctctctgggatcattttctcttacacacgaattgtctcctctgtcatgaaaattccatcagctggtggaaagtataaagctttttccatctgcgggtcacatttaatcgttgtttccttgttttatggaacagggtttggggtgtaccttagttctggggctacccactcctccaggaagggtgcaatagcatcagtgatgtataccgtggtcacccccatgctgaacccactcatttacagcctgagaaacaaggacatgttgaaggctttgaggaaactaatatctaggataccatctttccattga

SEQ ID NO: 162476 - DNA, 1146 bp, Homo sapiens
  Payload ID: 11976
  Gene Symbol: OR8A1
  Gene Name: olfactory receptor, family 8, subfamily A, member 1
  Uniprot ID: Q8NGG7
  ENST ID: ENST00000284287
  CDS Start-End: 73-1053
catcagcagagagcccaggatgtttcactagcaccaaaggctcaagactagccgtccaagattagccttttaatggggttcttgtctcccatgcatccctgcaggcctcccacccagaggagaatggctgcaggaaatcactctacagtgacagagttcattctcaagggtttaacgaagagagcagacctccagctccccctctttctcctcttcctcgggatctacttggtcaccatcgtggggaacctgggcatgatcactctaatttgtctgaactctcagctgcacacccccatgtactactttctcagcaatctgtcactcatggatctctgctactcctccgtcattacccctaagatgctggtgaactttgtgtcagagaaaaacatcatctcctacgcagggtgcatgtcacagctctacttcttccttgtttttgtcattgctgagtgttacatgctgacagtgatggcctacgaccgctatgttgccatctgccaccctttgctttacaacatcattatgtctcatcacacctgcctgctgctggtggctgtggtctacgccatcggactcattggctccacaatagaaactggcctcatgttaaaactgccctattgtgagcacctcatcagtcactacttctgtgacatcctccctctcatgaagctgtcctgctctagcacctatgatgttgagatgacagtcttcttttcggctggattcaacatcatagtcacgagcttaacagttcttgtttcttacaccttcattctctccagcatcctcggcatcagcaccacagaggggagatccaaagccttcagcacctgcagctcccaccttgcagccgtgggaatgttctatggatcaactgcattcatgtacttaaaaccctccacaatcagttccttgacccaggagaatgtggcctctgtgttctacaccacggtaatccccatgttgaatcccctaatctacagcctgaggaacaaggaagtaaaggctgccgtgcagaaaacgctgaggggtaaactgttttgatgcaaatgttattgttccttttcaatttagtggtaattgttataaataccagagtgacagcttctgaatgctggccagctgtggatggaaaat

SEQ ID NO: 162477 - DNA, 998 bp, Homo sapiens
  Payload ID: 11977
  Gene Symbol: OR8B12
  Gene Name: olfactory receptor, family 8, subfamily B, member 12
  Uniprot ID: Q8NGG6
  ENST ID: ENST00000306842
  CDS Start-End: 26-958
cgactctcctgcctgaccaaaaagaatggcagccaaaaactcttctgtgacagagtttatcctcgaaggcttaacccaccagccgggactgcggatccccctcttcttcctgtttctgggtttctacacggtcaccgtggtggggaacctgggcttgataaccctgattgggctgaactctcacctgcacactcccatgtacttcttcctttttaacctctctttaatagatttctgtttctccactaccatcactcccaaaatgctgatgagttttgtctcaaggaagaacatcatttccttcacagggtgtatgactcagctcttcttcttctgcttctttgtcgtctctgagtccttcatcctgtcagcgatggcgtatgaccgctacgtggccatctgtaacccactgttgtacacagtcaccatgtcttgccaggtgtgtttgctccttttgttgggtgcctatgggatggggtttgctggggccatggcccacacaggaagcataatgaacctgaccttctgtgctgacaaccttgtcaatcatttcatgtgtgacatccttcctctccttgagctctcctgcaacagctcttacatgaatgagctggtggtctttattgtggtggctgttgacgttggaatgcccattgtcactgtctttatttcttatgccctcatcctctccagcattctacacaacagttctacagaaggcaggtccaaagcctttagtacttgcagttcccacataattgtagtttctcttttctttggttctggtgctttcatgtatctcaaacccctttccatcctgcccctcgagcaagggaaagtgtcctccctgttctataccataatagtccccgtgttaaacccattaatctatagcttgaggaacaaggatgtcaaagttgccctgaggagaactttgggcagaaaaatcttttcttaagaaaggattagtattggaggaaggagatacaatgctttgc

SEQ ID NO: 162478 - DNA, 968 bp, Homo sapiens
  Payload ID: 11978
  Gene Symbol: OR8B2
  Gene Name: olfactory receptor, family 8, subfamily B, member 2
  Uniprot ID: Q96RD0
  ENST ID: ENST00000375013
  CDS Start-End: 20-961
agatttttgaagacaaaaaatgctggctagaaacaactccttagtgactgaatttattcttgctggattaacagatcatccagagttccggcaacccctctttttcctgtttctagtgatctacattgtcaccatggtaggcaaccttggcttgatcactcttttcggtctaaattctcacctccacacaccaatgtactatttcctcttcaatctctccttcattgatctctgttactcctctgttttcactcccaaaatgctaatgaactttgtgtcaaaaaagaatattatctccaatgttgggtgcatgactcggctgtttttctttctctttttcgtcatctctgaatgttacatgttgacttcaatggcatatgatcgctatgtggccatctgtaatccattgctgtataaggtcaccatgtcccatcaggtctgttctatgctcacttttgctgcttacataatgggattggctggagccacggcccacaccgggtgcatgcttagactcaccttctgcagtgctaatatcatcaaccattacttgtgtgacatactccccctcctccagctttcctgcaccagcacctatgtcaacgaggtggttgttctcattgttgtgggtactaatatcacggtacccagttgtaccatcctcatttcttatgttttcattgtcactagcattcttcatatcaaatccactcaaggaagatcaaaagccttcagtacttgtagctctcatgtcattgctctgtctctgttttttgggtcagcggcattcatgtatattaaatattcttctggatctatggagcagggaaaagtttcttctgttttctacactaatgtggtgcccatgctcaatcccctcatctacagtttgaggaacaaggatgtcaaagttgcactgaggaaagctctgattaaaattcagaggagaaatatattctaattagaag

SEQ ID NO: 162479 - DNA, 987 bp, Homo sapiens
  Payload ID: 11979
  Gene Symbol: OR8B3
  Gene Name: olfactory receptor, family 8, subfamily B, member 3
  Uniprot ID: Q8NGG8
  ENST ID: ENST00000354597
  CDS Start-End: 18-959
atttttgaagacaaaaaatgctggctagaaacaactccttagtgactgaatttattcttgctggattaacagatcatccagagttccagcaacccctctttttcctgtttctagtggtctacattgtcaccatggtaggcaaccttggcttgatcattcttttcggtctaaattctcacctccacacaccaatgtactatttcctcttcaatctctccttcattgatctctgttactcctctgttttcactcccaaaatgctaatgaactttgtatcaaaaaagaatattatctcctatgttgggtgcatgactcagctgtttttctttctcttttttgtcatctctgaatgttacatgttgacctcaatggcatatgatcgctatgtggccatctgtaatccattgctgtataaggtcaccatgtcccatcaggtctgttctatgctcacttttgctgcttacataatgggattggctggagccacggcccacaccgggtgcatgcttagactcaccttctgcagtgctaatatcatcaaccattacttgtgtgacatactccccctcctccagctttcctgcaccagcacctatgtcaacgaggtggttgttctcattgttgtgggtattaatatcatggtacccagttgtaccatcctcatttcttatgttttcattgtcactagcattcttcatatcaaatccactcaaggaagatcaaaagccttcagtacttgtagctctcatgtcattgctctgtctctgttttttgggtcagcggcattcatgtatattaaatattcttctggatctatggagcagggaaaagtttcttctgttttctacactaatgtggtgcccatgctcaatcctctcatctacagtttgaggaacaaggatgtcaaagttgcactgaggaaagctctgattaaaattcagagaagaaatatattctaattagaagcagtaataatgtaaaacgatt

SEQ ID NO: 162480 - DNA, 930 bp, Homo sapiens
  Payload ID: 11980
  Gene Symbol: OR8B4
  Gene Name: olfactory receptor, family 8, subfamily B, member 4 (gene/pseudogene)
  Uniprot ID: Q96RC9
  ENST ID: ENST00000624268
  CDS Start-End: 1-930
atgactctgagaaacagctcctcagtgactgagtttatccttgtgggattatcagaacagccagagctccagctccctcttttccttctattcttagggatctatgtgttcactgtggtgggcaacttgggcttgatcaccttaattgggataaatcctagccttcacacccccatgtactttttcctcttcaacttgtcctttatagatctctgttattcctgtgtgtttacccccaaaatgctgaatgactttgtttcagaaagtatcatctcttatgtgggatgtatgactcagctatttttcttctgtttctttgtcaattctgagtgctatgtgttggtatcaatggcctatgatcgctatgtggccatctgcaaccccctgctctacatggtcaccatgtccccaagggtctgctttctgctgatgtttggttcctatgtggtagggtttgctggggccatggcccacactggaagcatgctgcgactgaccttctgtgattccaacgtcattgaccattatctgtgtgacgttctccccctcttgcagctctcctgcaccagcacccatgtcagtgagctggtatttttcattgttgttggagtaatcaccatgctatccagcataagcatcgtcatctcttacgctttgatactctccaacatcctctgtattccttctgcagagggcagatccaaagcctttagcacatggggctcccacataattgctgttgctctgttttttgggtcagggacattcacctacttaacaacatcttttcctggctctatgaaccatggcagatttgcctcagtcttttacaccaatgtggttcccatgcttaacccttcgatctacagtttgaggaataaggatgataaacttgccctgggcaaaaccctgaagagagtgctcttctaa

SEQ ID NO: 162481 - DNA, 1033 bp, Homo sapiens
  Payload ID: 11981
  Gene Symbol: OR8B8
  Gene Name: olfactory receptor, family 8, subfamily B, member 8
  Uniprot ID: Q15620
  ENST ID: ENST00000328064
  CDS Start-End: 74-1009
ggagggcagcagtggtctctctctctctctaaataactttttcccttgtccccacagaatgccttaaatgacaatggctgctgagaattcctccttcgtgacacagtttatcctcgcaggcttaactgaccaaccgggagtccagatccccctcttcttcctgtttctaggcttctacgtggtcactgtggtggggaacctgggcttgataaccctgataaggctcaactctcacttgcacacccctatgtacttcttcctctataacttgtccttcatagatttctgctattccagtgttatcactcccaaaatgctgatgagctttgtcttaaagaagaacagcatctcctacgcagggtgtatgactcagctcttcttctttcttttctttgttgtctctgagtccttcatcctgtcagcaatggcgtatgaccgctatgtggccatctgtaacccactgttgtacatggtcaccatgtctccccaggtgtgttttctccttttgttgggtgtctatgggatggggtttgctggggccatggcccacacagcgtgcatgatgggtgtgaccttctgtgccaataaccttgtcaaccactacatgtgtgacatccttccccttcttgagtgtgcttgcaccagcacctatgtgaatgagcttgtagtgtttgttgttgtgggcattgatattggtgtgcccacagtcaccatcttcatttcctatgctctcattctctccagcatcttccacattgattccacggagggcaggtccaaagccttcagcacctgcagctcccacataattgcagtttctctgttctttgggtcaggagcattcatgtacctcaaacccttttctcttttagctatgaaccagggcaaggtgtcttccctattctataccactgtggtgcccatgctcaacccattaatttatagcctgaggaataaggacgtcaaagttgctctaaagaaaatcttgaacaaaaatgcattctcctgagaaaagggcaatgctcaggaaaga

SEQ ID NO: 162482 - DNA, 1026 bp, Homo sapiens
  Payload ID: 11982
  Gene Symbol: OR8D1
  Gene Name: olfactory receptor, family 8, subfamily D, member 1
  Uniprot ID: Q8WZ84
  ENST ID: ENST00000357821
  CDS Start-End: 72-998
ttggaagagcagtgagggtccatgttaaggtaattcatactttctattttcacagaaatgcctaaagaagaatgaccatggaaaattattctatggcagctcagtttgtcttagatggtttaacacagcaagcagagctccagctgcccctcttcctcctgttcctgggaatctatgtggtcacagtagtgggcaacctgggcatgattctcctgattgcagtcagccctctacttcacacccccatgtactatttcctcagcagcttgtccttcgtcgatttctgctattcctctgtcattactcccaaaatgctggtgaacttcctaggaaagaagaatacaatcctttactctgagtgcatggtccagctctttttctttgtggtctttgtggtggctgagggttacctcctgactgccatggcatatgatcgctatgttgccatctgtagcccactgctttataatgcgatcatgtcctcatgggtctgctcactgctagtgctggctgccttcttcttgggctttctctctgccttgactcatacaagtgccatgatgaaactgtccttttgcaaatcccacattatcaaccattacttctgtgatgttcttcccctcctcaatctctcctgctccaacacacacctcaatgagcttctactttttatcattgcggggtttaacaccttggtgcccaccctagctgttgctgtctcctatgccttcatcctctacagcatccttcacatccgctcctcagagggccggtccaaagcttttggaacatgcagctctcatctcatggctgtggtgatcttctttgggtccattaccttcatgtatttcaagcccccttcaagtaactccctggaccaggagaaggtgtcctctgtgttctacaccacggtgatccccatgctgaaccctttaatatacagtctgaggaataaggatgtgaagaaagcattaaggaaggtcttagtaggaaaatgagtcctgatttgggggatttatagatggg

SEQ ID NO: 162483 - DNA, 936 bp, Homo sapiens
  Payload ID: 11983
  Gene Symbol: OR8D2
  Gene Name: olfactory receptor, family 8, subfamily D, member 2 (gene/pseudogene)
  Uniprot ID: Q9GZM6
  ENST ID: ENST00000357438
  CDS Start-End: 1-936
atggctacttcaaaccattcttcaggggctgagtttatcctggcaggcttgacacaacgcccagaacttcaactgccactcttcctcctgttccttggaatatatgtggtcacagtggtggggaacctgggcatgatcttcttaattgctctcagttctcaactttaccctccagtgtattattttctcagtcatttgtctttcattgatctctgctactcctctgtcattacccctaagatgctggtgaactttgttccagaggagaacattatctcctttctggaatgcattactcaactttatttcttccttatttttgtaattgcagaaggctaccttctgacagccatggaatatgaccgttatgttgctatctgtcgcccactgctttacaatattgtcatgtcccacagggtctgttccataatgatggctgtggtatactcactgggttttctgtgggccacagtccatactacccgcatgtcagtgttgtcattctgtaggtctcatacggtcagtcattatttttgtgatattctccccttattgactctgtcttgctccagcacccacatcaatgagattctgctgttcattattggaggagttaataccttagcaactacactggcggtccttatctcttatgctttcattttctctagtatccttggtattcattccactgaggggcaatccaaagcctttggcacttgtagctcccatctcttggctgtgggcatcttttttgggtctataacattcatgtatttcaagcccccttccagcactactatggaaaaagagaaggtgtcttctgtgttctacatcacaataatccccatgctgaatcctctaatctatagcctgaggaacaaggatgtgaaaaatgcactgaagaagatgactaggggaaggcagtcatcctga

SEQ ID NO: 162484 - DNA, 936 bp, Homo sapiens; identical to SEQ ID NO: 162483
  Payload ID: 11983
  Gene Symbol: OR8D2
  Gene Name: olfactory receptor, family 8, subfamily D, member 2 (gene/pseudogene)
  Uniprot ID: Q9GZM6
  ENST ID: ENST00000624877
  CDS Start-End: 1-936

SEQ ID NO: 162485 - DNA, 1051 bp, Homo sapiens
  Payload ID: 11983
  Gene Symbol: OR8D2
  Gene Name: olfactory receptor, family 8, subfamily D, member 2 (gene/pseudogene)
  Uniprot ID: Q9GZM6
  ENST ID: ENST00000624618
  CDS Start-End: 92-1027
tggggcatgtcattctgctttgggaatcagaaaataaatctaatgtctctcttttctcttatttcttattacacataataccttaaaagacatggctacttcaaaccattcttcaggggctgagtttatcctggcaggcttgacacaacgcccagaacttcaactgccactcttcctcctgttccttggaatatatgtggtcacagtggtggggaacctgggcatgatcttcttaattgctctcagttctcaactttaccctccagtgtattattttctcagtcatttgtctttcattgatctctgctactcctctgtcattacccctaagatgctggtgaactttgttccagaggagaacattatctcctttctggaatgcattactcaactttatttcttccttatttttgtaattgcagaaggctaccttctgacagccatggaatatgaccgttatgttgctatctgtcgcccactgctttacaatattgtcatgtcccacagggtctgttccataatgatggctgtggtatactcactgggttttctgtgggccacagtccatactacccgcatgtcagtgttgtcattctgtaggtctcatacggtcagtcattatttttgtgatattctccccttattgactctgtcttgctccagcacccacatcaatgagattctgctgttcattattggaggagttaataccttagcaactacactggcggtccttatctcttatgctttcattttctctagtatccttggtattcattccactgaggggcaatccaaagcctttggcacttgtagctcccatctcttggctgtgggcatcttttttgggtctataacattcatgtatttcaagcccccttccagcactactatggaaaaagagaaggtgtcttctgtgttctacatcacaataatccccatgctgaatcctctaatctatagcctgaggaacaaggatgtgaaaaatgcactgaagaagatgactaggggaaggcagtcatcctgacaaagagggttctcattggcagcc

SEQ ID NO: 162486 - DNA, 1331 bp, Homo sapiens
  Payload ID: 11984
  Gene Symbol: OR8D4
  Gene Name: olfactory receptor, family 8, subfamily D, member 4
  Uniprot ID: Q8NGM9
  ENST ID: ENST00000321355
  CDS Start-End: 287-1231
ttttaagcattagttttgtctctaactctggagtaaaaggttctgtcgtttgctaagagaatttgttccactggagggtatggaaaagtgtgtttctggttcctaaaatctataggtaggtagatgcttaccgactccatttcatctgagtgttcactttttggttttcgtaacacaaagtcagtgttttcatagagagaaaacactgatatttgttttctatagaaacaaacactgatagaatttgactttttctctctcatctccacagatttctcagagaagaatgggtgtaaaaaaccattccacagtgactgagtttcttctttcaggattaactgaacaagcagagcttcagctgcccctcttctgcctcttcttaggaatttacacagttactgtggtgggaaacctcagcatgatctcaattattaggctgaatcgtcaacttcatacccccatgtactatttcctgagtagtttgtcttttttagatttctgctattcttctgtcattacccctaaaatgctatcagggtttttatgcagagatagatccatctcctattctggatgcatgattcagctgttttttttctgtgtttgtgttatttctgaatgctacatgctggcagccatggcctgcgatcgctacgtggccatctgcagcccactgctctacagggtcatcatgtcccctagggtctgttctctgctggtggctgctgtcttctcagtaggtttcactgatgctgtgatccatggaggttgtatactcaggttgtctttctgtggatcaaacatcattaaacattatttctgtgacattgtccctcttattaaactctcctgctccagcacttatattgatgagcttttgatttttgtcattggtggatttaacatggtggccacaagcctaacaatcattatttcatatgcttttatcctcaccagcatcctgcgcatccactctaaaaagggcaggtgcaaagcgtttagcacctgtagctcccacctgacagctgttcttatgttttatgggtctctgatgtccatgtatctcaaacctgcttctagcagttcactcacccaggagaaagtatcctcagtattttataccactgtgattctcatgttgaatcccttgatatatagtctgaggaacaatgaagtaagaaatgctctgatgaaacttttaagaagaaaaatatctttatctccaggataaatatgctctttattaagatctatttctgtattcataatcatgattatatgtatatatttataccttgactatttaaaagtaatttgaggtccaggtacgg

SEQ ID NO: 162487 - DNA, 936 bp, Homo sapiens
  Payload ID: 11985
  Gene Symbol: OR8G1
  Gene Name: olfactory receptor, family 8, subfamily G, member 1 (gene/pseudogene)
  Uniprot ID: Q15617
  ENST ID: ENST00000341493
  CDS Start-End: 1-936
atgtcaggagaaaataattcctcagtgactgagttcattctggctgggctctcagaacagccagagctccagctgcccctcttcctcctgttcttaggaatctatgtggtcacagtggtgggcaacctgggcatgaccacactgatttggctcagttctcacctgcacacccctatgtactatttcctcagcagtctgtccttcattgacttctgccattccactgtcattacccctaagatgctggtgaactttgtgacagagaagaacatcatctcctaccctgaatgcatgactcagctctacttcttcctcgtttttgctattgcagagtgtcacatgttggctgcaatggcgtatgaccgttacatggccatctgtagccccttgctgtacagtgtcatcatatccaataaggcttgcttttctctgattttaggggtgtatataataggcctggtttgtgcatcagttcatacaggctgtatgtttagggttcaattctgcaaatttgatttgattaaccattatttctgtgatcttcttcccctcctaaagctctcttgctctagtatctatgtcaacaaactacttattctatgtgttggtgcatttaacatccttgtccccagcctgaccatcctttgctcttacatctttattattgccagcatcctccacattcgctccactgagggcaggtccaaagccttcagcacttgtagctcccacatgttggcggttgtaatcttttttggatctgcagcattcatgtacttgcagccatcttcaatcagctccatggaccaggggaaagtatcctctgtgttttatactattattgtgcccatgttgaaccctctgatttatagcctgaggaataaagatgtccatgtttccctgaagaaaatgctacagagaagaacattattgtaa

SEQ ID NO: 162488 - DNA, 1041 bp, Homo sapiens
  Payload ID: 11986
  Gene Symbol: OR8G5
  Gene Name: olfactory receptor, family 8, subfamily G, member 5
  Uniprot ID: Q8NG78
  ENST ID: ENST00000524943
  CDS Start-End: 1-1041
atgatcatatataaacaagggatcactttcctacaaaaggagaataacaatacaattcacctaaataccatgttttttctctcccctgcagaaactcatcaaagaatggcagcagaaaaccattcttttgtgactaagtttattctggttgggctaacagagaagtcagagctacagctgcccctcttcctcgtcttcctgggaatctatgtagtcacagtgctggggaacctgggcatgatcacactgattgggctcagttctcacctgcacacacctatgtactgtttcctcagcagtctgtccttcattgacttctgccattccactgtcattacccctaagatgctggtgaactttgtgacagagaagaacatcatctcctaccctgaatgcatgactcagctctacttcttcctcgtttttgctattgcagagtgtcacatgttggctgcaatggcatatgacggctacgtggccatctgtagccccttgctgtacagcatcatcatatccaataaggcttgcttttctctgattttagtggtgtatgtaataggcctgatttgtgcgtcagctcatataggctgtatgtttagggttcaattctgcaaatttgatgtgatcaaccattatttctgtgatcttatttctatcttgaagctctcctgttctagtacttacattaatgagttactgattttaatctttagtggaattaacatccttgtccccagcctgaccatcctcagctcttacatcttcatcattgccagcatcctccgcattcgctacactgagggcaggtccaaagccttcagcacttgcagctcccacatctcggctgtttctgttttctttgggtctgcagcattcatgtacctgcagccatcatctgtcagctccatggaccaggggaaagtgtcctctgtgttttatactattgttgtgcccatgctgaaccccctgatctacagcctgaggaataaagatgtccacgttgccctgaagaaaacgctagggaaaagaacattcttatga

SEQ ID NO: 162489 - DNA, 1038 bp, Homo sapiens
  Payload ID: 11987
  Gene Symbol: OR8H1
  Gene Name: olfactory receptor, family 8, subfamily H, member 1
  Uniprot ID: Q8NGG4
  ENST ID: ENST00000313022
  CDS Start-End: 29-964
tctcagcagtttaaagcaattgaacatcatgggtagaagaaataacacaaatgtgcctgacttcatccttacgggactgtcagattctgaagaggtccagatggccctctttatactatttctcctgatatacctaattactatgctgggcaatgtggggatgatattgataatccgcctggacctccagcttcacactcccatgtattttttccttactcacttgtcatttattgacctcagttactcaactgtcatcacacctaaaaccttagcgaacttactgacttccaactatatttccttcatgggctgctttgcccagatgttcttttttgtcttcttgggagctgctgaatgttttcttctctcatcaatggcctatgatcgctacgtagctatctgcagtcctctacgttacccagttattatgtccaaaaggctgtgttgcgctcttgtcactgggccctatgtgattagctttatcaactcctttgtcaatgtggtttggatgagcagactgcatttctgcgactcaaatgtagttcgtcactttttctgcgacacgtctccaattttagctctgtcctgcatggacacatacgacattgaaatcatgatacacattttagctggttccaccctgatggtgtcccttatcacaatatctgcatcctatgtgtccattctctctaccatcctgaaaattaattccacttcaggaaagcagaaagctttgtctacttgtgcctctcatctcttgggagtcaccatcttttatggaactatgatttttacttatttaaaaccaagaaagtcttattctttgggaagggatcaagtggcttctgttttttatactattgtgattcccatgctgaatccactcatttatagtcttagaaacaaagaagttaaaaatgctctcattagagtcatgcagagaagacaggactccaggtaattaaaatagcaggaatgctgaacatttaaactcatcttttctttcttttctatttggtatgtccttggtctccc

SEQ ID NO: 162490 - DNA, 927 bp, Homo sapiens
  Payload ID: 11987
  Gene Symbol: OR8H1
  Gene Name: olfactory receptor, family 8, subfamily H, member 1
  ENST ID: ENST00000574192
  CDS Start-End: 1-927
aataacacaaatgtgcctgacttcatccttacgggactgtcagattctgaagaggtccagatggccctctttatactatttctcctgatatacctaattactatgctgggcaatgtggggatgatattgataatccgcctggacctccagcttcacactcccatgtattttttccttactcacttgtcatttattgacctcagttactcaactgtcatcacacctaaaaccttagcgaacttactgacttccaactatatttccttcatgggctgctttgcccagatgttcttttttgtcttcttgggagctgctgaatgttttcttctctcatcaatggcctatgatcgctacgtagctatctgcagtcctctacgttacccagttattatgtccaaaaggctgtgttgcgctcttgtcactgggccctatgtgattagctttatcaactcctttgtcaatgtggtttggatgagcagactgcatttctgcgactcaaatgtagttcgtcactttttctgcgacacgtctccaattttagctctgtcctgcatggacacatacgacattgaaatcatgatacacattttagctggttccaccctgatggtgtcccttatcacaatatctgcatcctatgtgtccattctctctaccatcctgaaaattaattccacttcaggaaagcagaaagctttgtctacttgtgcctctcatctcttgggagtcaccatcttttatggaactatgatttttacttatttaaaaccaagaaagtcttattctttgggaagggatcaagtggcttctgttttttatactattgtgattcccatgctgaatccactcatttatagtcttagaaacaaagaagttaaaaatgctctcattagagtcatgcagagaatttggtatgtccttggtctc

SEQ ID NO: 162491 - DNA, 927 bp, Homo sapiens; identical to SEQ ID NO: 162490
  Payload ID: 11987
  Gene Symbol: OR8H1
  Gene Name: olfactory receptor, family 8, subfamily H, member 1
  ENST ID: ENST00000610894
  CDS Start-End: 1-927

SEQ ID NO: 162492 - DNA, 1038 bp, Homo sapiens; identical to SEQ ID NO: 162489
  Payload ID: 11987
  Gene Symbol: OR8H1
  Gene Name: olfactory receptor, family 8, subfamily H, member 1
  Uniprot ID: Q8NGG4
  ENST ID: ENST00000626711
  CDS Start-End: 29-964

SEQ ID NO: 162493 - DNA, 939 bp, Homo sapiens
  Payload ID: 11988
  Gene Symbol: OR8H2
  Gene Name: olfactory receptor, family 8, subfamily H, member 2
  Uniprot ID: Q8N162
  ENST ID: ENST00000313503
  CDS Start-End: 1-939
atgatgggtagaaggaataacacaaatgtggctgacttcatccttatgggactgacactttctgaagagatccagatggctctgtttatgctatttctcctgatatacctaattactatgctggggaatgtggggatgatattgataatccgcctggacctccagcttcacactcccatgtattttttccttactcacctgtcatttattgacctcagttactcaactgtcgtcacacctaaaaccttagcgaacttactgacttccaactatatttcctttacgggctgctttgcccagatgttcttttttgccttcttgggtactgctgaatgttaccttctctcctcaatggcccatgatcgctatgcagcgatctgcagtcctctacactacacagttattatgtccaaaaggctctgcctcgctctcatcactgggccttatgtgattggctttatagactcctttgtcaacgtggtttccatgagcagattgcatttctacgactcaaacgtaattcatcactttttctgtgacacttccccaattttagctctgtcctgcactgatacatacaacaccgaaatcctgatattcattattgttggttccaccctgatggtgtcccttttcacaatatctgcatcctatgtgttcattctctttaccatcctgaaaattaattccacttcaggaaagcagaaagctttctctacttgcgtctctcatctcttgggagtcaccatcttttatagcactctgatttttacttatttaaaaccaagaaagtcttattccttgggaagagatcaagtggcttctgttttttatactattgtgattcccgtgctgaatccactcatttatagtcttagaaacaaagaggtgaaaaatgctgtcatcagagtcatgcagagaagacaggactccaggtaa

SEQ ID NO: 162494 - DNA, 1038 bp, Homo sapiens
  Payload ID: 11988
  Gene Symbol: OR8H2
  Gene Name: olfactory receptor, family 8, subfamily H, member 2
  ENST ID: ENST00000618136
  CDS Start-End: 29-964
tctcagcagtttagagcaggtgaacatgatgggtagaaggaataacacaaatgtggctgacttcatccttatgggactgacactttctgaagagatccagatggctctgtttatgctatttctcctgatatacctaattactatgctggggaatgtggggatgatattgataatccgcctggacctccagcttcacactcccatgtattttttccttactcacctgtcatttattgacctcagttactcaactgtcgtcacacctaaaaccttagcgaacttactgacttccaactatatttcctttacgggctgctttgcccagatgttcttttttgccttcttgggtactgctgaatgttaccttctctcctcaatggcccatgatcgctatgcagcgatctgcagtcctctacactacacagttattatgtccaaaaggctctgcctcgctctcatcactgggccttatgtgattggctttatagactcctttgtcaacgtggtttccatgagcagattgcatttctacgactcaaacgtaattcatcactttttctgtgacacttccccaattttagctctgtcctgcactgatacatacaacaccgaaatcctgatattcattattgttggttccaccctgatggtgtcccttttcacaatatctgcatcctatgtgttcattctctttaccatcctgaaaattaattccacttcaggaaagcagaaagctttctctacttgcgtctctcatctcttgggagtcaccatcttttatagcactctgatttttacttatttaaaaccaagaaagtcttattccttgggaagagatcaagtggcttctgttttttatactattgtgattcccgtgctgaatccactcatttatagtcttagaaacaaagaggtgaaaaatgctgtcatcagagtcatgcagagaagacaggactccaggtaattaatatagcaggaatgctgaacatttaaactcatcttttctttcattcctgttgggtattttcttagtctctc

SEQ ID NO: 162495 - DNA, 939 bp, Homo sapiens
  Payload ID: 11989
  Gene Symbol: OR8H3
  Gene Name: olfactory receptor, family 8, subfamily H, member 3
  Uniprot ID: Q8N146
  ENST ID: ENST00000313472
  CDS Start-End: 1-939
atgatgggtagaaggaatgacacaaatgtggctgacttcatccttacgggactgtcagactctgaagaggtccagatggctctgtttatgctatttctcctcatatacctaattactatgctggggaatgtggggatgctattgataatccgcctggacctccagcttcacactcccatgtattttttccttactcacctgtcatttattgacctcagttactcaactgtcgtcacacctaaaaccttagcgaacttactgacttccaactatatttccttcacgggctgctttgcccagatgttctgttttgtcttcttgggtactgctgaatgttatcttctctcctcaatggcctatgatcgctatgcagcgatctgcagtcctctacactacacagttattatgcccaaaaggctctgcctcgctctcatcactgggccttatgtgattggctttatggactcctttgtcaatgtggtttccatgagcagattgcatttctgtgactcaaacataattcatcactttttctgtgacacttccccaattttagctctgtcctgcactgacacagacaacactgaaatgctgatattcattatcgctggttccaccctgatggtgtcccttatcacaatatctgcatcctatgtgtccattctctctaccatcctgaaaattaattccacttcaggaaagcagaaagctttctctacttgcgtctctcatctcttgggagtcaccatcttctatggaactatgatttttacttacttaaagccaagaaagtcttattccttgggaagagatcaagtggctcctgtgttttatactattgtgattcccatgctgaatccactcatttatagtcttagaaacagagaagtgaaaaatgctctcattagagtcatgcagagaagacaggactccaggtag

SEQ ID NO: 162496 - DNA, 933 bp, Homo sapiens
  Payload ID: 11990
  Gene Symbol: OR8I2
  Gene Name: olfactory receptor, family 8, subfamily I, member 2
  Uniprot ID: Q8N0Y5
  ENST ID: ENST00000302124
  CDS Start-End: 1-933
atggctggcaacaatttcactgaggttaccgtcttcatcctctctggatttgcaaatcaccctgaattacaagtcagtcttttcttgatgtttctcttcatttatctattcactgttttgggaaacctgggactgatcacgttaatcagaatggattctcagcttcacacccctatgtactttttcctgagcaatttagcatttattgacatattttactcctctactgtaacacctaaggcattggtgaatttccaatccaatcggagatccatctcctttgttggctgctttgttcaaatgtacttttttgttggattggtgtgttgtgagtgtttccttctgggatcaatggcctacaatcgctacatagcaatctgcaatcccttactgtattcagtagtcatgtcccaaaaagtgtccaactggctgggagtaatgccatatgtgataggcttcacaagctcgctgatatctgtctgggtgataagcagtttggcgttctgtgattccagcatcaatcattttttttgtgacaccacagctcttttagcactctcctgtgtagatacattcggcacagaaatggtgagctttgtcttagctggattcactcttcttagctctctccttatcatcacagtcacttatatcatcatcatctcagccatcctgaggatccagtcagcagcaggcaggcagaaggccttctccacctgcgcatcccacctcatggctgtaactatcttttatgggtctctgattttcacctatttgcaacctgataacacatcatcgctgacccaggcgcaggtggcatctgtattctatacgattgtcattcccatgctgaatccactcatctacagtctgaggaacaaagatgtgaaaaatgctcttctgagagtcatacatagaaaactttttccatga

SEQ ID NO: 162497 - DNA, 933 bp, Homo sapiens; identical to SEQ ID NO: 162496
  Payload ID: 11990
  Gene Symbol: OR8I2
  Gene Name: olfactory receptor, family 8, subfamily I, member 2
  ENST ID: ENST00000618695
  CDS Start-End: 1-553

SEQ ID NO: 162498 - DNA, 1074 bp, Homo sapiens
  Payload ID: 11991
  Gene Symbol: OR8J1
  Gene Name: olfactory receptor, family 8, subfamily J, member 1
  Uniprot ID: Q8NGP2
  ENST ID: ENST00000303039
  CDS Start-End: 33-983
tcccccaaacagatgaatttccaaactctgacatggctcctgaaaatttcaccagagtcactgagtttattcttacaggtgtctctagctgtccagagctccagattcccctcttcctggtctttctggtgctctatgggctgaccatggcagggaacctgggcatcatcaccctcaccagtgttgactctcgacttcaaacccccatgtactttttcctgcaacatctggctctcattaatcttggtaactctactgtcattgcccctaaaatgctgattaactttttagtaaagaagaaaactacctcattctatgaatgtgccacccaactgggagggttcttgttctttattgtatcggaggtaatcatgctggctttgatggcctatgaccgctatgtggctatttgtaaccctctgctgtacatggtggtggtgtctcggcggctctgcctcctgctggtctccctcacatacctctatggcttttctacagctattgtggtttcatcttatgtattctctgtgtcttattgctcttctaatataatcaatcatttttactgtgataatgttcctctgttagcattatcttgctctgatacttacttaccagaaacagttgtctttatatctgcagcaacaaatgtggttggttccttgattatagttctagtatcttatttcaatattgttttgtctattttaaaaatatgttcatcagaaggaaggaaaaaagccttttctacctgtgcttcacatatgatggcagtcacaattttttatgggacattgctattcatgtatgtgcagccccgaagtaaccattcactggatactgatgataagatggcttctgtgttttacacgttggtaattcctatgctgaatcccttgatctacagcctgaggaataaggatgtgaagactgctctacagagattcatgacaaatctgtgctattcctttaaaacaatgtaattttaaacagtacaggtaaatgaggagagagttaatataagctgccattatgtaaaagaaaatgtaggaaaaagaaaaggtaggtagccga

SEQ ID NO: 162499 - DNA, 1074 bp, Homo sapiens
  Payload ID: 11991
  Gene Symbol: OR8J1
  Gene Name: olfactory receptor, family 8, subfamily J, member 1
  Uniprot ID: Q8NGP2
  ENST ID: ENST00000574644
  CDS Start-End: 33-983
tcccccaaacagatgaatttccaaactctgacatggctcctgaaaatttcaccagggtcactgagtttattcttacaggtgtctctagctgtccagagctccagattcccctcttcctggtctttctggtgctctatgggctgaccatggcagggaacctgggcatcatcaccctcaccagtgttgactctcgacttcaaacccccatgtactttttcctgcaacatctggctctcattaatcttggtaactctactgtcattgcccctaaaatgctgattaactttttagtaaagaagaaaactacctcattctatgaatgtgccacccaactgggagggttcttgttctttattgtatcggaggtaatcatgctggctttgatggcctatgaccgctatgtggctatttgtaaccctctgctgtacatggtggtggtgtctcggcggctctgcctcctgctggtctccctcacatacctctatggcttttctacagctattgtggtttcatcttatgtattctctgtgtcttattgctcttctaatataatcaatcatttttactgtgataatgttcctctgttagcattatcttgctctgatacttacttaccagaaacagttgtctttatatctgcagcaacaaatgtggttggttccttgattatagttctagtatcttatttcaatattgttttgtctattttaaaaatatgttcatcagaaggaaggaaaaaagccttttctacctgtgcttcacatatgatggcagtcacaattttttatgggacattgctattcatgtatgtgcagccccgaagtaaccattcattggatactgatgataagatggcttctgtgttttacacgttggtaattcctatgctgaatcccttgatctacagcctgaggaataaggatgtgaagactgctctacagagattcatgacaaatctgtgctattcctttaaaacaatgtaattttaaacagtacaggtaaatgaggagagagttaatataagctgccattatgtaaaagaaaatgtaggaaaaagaaaaggtaggtagccga

SEQ ID NO: 162500 - DNA, 948 bp, Homo sapiens
  Payload ID: 11992
  Gene Symbol: OR8J2
  Gene Name: olfactory receptor, family 8, subfamily J, member 2 (gene/pseudogene)
  ENST ID: ENST00000533152
  CDS Start-End: 1-948
atggcttcaggaaatctcacatgggtgacggagttcattcttgtgggagtctcagatgatccggagctccagattcccctcttcctggtcttcctggtgctctatttgctgaccgtggcagggaacctgggcatcatcaccctcaccagtgttgaccctcaacttcaaacccccatgtactttttcctctgacacttggctattattaatctttgcaattctactgtcgttgcccctaaaatgctggttaacttcctggttaccaagaaaaccatatcatactatggatgtgcagcccaactgggtggattcttggttttcattgtggctgagattttcacgctggctgcaatggcctatgaccgctatgtggctatttggagccctctgctctacgccgtagtggtgtctccaaaggtgtgtcgtctgctggtgtccctcacataccttcagagtcttatcacagcactgactgtctcttcctgtgtgttctctgtgtcatactgttcttccaacattatcaaccatttttactgtgatgatgtccctttgctagcattgtcctgttctgatacctacattccagaaacagcagtctttatcttttcagggaccaacttgcttttctccatgatcgttgttctgatatcctacttcaacattgttattaccattttgaggatacgttcctcagaaggacgacaaaaagccttttccacctgtgcttctcacatgatagctgtggttgtgttctatgggactctccttttcatgtatttgcaaccaaggagtaatcattcattagatactgacaaaatggcttcggtcttctacaccctggtgataccagtgctgaaccctctaatctacagcctcaggaacaagaacgtgaaggatgcactaaagaggttcctagataacccatgccgatcactcaaactaatgtaa

SEQ ID NO: 162501 - DNA, 948 bp, Homo sapiens; identical to SEQ ID NO: 162500
  Payload ID: 11992
  Gene Symbol: OR8J2
  Gene Name: olfactory receptor, family 8, subfamily J, member 2 (gene/pseudogene)
  ENST ID: ENST00000570683
  CDS Start-End: 1-948

SEQ ID NO: 162502 - DNA, 948 bp, Homo sapiens
  Payload ID: 11993
  Gene Symbol: OR8J3
  Gene Name: olfactory receptor, family 8, subfamily J, member 3
  Uniprot ID: Q8NGG0
  ENST ID: ENST00000301529
  CDS Start-End: 1-948
atggctcctgaaaatttcaccagggtcactgagtttattctcacaggtgtctctagctgtccagagctccagattcccctcttcctggtcttcctagtgctctatgtgctgaccatggcagggaacctgggcatcatcaccctcaccagtgttgactctcgacttcaaaaccccatgtactttttcctgagacatctagctatcatcaatcttggcaactctactgtcattgcccctaaaatgctgatgaactttttagtaaagaagaaaactacctcattctatgaatgtgccacccaactgggagggttcttgttctttattgtatcggaggtaatgatgctggctgtgatggcctatgaccgctatgtggccatttgtaaccctctgctctacatggtggtggtgtctcggcggctctgcctcctgctggtgtccctcacatacctctatggcttttctacagctattgtggtttcaccttgtatattctctgtgtcttattgctcttctaatataatcaatcatttttactgtgatattgcacctctgttagcattatcttgctctgatacttacataccagaaacaatagtctttatatctgcagcaacaaatttggttttttccatgattacagttctagtatcttatttcaatattgttttgtccattctaaggatacgttcaccagaaggaaggaaaaaagccttttccacctgcgcttcgcatatgatagcagtcacggttttctatgggacaatgctatttatgtatttgcagccccaaaccaaccactcactggatactgataagatggcttctgtgttttacacattggtgattcctatgctgaatcccttgatctacagcctgaggaataatgatgtaaatgttgccttaaagaaattcatggaaaatccatgttactcctttaaatcaatgtaa

SEQ ID NO: 162503 - DNA, 960 bp, Homo sapiens
  Payload ID: 11994
  Gene Symbol: OR8K1
  Gene Name: olfactory receptor, family 8, subfamily K, member 1
  Uniprot ID: Q8NGG5
  ENST ID: ENST00000279783
  CDS Start-End: 1-960
atgaatcatgtggtaaaacacaatcacacggcagtgaccaaggtgactgaatttattctcatggggattacagacaaccctgggctgcaggctccactgtttggactcttcctcatcatatatctggtcacagtgataggcaatctgggcatggttatcttgacctacttggactccaagctacacacccccatgtactttttccttagacatttgtcaatcactgatcttggttactccactgtcattgccccgaagatgttagtaaacttcatagtgcacaaaaacacaatttcttacaattggtatgccactcagctagcattctttgagattttcatcatctctgagctctttattctatcagcaatggcctatgatcgctacgtagccatctgtaaacctcttctgtacgtgatcatcatggcagagaaagtactttgggtgctggtaattgttccctatctctatagcacgtttgtgtcactatttctcacaattaagttatttaaactgtccttctgtggctcaaacataatcagctatttttactgtgactgtatccctctgatgtccatactctgttctgacacaaatgaattagaattaataattttgatcttctcaggctgtaatttgctcttctccctctcaattgttctcatatcctacatgtttattctagtggccattctcagaatgaactcaaggaaagggaggtacaaagccttctccacctgtagctctcatctgacagtggtgatcatgttctatgggacattgttatttatttacttgcaacccaagtccagtcatactttggctattgataaaatggcctcagtgttttataccctgttgattcctatgctgaatccgttgatctacagcctaaggaacaaagaagtaaaagatgctctaaagagaactttaaccaatcgattcaaaattcccatttaa

SEQ ID NO: 162504 - DNA, 960 bp, Homo sapiens; identical to SEQ ID NO: 162503
  Payload ID: 11994
  Gene Symbol: OR8K1
  Gene Name: olfactory receptor, family 8, subfamily K, member 1
  Uniprot ID: Q8NGG5
  ENST ID: ENST00000574800
  CDS Start-End: 1-960

SEQ ID NO: 162505 - DNA, 939 bp, Homo sapiens
  Payload ID: 11995
  Gene Symbol: OR8K3
  Gene Name: olfactory receptor, family 8, subfamily K, member 3 (gene/pseudogene)
  Uniprot ID: Q8NH51
  ENST ID: ENST00000312711
  CDS Start-End: 1-939
atggaacaacacaatctaacaacggtgaatgaattcattcttacgggaatcacagatatcgctgagctgcaggcaccattatttgcattgttcctcatgatctatgtgatctcagtgatgggcaatttgggcatgattgtcctcaccaagttggactccaggttgcaaacccctatgtacttttttctcagacatctggctttcatggatcttggttattcaacaactgtgggacccaaaatgttagtaaattttgttgtggataagaatataatttcttattatttttgtgcaacacagctagctttctttcttgtgttcattggtagtgaactttttattctctcagccatgtcctacgacctctatgtggccatctgtaaccctctgctatacacagtaatcatgtcacgaagggtatgtcaggtgctggtagcaatcccttacctctattgcacattcatttctcttctagtcaccataaagatttttactttatccttctgtggctacaacgtcattagtcatttctactgtgacagtctccctttgttacctttgctttgttcaaatacacatgaaattgaattgataattctgatctttgcagctattgatttgatttcatctcttctgatagttcttttatcttacctgctcatccttgtagccattctcaggatgaattctgctggcagacaaaaggctttttctacctgtggagcccacctgacagtggtcatagtgttctatgggactttgcttttcatgtacgtgcagcccaagtccagtcattcctttgacactgataaagtggcttccatattttacaccctggttatccccatgttgaatcccttgatctatagtttacgaaacaaagatgtaaaatatgccctacgaaggacatggaataacttatgtaatatttttgtttaa

SEQ ID NO: 162506 - DNA, 939 bp, Homo sapiens; identical to SEQ ID NO: 162505
  Payload ID: 11995
  Gene Symbol: OR8K3
  Gene Name: olfactory receptor, family 8, subfamily K, member 3 (gene/pseudogene)
  Uniprot ID: Q8NH51
  ENST ID: ENST00000573400
  CDS Start-End: 1-939

SEQ ID NO: 162507 - DNA, 939 bp, Homo sapiens; identical to SEQ ID NO: 162505
  Payload ID: 11995
  Gene Symbol: OR8K3
  Gene Name: olfactory receptor, family 8, subfamily K, member 3 (gene/pseudogene)
  Uniprot ID: Q8NH51
  ENST ID: ENST00000623750
  CDS Start-End: 1-939

SEQ ID NO: 162508 - DNA, 939 bp, Homo sapiens; identical to SEQ ID NO: 162505
  Payload ID: 11995
  Gene Symbol: OR8K3
  Gene Name: olfactory receptor, family 8, subfamily K, member 3 (gene/pseudogene)
  Uniprot ID: Q8NH51
  ENST ID: ENST00000623845
  CDS Start-End: 1-939

SEQ ID NO: 162509 - DNA, 924 bp, Homo sapiens
  Payload ID: 11996
  Gene Symbol: OR8K5
  Gene Name: olfactory receptor, family 8, subfamily K, member 5
  Uniprot ID: Q8NH50
  ENST ID: ENST00000313447
  CDS Start-End: 1-924
atgggccaacacaatctaacagtgctaactgaattcattctgatggaactcacaaggcggcctgagctgcagattcccctttttggagtcttcctcgtcatctacctaatcacagtggtgggcaacctaactatgatcattttgaccaaactggactcccacttacatacacctatgtacttttctatcagacatttggcttttgttgatcttggtaattctactgtcatttgtcccaaggtgctggcaaattttgttgtggatcgaaatactatttcctattatgcatgtgctgcacagctggcattcttccttatgttcattatcagtgaatttttcatcctgtcagccatggcctatgaccgctatgtggccatttgtaaccctctgctctattatgttattatgtctcagcgactgtgtcatgtactggtgggcattcaatatctctacagcacatttcaggctctgatgttcactattaagatttttacattgaccttctgtggctctaatgtcatcagtcatttttactgtgatgatgttcctttgctacctatgctttgctcaaatgcacaggaaatagaattgttgagcatactattttctgtatttaatttgatctcctcctttctgatagtcttagtgtcctacatgttgattttgttagctatatgtcaaatgcattctgcagagggcaggaaaaaggctttctccacatgtggttcccatttgacagtggtggttgtgttctatgggtctctactcttcatgtacatgcagcccaattccactcacttctttgatactgataaaatggcttctgtgttttacactttagtaatccccatgcttaaccctttgatttacagcttaagaaacgaagaggtgaaaaatgccttctataagctctttgagaattga

SEQ ID NO: 162510 - DNA, 1080 bp, Homo sapiens
  Payload ID: 11997
  Gene Symbol: OR8S1
  Gene Name: olfactory receptor, family 8, subfamily S, member 1
  Uniprot ID: Q8NH09
  ENST ID: ENST00000310194
  CDS Start-End: 1-1080
atggccttggggaatcacagcaccatcaccgagttcctcctccttgggctgtctgccgaccccaacatccgggctctgctctttgtgctgttcctggggatttacctcctgaccataatggaaaacctgatgctgctgctcatgatcagggctgattcttgtctccataagcccatgtatttcttcctgagtcacctctcttttgttgatctctgcttctcttcagtcattgtgcccaagatgctggagaacctcctgtcacagaggaaaaccatttcagtagagggctgcctggctcaggtcttctttgtgtttgtcactgcagggactgaagcctgccttctctcagggatggcctatgaccgccatgctgccatctgccgcccactactttatggacagatcatgggtaaacagctgtatatgcaccttgtgtggggctcatggggactgggctttctggacgcactcatcaatgtcctcctagctgtaaacatggtcttttgtgaagccaaaatcattcaccactacagctatgagatgccatccctcctccctctgtcctgctctgatatctccagaagcctcatcgccttgctctgctccactctcctacatgggctgggaaacttccttttggtcttcttatcctacacccgtataatctctaccatcctaagcatcagctctacctcgggcagaagcaaggccttctccacctgctctgcccacctcactgcagtgacactttactatggctcaggtttgctccgccatctcatgccaaactcaggttcccccatagagttgatcttctctgtgcagtatactgtagtcactcccatgctgaattccctcatctatagcctgaaaaataaggaagtgaagggggaaagaagcctccgggacagcagtcatttgcctcagctgcacaaaggccaggccagatggaagagaccagccttcaccgaaggccgcagggagcccggacacccggagctgagcattccggtcacgcctcaaccccaaggggcctgcgcatgctccgcgctgcgcgcggcgcccacggccctgccctga

SEQ ID NO: 162511 - DNA, 930 bp, Homo sapiens
  Payload ID: 11998
  Gene Symbol: OR8U1
  Gene Name: olfactory receptor, family 8, subfamily U, member 1
  Uniprot ID: Q8NH10
  ENST ID: ENST00000302270
  CDS Start-End: 1-930
atggctcacatcaattgcacccaggcgacagagtttattcttgtgggcctcacagaccatcaggagttgaagatgcccctctttgtgctattcttatccatctacctcttcacagtggtaggcaacttgggtttgatcctactcattagagcggatacaagtctcaacacaccaatgtacttctttcttagcaacctagcttttgtggatttctgttactcttctgtcattacacccaaaatgcttgggaatttcttgtacaaacaaaatgttatatcctttgatgcatgtgctactcaactgggctgctttctcaccttcatgatatcagaatccttgctactggcttccatggcctatgaccgatatgtggccatttgtaaccctctattgtatatggttgtaatgactccaggaatctgcattcaacttgtagcagttccttatagctatagcttcctaatggcactatttcacaccatcctcaccttccgcctctcctattgccactccaacattgtcaaccatttctattgtgatgacatgcctctcctcaggctaacttgctcagacactcgcttcaaacagctctggatctttgcctgtgctggtatcatgttcatttcctcccttctgattgtctttgtctcctacatgttcatcatttctgccatcctgaggatgcattcagctgagggaagacagaaggctttctcgacgtgtggctctcacatgctggcagtcaccatattctatgggaccctcatttttatgtacttacagcctagctctagccatgccctggacacagacaagatggcctctgtcttctacacagtgatcattcccatgttgaatcccttaatctatagcctccagaataaggaggtgaaagaagctctgaagaaaatcattatcaataaaaactag

SEQ ID NO: 162512 - DNA, 930 bp, Homo sapiens
  Payload ID: 11998
  Gene Symbol: OR8U1
  Gene Name: olfactory receptor, family 8, subfamily U, member 1
  Uniprot ID: P0C7N5
  ENST ID: ENST00000626074
  CDS Start-End: 1-930
atgactcagatcaattgcacccaggtgacagagtttattcttgtgggcctcacagatcgtcaggagttgaagatgcccctctttgtgctattcttatctatctatcttttcacagtagtaggcaatctgggtttgatcctactcattagaacagatgaaaaactcaacacaccaatgtacttctttcttagcaacctagcttttgtggatttctgttactcttctgtcattacacccaaaatgcttgggaatttcttatataaacaaaatagtatttcgttcaatgcatgtgctgctcagttaggctgtttcctggccttcatgacggctgagtgcttgctactggcttccatggcctatgaccgatatgtggccatttgtaaccctctgatgtatatggtggtaatgtccccaggaatctgcattcagcttgtggctgctccccatagctatagcatcttggttgcactgtttcacaccatcctcaccttccgcctctcctattgccactccaacattgtcaaccatttctattgtgatgacatgcctctcctcaggctaacttgctcagacactcgcttcaaacagctctggatctttgcctgtgctggtatcatgttcatttcctcccttctgattgtctttgtctcctacatgttcatcatttctgccatcctgaggatgcattcagctgagggaagacagaaggctttctcgacgtgtggctctcacatgctggcagtcaccatattctatgggaccctcatttttatgtacttacagcctagctctagccatgccctggacacagacaagatggcctctgtcttctacacagtgatcattcccatgttgaatcccttaatctatagcctccagaataaggaggtgaaagaagctctgaagaaaatcattatcaataaaaactag

SEQ ID NO: 162513 - DNA, 930 bp, Homo sapiens
  Payload ID: 11999
  Gene Symbol: OR8U8
  Gene Name: olfactory receptor, family 8, subfamily U, member 8
  ENST ID: ENST00000570574
  CDS Start-End: 1-930
atggctcacatcaattgcacccaggcgacagagtttattcttgtgggcctcacagatcgtcaggagttgaagatgcccctctttgtgctattcttatccatctacctcttcacagtggtaggcaacttgggtttgatcctactcattagagcggatacaagtctcaacacaccaatgtacttctttcttagcaacctagcttttgtggatttctgttactcttctgtcattacacccaaaatgcttgggaatttcttgtacaaacaaaatgttatatcctttgatgcatgtgctactcaactgggctgctttctcaccttcatgatatcagaatccttgctactggcttccatggcctatgaccgatatgtggccatttgtaaccctctattgtatatggttgtaatgactccaggaatctgcattcaacttgtagcagttccttatagctatagcttcctaatggcactatttcacaccatcctcaccttccgcctctcctattgccactccaacattgtcaaccatttctattgtgatgacatgcctctcctcaggctaacttgctcagacactcgcttcaaacagctctggatctttgcctgtgctggtatcatgttcatttcctcccttctgattgtctttgtctcctacatgttcatcatttctgccatcctgaggatgcattcagctgagggaagacagaaggctttctcgacgtgtggctctcacatgctggcagtcaccatattctatgggaccctcatttttatgtacttacagcctagctctagccatgccctggacacagacaagatggcctctgtcttctacacagtgatcattcccatgttgaatcccttaatctatagcctccagaataaggaggtgaaagaagctctgaagaaaatcattatcaataaaaactag

SEQ ID NO: 162514 - DNA, 960 bp, Homo sapiens
  Payload ID: 11999
  Gene Symbol: OR8U8
  Gene Name: olfactory receptor, family 8, subfamily U, member 8
  ENST ID: ENST00000627176
  CDS Start-End: 1-960
atggctcacatcaattgcacccaggcgacagagtttattcttgtgggcctcacagatcgtcaggagttgaagatgcccctctttgtgctattcttatccatctacctcttcacagtggtaggcaacttgggtttgatcctactcattagagcggatacaagtctcaacacaccaatgtacttctttcttagcaacctagcttttgtggatttctgttactcttctgtcattacacccaaaatgcttgggaatttcttgtacaaacaaaatgttatatcctttgatgcatgtgctactcaactgggctgctttctcaccttcatgatatcagaatccttgctactggcttccatggcctatgaccgatatgtggccatttgtaaccctctattgtatatggttgtaatgactccaggaatctgcattcaacttgtagcagttccttatagctatagcttcctaatggcactatttcacaccatcctcaccttctgcctctcctattgccactccaacattgtcaaccatttctattgtgatgacatgcctctcctcaggctaacttgctcagacactcgcttcaaacagctatggattttggcctgtgctggtatcacattcatctgctctgttctgattgtctttgtctcctacatgttcattatttttgccatcctgaggatgagctcagctgaaggaagacgcaaagccttctccacctgtagctctcacatgctggcagtcaccatattctatggcaccctgatctttatgtacttacaaccaagctcaagccattctcttgatgcagacaagatggcctctgtcttctacacggtgattattcccatgttgaatcccttgatttacagtctcaggaacaaagatgtaaaagatgccctgaagaaagtcatcatcaatagaaaccatgcttttatttttctgaaactgagaaaatga

SEQ ID NO: 162515 - DNA, 1038 bp, Homo sapiens
  Payload ID: 12000
  Gene Symbol: OR9A2
  Gene Name: olfactory receptor, family 9, subfamily A, member 2
  Uniprot ID: Q8NGT5
  ENST ID: ENST00000350513
  CDS Start-End: 64-996
tgtggagcaatgccacctctcttttaatctctgggcttcaaaacaagcagaatcaaggactaaatgatggacaaccactctagtgccactgaattccaccttctaggcttccctgggtcccaaggactacaccacattctttttgctatattctttttcttctatttagtgacattaatgggaaacacggtcatcattgtgattgtctgtgtggataaacgtctgcagtcccccatgtatttcttcctcagccacctctctaccctggagatcctggtcacaaccataattgtccccatgatgctttggggattgctcttcctgggatgcagacagtatctttctctacatgtatcgctcaacttttcctgtgggaccatggagtttgcattacttggagtgatggctgtggaccgttatgtggctgtgtgtaaccctttgaggtacaacatcattatgaacagcagtacctgtatttgggtggtaatagtgtcatgggtgtttggatttctttctgaaatctggcccatctatgccacatttcagtttaccttccgcaaatcaaattcattagaccatttttactgtgaccgagggcaattgctcaaactgtcctgcgataacactcttctcacagagtttatccttttcttaatggctgtttttattctcattggttctttgatccctacgattgtctcctacacctacattatctccaccatcctcaagatcccgtcagcctctggccggaggaaagccttctccacttttgcctcccacttcacctgtgttgtgattggctatggcagctgcttgtttctctacgtgaaacccaagcaaacacagggagttgagtacaataagatagtttccctgttggtttctgtgttaacccccttcctgaatcctttcatctttactcttcggaatgacaaagtcaaagaggccctccgagatgggatgaaacgctgctgtcaactcctgaaagattagctgttctgtaagtcagttttaggtggtccaagcctcagggtt

SEQ ID NO: 162516 - DNA, 1038 bp, Homo sapiens; identical to SEQ ID NO: 162515
  Payload ID: 12000
  Gene Symbol: OR9A2
  Gene Name: olfactory receptor, family 9, subfamily A, member 2
  Uniprot ID: Q8NGT5
  ENST ID: ENST00000619330
  CDS Start-End: 64-996

SEQ ID NO: 162517 - DNA, 1093 bp, Homo sapiens
  Payload ID: 12001
  Gene Symbol: OR9A4
  Gene Name: olfactory receptor, family 9, subfamily A, member 4
  Uniprot ID: Q8NGU2
  ENST ID: ENST00000548136
  CDS Start-End: 60-1004
gcggttgttctctctcttttgctctctagatttcacaaggaacaagggcttagaactaaatgttgatgaattactctagtgccactgaattttatctccttggcttccctggctctgaagaactacatcatatcctttttgctatattcttctttttctacttggtgacattaatgggaaacacagtcatcatcatgattgtctgtgtggataaacgtctgcagtcccccatgtatttcttcctcggccacctctctgccctggagatcctggtcacaaccataatcgtccccgtgatgctttggggattgctgctccctgggatgcagacaatatatttgtctgcctgtgttgtccagctcttcttgtaccttgctgtggggacaacagagttcgcattacttggagcaatggctgtggaccgttatgtggctgtctgtaaccctctgaggtacaacatcattatgaacagacacacctgcaactttgtggttcttgtgtcatgggtgtttgggtttctttttcaaatctggccggtctatgtcatgtttcagcttacttactgcaaatcaaatgtggtgaacaattttttttgtgaccgagggcaattgctcaaactatcctgcaataatactcttttcacggagtttatcctcttcttaatggctgtttttgttctctttggttctttgatccctacaattgtctccaacgcctacatcatctccaccattctcaagatcccgtcatcctctggccggaggaaatccttctccacttgtgcctcccacttcacctgtgttgtgattggctacggcagctgcttgtttctctacgtgaaacccaagcaaacgcaggcagctgattacaattgggtagtttccctgatggtttcagtagtaactcctttcctcaatcctttcatcttcaccctccggaatgataaagtcatagaggcccttcgggatggggtgaaacgctgctgtcaactattcaggaattagccttgctctgaggacttttacatggtaaagcacttagtatggattctagaataatctgaaaagaacttgctcatctttgaactgcatca

SEQ ID NO: 162518 - DNA, 918 bp, Homo sapiens
  Payload ID: 12002
  Gene Symbol: OR9G1
  Gene Name: olfactory receptor, family 9, subfamily G, member 1
  Uniprot ID: Q8NH87
  ENST ID: ENST00000312153
  CDS Start-End: 1-918
atgcagaggagcaatcatacagtgactgagtttatactgctgggcttcaccacagacccaggaatgcagctgggcctcttcgtggtgttcctgggcgtgtactctctcactgtggtaggaaatagcaccctcatcgtgttgatctgtaatgactcctgcctccacacacccatgtattttttcactggaaatctgtcgtttctggatctctggtattcttctgtctacaccccaaagatcctagtgacctgcatctctgaagacaaaagcatctcctttgctggctgcctgtgtcagttcttcttctctgcagggctggcctatagtgagtgctacctgctggctgccgtggcttatgaccgctacgtggccatctccaagcccctgctttatgcccaggccatgtccataaagctgtgtgcattgctggtagcagtctcatattgtggtggctttattaactcttcaatcatcaccaagaaaacgttttcctttaacttctgccgtgaaaacatcattgatgactttttctgtgatttgcttcccttggtggagctggcctgtggcgagaagggcggctataaaattatgatgtacttcctgctggcctccaatgtcatctgccccgcagtgctcatcctggcctcctacctctttatcatcaccagtgtcttgaggatctcctcctccaagggctacctcaaagccttctccacatgctcctcccacctgacctctgtcactttatactatggctccattctctacatctacgctctccccagatctagctattcttttgatatggacaaaatagtttctacattttacactgtggtattccccatgttgaatctcatgatctacagcctaaggaataaggatgtgaaagaggctctgaaaaaacttctcccataa

SEQ ID NO: 162519 - DNA, 918 bp, Homo sapiens
  Payload ID: 12002
  Gene Symbol: OR9G1
  Gene Name: olfactory receptor, family 9, subfamily G, member 1
  ENST ID: ENST00000573911
  CDS Start-End: 1-918
atgcagaggagcaatcatacagtgactgagtttatactgctgggcttcaccacagacccaggaatgcagctgggcctcttcgtggtgttcctgggcgtgtactctctcactgtggtaggaaatagcaccctcatcgtgttgatctgtaatgactcccgcctccacacacccatgtattttttcattggaaatctgtcgtttctggatctctggtattcttctgtctacaccccaaagatcctagtgacctgcatctctgaagacaaaagcatctcctttgctggctgcctgggtcagttcttcttctctgcagggctggcctatagtgagtgctacctgctggctgccgtggcttatgaccgctacgtggccatctccaagcccctgctttatgctcaggccatgtccataaagctgtgtgcattgctggtagcagtctcatattgtggtggctttattaactcttcaatcatcaccaagaaaacgttttcctttaacttctgccgtgaaaacatcattgatgactttttctgtgatttgcttcccttggtggagctggcctgtggcgagaagggcggctataaaattatgatgtacttcctgctggcctccaatgtcatctgccccgcggtgctcatcctggcctcctacctctttatcatcaccagtgtcttgaggatctcctcctcccagggccgcctcaaagccttctccacatgctcctcccacctgacctctgtcactttatactatggctccattctctacatctacgctctccccagatctagctattcttttgatatggacaaaatagtttctacattttacactgtggtattccccatgttgaatctcatgatctacagcctaaggaataaggatgtgaaagaggctctgaaaaaacttctcccataa

SEQ ID NO: 162520 - DNA, 985 bp, Homo sapiens
  Payload ID: 12003
  Gene Symbol: OR9G4
  Gene Name: olfactory receptor, family 9, subfamily G, member 4
  Uniprot ID: Q8NGQ1
  ENST ID: ENST00000302957
  CDS Start-End: 1-984
atgattttcccttctcatgatagtcaggctttcacctccgtggacatggaagtgggaaattgcaccatcctgactgaattcatcttgttgggtttctcagcagattcccagtggcagccgattctatttggagtgtttctgatgctctatttgataaccttgtcaggaaacatgaccttggttatcttaatccgaactgattcccacttgcatacacctatgtactttttcattggcaatctgtcttttttggatttctggtatacctctgtgtatacccccaaaatcctggccagttgtgtctcagaagataagcgcatttccttggctggatgtggggctcagctgtttttttcctgtgttgtagcctacactgaatgctatctcctggcagccatggcatatgaccgccatgcagcaatttgtaacccattgctttattcaggtaccatgtccaccgccctctgtactgggcttgttgctggctcctacataggaggatttttgaatgccatagcccatactgccaatacattccgcctgcatttttgtggtaaaaatatcattgaccactttttctgtgatgcaccaccattggtaaaaatgtcctgtacaaacaccagggtctacgaaaaagtcctgcttggtgtggtgggcttcacagtactctccagcattcttgctatcctgatttcctatgtcaacatcctcctggctatcctgagaatccactcagcttcaggaagacacaaggcattctccacctgtgcttcccacctcatctcagtcatgctcttctatggatcattgttgtttatgtattcaaggcctagttccacctactccctagagagggacaaagtagctgctctgttctacaccgtgatcaacccactgctcaaccctctcatctatagcctgagaaacaaagatatcaaagaggccttcaggaaagcaacacagactatacaaccacaaacatgaa

SEQ ID NO: 162521 - DNA, 985 bp, Homo sapiens; identical to SEQ ID NO: 162520
  Payload ID: 12003
  Gene Symbol: OR9G4
  Gene Name: olfactory receptor, family 9, subfamily G, member 4
  Uniprot ID: Q8NGQ1
  ENST ID: ENST00000575017
  CDS Start-End: 1-984

SEQ ID NO: 162522 - DNA, 918 bp, Homo sapiens
  Payload ID: 12004
  Gene Symbol: OR9G9
  Gene Name: olfactory receptor, family 9, subfamily G, member 9
  ENST ID: ENST00000571130
  CDS Start-End: 1-918
atgcagaggagcaatcacacagtgactgagtttatactgctgggcttcaccacagacccagggatgcagctgggcctcttcgtggtgttcctgggcgtgtactctctcactgtggtaggaaatagcaccctcatcgtgttgatctgtaatgactcccacctccacacacccatgtattttgtcgttggaaatctgtcgtttctggatctctggtattcttctgtctacaccccaaagatcctagtgatctgcatctctgaagacaaaagcatctcctttgctggctgcctgtgtcagttcttcttctctgcagggctggcctatagtgagtgctgcttactggctgccatggcttatgaccgctacgtggccatctccaagcccctgctttatgcccaggccatgtccataaagctgtgtgcattgctggtagcagtctcatattgtggtggctttattaactcttcaatcatcaccaagaaaacgttttcctttaacttctgctgtgaaaacatcattgatgactttttctgtgatttacttcccttggtgaagctggcctgtggcgagaagggcggctataagtttctgatgtacttcctgctggcctccaatgtcatctgccccgcggtgctcatcctggcctcctacctctttatcatcaccagtgtcttgaggatctcctcctcccagggccgcctcaaagccttctccacatgctcctcccacctgacctctgtcactttatactatggctccattctctacatctatgctctccctagatctagctattcttttgatatggacaaaatagtttctacattttatactgaggtactccccatgttgaatcccatgatctacagcctaaggaataaggatgtgaaagaggctctgaaaaaacttctcccataa

SEQ ID NO: 162523 - DNA, 945 bp, Homo sapiens
  Payload ID: 12005
  Gene Symbol: OR9I1
  Gene Name: olfactory receptor, family 9, subfamily I, member 1
  Uniprot ID: Q8NGQ6
  ENST ID: ENST00000302610
  CDS Start-End: 1-945
atggccaagaataatctcaccagagtaaccgaattcattctcatgggctttatggaccaccccaaattggagattcccctctttctggtgtttctgagtttctacctagtcacccttcttgggaatgtggggatgattatgttaatccaagtagatgtcaaactctacaccccaatgtacttcttcctgagccacctctccctgctggatgcctgttacacctcagtcatcacccctcagatcctagccacattggccacaggcaaaacggtcatctcctacggccactgtgctgcccagttctttttattcaccatctgtgcaggcacagagtgctttctgctggcagtgatggcctatgatcgctatgctgccattcgcaacccactgctctataccgtggccatgaatcccaggctctgctggagcctggtggtaggagcctatgtctgtggggtgtcaggagccatcctgcgtaccacttgcaccttcaccctctccttctgtaaggacaatcaaataaacttcttcttctgtgacctcccacccctgctgaagcttgcctgcagtgacacagcaaacatcgagattgtcatcatcttctttggcaattttgtgattttggccaatgcctccgtcatcctgatttcctatctgctcatcatcaagaccattttgaaagtgaagtcttcaggtggcagggccaagactttctccacatgtgcctctcacatcactgctgtggcccttttctttggagcccttatcttcatgtatctgcaaagtggctcaggcaaatctctggaggaagacaaagtcgtgtctgtcttctatacagtggtcatccccatgctgaaccctctgatctacagcttaagaaacaaagatgtaaaagacgccttcagaaaggtcgctaggagactccaggtgtccctgagcatgtag

SEQ ID NO: 162524 - DNA, 1122 bp, Homo sapiens
  Payload ID: 12006
  Gene Symbol: OR9K2
  Gene Name: olfactory receptor, family 9, subfamily K, member 2
  Uniprot ID: Q8NGE7
  ENST ID: ENST00000305377
  CDS Start-End: 89-1096
tcacagtatacttatgaggcaaaaattaataataacattaatttaaaaatagctttgtaaatcctaataccataagagattatttgtaatgctaggatccaaaccaagagttcatttgtatattttgccctgtgcctctcaacaggtttctaccatgggtgacaggggaacaagcaatcactcagaaatgactgacttcattcttgcaggcttcagggtacgcccagagctccacattctcctcttcctgctatttttgtttgtttatgccatgatccttctagggaatgttgggatgatgaccattattatgactgatcctcggctgaacacaccaatgtattttttcctaggcaatctctccttcattgatcttttctattcatctgttattgaacccaaggctatgatcaacttctggtctgaaaacaagtctatctcctttgcaggctgtgtggcccagctctttctctttgccctcctcattgtgactgagggatttctcctggcggccatggcttatgaccgctttattgccatctgcaaccctctgctctactctgttcaaatgtccacacgtctgtgtactcagttggtggctggttcctatttttgtggctgcattagctcagttattcagactagcatgacatttactttatctttttgcgcttctcgggctgttgaccacttttactgtgattctcgcccacttcagagactgtcttgttctgatctctttatccatagaatgatatctttttccttatcatgtattattatcttgcctactatcatagtcattatagtatcttacatgtatattgtgtccacagttctaaagatacattctactgagggacataagaaggccttctccacctgcagctctcacctgggagttgtgagtgtgctgtatggtgctgtcttttttatgtatctcactcctgacagatttcctgagctgagtaaagtggcatccttatgttactccctagtcactcccatgttgaatcctttgatttactctctgaggaacaaagatgtccaagaggctctaaaaaaatttctagagaagaaaaatattattctttgattattatttctctttcaccaatttta

SEQ ID NO: 162525 - DNA, 2488 bp, Homo sapiens
  Payload ID: 12007
  Gene Symbol: OR9Q1
  Gene Name: olfactory receptor, family 9, subfamily Q, member 1
  Uniprot ID: Q8NGQ5
  ENST ID: ENST00000335397
  CDS Start-End: 317-1249
ggtggcccttgtgcagggaattgaagaagtgcaggaggatgccacacagagatggtagagggagcgaaaggagcaaaggccctaactttcccttaatgatgtctccttccatctttagtccagcccagcaatgtacatgttatccttcccgtttgaagatgaagacactgaggctcagaaagatcaaacgcctttcccaaactcacagctacggcctgacggagccatgtaagcaccaagaagacccttaccagacactgcatgctggtgccttgatcttggacttcccagcctcctgaactggaccactggtgtcatggcagagatgaacctcaccttggtgaccgagttcctccttattgcattcactgaatatcctgaatgggcactccctctcttcctcttgtttttatttatgtatctcatcaccgtattggggaacttagagatgattattctgatcctcatggatcaccagctccacgctccaatgtatttccttctgagtcacctcgctttcatggacgtctgctactcatctatcactgtcccccagatgctggcagtgctgctggagcatggggcagctttatcttacacacgctgtgctgctcagttctttctgttcaccttctttggttccatcgactgctacctcttggccctcatggcctatgaccgctacttggctgtgtgccagcccctgctttatgtcaccatcctgacacagcaggcccgcttgagtcttgtggctggggcttacgttgctggtctcatcagtgccttggtgcggacagtctcagccttcactctctccttctgtggaaccagtgagattgactttattttctgtgacctccctcctctgttaaagttgacctgtggggagagctacactcaagaagtgctgattattatgtttgccatttttgtcatccctgcttccatggtggtgatcttggtgtcctacctgtttatcatcgtggccatcatggggatccctgctggaagccaggccaagaccttctccacctgcacctcccacctcactgctgtgtcactcttctttggtaccctcatcttcatgtacttgagaggtaactcagatcagtcttcggagaagaatcgggtagtgtctgtgctttacacagaggtcatccccatgttgaatcccctcatctacagcctgaggaacaaggaagtgaaggaggccctgagaaaaattctcaatagagccaagttgtcctaaccatctccaaacttggaaaatcccgagaaccacctactctgtagtgtcagaattctggacgctcattatttatagcatgctcaatgtttaaatgaatatattatggtactaggtataaaaaagaaccagaacttttagctccagggagaggaaggaagacaaggaaaagtcaacctgaaaagagattggagtgggagttttgattcccaggacaagtgacaaaaggatttgaaattaaagcctgtgcaatccaaatatggcacacttcacctgtctgtgattataagagtaattttttttgcaaaatttttaatgaaagattttcatcatatagaaatgttaaaaataatatgtaggaagtttcctatactcagtactgagattgtgtaattgctaatatttgctgtctttacttggttacatagatgtaatctatccgtgagtttattcatcaatcaattcactcatcaaaccacctttttttgattcatttcaaggtgagttccggacatcagcattagtaccctttacttctatgcacttcagaattatatcatcaattaggattcaatatttagattacatttatttttaatgatcaaactatggtcgtttgatgatccaattagcaaagctgaccctactcaaggtatgccttaatattctggtagtagttctcaagaaggcctcacacaaacttttaacaatgcctacaataacatgtctgtcaattgctatcacctctggatatatgccctgttctttttcttcctacctattacagttctctctcgtcatatggcatgactaaaaatccacttagcaaagttataccattcccactgcccataatggcgtcttcagtgtctgtatcatagacattgactctctgtgttctgaaagctttttccttcagggaggcagaacattgctgcattccacatggcgataggcaggagggtggtcctcgcctatcctgggtccctgcactctgcagcagctcagcctgcatccaaagcctcacaaaatctgtctgttcttaatctttacttctctaatcacaggggacttgtctcaatcaaacccaaggcactggaagagagcaggccccatctattaattttttttcatttaaacaaatttttatacctggaactcaaacttcttttcctgtctcctggattactaaaaaaaaaaaaaaaaaaaaaaatccaaaaccaaaacaacaacaacaaaaaa

SEQ ID NO: 162526 - DNA, 2134 bp, Homo sapiens
  Payload ID: 12007
  Gene Symbol: OR9Q1
  Gene Name: olfactory receptor, family 9, subfamily Q, member 1
  Uniprot ID: Q8NGQ5
  ENST ID: ENST00000612174
  CDS Start-End: 15-947
ggaccactggtgtcatggcagagatgaacctcaccttggtgaccgagttcctccttattgcattcactgaatatcctgaatgggcactccctctcttcctcttgtttttatttatgtatctcatcaccgtattggggaacttagagatgattattctgatcctcatggatcaccagctccacgctccaatgtatttccttctgagtcacctcgctttcatggacgtctgctactcatctatcactgtcccccagatgctggcagtgctgctggagcatggggcagctttatcttacacacgctgtgctgctcagttctttctgttcaccttctttggttccatcgactgctacctcttggccctcatggcctatgaccgctacttggctgtgtgccagcccctgctttatgtcaccatcctgacacagcaggcccgcttgagtcttgtggctggggcttacgttgctggtctcatcagtgccttggtgcggacagtctcagccttcactctctccttctgtggaaccagtgagattgactttattttctgtgacctccctcctctgttaaagttgacctgtggggagagctacactcaagaagtgctgattattatgtttgccatttttgtcatccctgcttccatggtggtgatcttggtgtcctacctgtttatcatcgtggccatcatggggatccctgctggaagccaggccaagaccttctccacctgcacctcccacctcactgctgtgtcactcttctttggtaccctcatcttcatgtacttgagaggtaactcagatcagtcttcggagaagaatcgggtagtgtctgtgctttacacagaggtcatccccatgttgaatcccctcatctacagcctgaggaacaaggaagtgaaggaggccctgagaaaaattctcaatagagccaagttgtcctaaccatctccaaacttggaaaatcccgagaaccacctactctgtagtgtcagaattctggacgctcattatttatagcatgctcaatgtttaaatgaatatattatggtactaggtataaaaaagaaccagaacttttagctccagggagaggaaggaagacaaggaaaagtcaacctgaaaagagattggagtgggagttttgattcccaggacaagtgacaaaaggatttgaaattaaagcctgtgcaatccaaatatggcacacttcacctgtctgtgattataagagtaattttttttgcaaaatttttaatgaaagattttcatcatatagaaatgttaaaaataatatgtaggaagtttcctatactcagtactgagattgtgtaattgctaatatttgctgtctttacttggttacatagatgtaatctatccgtgagtttattcatcaatcaattcactcatcaaaccacctttttttgattcatttcaaggtgagttccggacatcagcattagtaccctttacttctatgcacttcagaattatatcatcaattaggattcaatatttagattacatttatttttaatgatcaaactatggtcgtttgatgatccaattagcaaagctgaccctactcaaggtatgccttaatattctggtagtagttctcaagaaggcctcacacaaacttttaacaatgcctacaataacatgtctgtcaattgctatcacctctggatatatgccctgttctttttcttcctacctattacagttctctctcgtcatatggcatgactaaaaatccacttagcaaagttataccattcccactgcccataatggcgtcttcagtgtctgtatcatagacattgactctctgtgttctgaaagctttttccttcagggaggcagaacattgctgcattccacatggcgataggcaggagggtggtcctcgcctatcctgggtccctgcactctgcagcagctcagcctgcatccaaagcctcacaaaatctgtctgttcttaatctttacttctctaatcacaggggacttgtctcaatcaaacccaaggcactggaagagagcaggccccatctattaattttttttcatttaaacaaatttttatacctggaactcaaacttcttttcctgtctcctggattact

SEQ ID NO: 162527 - DNA, 1085 bp, Homo sapiens
  Payload ID: 12008
  Gene Symbol: OR9Q2
  Gene Name: olfactory receptor, family 9, subfamily Q, member 2
  Uniprot ID: Q8NGE9
  ENST ID: ENST00000311591
  CDS Start-End: 58-1002
tgagctgtcccctcatctggctcttgtcttagccgttgcaggtgaaccactggatggatggctgaaaggaattacaccgtagtgacggagttcttccttactgcatttactgaacatctccagtggagggttcctctcttcctcatatttttgagtttctatcttgccactatgttagggaacacaggcatgatcctcctgatccgtggcgatcgtcggctccacaccccgatgtacttcttcctcagccacctttccttggtggacatctgctactcgtccgccatcatccctcagatgctggctgtgctgtgggagcacggcacaaccatctcccaggctcgctgtgcagctcagttcttcctcttcaccttctttgcctccatcgactgctaccttctggccatcatggcctatgaccgctacacggccgtgtgccagcccctgctttatgtcaccatcataaccgagaaggcccgctggggcctagtcactggggcttacgttgctggttttttcagtgcctttgttcgaacggtcacagccttcactctctccttttgtggaaacaatgagatcaacttcattttctgtgacctccctcctctattaaaactctcctgtggggacagctacactcaggaagtggtgattattgtgtttgctcttttcgtcatgcctgcctgtatcttggtgatcttggtatcctacctgtttatcattgtggccatcctgcagatccactctgctggaggccgggccaagaccttctccacctgcgcctcccacctcactgccgtcgctcttttctttggcaccctcatcttcatgtacctgcgagacaacacaggccagtcctccgagggagaccgagtggtgtctgtgctctacacggtggtgaccccaatgctgaatccccttatctatagcctgagaaacaaggaggtaaaagaggccactaggaaagccctgagcaaatcaaagcctgctagaagaccctaaatggacccttgtgaaatatatcattccttagtttccccatcttttctgtcttttctcaatagcaccttctggagagactttcc

SEQ ID NO: 162528 - DNA, 3262 bp, Homo sapiens
  Payload ID: 12009
  Gene Symbol: OLIG2
  Gene Name: oligodendrocyte lineage transcription factor 2
  Uniprot ID: Q13516
  ENST ID: ENST00000333337
  CDS Start-End: 929-1900
ggatgcttattatagatcgacgcgacaccagcgcccggtgccaggttctcccctgaggcttttcggagcgagctcctcaaatcgcatccagagtaagtgtccccgccccacagcagccgcagcctagatcccagggacagactctcctcaactcggctgtgacccagaatgctccgatacagggggtctggatccctactctgcgggccatttctccagagcgactttgctcttctgtcctccccacactcaccgctgcatctccctcaccaaaagcgagaagtcggagcgacaacagctctttctgcccaagccccagtcagctggtgagctccccgtggtctccagatgcagcacatggactctgggccccgcgccggctctgggtgcatgtgcgtgtgcgtgtgtttgctgcgtggtgtcgatggagataaggtggatccgtttgaggaaccaaatcattagttctctatctagatctccattctccccaaagaaaggccctcacttcccactcgtttattccagcccgggggctcagttttcccacacctaactgaaagcccgaagcctctagaatgccacccgcaccccgagggtcaccaacgctccctgaaataacctgttgcatgagagcagaggggagatagagagagcttaattataggtacccgcgtgcagctaaaaggagggccagagatagtagcgagggggacgaggagccacgggccacctgtgccgggaccccgcgctgtggtactgcggtgcaggcgggagcagcttttctgtctctcactgactcactctctctctctctccctctctctctctctcattctctctcttttctcctcctctcctggaagttttcgggtccgagggaaggaggaccctgcgaaagctgcgacgactatcttcccctggggccatggactcggacgccagcctggtgtccagccgcccgtcgtcgccagagcccgatgacctttttctgccggcccggagtaagggcagcagcggcagcgccttcactgggggcaccgtgtcctcgtccaccccgagtgactgcccgccggagctgagcgccgagctgcgcggcgctatgggctctgcgggcgcgcatcctggggacaagctaggaggcagtggcttcaagtcatcctcgtccagcacctcgtcgtctacgtcgtcggcggctgcgtcgtccaccaagaaggacaagaagcaaatgacagagccggagctgcagcagctgcgtctcaagatcaacagccgcgagcgcaagcgcatgcacgacctcaacatcgccatggatggcctccgcgaggtcatgccgtacgcacacggcccttcggtgcgcaagctttccaagatcgccacgctgctgctggcgcgcaactacatcctcatgctcaccaactcgctggaggagatgaagcgactggtgagcgagatctacgggggccaccacgctggcttccacccgtcggcctgcggcggcctggcgcactccgcgcccctgcccgccgccaccgcgcacccggcagcagcagcgcacgccgcacatcaccccgcggtgcaccaccccatcctgccgcccgccgccgcagcggctgctgccgccgctgcagccgcggctgtgtccagcgcctctctgcccggatccgggctgccgtcggtcggctccatccgtccaccgcacggcctactcaagtctccgtctgctgccgcggccgccccgctggggggcgggggcggcggcagtggggcgagcgggggcttccagcactggggcggcatgccctgcccctgcagcatgtgccaggtgccgccgccgcaccaccacgtgtcggctatgggcgccggcagcctgccgcgcctcacctccgacgccaagtgagccgactggcgccggcgcgttctggcgacaggggagccaggggccgcggggaagcgaggactggcctgcgctgggctcgggagctctgtcgcgaggaggggcgcaggaccatggactgggggtggggcatggtggggattccagcatctgcgaacccaagcaatgggggcgcccacagagcagtggggagtgaggggatgttctctccgggacctgatcgagcgctgtctggctttaacctgagctggtccagtagacatcgttttatgaaaaggtaccgctgtgtgcattcctcactagaactcatccgacccccgacccccacctccgggaaaagattctaaaaacttctttccctgagagcgtggcctgacttgcagactcggcttgggcagcacttcggggggggagggggtgttatgggagggggacacattggggccttgctcctcttcctcctttcttggcgggtgggagactccgggtagccgcactgcagaagcaacagcccgaccgcgccctccagggtcgtccctggcccaaggccaggggccacaagttagttggaagccggcgttcggtatcagaagcgctgatggtcatatccaatctcaatatctgggtcaatccacaccctcttagaactgtggccgttcctccctgtctctcgttgatttgggagaatatggttttctaataaatctgtggatgttccttcttcaacagtatgagcaagtttatagacattcagagtagaaccacttgtggattggaataacccaaaactgccgatttcaggggcgggtgcattgtagttattattttaaaatagaaactaccccaccgactcatctttccttctctaagcacaaagtgatttggttattttggtacctgagaacgtaacagaattaaaaggcagttgctgtggaaacagtttgggttatttgggggttctgttggctttttaaaattttcttttttggatgtgtaaatttatcaatgatgaggtaagtgcgcaatgctaagctgtttgctcacgtgactgccagccccatcggagtctaagccggctttcctctattttggtttatttttgccacgtttaacacaaatggtaaactcctccacgtgcttcctgcgttccgtgcaagccgcctcggcgctgcctgcgttgcaaactgggctttgtagcgtctgccgtgtaacacccttcctctgatcgcaccgcccctcgcagagagtgtatcatctgttttatttttgtaaaaacaaagtgctaaataatatttattacttgtttggttgcaaaaacggaataaatgactgagtgttgagattttaaataaaatttaaagtaaa

SEQ ID NO: 162529 - DNA, 2578 bp, Homo sapiens
  Payload ID: 12009
  Gene Symbol: OLIG2
  Gene Name: oligodendrocyte lineage transcription factor 2
  Uniprot ID: Q13516
  ENST ID: ENST00000382357
  CDS Start-End: 245-1216
gcacattgttccccgcccccgcccccgccaccgctgccgccgtcgccgctgccaccgggctataaaaaccggccgagcccctaaaggtgcggatgcttattatagatcgacgcgacaccagcgcccggtgccaggttctcccctgaggcttttcggagcgagctcctcaaatcgcatccagattttcgggtccgagggaaggaggaccctgcgaaagctgcgacgactatcttcccctggggccatggactcggacgccagcctggtgtccagccgcccgtcgtcgccagagcccgatgacctttttctgccggcccggagtaagggcagcagcggcagcgccttcactgggggcaccgtgtcctcgtccaccccgagtgactgcccgccggagctgagcgccgagctgcgcggcgctatgggctctgcgggcgcgcatcctggggacaagctaggaggcagtggcttcaagtcatcctcgtccagcacctcgtcgtctacgtcgtcggcggctgcgtcgtccaccaagaaggacaagaagcaaatgacagagccggagctgcagcagctgcgtctcaagatcaacagccgcgagcgcaagcgcatgcacgacctcaacatcgccatggatggcctccgcgaggtcatgccgtacgcacacggcccttcggtgcgcaagctttccaagatcgccacgctgctgctggcgcgcaactacatcctcatgctcaccaactcgctggaggagatgaagcgactggtgagcgagatctacgggggccaccacgctggcttccacccgtcggcctgcggcggcctggcgcactccgcgcccctgcccgccgccaccgcgcacccggcagcagcagcgcacgccgcacatcaccccgcggtgcaccaccccatcctgccgcccgccgccgcagcggctgctgccgccgctgcagccgcggctgtgtccagcgcctctctgcccggatccgggctgccgtcggtcggctccatccgtccaccgcacggcctactcaagtctccgtctgctgccgcggccgccccgctggggggcgggggcggcggcagtggggcgagcgggggcttccagcactggggcggcatgccctgcccctgcagcatgtgccaggtgccgccgccgcaccaccacgtgtcggctatgggcgccggcagcctgccgcgcctcacctccgacgccaagtgagccgactggcgccggcgcgttctggcgacaggggagccaggggccgcggggaagcgaggactggcctgcgctgggctcgggagctctgtcgcgaggaggggcgcaggaccatggactgggggtggggcatggtggggattccagcatctgcgaacccaagcaatgggggcgcccacagagcagtggggagtgaggggatgttctctccgggacctgatcgagcgctgtctggctttaacctgagctggtccagtagacatcgttttatgaaaaggtaccgctgtgtgcattcctcactagaactcatccgacccccgacccccacctccgggaaaagattctaaaaacttctttccctgagagcgtggcctgacttgcagactcggcttgggcagcacttcggggggggagggggtgttatgggagggggacacattggggccttgctcctcttcctcctttcttggcgggtgggagactccgggtagccgcactgcagaagcaacagcccgaccgcgccctccagggtcgtccctggcccaaggccaggggccacaagttagttggaagccggcgttcggtatcagaagcgctgatggtcatatccaatctcaatatctgggtcaatccacaccctcttagaactgtggccgttcctccctgtctctcgttgatttgggagaatatggttttctaataaatctgtggatgttccttcttcaacagtatgagcaagtttatagacattcagagtagaaccacttgtggattggaataacccaaaactgccgatttcaggggcgggtgcattgtagttattattttaaaatagaaactaccccaccgactcatctttccttctctaagcacaaagtgatttggttattttggtacctgagaacgtaacagaattaaaaggcagttgctgtggaaacagtttgggttatttgggggttctgttggctttttaaaattttcttttttggatgtgtaaatttatcaatgatgaggtaagtgcgcaatgctaagctgtttgctcacgtgactgccagccccatcggagtctaagccggctttcctctattttggtttatttttgccacgtttaacacaaatggtaaactcctccacgtgcttcctgcgttccgtgcaagccgcctcggcgctgcctgcgttgcaaactgggctttgtagcgtctgccgtgtaacacccttcctctgatcgcaccgcccctcgcagagagtgtatcatctgttttatttttgtaaaaacaaagtgctaaataatatttattacttgtttggttgcaaaaacggaataaatgactgagtgttgagattttaaataaaatttaaagtaaa

SEQ ID NO: 162530 - DNA, 575 bp, Homo sapiens
  Payload ID: 12009
  Gene Symbol: OLIG2
  Gene Name: oligodendrocyte lineage transcription factor 2
  ENST ID: ENST00000430860
  CDS Start-End: 389-575
ggatgcttattatagatcgacgcgacaccagcgcccggtgccaggttctcccctgaggcttttcggagcgagctcctcaaatcgcatccagagtaagtgtccccgccccacagcagccgcagcctagatcccagggacagactctcctcaactcggctgtgacccagaatgctccgatacagggggtctggatccctactctgcgggccatttctccagagcgactttgctcttctgtcctccccacactcaccgctgcatctccctcaccaaaagcgagaagtcggagcgacaacagctctttctgcccaagccccagtcagctgttttcgggtccgagggaaggaggaccctgcgaaagctgcgacgactatcttcccctggggccatggactcggacgccagcctggtgtccagccgcccgtcgtcgccagagcccgatgacctttttctgccggcccggagtaagggcagcagcggcagcgccttcactgggggcaccgtgtcctcgtccaccccgagtgactgcccgccggagctgagcgccgagctgcgcggcgctatgggctctgcgg

SEQ ID NO: 162531 - DNA, 1947 bp, Homo sapiens
  Payload ID: 12010
  Gene Symbol: OMG
  Gene Name: oligodendrocyte myelin glycoprotein
  Uniprot ID: P23515
  ENST ID: ENST00000247271
  CDS Start-End: 263-1585
acaaattttttaaaaaattgtccattttgttgcgtgtgcacctcttgccataaatttgagtcagcaccagcgacagctctgcagtcctcctatgtggtactgatcaggtggttgcagagcttcagctcacagcaacacaatgcagctgagcaggcaagcacagcccacagccagaaacagttccgactctacagaacaagacgacctttaagtttcccagagaaaatgagatgctgatgttgaagacgacaccacggctttgatggaatatcagatattgaaaatgtctctctgcctgttcatccttctgtttctcacacctggtattttatgcatttgtcctctccaatgtatatgcacagagaggcacaggcatgtggactgttcaggcagaaacttgtctacattaccatctggactgcaagagaatattatacatttaaacctgtcttataaccactttactgatctgcataaccagttaacccaatataccaatctgaggaccctggacatttcaaacaacaggcttgaaagcctgcctgctcacttacctcggtctctgtggaacatgtctgctgctaacaacaacattaaacttcttgacaaatctgatactgcttatcagtggaatcttaaatatctggatgtttctaagaacatgctggaaaaggttgtcctcattaaaaatacactaagaagtctcgaggttctcaacctcagtagtaacaaactttggacagttccaaccaacatgccctccaaactacatatcgtggacctgtctaataattctttgacacaaattcttccaggtacattaataaacctgacaaatctcacacatctttacctgcacaacaataagttcacattcattccagaccaatcttttgaccaactctttcagttgcaagagataaccctttacaataacaggtggtcatgtgaccacaaacaaaacattacttacttactgaagtggatgatggaaacaaaagcccatgtgatagggactccatgttctacccaaatatcatctttaaaggaacataacatgtatcccacaccttctggatttacctcaagcttattcactgtaagtgggatgcagacagtggacaccattaactctctgagtgtggtaactcaacccaaagtgaccaaaatacccaaacaatatcgaacaaaggaaacaacgtttggtgccactctaagcaaagacaccacctttactagcactgataaggcttttgtgccctatccagaagatacatccacagagactatcaattcacatgaagcagcagctgcaactctaactattcatctccaagatggaatggtcacaaacacaagcctcactagctcaacaaaatcatccccaacacccatgaccctaagtatcactagtggcatgccaaataatttctctgaaatgcctcaacaaagcacaacccttaacttatggagggaagagacaaccacaaatgtaaagactccattaccttctgtggcaaatgcttggaaagtaaatgcttcatttctcttattgctcaatgttgtggtcatgctggctgtctgagggtctgcattttctgaaactaatgaaagcactcctccctgatgtacagttgggaaaatatgtccatatctaaccagtgattcgagctatatttaagtattcaagaaagccagtcttaacatttctaactctgatgtaaatgaagtaacttgtcttaaataaaagaaatgcacaatgtcttggtacttgctgctattttactgtcttaattaagtaaactaatgagtttcttttataaaaaaaatgaaatgttttaaggcttcaatttattgcacaaaatataaagcatctaaactttaatatgtattttatgtatgtttacactgtcaaacatctggaaaataaaaggtctatgctcataa

SEQ ID NO: 162532 - DNA, 2277 bp, Homo sapiens
  Payload ID: 12011
  Gene Symbol: OLIG1
  Gene Name: oligodendrocyte transcription factor 1
  Uniprot ID: Q8TAK6
  ENST ID: ENST00000382348
  CDS Start-End: 104-919
atcgtttccccgcgcgcaggtccgcggggaggggcggcctgccgaccggcccaccccagggcgttcctgaagggcgtcctcggccgcccccaccgcctcccagatgtactatgcggtttcccaggcgcgcgtgaacgcggtccccgggaccatgctgcggccacagcggcccggagacttgcagctcggggcctccctctacgagctggtgggctacaggcagccgccctcctcctcctcctcctccacctcctccacctcctccacttcctcctcctccacgacggcccccctcctccccaaggctgcgcgcgagaagccggaggcgccggccgagcctccaggccccgggcccgggtcaggcgcgcacccgggcggcagcgcccggccggacgccaaggaggagcagcagcagcagctgcggcgcaagatcaacagccgcgagcggaagcgcatgcaggacctgaacctggccatggacgccctgcgcgaggtcatcctgccctactcagcggcgcactgccagggcgcgcccggccgcaagctctccaagatagccacgctgctgctcgcccgcaactacatcctactgctgggcagctcgctgcaggagctgcgccgcgcgctgggcgagggcgccgggcccgccgcgccgcgcctgctgctggccgggctgcccctgctcgccgccgcgcccggctccgtgctgctggcgcccggcgccgtaggaccccccgacgcgctgcgccccgccaagtacctgtcgctggcgctggacgagccgccgtgcggccagttcgctctccccggcggcggcgcaggcggccccggcctctgcacctgcgccgtgtgcaagttcccgcacctggtcccggccagcctgggcctggccgccgtgcaggcgcaattctccaagtgagggcgggcctgggcctggggcgcgacctcggcccggcctcccttcgctcagcttctccgcgcccctgctccctgcgtctgggagagcgaggccgagcaaggaaagcatttcgaaccttccagtccagaggaagggactgtcgggcacccccttccccgcccccacccctgggacgttaaagtgaccagagcggatgttcgatggcgcctcggggcagtttggggttctgggtcggttccagcggctttaggcagaaagtgctcgctctcacccagcacatctctctccttgtccctggagttgcgcgcttcgcggggccgatgtagaacttagggcgccttgccgtggttggcgcgccccgggtgcagcgagaggccatccccgagcgctacctccccggagcggagcacgccggctcccagtactaggggctgcgctcgagcagtggcgggggcggaggggtggttcttttccttctcctccgccagaggccacgggcgcccttgttcccgccggccaggtcctatcaaaggaggctgccggaactcaagaggcagaaaaagaccagttaggcggtgcagacggtctgggacgtggcagacggacggaccctcggcggacaggtggtcggcgtcggggtgcggtgggtaggggcgaggacaacgcagggtgcgctgggttgggacgtgggtccacttttgtagaccagctgtttggagagctgtatttaagactcgcgtatccagtgttttgtcgcagagagttttcgctcttaaatcctgggggtttcttagaaagcaacttagaactcgagattcacctttcgtttccctttccccaaaagtagcgtaaccaacatttaagcttgcttaaaaacgaaaaccaaccgccttgcatccagtgttcccgatttactaaaataggtaaccaggcgtctcacagtcgccgtcctgtcaagagcgctaatgaacgttctcattaacacgcaggagtaccgggagccctgaaccgcccgctgctcggcggatcccagctgcggtggcgacggcgggaaggcgctttccgctgttcctcagcgggccgggcccttgaccagcgcggcccgcaggtcttccttctcgccgtcttgcagttgaagagctacatacgtagtcagtttcgatttgttacagacgttaacaaattcctttacccaaggttatgctatgacctttccgcagtttactttgattttctatgtttaaggttttggttgttggtagtagccgaatttaactggcactttattttacttctaaccttgtttcctgacggtgtacagaatcaacaaaataaaacatttaaagtctgatttttta

SEQ ID NO: 162533 - DNA, 1083 bp, Homo sapiens
  Payload ID: 12011
  Gene Symbol: OLIG1
  Gene Name: oligodendrocyte transcription factor 1
  ENST ID: ENST00000426947
  CDS Start-End: 1-98
gcggccccggcctctgcacctgcgccgtgtgcaagttcccgcacctggtcccggccagcctgggcctggccgccgtgcaggcgcaattctccaagtgagggcgggcctgggcctggggcgcgacctcggcccggcctcccttcgctcagcttctccgcgcccctgctccctgcgtctgggagagcgaggccgagcaaggaaagcatttcgaaccttccagtccagaggaagggactgtcgggcacccccttccccgcccccacccctgggacgttaaagtgaccagagcggatgttcgatggcgcctcggggcagtttggggttctgggtcggttccagcggctttaggcagaaagtgctcgctctcacccagcacatctctctccttgtccctggagttgcgcgcttcgcggggccgatgtagaacttagggcgccttgccgtggttggcgcgccccgggtgcagcgagaggccatccccgagcgctacctccccggagcggagcacgccggctcccagtactaggggctgcgctcgagcagtggcgggggcggaggggtggttcttttccttctcctccgccagaggccacgggcgcccttgttcccgccggccaggtcctatcaaaggaggctgccggaactcaagaggcagaaaaagaccagttaggcggtgcagacggtctgggacgtggcagacggacggaccctcggcggacaggagtaccgggagccctgaaccgcccgctgctcggcggatcccagctgcggtggcgacggcgggaaggcgctttccgctgttcctcagcgggccgggcccttgaccagcgcggcccgcaggtcttccttctcgccgtcttgcagttgaagagctacatacgtagtcagtttcgatttgttacagacgttaacaaattcctttacccaaggttatgctatgacctttccgcagtttactttgattttctatgtttaaggttttggttgttggtagtagccgaatttaactggcactttattttacttctaaccttgtttcctgacggtgtacagaatcaacaaaataaaacatttaaagtctga

SEQ ID NO: 162534 - DNA, 2049 bp, Homo sapiens
  Payload ID: 12012
  Gene Symbol: OLIG3
  Gene Name: oligodendrocyte transcription factor 3
  Uniprot ID: Q7RTU3
  ENST ID: ENST00000367734
  CDS Start-End: 81-899
ttttttttttttaattcaagattttctttaatttcccgcctaaagcctccccacggtagggccgcatcccctgtaataaaatgaattctgattcgagctctgtctccagcagagcttcatctccggacatggatgagatgtacctgagggaccaccaccaccgccaccaccaccaccaggagagccgtctcaactcggtctcgtccacgcagggcgatatgatgcagaagatgcccggggaaagcctctcgcgggctggcgccaaggccgcgggagagagcagcaagtacaaaatcaagaagcagctgtcggagcaggacctacagcagttgaggctgaagatcaacggacgcgaacgcaagcggatgcacgacctgaacctagccatggacgggctgcgcgaagtcatgccctacgcgcatgggccgtcggtgcgcaagctctccaagatcgccacactcctgctcgccagaaactacatcctcatgctcaccagctccctggaggagatgaagaggctggttggcgagatctatgggggccaccactcggcctttcactgcgggaccgtgggccactcggccggccaccccgcgcacgcggccaactccgtgcacccggtgcaccccatcttgggcggcgcgctctcatctggcaacgcctcgtcaccgctgtccgccgcctcacttcccgccatcggcaccatccggcctccccactcgctactcaaggcgccctccacgccgcccgcgctgcagctgggcagcggcttccagcactgggctggtctgccctgcccctgcaccatctgccagatgccgccgccgccgcacctgtccgctctctccacagccaacatggcccggctgtcggccgagtccaaggacttgctcaagtgagcagcgggcgggcccggctgccaaggaggagggagagcggcgggaggggccgcggtgccgggccgggagggaagagggaggctgcacgctcggcccacgggagggcaggctccggggcccgcagcctcccacgctgtctgagagatctcagactccacttgacccccggagggaaaggaccaaaatcaaaccgcaatttctaggtggtagcaaagggggactcgaaccagatgtcgtgtgttttgcatgcatgcttcttttccccatgccgcgccagtatttttcactgccatatgctcttgtcaaaactgcatttgttgtataaagatgggatcggtgtagttaaaaacttgcgaagggacttttgagttggctttctctgactctgtgttctcgctttggaaaaagacggccatcccttttgtgcaaaacaaatgtaaatattttcttgagatggatgcgattatgattgtctctgtccttgccacagtttttctagagacaatggagagagaaagagagagagagcgcgagagagatcaagacccaagttttgaatctcaaccgaggtccagggcatgacacctcctatgtgggttttcctttcgacgcagtgtaggtcaaaagaatgcatgcacgcttctaaatgaatcttgtctgaatatgtcgtgcaggctgtggtgccgttttccttgtaacaaggatttattagtgaattatcccaagtactccatatatctgtctgtggttgtatgaaatgaaaaaaggggcagagtgcaaagacccacactcacgcacacgcgcttcttctcccacccccacccccttcaaactttattcggaaccttcctttgctgttctggggccgctattgtaaaagcctgggctccctctagtagcttgcgccaccccccctcgctcagttattctgcatgcggggttggctctctctattatcagctttgaaaacttatcctggttttgggaggggtgccgtttttattttcctgaacatttgcttgaaatattttgttagggcctcaaagacgatacctgtctttattttttatatattcttgataactatgatatatttattaataaccagtgtttctggatgagatttcaaataaaaaagaacctttaaatc

SEQ ID NO: 162535 - DNA, 3557 bp, Homo sapiens
  Payload ID: 12013
  Gene Symbol: OPALIN
  Gene Name: oligodendrocytic myelin paranodal and inner loop protein
  Uniprot ID: Q96PE5
  ENST ID: ENST00000371172
  CDS Start-End: 407-832
ccagcctcagcctcatgtaacccattgtttccaaagggctgcaggctgcagaagcccccaagctctcaggccagctgtggcttctttgctgagatggaggtatagccaagaaagcagcctgaaaagtaaggacagaaaatcaaggcaaagagggtgggtgaaccaggccatacacgtcggccatgcagcagcagcccatctttcccgagggatggactgagggcttggctactcccctgaccataaatggcttggccagggttctcttggagccacctctcagcctgcctctgcagctttgtcagttaactgttcctacaaatgaaagacacaagccaataaagccagtgagaaaggagcttaccaaaggcagtgtacgaagaaggttcctgggagactgtcagaaatgagtttttcactgaacttcaccctgccggcgaacacaacgtcctctcctgtcacaggtgggaaagaaacggactgtgggccctctcttggattagcggcgggcataccattgctggtggccacagccctgctggtggctttactatttactttgattcaccgaagaagaagcagcattgaggccatggaggaaagtgacagaccatgtgaaatttcagaaattgatgacaatcccaagatatctgagaatcctaggagatcacccacacatgagaagaatacgatgggagcacaagaggcccacatatatgtgaagactgtagcaggaagcgaggaacctgtgcatgaccgttaccgtcctactatagaaatggaaagaaggaggggattgtggtggcttgtgcccagactgagcctggaatgatgcagctcagtcaaggagcagcagacctggcactggaacagggttgaaaacccagggttttgtacttggagaggaaagatgccaagctgcttcttaatcaatccaaatttcatttacagctctggaacactttggggctgatttgtctctttaggggacatccccaacatggttaattccaactctcagatcttgtgctttagttagtacatgtgactcaccagatggggtccttagatcctattcctgctcccagtgggaatttgcttttctttgtcattttgggaaaggggcttggtttctgagtgtcttgccttctcatctttttttttcatatcctttttctcaaaaaagccatcagatctgactttcatggaagtgttgctgaggtcagcctggtgcaagttgggatacaaatgaaacttatgcaggatgtgtgagaggaagcagttaattgtttctgaatatctcagggtaggaaccatgtggagccacacattccctgaccacagggaagcacctggctcaatcatgtcacacagcagtggaaagaatacggactcttaagtcacacctaccactgagcagctgtacgactttggagaagttgtttaacattttcaagcctcagtttttgcttttttaaaggaggggaaatatttgcctcatgtcataattgaaaagattaaataagaaataaagggaagtgtctgctacttagttgccagtcaaaatgttagttctctctctctaccaccttcttcctacctcttcccatattgcttgcctgataaaacagctaatcaccagcatttgttccccatagtcacagggccacacaagggaacatttaggacaaactttctccatggcctatgatccaaattgttatctaaagatgattctaggtgttgctggtagtatgtgaatcttccaatctaggtgtgatcgtgtcctcatatgaatcaggaaaaggcagtttcttacaagttccgaattccaaatacagagactggtggtgttacatttaaccttaaagatgttaatgttgatggaaattcatgtttcatattaaaacaacactttgtctttacaatgaaacattttgcttaatttttaaagtaagacattatgatacctctgatggcagttcctcaaataactttaacttttgtgctttagggatagttgttaaagttacaacttcttttattttattttttaaaggcttcagattaaacaagagcccttaagcccacgcatagcattgccgcttcagcttgctgaggactgtctccaaggaggccaaatggaaaaggagaggctacttcaagtggtgttggcccattgagcctattgggcaaactataaccaggttgccttattttgggtggattactccaggagaggccaccctccagctttctcttatcccagtaactcctcttcccattttccaatccatccccagccttttttttttttcttctgtactcttcttttgccttcaatatgagtttcatttcctctgtgtctttgggcagacttccttctaacatgtgtcagctaccctaccacacacctggcctaggagacacatcattcattgctcctacttgtgtctgtaatcagagagtatttaaggagggcagttctgcgacggactgtgtgtgtgttgaaagtaaagatggggggccgcggggaaggcaagagtttttccaaaagattattagaaatgagggctgtatctactctgtggagtagaaccaagtctacttggagaaaagaaccaagtccttggatatctaggggaaagctgtttggcagaaagaaaaatcaagaggacccaaggggatggagacaggaccacaggaatgggccaaggagcaacgtgcctgccattcagccagcttgggacaggctttcactttcactcccatgaggaggcttccaggcagcctggttcccccatgtatagccattgccctctagcaggccaggcctcccagtgggaaggcctgggtccagggcatcttaagttcatccagcagctccatgagccacacagatatcctagaaaatattcctttctcacacagggcttctgattactcagaaacatgcccctcttccctgaataaccaagaacatgttctatgaacccaatctctgccacatgtcaatacctgctcttcaaagccccttttgaaactcagttttgtgccaagtcctctggatctaattaccttaaacaagcagatttagccatttttaaacagacattcccagtcatcctggtgcttgtacttctcctacatgtcatgaaggaccttggatttactgagaactcagccgtggccttggctttgatacttataggtgtcagcccttgggccgattgttgatcatccagagcctcagttctgtacttgtaaagtggagacagcagttctcatcctccatccttttagcccatggggtggttgtaaggctggattgaaatatgcatgtgactaagccatgtagctataaagtgagggatgacttgtgttttggatcacttattttaattctacttataatccacggcttagaatatttaaacattgtttctattaaactagaaaggttcagcatttctgtcatttacttctgctatgatacacaagaacttatgttggaatgaagtgaaaagtaaaatggccattcttatgaacctacaaaa

SEQ ID NO: 162536 - DNA, 3578 bp, Homo sapiens
  Payload ID: 12013
  Gene Symbol: OPALIN
  Gene Name: oligodendrocytic myelin paranodal and inner loop protein
  ENST ID: ENST00000393870
  CDS Start-End: 470-859
aatgactccatcattatcagtaacatggttaatgtggactcccgtcagctggggatggagtggccagcctcagcctcatgtaacccattgtttccaaagggctgcaggctgcagaagcccccaagctctcaggccagctgtggcttctttgctgagatggaggtatagccaagaaagcagcctgaaaagtaaggacagaaaatcaaggcaaagagggtgggtgaaccaggccatacacgtcggccatgcagcagcagcccatctttcccgagggatggactgagggcttggctactcccctgaccataaatggcttggccagggttctcttggagccacctctcagcctgcctctgcagctttgtcagttaactgttcctacaaatgaaagacacaagccaataaagccagtgagaaaggagcttaccaaaggcagtgtacgaagaaggttcctgggagactgtcagaaatgacgtcctctcctgtcacaggtgggaaagaaacggactgtgggccctctcttggattagcggcgggcataccattgctggtggccacagccctgctggtggctttactatttactttgattcaccgaagaagaagcagcattgaggccatggaggaaagtgacagaccatgtgaaatttcagaaattgatgacaatcccaagatatctgagaatcctaggagatcacccacacatgagaagaatacgatgggagcacaagaggcccacatatatgtgaagactgtagcaggaagcgaggaacctgtgcatgaccgttaccgtcctactatagaaatggaaagaaggaggggattgtggtggcttgtgcccagactgagcctggaatgatgcagctcagtcaaggagcagcagacctggcactggaacagggttgaaaacccagggttttgtacttggagaggaaagatgccaagctgcttcttaatcaatccaaatttcatttacagctctggaacactttggggctgatttgtctctttaggggacatccccaacatggttaattccaactctcagatcttgtgctttagttagtacatgtgactcaccagatggggtccttagatcctattcctgctcccagtgggaatttgcttttctttgtcattttgggaaaggggcttggtttctgagtgtcttgccttctcatctttttttttcatatcctttttctcaaaaaagccatcagatctgactttcatggaagtgttgctgaggtcagcctggtgcaagttgggatacaaatgaaacttatgcaggatgtgtgagaggaagcagttaattgtttctgaatatctcagggtaggaaccatgtggagccacacattccctgaccacagggaagcacctggctcaatcatgtcacacagcagtggaaagaatacggactcttaagtcacacctaccactgagcagctgtacgactttggagaagttgtttaacattttcaagcctcagtttttgcttttttaaaggaggggaaatatttgcctcatgtcataattgaaaagattaaataagaaataaagggaagtgtctgctacttagttgccagtcaaaatgttagttctctctctctaccaccttcttcctacctcttcccatattgcttgcctgataaaacagctaatcaccagcatttgttccccatagtcacagggccacacaagggaacatttaggacaaactttctccatggcctatgatccaaattgttatctaaagatgattctaggtgttgctggtagtatgtgaatcttccaatctaggtgtgatcgtgtcctcatatgaatcaggaaaaggcagtttcttacaagttccgaattccaaatacagagactggtggtgttacatttaaccttaaagatgttaatgttgatggaaattcatgtttcatattaaaacaacactttgtctttacaatgaaacattttgcttaatttttaaagtaagacattatgatacctctgatggcagttcctcaaataactttaacttttgtgctttagggatagttgttaaagttacaacttcttttattttattttttaaaggcttcagattaaacaagagcccttaagcccacgcatagcattgccgcttcagcttgctgaggactgtctccaaggaggccaaatggaaaaggagaggctacttcaagtggtgttggcccattgagcctattgggcaaactataaccaggttgccttattttgggtggattactccaggagaggccaccctccagctttctcttatcccagtaactcctcttcccattttccaatccatccccagccttttttttttttcttctgtactcttcttttgccttcaatatgagtttcatttcctctgtgtctttgggcagacttccttctaacatgtgtcagctaccctaccacacacctggcctaggagacacatcattcattgctcctacttgtgtctgtaatcagagagtatttaaggagggcagttctgcgacggactgtgtgtgtgttgaaagtaaagatggggggccgcggggaaggcaagagtttttccaaaagattattagaaatgagggctgtatctactctgtggagtagaaccaagtctacttggagaaaagaaccaagtccttggatatctaggggaaagctgtttggcagaaagaaaaatcaagaggacccaaggggatggagacaggaccacaggaatgggccaaggagcaacgtgcctgccattcagccagcttgggacaggctttcactttcactcccatgaggaggcttccaggcagcctggttcccccatgtatagccattgccctctagcaggccaggcctcccagtgggaaggcctgggtccagggcatcttaagttcatccagcagctccatgagccacacagatatcctagaaaatattcctttctcacacagggcttctgattactcagaaacatgcccctcttccctgaataaccaagaacatgttctatgaacccaatctctgccacatgtcaatacctgctcttcaaagccccttttgaaactcagttttgtgccaagtcctctggatctaattaccttaaacaagcagatttagccatttttaaacagacattcccagtcatcctggtgcttgtacttctcctacatgtcatgaaggaccttggatttactgagaactcagccgtggccttggctttgatacttataggtgtcagcccttgggccgattgttgatcatccagagcctcagttctgtacttgtaaagtggagacagcagttctcatcctccatccttttagcccatggggtggttgtaaggctggattgaaatatgcatgtgactaagccatgtagctataaagtgagggatgacttgtgttttggatcacttattttaattctacttataatccacggcttagaatatttaaacattgtttctattaaactagaaaggttcagcatttctgtcatttacttctgctatgatacacaagaacttatgttggaatgaagtgaaaagtaaaatggccattcttatgaacct

SEQ ID NO: 162537 - DNA, 3545 bp, Homo sapiens
  Payload ID: 12013
  Gene Symbol: OPALIN
  Gene Name: oligodendrocytic myelin paranodal and inner loop protein
  Uniprot ID: Q96PE5
  ENST ID: ENST00000393871
  CDS Start-End: 470-826
aatgactccatcattatcagtaacatggttaatgtggactcccgtcagctggggatggagtggccagcctcagcctcatgtaacccattgtttccaaagggctgcaggctgcagaagcccccaagctctcaggccagctgtggcttctttgctgagatggaggtatagccaagaaagcagcctgaaaagtaaggacagaaaatcaaggcaaagagggtgggtgaaccaggccatacacgtcggccatgcagcagcagcccatctttcccgagggatggactgagggcttggctactcccctgaccataaatggcttggccagggttctcttggagccacctctcagcctgcctctgcagctttgtcagttaactgttcctacaaatgaaagacacaagccaataaagccagtgagaaaggagcttaccaaaggcagtgtacgaagaaggttcctgggagactgtcagaaatggactgtgggccctctcttggattagcggcgggcataccattgctggtggccacagccctgctggtggctttactatttactttgattcaccgaagaagaagcagcattgaggccatggaggaaagtgacagaccatgtgaaatttcagaaattgatgacaatcccaagatatctgagaatcctaggagatcacccacacatgagaagaatacgatgggagcacaagaggcccacatatatgtgaagactgtagcaggaagcgaggaacctgtgcatgaccgttaccgtcctactatagaaatggaaagaaggaggggattgtggtggcttgtgcccagactgagcctggaatgatgcagctcagtcaaggagcagcagacctggcactggaacagggttgaaaacccagggttttgtacttggagaggaaagatgccaagctgcttcttaatcaatccaaatttcatttacagctctggaacactttggggctgatttgtctctttaggggacatccccaacatggttaattccaactctcagatcttgtgctttagttagtacatgtgactcaccagatggggtccttagatcctattcctgctcccagtgggaatttgcttttctttgtcattttgggaaaggggcttggtttctgagtgtcttgccttctcatctttttttttcatatcctttttctcaaaaaagccatcagatctgactttcatggaagtgttgctgaggtcagcctggtgcaagttgggatacaaatgaaacttatgcaggatgtgtgagaggaagcagttaattgtttctgaatatctcagggtaggaaccatgtggagccacacattccctgaccacagggaagcacctggctcaatcatgtcacacagcagtggaaagaatacggactcttaagtcacacctaccactgagcagctgtacgactttggagaagttgtttaacattttcaagcctcagtttttgcttttttaaaggaggggaaatatttgcctcatgtcataattgaaaagattaaataagaaataaagggaagtgtctgctacttagttgccagtcaaaatgttagttctctctctctaccaccttcttcctacctcttcccatattgcttgcctgataaaacagctaatcaccagcatttgttccccatagtcacagggccacacaagggaacatttaggacaaactttctccatggcctatgatccaaattgttatctaaagatgattctaggtgttgctggtagtatgtgaatcttccaatctaggtgtgatcgtgtcctcatatgaatcaggaaaaggcagtttcttacaagttccgaattccaaatacagagactggtggtgttacatttaaccttaaagatgttaatgttgatggaaattcatgtttcatattaaaacaacactttgtctttacaatgaaacattttgcttaatttttaaagtaagacattatgatacctctgatggcagttcctcaaataactttaacttttgtgctttagggatagttgttaaagttacaacttcttttattttattttttaaaggcttcagattaaacaagagcccttaagcccacgcatagcattgccgcttcagcttgctgaggactgtctccaaggaggccaaatggaaaaggagaggctacttcaagtggtgttggcccattgagcctattgggcaaactataaccaggttgccttattttgggtggattactccaggagaggccaccctccagctttctcttatcccagtaactcctcttcccattttccaatccatccccagccttttttttttttcttctgtactcttcttttgccttcaatatgagtttcatttcctctgtgtctttgggcagacttccttctaacatgtgtcagctaccctaccacacacctggcctaggagacacatcattcattgctcctacttgtgtctgtaatcagagagtatttaaggagggcagttctgcgacggactgtgtgtgtgttgaaagtaaagatggggggccgcggggaaggcaagagtttttccaaaagattattagaaatgagggctgtatctactctgtggagtagaaccaagtctacttggagaaaagaaccaagtccttggatatctaggggaaagctgtttggcagaaagaaaaatcaagaggacccaaggggatggagacaggaccacaggaatgggccaaggagcaacgtgcctgccattcagccagcttgggacaggctttcactttcactcccatgaggaggcttccaggcagcctggttcccccatgtatagccattgccctctagcaggccaggcctcccagtgggaaggcctgggtccagggcatcttaagttcatccagcagctccatgagccacacagatatcctagaaaatattcctttctcacacagggcttctgattactcagaaacatgcccctcttccctgaataaccaagaacatgttctatgaacccaatctctgccacatgtcaatacctgctcttcaaagccccttttgaaactcagttttgtgccaagtcctctggatctaattaccttaaacaagcagatttagccatttttaaacagacattcccagtcatcctggtgcttgtacttctcctacatgtcatgaaggaccttggatttactgagaactcagccgtggccttggctttgatacttataggtgtcagcccttgggccgattgttgatcatccagagcctcagttctgtacttgtaaagtggagacagcagttctcatcctccatccttttagcccatggggtggttgtaaggctggattgaaatatgcatgtgactaagccatgtagctataaagtgagggatgacttgtgttttggatcacttattttaattctacttataatccacggcttagaatatttaaacattgtttctattaaactagaaaggttcagcatttctgtcatttacttctgctatgatacacaagaacttatgttggaatgaagtgaaaagtaaaatggccattcttatgaacct

SEQ ID NO: 162538 - DNA, 3581 bp, Homo sapiens
  Payload ID: 12013
  Gene Symbol: OPALIN
  Gene Name: oligodendrocytic myelin paranodal and inner loop protein
  Uniprot ID: Q96PE5
  ENST ID: ENST00000419479
  CDS Start-End: 470-862
aatgactccatcattatcagtaacatggttaatgtggactcccgtcagctggggatggagtggccagcctcagcctcatgtaacccattgtttccaaagggctgcaggctgcagaagcccccaagctctcaggccagctgtggcttctttgctgagatggaggtatagccaagaaagcagcctgaaaagtaaggacagaaaatcaaggcaaagagggtgggtgaaccaggccatacacgtcggccatgcagcagcagcccatctttcccgagggatggactgagggcttggctactcccctgaccataaatggcttggccagggttctcttggagccacctctcagcctgcctctgcagctttgtcagttaactgttcctacaaatgaaagacacaagccaataaagccagtgagaaaggagcttaccaaaggcagtgtacgaagaaggttcctgggagactgtcagaaatgagtttttcactgaacttcaccctgccggcgaacacagactgtgggccctctcttggattagcggcgggcataccattgctggtggccacagccctgctggtggctttactatttactttgattcaccgaagaagaagcagcattgaggccatggaggaaagtgacagaccatgtgaaatttcagaaattgatgacaatcccaagatatctgagaatcctaggagatcacccacacatgagaagaatacgatgggagcacaagaggcccacatatatgtgaagactgtagcaggaagcgaggaacctgtgcatgaccgttaccgtcctactatagaaatggaaagaaggaggggattgtggtggcttgtgcccagactgagcctggaatgatgcagctcagtcaaggagcagcagacctggcactggaacagggttgaaaacccagggttttgtacttggagaggaaagatgccaagctgcttcttaatcaatccaaatttcatttacagctctggaacactttggggctgatttgtctctttaggggacatccccaacatggttaattccaactctcagatcttgtgctttagttagtacatgtgactcaccagatggggtccttagatcctattcctgctcccagtgggaatttgcttttctttgtcattttgggaaaggggcttggtttctgagtgtcttgccttctcatctttttttttcatatcctttttctcaaaaaagccatcagatctgactttcatggaagtgttgctgaggtcagcctggtgcaagttgggatacaaatgaaacttatgcaggatgtgtgagaggaagcagttaattgtttctgaatatctcagggtaggaaccatgtggagccacacattccctgaccacagggaagcacctggctcaatcatgtcacacagcagtggaaagaatacggactcttaagtcacacctaccactgagcagctgtacgactttggagaagttgtttaacattttcaagcctcagtttttgcttttttaaaggaggggaaatatttgcctcatgtcataattgaaaagattaaataagaaataaagggaagtgtctgctacttagttgccagtcaaaatgttagttctctctctctaccaccttcttcctacctcttcccatattgcttgcctgataaaacagctaatcaccagcatttgttccccatagtcacagggccacacaagggaacatttaggacaaactttctccatggcctatgatccaaattgttatctaaagatgattctaggtgttgctggtagtatgtgaatcttccaatctaggtgtgatcgtgtcctcatatgaatcaggaaaaggcagtttcttacaagttccgaattccaaatacagagactggtggtgttacatttaaccttaaagatgttaatgttgatggaaattcatgtttcatattaaaacaacactttgtctttacaatgaaacattttgcttaatttttaaagtaagacattatgatacctctgatggcagttcctcaaataactttaacttttgtgctttagggatagttgttaaagttacaacttcttttattttattttttaaaggcttcagattaaacaagagcccttaagcccacgcatagcattgccgcttcagcttgctgaggactgtctccaaggaggccaaatggaaaaggagaggctacttcaagtggtgttggcccattgagcctattgggcaaactataaccaggttgccttattttgggtggattactccaggagaggccaccctccagctttctcttatcccagtaactcctcttcccattttccaatccatccccagccttttttttttttcttctgtactcttcttttgccttcaatatgagtttcatttcctctgtgtctttgggcagacttccttctaacatgtgtcagctaccctaccacacacctggcctaggagacacatcattcattgctcctacttgtgtctgtaatcagagagtatttaaggagggcagttctgcgacggactgtgtgtgtgttgaaagtaaagatggggggccgcggggaaggcaagagtttttccaaaagattattagaaatgagggctgtatctactctgtggagtagaaccaagtctacttggagaaaagaaccaagtccttggatatctaggggaaagctgtttggcagaaagaaaaatcaagaggacccaaggggatggagacaggaccacaggaatgggccaaggagcaacgtgcctgccattcagccagcttgggacaggctttcactttcactcccatgaggaggcttccaggcagcctggttcccccatgtatagccattgccctctagcaggccaggcctcccagtgggaaggcctgggtccagggcatcttaagttcatccagcagctccatgagccacacagatatcctagaaaatattcctttctcacacagggcttctgattactcagaaacatgcccctcttccctgaataaccaagaacatgttctatgaacccaatctctgccacatgtcaatacctgctcttcaaagccccttttgaaactcagttttgtgccaagtcctctggatctaattaccttaaacaagcagatttagccatttttaaacagacattcccagtcatcctggtgcttgtacttctcctacatgtcatgaaggaccttggatttactgagaactcagccgtggccttggctttgatacttataggtgtcagcccttgggccgattgttgatcatccagagcctcagttctgtacttgtaaagtggagacagcagttctcatcctccatccttttagcccatggggtggttgtaaggctggattgaaatatgcatgtgactaagccatgtagctataaagtgagggatgacttgtgttttggatcacttattttaattctacttataatccacggcttagaatatttaaacattgtttctattaaactagaaaggttcagcatttctgtcatttacttctgctatgatacacaagaacttatgttggaatgaagtgaaaagtaaaatggccattcttatgaacct

SEQ ID NO: 162539 - DNA, 3392 bp, Homo sapiens
  Payload ID: 12013
  Gene Symbol: OPALIN
  Gene Name: oligodendrocytic myelin paranodal and inner loop protein
  ENST ID: ENST00000536387
  CDS Start-End: 434-673
agtgcagcgaccatccagtgtccttgcagcacgtgttggtctggtgctagcgtgaagagcagtggttaggtcccttgagcaagaggaccctgacctaagaggcccagacgtccctgtgttccaccgtcatcccagaagcagaggtgcacagtgctgtcagcctgggtgctctgattcatccacagagactactggagttgcttggaagccttgcagagtggtggaaagaggttgtcaccgggacactcagagtttttcactgaacttcaccctgccggcgaacacaacgtcctctcctgtcacaggtgggaaagaaacggactgtgggccctctcttggattagcggcgggcataccattgctggtggccacagccctgctggtggctttactatttactttgattcaccgaagaagaagcagcattgaggccatggaggaaagtgacagaccatgtgaaatttcagaaattgatgacaatcccaagatatctgagaatcctaggagatcacccacacatgagaagaatacgatgggagcacaagaggcccacatatatgtgaagactgtagcaggaagcgaggaacctgtgcatgaccgttaccgtcctactatagaaatggaaagaaggaggggattgtggtggcttgtgcccagactgagcctggaatgatgcagctcagtcaaggagcagcagacctggcactggaacagggttgaaaacccagggttttgtacttggagaggaaagatgccaagctgcttcttaatcaatccaaatttcatttacagctctggaacactttggggctgatttgtctctttaggggacatccccaacatggttaattccaactctcagatcttgtgctttagttagtacatgtgactcaccagatggggtccttagatcctattcctgctcccagtgggaatttgcttttctttgtcattttgggaaaggggcttggtttctgagtgtcttgccttctcatctttttttttcatatcctttttctcaaaaaagccatcagatctgactttcatggaagtgttgctgaggtcagcctggtgcaagttgggatacaaatgaaacttatgcaggatgtgtgagaggaagcagttaattgtttctgaatatctcagggtaggaaccatgtggagccacacattccctgaccacagggaagcacctggctcaatcatgtcacacagcagtggaaagaatacggactcttaagtcacacctaccactgagcagctgtacgactttggagaagttgtttaacattttcaagcctcagtttttgcttttttaaaggaggggaaatatttgcctcatgtcataattgaaaagattaaataagaaataaagggaagtgtctgctacttagttgccagtcaaaatgttagttctctctctctaccaccttcttcctacctcttcccatattgcttgcctgataaaacagctaatcaccagcatttgttccccatagtcacagggccacacaagggaacatttaggacaaactttctccatggcctatgatccaaattgttatctaaagatgattctaggtgttgctggtagtatgtgaatcttccaatctaggtgtgatcgtgtcctcatatgaatcaggaaaaggcagtttcttacaagttccgaattccaaatacagagactggtggtgttacatttaaccttaaagatgttaatgttgatggaaattcatgtttcatattaaaacaacactttgtctttacaatgaaacattttgcttaatttttaaagtaagacattatgatacctctgatggcagttcctcaaataactttaacttttgtgctttagggatagttgttaaagttacaacttcttttattttattttttaaaggcttcagattaaacaagagcccttaagcccacgcatagcattgccgcttcagcttgctgaggactgtctccaaggaggccaaatggaaaaggagaggctacttcaagtggtgttggcccattgagcctattgggcaaactataaccaggttgccttattttgggtggattactccaggagaggccaccctccagctttctcttatcccagtaactcctcttcccattttccaatccatccccagccttttttttttttcttctgtactcttcttttgccttcaatatgagtttcatttcctctgtgtctttgggcagacttccttctaacatgtgtcagctaccctaccacacacctggcctaggagacacatcattcattgctcctacttgtgtctgtaatcagagagtatttaaggagggcagttctgcgacggactgtgtgtgtgttgaaagtaaagatggggggccgcggggaaggcaagagtttttccaaaagattattagaaatgagggctgtatctactctgtggagtagaaccaagtctacttggagaaaagaaccaagtccttggatatctaggggaaagctgtttggcagaaagaaaaatcaagaggacccaaggggatggagacaggaccacaggaatgggccaaggagcaacgtgcctgccattcagccagcttgggacaggctttcactttcactcccatgaggaggcttccaggcagcctggttcccccatgtatagccattgccctctagcaggccaggcctcccagtgggaaggcctgggtccagggcatcttaagttcatccagcagctccatgagccacacagatatcctagaaaatattcctttctcacacagggcttctgattactcagaaacatgcccctcttccctgaataaccaagaacatgttctatgaacccaatctctgccacatgtcaatacctgctcttcaaagccccttttgaaactcagttttgtgccaagtcctctggatctaattaccttaaacaagcagatttagccatttttaaacagacattcccagtcatcctggtgcttgtacttctcctacatgtcatgaaggaccttggatttactgagaactcagccgtggccttggctttgatacttataggtgtcagcccttgggccgattgttgatcatccagagcctcagttctgtacttgtaaagtggagacagcagttctcatcctccatccttttagcccatggggtggttgtaaggctggattgaaatatgcatgtgactaagccatgtagctataaagtgagggatgacttgtgttttggatcacttattttaattctacttataatccacggcttagaatatttaaacattgtttctattaaactagaaaggttcagcatttctgtcatttacttctgctatgatacacaagaacttatgttggaatgaagtgaaaagtaaaatggccattcttatgaacct

SEQ ID NO: 162540 - DNA, 3115 bp, Homo sapiens
  Payload ID: 12013
  Gene Symbol: OPALIN
  Gene Name: oligodendrocytic myelin paranodal and inner loop protein
  Uniprot ID: Q96PE5
  ENST ID: ENST00000611913
  CDS Start-End: 1-396
atgcggatgacgtcctctcctgtcacaggtgggaaagaaacggactgtgggccctctcttggattagcggcgggcataccattgctggtggccacagccctgctggtggctttactatttactttgattcaccgaagaagaagcagcattgaggccatggaggaaagtgacagaccatgtgaaatttcagaaattgatgacaatcccaagatatctgagaatcctaggagatcacccacacatgagaagaatacgatgggagcacaagaggcccacatatatgtgaagactgtagcaggaagcgaggaacctgtgcatgaccgttaccgtcctactatagaaatggaaagaaggaggggattgtggtggcttgtgcccagactgagcctggaatgatgcagctcagtcaaggagcagcagacctggcactggaacagggttgaaaacccagggttttgtacttggagaggaaagatgccaagctgcttcttaatcaatccaaatttcatttacagctctggaacactttggggctgatttgtctctttaggggacatccccaacatggttaattccaactctcagatcttgtgctttagttagtacatgtgactcaccagatggggtccttagatcctattcctgctcccagtgggaatttgcttttctttgtcattttgggaaaggggcttggtttctgagtgtcttgccttctcatctttttttttcatatcctttttctcaaaaaagccatcagatctgactttcatggaagtgttgctgaggtcagcctggtgcaagttgggatacaaatgaaacttatgcaggatgtgtgagaggaagcagttaattgtttctgaatatctcagggtaggaaccatgtggagccacacattccctgaccacagggaagcacctggctcaatcatgtcacacagcagtggaaagaatacggactcttaagtcacacctaccactgagcagctgtacgactttggagaagttgtttaacattttcaagcctcagtttttgcttttttaaaggaggggaaatatttgcctcatgtcataattgaaaagattaaataagaaataaagggaagtgtctgctacttagttgccagtcaaaatgttagttctctctctctaccaccttcttcctacctcttcccatattgcttgcctgataaaacagctaatcaccagcatttgttccccatagtcacagggccacacaagggaacatttaggacaaactttctccatggcctatgatccaaattgttatctaaagatgattctaggtgttgctggtagtatgtgaatcttccaatctaggtgtgatcgtgtcctcatatgaatcaggaaaaggcagtttcttacaagttccgaattccaaatacagagactggtggtgttacatttaaccttaaagatgttaatgttgatggaaattcatgtttcatattaaaacaacactttgtctttacaatgaaacattttgcttaatttttaaagtaagacattatgatacctctgatggcagttcctcaaataactttaacttttgtgctttagggatagttgttaaagttacaacttcttttattttattttttaaaggcttcagattaaacaagagcccttaagcccacgcatagcattgccgcttcagcttgctgaggactgtctccaaggaggccaaatggaaaaggagaggctacttcaagtggtgttggcccattgagcctattgggcaaactataaccaggttgccttattttgggtggattactccaggagaggccaccctccagctttctcttatcccagtaactcctcttcccattttccaatccatccccagccttttttttttttcttctgtactcttcttttgccttcaatatgagtttcatttcctctgtgtctttgggcagacttccttctaacatgtgtcagctaccctaccacacacctggcctaggagacacatcattcattgctcctacttgtgtctgtaatcagagagtatttaaggagggcagttctgcgacggactgtgtgtgtgttgaaagtaaagatggggggccgcggggaaggcaagagtttttccaaaagattattagaaatgagggctgtatctactctgtggagtagaaccaagtctacttggagaaaagaaccaagtccttggatatctaggggaaagctgtttggcagaaagaaaaatcaagaggacccaaggggatggagacaggaccacaggaatgggccaaggagcaacgtgcctgccattcagccagcttgggacaggctttcactttcactcccatgaggaggcttccaggcagcctggttcccccatgtatagccattgccctctagcaggccaggcctcccagtgggaaggcctgggtccagggcatcttaagttcatccagcagctccatgagccacacagatatcctagaaaatattcctttctcacacagggcttctgattactcagaaacatgcccctcttccctgaataaccaagaacatgttctatgaacccaatctctgccacatgtcaatacctgctcttcaaagccccttttgaaactcagttttgtgccaagtcctctggatctaattaccttaaacaagcagatttagccatttttaaacagacattcccagtcatcctggtgcttgtacttctcctacatgtcatgaaggaccttggatttactgagaactcagccgtggccttggctttgatacttataggtgtcagcccttgggccgattgttgatcatccagagcctcagttctgtacttgtaaagtggagacagcagttctcatcctccatccttttagcccatggggtggttgtaaggctggattgaaatatgcatgtgactaagccatgtagctataaagtgagggatgacttgtgttttggatcacttattttaattctacttataatccacggcttagaatatttaaacattgtttctattaaactagaaaggttcagcatttctgtcatttacttctgctatgatacacaagaacttatgttggaatgaagtgaaaagtaaaatggccattcttatgaacct

SEQ ID NO: 162541 - DNA, 1417 bp, Homo sapiens
  Payload ID: 12014
  Gene Symbol: OBFC1
  Gene Name: oligonucleotide/oligosaccharide-binding fold containing 1
  Uniprot ID: Q9H668
  ENST ID: ENST00000224950
  CDS Start-End: 169-1275
ccaactgctcctgcgccgggcggggtcgtcgccgccagcggctccgagcgccggaagggccaggtctcagggctcctggagctgcaggcggcgggaggggctacaaatgcttgactcagtgatgcagaacctttcagagttagctggaagccacagccctgcctcttgatgcagcctggatccagccggtgtgaagaggagaccccttccctcttgtggggtttggatcctgtgtttctagcctttgcaaaactctacatcagggatatcctggacatgaaggagtcccgccaggtgccaggtgtatttttgtacaatggacatccaataaaacaggtagatgtcttgggaactgtcattggagtgagagaaagagatgctttctacagttatggagtggatgacagcactggagttataaactgcatctgctggaaaaagttgaatactgagtctgtatcagctgctccaagtgcagcaagagagctcagcttaacctcacaacttaagaagctacaagagaccattgagcagaaaacaaagatagagatcggggacacgatccgagtcagaggcagtatccgcacatacagagaagagcgagagattcatgccaccacttactataaagtggacgacccagtgtggaacattcaaattgcaaggatgcttgagctgcccactatctacaggaaagtttatgaccagccttttcacagctcagccctagagaaagaagaggcactaagcaatccaggcgccctggacctccccagtctcacgagtttgctgagtgaaaaagccaaagaattcctcatggagaacagagtgcagagcttttaccagcaggagctggaaatggtggagtctttgctgtcccttgccaatcagcctgtgattcacagtgcctcctccgaccaagtgaattttaagaaggacaccacttccaaggcaattcatagtatatttaagaatgctatacaactgctgcaggaaaaaggacttgttttccagaaagatgatggttttgataacctatactatgtaaccagagaagacaaagacctgcacagaaagatccaccggatcattcagcaggactgccagaaaccaaatcacatggagaagggctgtcacttcctgcacatcttggcctgtgctcgcctgagcatccgcccgggcctgagcgaggctgtgctgcagcaagttctggagctcctggaggaccagagtgacattgtcagcacaatggagcactactacacagcgttctgagcagagacacgcagaccagctgaggaggacaaagataaggtggcattcacccccaggctctgactttcagcatcatgcaggggcttatctgtctggaggcagttacctcataataaactataaaatatagtcatcttgggaa

SEQ ID NO: 162542 - DNA, 1311 bp, Homo sapiens
  Payload ID: 12014
  Gene Symbol: OBFC1
  Gene Name: oligonucleotide/oligosaccharide-binding fold containing 1
  Uniprot ID: Q9H668
  ENST ID: ENST00000369764
  CDS Start-End: 76-1182
gtgtcccatctagatgcttgactcagtgatgcagaacctttcagagttagctggaagccacagccctgcctcttgatgcagcctggatccagccggtgtgaagaggagaccccttccctcttgtggggtttggatcctgtgtttctagcctttgcaaaactctacatcagggatatcctggacatgaaggagtcccgccaggtgccaggtgtatttttgtacaatggacatccaataaaacaggtagatgtcttgggaactgtcattggagtgagagaaagagatgctttctacagttatggagtggatgacagcactggagttataaactgcatctgctggaaaaagttgaatactgagtctgtatcagctgctccaagtgcagcaagagagctcagcttaacctcacaacttaagaagctacaagagaccattgagcagaaaacaaagatagagatcggggacacgatccgagtcagaggcagtatccgcacatacagagaagagcgagagattcatgccaccacttactataaagtggacgacccagtgtggaacattcaaattgcaaggatgcttgagctgcccactatctacaggaaagtttatgaccagccttttcacagctcagccctagagaaagaagaggcactaagcaatccaggcgccctggacctccccagtctcacgagtttgctgagtgaaaaagccaaagaattcctcatggagaacagagtgcagagcttttaccagcaggagctggaaatggtggagtctttgctgtcccttgccaatcagcctgtgattcacagtgcctcctccgaccaagtgaattttaagaaggacaccacttccaaggcaattcatagtatatttaagaatgctatacaactgctgcaggaaaaaggacttgttttccagaaagatgatggttttgataacctatactatgtaaccagagaagacaaagacctgcacagaaagatccaccggatcattcagcaggactgccagaaaccaaatcacatggagaagggctgtcacttcctgcacatcttggcctgtgctcgcctgagcatccgcccgggcctgagcgaggctgtgctgcagcaagttctggagctcctggaggaccagagtgacattgtcagcacaatggagcactactacacagcgttctgagcagagacacgcagaccagctgaggaggacaaagataaggtggcattcacccccaggctctgactttcagcatcatgcaggggcttatctgtctggaggcagttacctcataataaactataaaatata

SEQ ID NO: 162543 - DNA, 7879 bp, Homo sapiens
  Payload ID: 12015
  Gene Symbol: OPHN1
  Gene Name: oligophrenin 1
  Uniprot ID: O60890
  ENST ID: ENST00000355520
  CDS Start-End: 643-3051
tgtgcgtcgcgctctcgccctcctcttcccgctgcagtgtctatggagcgaggctacgtttcattgccgccctggcttaacccttccggcgcctaaaaggacggccggccggccggctcccttgcaccaggaagaagtcttagcagccagcgggccctggtcaggaaactctaaggtacaaggaaaacagttgaggaaggagccagagcgctccggtttggtcctcgggcttcgctggggcggggcgcaggcgttggctttaagaaaggggaggggacagtgcaatccgggttgcccgcggagttcggccaaggaagtcttccgctcgctccggagcgaggagcctgtagagaggctgttcccagctccagctctaacctcgcctacaccttgggcgggcccaagtgtcacgtttgcaattgctcaggaaggatccggcccgtctccggaggcaagtcgggctgcggtttttgctgcttatctgggaaggcgatgcctaagggacatgctgcttgctaggcagcaccctgccgggatccgactgcgatagttagctctccctggccctgaagccatcgccggggcgcctgttctctgtccggaccagccagcgctcctcaggagtctcactgaaacagaaccatgggtcatcccccgctggagttcagcgactgctacctggacagccccgatttccgcgagaggctcaagtgttatgagcaggaactggagaggaccaacaaattcatcaaagacgtaatcaaagacggcaacgcgcttatcagcgctatgagaaattattcttctgctgttcagaaattttcccagacgctgcagtcatttcagtttgatttcattggagacactctgactgatgatgaaattaacatcgctgaatccttcaaggaatttgctgaattgctcaacgaggtagaaaatgagaggatgatgatggtacacaatgctagtgatttgctgattaaacccttggaaaatttccggaaggaacaaataggcttcaccaaggagcggaaaaagaaatttgaaaaggatggtgagaggttttattctttactggatcggcacttacacctgtcttcaaaaaagaaagaatctcagttacaagaggcagacctacaggtggacaaggagaggcacaattttttcgagtcctctcttgattatgtttatcaaatccaggaagttcaggagtccaagaagttcaatattgtggagcctgtcttggcctttcttcatagtctgttcatttctaacagcctgactgtggagctcacacaggatttcctcccatacaaacaacagctccaactcagtttacagaatacaagaaatcatttctccagtacccgggaagagatggaagaacttaagaaaaggatgaaagaagctccccagacatgcaaacttccaggacagccaactattgaaggctatctctatacacaagagaaatgggctttaggaatatcctgggtgaaatactattgccagtatgagaaagagaccaaaacactgaccatgacgcctatggagcagaagccaggtgctaagcaggggcccttggacttaacactgaagtactgtgtgagaaggaagacggagtctatcgacaagaggttctgttttgacatagaaactaatgaaaggccaggaaccatcactctgcaggccctttcagaagctaacagaaggctatggatggaagccatggatgggaaagaacctatctaccacagccctataacaaaacagcaagaaatggagctaaatgaagtgggcttcaagtttgtcaggaagtgcatcaatattattgagaccaaagggatcaagacagaagggttgtaccgcactgtgggcagcaatattcaggttcagaagctgctgaatgccttttttgatcctaaatgcccaggagatgttgattttcataatagtgactgggacattaagacaatcaccagctccttgaaattctacctcaggaatctttctgaacctgtcatgacctatagacttcacaaagagctggtctctgctgccaagtctgacaacctggattaccgcctaggagctattcactccctggtatataagctaccagaaaagaaccgagagatgctggaacttctgataagacacttggtcaatgtgtgtgagcacagcaaagagaatcttatgaccccctccaacatgggagtaatctttgggcccaccctgatgagagctcaggaggacactgtggccgccatgatgaacatcaaattccagaacatagtggtggaaatactaatcgagcactttggcaagatctatttaggtccacctgaggaaagcgctgcaccgccagtgcctccgcctcgggtgacagcaagaaggcacaaaccaatcacgatttcaaagcgcttgctgcgagaaaggacggttttctatacttcttccctggatgaaagcgaagatgaaatccaacatcaaacaccgaatggtactatcaccagcagcatagaaccccccaagccaccacaacaccccaaactacctattcagaggagtggggaaactgatcctgggaggaagtccccaagcaggcctattttggatggcaagttggagccctgcccagaggtggacgtggggaagttggtgtctaggctgcaggatggagggaccaagatcaccccaaaggccaccaatggacccatgccaggctctgggcccaccaagaccccctctttccacataaagagaccagctccccggcccctggcccaccacaaggagggggatgctgacagtttcagcaaagtgcggcctccaggagaaaagccaaccatcatccgccccccagtgaggcccccagatcctccctgccgggcagctactccccaaaagccagaaccaaagccagatattgtggctggcaatgcgggggaaatcacatcatctgtggtggcttccaggaccaggttttttgaaacagcttcccggaaaacaggaagttctcaaggcagacttcctggagatgaaagttgaggctacaggttttaaaagccttggcctcagaggaccctttccaggttctgaaagagtctttcttcttcaaacctttgtgtgcggagtcattttgtgttgaagagcagctccttcctagccttgcactttcagactctctctgggaggccataaaataaggagcatatgtcctagacaggtgtttatatctcctttgtattctgtcttcatcccctcagaaggtctgttttgagttcctataacactgtgaagagctggactccctcaagccagactctgccaaaaccaagatatccacttacctgagttgaagaggggagctcagttttcaactcttccctgaacttcctgcttcctcagagggccattgaactctgagagatttggggctaaagactgatctcaggggtcttaccttgaactgaaggccacttgagttggggccattgcttaccttggttggaagggaatagaaatgtttgctgaacattggagaatctcaacatgtctcctactgaggatatggacactggtgccatgtcagcgctctggtgctgcagtatgttgccaagagcccgtctgctcctgcgaggctatgagtgggatgagtgatgcccccacagcacctccatgtggacttaggaaggtggccttcctgctgttacatgcagccacttaggacaaatctgcaaagcatgttttgcatgtaaaagcctaggtctatttggattattctttctccttttttttgacagcttcctgtcaagcaatcaagaaacaaacaaaagctgaacacatttctttttaaaaaaaggagactgtgtttggtcctgtaggagttctattttggggtcaaatgctagaaaaattgttaaggtggattgaggccaggcagctgtcactgctgcttcatgtttgccttctgcacataaactcttttatctcctgaaaaaagcagttcttaacccagtgtccatggactcagaaactccatgatgcccctgagatggtatgcacaattccatgacaatatgccctttctggggagatagtccataatgttctgctaaatttcaaatgggctcgtgacccaaaaaagtcaagaaccacagcacttgagtaaaatactctttttacaatccatataagcccttgattggaagggcttttcaaaatcatttagtctaacaactgcccagtttccagtcgggggaactgaggcagagcaaggtagtgatcacaccagtacaagatctcaggtcccaggctcctatgcaagttttttttccccattatatcacacttatctagcaagggaccttgtggtttgtggctttagtggccatcatttctgggggttggcttttaccctttttcttgaatatttgccaccaagtgaaaaatgttaggacataaacccttgccaggtccctttcatttgctatctctattattggaaaggacctaaaaattggtgtaatggggcagaaatctgaggaatggacatttctaattcctgtttgttgaagggaagttgctggaaagagcatcagtacttgtttctatgcagatgcctgggccgtagcttgtctgtagcgtctgtataattataatgttgcccagtgtgagggaaagagctttcctacttgcactcttctaccaaggccctgttagtgcactgattatagtactgacagataaacctagataaagagatagagagtgagtacatgcacactcatgtgcaaacccactcagagatgcatttggaacagtgctactgaaaggcagtagtcattttcaagactgaattccaaacatggtttattggtgagttaggaacatgtaaggccaagtacactgagagcctttttgaaagtaattgagtggaaacttgatgccattctaaatcaaggcatatccaggtggcccggttgaactcactccactgtacccagtctcaaaggccaggttgctaagaaaccaggagtaaaagagtcaagtgaccatcatttcacctgctgcttgcccccaatagtagtctctgtgaggccttactgacctcacctaggaagtgatttttgagcccttgtttcagggctgtggcctccctgctctatcctgaataaagcagacaggtgtgcagattttggccatgaaagcatggctaatagggccacagtccctttaaagaaacatggtttgactctggttttcttgggggaaaataccacaatcaccgatgcaaacattggaagattattgagagccctagaaagctgctgtgatcccagtagaaaatatgtcccagaaatgtcatgagattgctgtgtgttgcctgggacacagatcaagggcctatcttggagagctggggaccagcagtctgcctggaggccagggagcagtggctgagtagctctgcctttgctctggtctataccttaagaatgccaaagaatgaatttcaacgcctgcctttggcactctgacttaaagtgcaaaaagcttctgtggcgaggcatgctatcatggaatgagactggcttgccctaggcttaatggatgggcagtcattttgcagaggctatgggaagagggtgataatagaagagtggcagctataggaaattatcaacataccttggccagcaagttagagaatctggcaatggatgaactgaaagtgatgaactggcagggataacaaagaacctaacatttattaagcacgtatttattaactgctcagtgtttcatattcatgcaagtattctcattttacagagaaagaaattatggcccagggggctaaagtaaacaactcaagggcacatagaaagtaaataaaaggactgtgatttgaatccaggccactcttagcccatgctgttttccctttgccacactgtggtaggtgtttgaacagaggccacattactagagttggcatgactcttgactcttgcctgcctaacaaaatattgaaaggcaaacatttgaaggagggagggggtgcaggttcagtttatatggaaatgcaaactgggctggaagatattcctgagttaggctttctcttcatattcagcttgcacatttggtaatgtttttaagatgatcatctaattttattttgtgaagtgaaggatttgtgttttagttggcagttgttaagtccttggcttgccatttttcaaaaagtaaaaaggtcctcacaggtgtctccatacttcgccaaggttgtagcatgggcagtttcagtttcagcctaagagactggtgacatccacaaatgcagttttagaagcagaaaaggtcttggtgcctctgcagtacttgatgtattggggtcaaatctctacaaatttttctgtggtgatagcaaaatcaagagatggcttacaaaaagaaatattgaatttttatttttgaagtttttgttttttaaaaggttgggggtgttcagccactgagggacaaaacttagcatctaatttcaattatagtgtcatgcagagtatttctaaagtaattggttatcatgggaaagtattctcttttcaagaagttctttgattctgtaataactagaacaaataaagtagtaaaagaagaaatagttctgtgactaggaaaaaattgcttttgagagaacatagatcaattatactacttctaaggtagctgcagataagtggccttgacacattacaagcctggaaaaaaacatcagaaataataaaaaatttcagagagaatcaagatacctttttttttcttttttttttcttttttttattatactctaagttttagggtacatgtgcacattgtgcaggttagttacatatgtatacatgtgccatgctggtgcgctgcacccactaatgtgtcatctagcattaggtatatctcccagtgctatccctcccccctcccccgaccccaccacagtccccagagtgtgatattccccttcctgtgtccatgtgatctcattgttcaattcccacctatgagtgagaatatgcggtgtttggttttttgttcttgcgatagtttactgagaatgatggtttccaatttcatccatgtccctacaaaggatatgaactcatcattttttatggctgcatagtattccatggtgtatatgtgccacattttcttaatccagtctatcattgttggacatttgggttggttccaagtctttgctattgtgaatagtgccgcaataaacatacgtgtgcatgtgtctttatagcagcatgatttatactcatttgggtatatacccagtaatgggatggctgggtcaaatggtatttctagttctagatccctgaggaatcgccacactgacttccacaatggttgaactagtttacagtccaaccaacagtgtaaaagtgttcctatttctccgcatcctctccagcacctgttgtttcctgactttttaatgattgccattctaactggtgtgagatgatatctcatagtggttttgatttgcatttctctgatggccagtgatgatgagcatttcttcatgtgttttttggctgcataaatgtcttcttttgagaagtgtctgttcatgtccttcgcgaaggacaagataccttaaagataagttttcgataaagaaaagccttcattttcctgggggaaatgaagcacttgatgccaaggacattagtagagggctagaaagattgcctgtgtgaaagacatatgctatatccaaataataaaacaaacgagatcctggggctcattcatgtgactttcaataaagtatgtagactgtctaatataa

SEQ ID NO: 162544 - DNA, 1077 bp, Homo sapiens
  Payload ID: 12016
  Gene Symbol: OSTC
  Gene Name: oligosaccharyltransferase complex subunit (non-catalytic)
  Uniprot ID: Q9NRP0
  ENST ID: ENST00000361564
  CDS Start-End: 73-522
ttagggagggcgggcctgtttccgggaggcgcgtggggcttgaggccgagaacggcccttgctgccaccaacatggagactttgtaccgtgtcccgttcttagtgctcgaatgtcccaacctgaagctgaagaagccgccctggttgcacatgccgtcggccatgactgtgtatgctctggtggtggtgtcttacttcctcatcaccggaggaataatttatgatgttattgttgaacctccaagtgtcggttctatgactgatgaacatgggcatcagaggccagtagctttcttggcctacagagtaaatggacaatatattatggaaggacttgcatccagcttcctatttacaatgggaggtttaggtttcataatcctggaccgatcgaatgcaccaaatatcccaaaactcaatagattccttcttctgttcattggattcgtctgtgtcctattgagttttttcatggctagagtattcatgagaatgaaactgccgggctatctgatgggttagagtgcctttgagaagaaatcagtggatactggatttgctcctgtcaatgaagttttaaaggctgtaccaatcctctaatatgaaatgtggaaaagaatgaagagcagcagtaaaagaaatatctagtgaaaaaacaggaagcgtattgaagcttggactagaatttcttcttggtattaaagagacaagtttatcacagaattttttttcctgctggcctattgctataccaatgatgttgagtggcattttctttttagtttttcattaaaatatattccatatctacaactataatatcaaataaagtgattattttttacaaccctcttaacattttttggagatgacatttctgattttcagaaattaacataaaatccagaagcaagattccgtaagctgagaactctggacagttgatcagctttacctatggtgctttgcctttaactagagtgtgtgatggtagattatttcagatatgtatgtaaaactgtttcctgaacaataagatgtatgaacggagcagaaataaatactttttctaattaa

SEQ ID NO: 162545 - DNA, 663 bp, Homo sapiens
  Payload ID: 12016
  Gene Symbol: OSTC
  Gene Name: oligosaccharyltransferase complex subunit (non-catalytic)
  Uniprot ID: Q9NRP0
  ENST ID: ENST00000512478
  CDS Start-End: 10-525
gccaccaacatggagactttgtaccgtgtcccgttcttagtgctcgaatgtcccaacctgaagctgaagaagccgccctggttgcacatgccgtcggccatgactgtgtatgctctggtggtggtgtcttacttcctcatcaccggaggaataatttatgatgttattgttgaacctccaagtgtcggttctatgactgatgaacatgggcatcagaggccagtagctttcttggcctacagagtaaatggacaatatattatggaaggacttgcatccagcttcctatttacaatgggaggtttaggtttcataatcctggaccgatcgaatgcaccaaatatcccaaaactcaatagattccttcttctgttcattggattcgtctgtgtcctattgagttttttcatggctagagtattcatgagaatgaaactgccacggagtctcgctctgttgcccaggctggagtgcagtggcgtgatctcggctcactacaaactctgcctcccaggggctatctgatgggttagagtgcctttgagaagaaatcagtggatactggatttgctcctgtcaatgaagttttaaaggctgtaccaatcctctaatatgaaatgtggaaaagaatgaagagcagcagtaaaagaaatatctagtgaa

SEQ ID NO: 162546 - DNA, 876 bp, Homo sapiens
  Payload ID: 12016
  Gene Symbol: OSTC
  Gene Name: oligosaccharyltransferase complex subunit (non-catalytic)
  ENST ID: ENST00000613215
  CDS Start-End: 72-323
tagggagggcgggcctgtttccgggaggcgcgtggggcttgaggccgagaacggcccttgctgccaccaacatggagactttgtaccgtgtcccgttcttagtgctcgaatgtcccaacctgaagctgaagaagccgccctggttgcacatgccgtcggccatgactgtgtatgctctggtggtggtgtcttacttcctcatcaccggaggaataatttatgatgttattgttgaacctccaagtgtcggttctatgactgatgaacatgggcatcagaggccagtagctttcttggcctacaggggctatctgatgggttagagtgcctttgagaagaaatcagtggatactggatttgctcctgtcaatgaagttttaaaggctgtaccaatcctctaatatgaaatgtggaaaagaatgaagagcagcagtaaaagaaatatctagtgaaaaaacaggaagcgtattgaagcttggactagaatttcttcttggtattaaagagacaagtttatcacagaattttttttcctgctggcctattgctataccaatgatgttgagtggcattttctttttagtttttcattaaaatatattccatatctacaactataatatcaaataaagtgattattttttacaaccctcttaacattttttggagatgacatttctgattttcagaaattaacataaaatccagaagcaagattccgtaagctgagaactctggacagttgatcagctttacctatggtgctttgcctttaactagagtgtgtgatggtagattatttcagatatgtatgtaaaactgtttcctgaacaataagatgtatgaacggagcagaaataaatactttttctaatt

SEQ ID NO: 162547 - DNA, 458 bp, Homo sapiens
  Payload ID: 12017
  Gene Symbol: OST4
  Gene Name: oligosaccharyltransferase complex subunit 4 (non-catalytic)
  Uniprot ID: P0C6T2
  ENST ID: ENST00000447619
  CDS Start-End: 51-164
acttcgggcttgttcgctggtggcgtcggagccgagccggactggtcaggatgatcacggacgtgcagctcgccatcttcgccaacatgctgggcgtgtcgctcttcttgcttgtcgttctctatcactacgtggccgtcaacaatcccaagaagcaggaatgaaagtggcgctttctccgccccaggtctttccccctcttttctagggttccaggacatagtctgaggcaagatggagggtatgaggggccttcacacttcacttcatcccttctacccatcacaacatacaaagcaactacacctggatttttccaaacaacttttatttcctcagagtcttccttaatcctatggaacaagaagctgccactgaatagggcccagtataggggcttgcttttctactccctccccccaatataaaaatatagacttttttttgtggtcccaaaa

SEQ ID NO: 162548 - DNA, 559 bp, Homo sapiens
  Payload ID: 12017
  Gene Symbol: OST4
  Gene Name: oligosaccharyltransferase complex subunit 4 (non-catalytic)
  Uniprot ID: P0C6T2
  ENST ID: ENST00000429985
  CDS Start-End: 188-301
acttcgggcttgttcgctggtggcgtcggagccgagccggactggtcaggtcagaggcacgcaggggccgtcccacgggccagccccgccgtggccgtggccgtggctggcccgtggggcgaggacgggttcttgcgagggcgaggagtgcgccagcccgcagctcagcccctctcttctccgcaggatgatcacggacgtgcagctcgccatcttcgccaacatgctgggcgtgtcgctcttcttgcttgtcgttctctatcactacgtggccgtcaacaatcccaagaagcaggaatgaaagtggcgctttctccgccccagggttccaggacatagtctgaggcaagatggagggtatgaggggccttcacacttcacttcatcccttctacccatcacaacatacaaagcaactacacctggatttttccaaacaacttttatttcctcagagtcttccttaatcctatggaacaagaagctgccactgaatagggcccagtataggggcttgcttttctactccctccccccaatataaaaatatagacttttt

SEQ ID NO: 162549 - DNA, 561 bp, Homo sapiens
  Payload ID: 12017
  Gene Symbol: OST4
  Gene Name: oligosaccharyltransferase complex subunit 4 (non-catalytic)
  Uniprot ID: P0C6T2
  ENST ID: ENST00000456793
  CDS Start-End: 175-288
cgtaacgcgccgcgcggagccgacgagacggcggggctagagaggccgtcccgaccgcgccccccgccggaagcggcttgttcgggcctgagctggcgctacgaagttccggtccaggtctctgacttcgggcttgttcgctggtggcgtcggagccgagccggactggtcaggatgatcacggacgtgcagctcgccatcttcgccaacatgctgggcgtgtcgctcttcttgcttgtcgttctctatcactacgtggccgtcaacaatcccaagaagcaggaatgaaagtggcgctttctccgccccagggttccaggacatagtctgaggcaagatggagggtatgaggggccttcacacttcacttcatcccttctacccatcacaacatacaaagcaactacacctggatttttccaaacaacttttatttcctcagagtcttccttaatcctatggaacaagaagctgccactgaatagggcccagtataggggcttgcttttctactccctccccccaatataaaaatatagacttttttttgtggtcccaaaa

SEQ ID NO: 162550 - DNA, 3310 bp, Homo sapiens
  Payload ID: 12018
  Gene Symbol: OGT
  Gene Name: O-linked N-acetylglucosamine (GlcNAc) transferase
  Uniprot ID: O15294
  ENST ID: ENST00000373701
  CDS Start-End: 178-3288
tagatggtcaattagagttcccagggtttgaagcctgtaactgctgccgccgctcaagccctccagagcattgctacggctgctgcccttgtactactacctccaaatacgttcttgctggtagtggcggcagcaggaccaattacctcttttttgctctccctcgagaagctccagatggcgtcttccgtgggcaacgtggccgacagcacagggttagctgagttggcacatcgagaatatcaggcaggagattttgaggcagctgagagacactgcatgcagctctggagacaagagccagacaatactggtgtgcttttattactttcatctatacacttccagtgtcgaaggctggacagatctgctcactttagcactctggcaattaaacagaacccccttctggcagaagcttattcgaatttggggaatgtgtacaaggaaagagggcagttgcaggaggcaattgagcattatcgacatgcattgcgtctcaaacctgatttcatcgatggttatattaacctggcagccgccttggtagcagcgggtgacatggaaggggcagtacaagcttacgtctctgctcttcagtacaatcctgatttgtactgtgttcgcagtgacctggggaacctgctcaaagccctgggtcgcttggaagaagccaaggcatgttatttgaaagcaattgagacgcaaccgaactttgcagtagcttggagtaatcttggctgtgttttcaatgcacaaggggaaatttggcttgcaattcatcactttgaaaaggctgtcacccttgacccaaactttctggatgcttatatcaatttaggaaatgtcttgaaagaggcacgcatttttgacagagctgtggcagcttatcttcgtgccctaagtttgagtccaaatcacgcagtggtgcacggcaacctggcttgtgtatactatgagcaaggcctgatagatctggcaatagacacctacaggcgggctatcgaactacaaccacatttccctgatgcttactgcaacctagccaatgctctcaaagagaagggcagtgttgctgaagcagaagattgttataatacagctctccgtctgtgtcccacccatgcagactctctgaataacctagccaatatcaaacgagaacagggaaacattgaagaggcagttcgcttgtatcgtaaagcattagaagtcttcccagagtttgctgctgcccattcaaatttagcaagtgtactgcagcagcagggaaaactgcaggaagctctgatgcattataaggaggctattcgaatcagtcctacctttgctgatgcctactctaatatgggaaacactctaaaggagatgcaggatgttcagggagccttgcagtgttatacgcgtgccatccaaattaatcctgcatttgcagatgcacatagcaatctggcttccattcataaggattcagggaatattccagaagccatagcttcttaccgcacggctctgaaacttaagcctgattttcctgatgcttattgtaacttggctcattgcctgcagattgtctgtgattggacagactatgatgagcgaatgaagaagttggtcagtattgtggctgaccagttagagaagaataggttgccttctgtgcatcctcatcatagtatgctatatcctctttctcatggcttcaggaaggctattgctgagaggcacggcaacctgtgcttagataagattaatgttcttcataaaccaccatatgaacatccaaaagacttgaagctcagtgatggtcggctgcgtgtaggatatgtgagttccgactttgggaatcatcctacttctcaccttatgcagtctattccaggcatgcacaatcctgataaatttgaggtgttctgttatgccctgagcccagacgatggcacaaacttccgagtgaaggtgatggcagaagccaatcatttcattgatctttctcagattccatgcaatggaaaagcagctgatcgcatccatcaggatggaattcatatccttgtaaatatgaatggctatactaagggcgctcgaaatgagctttttgctctcaggccagctcctattcaggcaatgtggctgggataccctgggacgagtggtgcgcttttcatggattatattatcactgatcaggaaacttcgccagctgaagttgctgagcagtattccgagaaattggcttatatgccccacactttttttattggtgatcatgctaatatgttccctcacctgaagaaaaaagcagtcatcgattttaagtccaatgggcacatttatgacaatcggatagttctgaatggcatcgacctcaaagcatttcttgatagtctaccagatgtgaaaattgtcaagatgaagtgtcctgatggaggagacaatgcagatagcagtaacacagctcttaatatgcctgttattcctatgaatactattgcagaagcagttattgaaatgattaaccgaggacagattcaaataacaattaatggattcagtattagcaatggactggcaactactcagatcaacaataaggctgcaactggagaggaggttccccgtaccattattgtaaccacccgttctcagtacgggttaccagaagatgccatcgtatactgtaactttaatcagttgtataaaattgacccttctactttgcagatgtgggcaaacattctgaagcgtgttcccaatagtgtactctggctgttgcgttttccagcagtaggagaacctaatattcaacagtatgcacaaaacatgggcctgccccagaaccgtatcattttttcacctgttgctcctaaagaggaacacgtcaggagaggccagctggctgatgtctgcttggacactccactctgtaatgggcacaccacagggatggatgtcctctgggcagggacccccatggtgactatgccaggagagactcttgcttctcgagttgcagcatcccagctcacttgcttaggttgtcttgagcttattgctaaaaacagacaagaatatgaagacatagctgtgaagctgggaactgatctagaatacctgaagaaagttcgtggcaaagtctggaagcaaagaatatctagccctctgttcaacaccaaacaatacacaatggaactagagcggctctatctacagatgtgggagcattatgcagctggcaacaaacctgaccacatgattaagcctgttgaagtcactgagtcagcataaataaagactgcacaggagaatt

SEQ ID NO: 162551 - DNA, 5461 bp, Homo sapiens
  Payload ID: 12018
  Gene Symbol: OGT
  Gene Name: O-linked N-acetylglucosamine (GlcNAc) transferase
  Uniprot ID: O15294
  ENST ID: ENST00000373719
  CDS Start-End: 218-3358
ggccgaggagccgtcgccgccatttcaagaccgtactaggtagatggtcaattagagttcccagggtttgaagcctgtaactgctgccgccgctcaagccctccagagcattgctacggctgctgcccttgtactactacctccaaatacgttcttgctggtagtggcggcagcaggaccaattacctcttttttgctctccctcgagaagctccagatggcgtcttccgtgggcaacgtggccgacagcacagaaccaacgaaacgtatgctttccttccaagggttagctgagttggcacatcgagaatatcaggcaggagattttgaggcagctgagagacactgcatgcagctctggagacaagagccagacaatactggtgtgcttttattactttcatctatacacttccagtgtcgaaggctggacagatctgctcactttagcactctggcaattaaacagaacccccttctggcagaagcttattcgaatttggggaatgtgtacaaggaaagagggcagttgcaggaggcaattgagcattatcgacatgcattgcgtctcaaacctgatttcatcgatggttatattaacctggcagccgccttggtagcagcgggtgacatggaaggggcagtacaagcttacgtctctgctcttcagtacaatcctgatttgtactgtgttcgcagtgacctggggaacctgctcaaagccctgggtcgcttggaagaagccaaggcatgttatttgaaagcaattgagacgcaaccgaactttgcagtagcttggagtaatcttggctgtgttttcaatgcacaaggggaaatttggcttgcaattcatcactttgaaaaggctgtcacccttgacccaaactttctggatgcttatatcaatttaggaaatgtcttgaaagaggcacgcatttttgacagagctgtggcagcttatcttcgtgccctaagtttgagtccaaatcacgcagtggtgcacggcaacctggcttgtgtatactatgagcaaggcctgatagatctggcaatagacacctacaggcgggctatcgaactacaaccacatttccctgatgcttactgcaacctagccaatgctctcaaagagaagggcagtgttgctgaagcagaagattgttataatacagctctccgtctgtgtcccacccatgcagactctctgaataacctagccaatatcaaacgagaacagggaaacattgaagaggcagttcgcttgtatcgtaaagcattagaagtcttcccagagtttgctgctgcccattcaaatttagcaagtgtactgcagcagcagggaaaactgcaggaagctctgatgcattataaggaggctattcgaatcagtcctacctttgctgatgcctactctaatatgggaaacactctaaaggagatgcaggatgttcagggagccttgcagtgttatacgcgtgccatccaaattaatcctgcatttgcagatgcacatagcaatctggcttccattcataaggattcagggaatattccagaagccatagcttcttaccgcacggctctgaaacttaagcctgattttcctgatgcttattgtaacttggctcattgcctgcagattgtctgtgattggacagactatgatgagcgaatgaagaagttggtcagtattgtggctgaccagttagagaagaataggttgccttctgtgcatcctcatcatagtatgctatatcctctttctcatggcttcaggaaggctattgctgagaggcacggcaacctgtgcttagataagattaatgttcttcataaaccaccatatgaacatccaaaagacttgaagctcagtgatggtcggctgcgtgtaggatatgtgagttccgactttgggaatcatcctacttctcaccttatgcagtctattccaggcatgcacaatcctgataaatttgaggtgttctgttatgccctgagcccagacgatggcacaaacttccgagtgaaggtgatggcagaagccaatcatttcattgatctttctcagattccatgcaatggaaaagcagctgatcgcatccatcaggatggaattcatatccttgtaaatatgaatggctatactaagggcgctcgaaatgagctttttgctctcaggccagctcctattcaggcaatgtggctgggataccctgggacgagtggtgcgcttttcatggattatattatcactgatcaggaaacttcgccagctgaagttgctgagcagtattccgagaaattggcttatatgccccacactttttttattggtgatcatgctaatatgttccctcacctgaagaaaaaagcagtcatcgattttaagtccaatgggcacatttatgacaatcggatagttctgaatggcatcgacctcaaagcatttcttgatagtctaccagatgtgaaaattgtcaagatgaagtgtcctgatggaggagacaatgcagatagcagtaacacagctcttaatatgcctgttattcctatgaatactattgcagaagcagttattgaaatgattaaccgaggacagattcaaataacaattaatggattcagtattagcaatggactggcaactactcagatcaacaataaggctgcaactggagaggaggttccccgtaccattattgtaaccacccgttctcagtacgggttaccagaagatgccatcgtatactgtaactttaatcagttgtataaaattgacccttctactttgcagatgtgggcaaacattctgaagcgtgttcccaatagtgtactctggctgttgcgttttccagcagtaggagaacctaatattcaacagtatgcacaaaacatgggcctgccccagaaccgtatcattttttcacctgttgctcctaaagaggaacacgtcaggagaggccagctggctgatgtctgcttggacactccactctgtaatgggcacaccacagggatggatgtcctctgggcagggacccccatggtgactatgccaggagagactcttgcttctcgagttgcagcatcccagctcacttgcttaggttgtcttgagcttattgctaaaaacagacaagaatatgaagacatagctgtgaagctgggaactgatctagaatacctgaagaaagttcgtggcaaagtctggaagcaaagaatatctagccctctgttcaacaccaaacaatacacaatggaactagagcggctctatctacagatgtgggagcattatgcagctggcaacaaacctgaccacatgattaagcctgttgaagtcactgagtcagcataaataaagactgcacaggagaattacccctatacctgagcctcaaccttctgggggaaagggaactagataacatacttcttacttgtctgtacagtaccttgttgcagatgggtgatatataatggtaatagaatagcacagccagacttgcttcctgcatggtagggagagacacaaaagatgggaaactgcttttccacaaggaatctccgtagaattttgcggcgaccagatggtgcataggtctggaaggtctgatctcccttggtcttccatgggatggttagtgtggaggggagatatagattgtccggccgctttgtgattccatggattgattcagtcttctggatttttttttctttatattttgggtactggagcttttaaaaatgtttggtttcaggtatttttattcatgtgaagtgtatatgattctcttgagataaggttttaagctaaaatgttactccctgttttagtttctgaactctgacagattgacagggactttgctggtgtagtctttttataggttttataaaccacttgagcctatatcagtcgttttagtgtctgacctaatatttggagctatcagtgctttgttgatttagatgatgactcaagattttttctggtccatttcccatttccttttcttccctgacccccataccctcacccttaaaattctcctgtaactcaactaacaaaatcaagcctgattcaaaacatcctagggtgttttaaacacaccatctggtgccaaatgaagatttttaggagtgattactaattatcaagggcacagttgtggtactgtcattgataataatatagtttttttttttttcctaattttgacctgtttcaccagtgttttacccttgactgccccttctatgctgcttccaaaagtgatagtgtgtgtaagatttttaccttcctttctaaagttttttttttttttttttaagtgagtcctgttcttcctatttctttcagcagaaatgaaatcccaggtaagtataagtattcaagtatttgatcagtaagtcacagttatctccagtgcattaaataaccttcatcaagaaataggttataggtaaaatctctgaaggatcatctatgtattcaagtaattattttttagataataactgtcttctggacttggtcttgaagtctgtacagattcagcctcagtagtagcgaactgcactgctgtttggtttggagtacaaattagacttatagtcctcctggaacttgagttattaaaatcataggaataaaattatgggatctcaacaaagggtcgagggtttgaggcttaaacaagccaacatatgaatatatgttttgtctcgctatactgcacttacgctatccagttgcaggtaattttttgtctgctagtagtgttctagattatgtctttccaaagcgctgaggctgtgcacctattctgtagttgcagctgatgcctgaatgtatcctagctgacaaattattgattaataagaacttgaatttctggaagattcttactgttaaccaaattttgagcaaggagtctcaaaggtaattctgaaccagaattacatgttaatgaacagtgtaccttttaacagtgtaaatcacggaatatccgtgaagggatttcttaatttattttttaccggttgattgaaatatcagttaaaggttgccagcatggttgcagataaactgatgtttgaaattcgctgaaatacttaatgtggaataggataatatacttccaatgccctcaaggctgtgaccttacagccattttacatagcacatcattcctcctatagggatgaactttttcctggcacgaaaagtagccgctctggttgaagctttgcttattgtaacaggcttttatttccaggtaatatgtcttggaagacttaattctgattagagatatagatattactggaaactaattgttttttttctattgtactctgctttatcaaagaagtaaaacatttaaatcgtactacagaaattaagatgttgtcttgcgatccttaataaatgaatgatttccctttaatacgg

SEQ ID NO: 162552 - DNA, 556 bp, Homo sapiens
  Payload ID: 12018
  Gene Symbol: OGT
  Gene Name: O-linked N-acetylglucosamine (GlcNAc) transferase
  ENST ID: ENST00000444774
  CDS Start-End: 88-556
gtaaagcaactggagtgtagctgcacaagtacaaggcggttgcccttttagacacttcagtcgcgagcatttgaaccaacgaaacgtatgctttccttccaagggttagctgagttggcacatcgagaatatcaggcaggagattttgaggcagctgagagacactgcatgcagctctggagacaagagccagacaatactggtgtgcttttattactttcatctatacacttccagtgtcgaaggctggacagatctgctcactttagcactctggcaattaaacagaacccccttctggcagaagcttattcgaatttggggaatgtgtacaaggaaagagggcagttgcaggaggcaattgagcattatcgacatgcattgcgtctcaaacctgatttcatcgatggttatattaacctggcagccgccttggtagcagcgggtgacatggaaggggcagtacaagcttacgtctctgctcttcagtacaatcctgatttgtactgtgttcgcagtgacctggggaacctgctcaaagccctgggtcgcttgg

SEQ ID NO: 162553 - DNA, 1935 bp, Homo sapiens
  Payload ID: 12019
  Gene Symbol: OMA1
  Gene Name: OMA1 zinc metallopeptidase
  Uniprot ID: Q96E52
  ENST ID: ENST00000371226
  CDS Start-End: 115-1689
agcgaagggcgccccggccggtatggcgggcaggaagtgcgggtgcgcgcctgcgcataggtcgggtctgcggtgtcaccgctttcgcttctgcttgagtagtcaagtgaaaaaatgagcttcatctgtggattgcagtctgctgctagaaaccatgttttcttccgatttaattcactgtctaactggagaaaatgtaacacattagcatccacctcacggggctgtcatcaagtacaagttaaccatatagtaaataagtatcagggactgggagtaaatcagtgtgacaggtggagttttctgcctggaaactttcatttttatagtacttttaacaacaaaagaacaggaggcctctcaagtaccaaaagtaaggaaatttggaggattaccagcaaatgtactgtatggaatgatgctttttcaagacagctgctaataaaagaagttacagcagtccctagtctgtcagtattgcatcctctaagccctgcttccataagagctattaggaatttccatacttctccacggtttcaagctgctccggttcctctcttgttgatgattcttaaaccagtacagaagttatttgcaatcattgtaggcaggggcataaggaaatggtggcaggcacttcctcctaacaagaaggaagtagttaaagaaaatataaggaagaataaatggaagctattccttggtttgagtagttttggattgctctttgtggtgttttattttactcacctggaagtaagtccaatcacaggaaggagcaagctactattattggggaaagaacagttcagacttttatcggaactggaatatgaagcatggatggaagaatttaaaaatgatatgctaactgagaaagatgcccgatacctggctgttaaagaagtgctttgtcatctaattgaatgcaataaagatgttccagggatctctcagatcaattgggttattcatgtggttgattccccaattattaatgccttcgtgcttccaaatggacaaatgtttgttttcactggatttttaaatagtgtaaccgatattcatcaactttctttccttctgggccatgaaatagcacatgcagtacttgggcatgctgcagaaaaggctggcatggttcatttgttggatttcctaggtatgattttcctcacaatgatttgggccatttgtcctcgagatagcttggcacttttgtgccagtggatacagtctaaattgcaggagtatatgtttaatagaccatacagcagaaaattggaggccgaagctgacaaaattggactactgcttgctgcaaaggcttgtgcagacataagagccagttcagtgttttggcagcaaatggagttcgttgatagcctgcatggccaacccaagatgccagaatggttatctacacacccttctcatggcaatcgagttgagtacttggatagacttatacctcaggctctcaaaattagagagatgtgtaattgtccaccactgtctaatccagaccctcgattactattcaaactcagcacgaagcattttcttgaagaatcagagaaagaagacctaaatatcacgaagaaacagaaaatggatactcttcctattcaaaaacaggagcaaataccattaacatacatagttgagaaaagaacgggcagttgaattaaaatttatgagacacaagatatatgaagaatgttgcagtccttatcattttatgttactttttaaaaaatgatgtttgaagtgaaaaaaaaaaggatattcagggtcaaatcatgtacattacagatattatctaaattcttctagaatttatttttcatgaaatattgatgtattttaatctatgttaaaatatcttcaatgaggaaaatgtcacagaataaatttatattacacatttta

SEQ ID NO: 162554 - DNA, 2105 bp, Homo sapiens
  Payload ID: 12019
  Gene Symbol: OMA1
  Gene Name: OMA1 zinc metallopeptidase
  ENST ID: ENST00000421528
  CDS Start-End: 1-985
gttatttgcaatcattgtaggcaggggcataaggaaatggtggcaggcacttcctcctaacaagaaggaagtagttaaagaaaatataaggaagaataaatggaagctattccttggtttgagtagttttggattgctctttgtggtgttttattttactcacctggaagtaagtccaatcacaggaaggagcaagctactattattggggaaagaacagttcagacttttatcggaactggaatatgaagcatggatggaagaatttaaaaatgatatgctaactgagaaagatgcccgatacctggctgttaaagaagtgctttgtcatctaattgaatgcaataaagatgttccagggatctctcagatcaattgggttattcatgtggttgattccccaattattaatgccttcgtgcttccaaatggacaaatgtttgttttcactggatttttaaatagtgtaaccgatattcatcaactttctttccttctgggccatgaaatagcacatgcagtacttgggcatgctgcagaaaaggctggcatggttcatttgttggatttcctaggtatgattttcctcacaatgatttgggccatttgtcctcgagatagcttggcacttttgtgccagtggatacagtctaaattgcaggagtatatgtttaatagaccatacagcagaaaattggaggccgaagctgacaaaattggactactgcttgctgcaaaggcttgtgcagacataagagccagttcagtgttttggcagcaaatggagttcgttgatagcctgcatggccaacccaagatgccagaatggttatctacacacccttctcatggcaatcgagttgagtacttggatagacttatacctcagcttgtccgggaagagaagtttattgaacagccagaacagattgcagagttaacgctcaacagcttcatccagaacacagaaatctgtcggagttgaaatgtgaaggaaacgcaggctaggaagacacaccagtcttgggaagtgatgaataaatgaaagaaggtcagccaggcggaatgtttctgcttcatctctgctcatatacagtgtagcggccatggaggggtaccactcagatcactcttcaagtgagtcctctgtggcatgcatgactgacaaatgctccagctgtcacaccttcaggcccatggtaactgaatatagcaggggcactagagctgggccgttcctgctgcacatgagatggtgtcatggatgactattgcatgaggactccctgttgacctggccaaaactttcttagaactgcactgtagtcacagctcttcctacttcctcctccttctttcccactctcctttctcgcacttcagactcacatcatggtctgaaggctctctctgcctcctcctgatcctctcctttgtcatgcaccagagcttctccaatacatctcatgcacagctaatcccatcttggtgtctacttcctgaagaatgctaatgcaaagacacagtgactctgtttttcagcccacatgtctctcacctgggaaacagatcaattctatgatatcatcatgcaatggaatactatagggcagtcaaaatgaacgaattagagatataggcatcaacatacatacatctcaaaaagataatgttgagcaaaaacaaaaatgttgcagagtgatacatacagtatgtaacatttatacaaagttttaaaacttgtgaaacaatgtcatatataatttgtagatgagtacatatgtgacaaaagcataaaaacacactaagggctgggtgcggtggctcgcgcctgtaatcccagcactttgggaggccaaggtgggtggatcatgaggtcaagagattgagaccatcctggccaacatggtgaaatcccgtctctactaaaaatacaaaaatcagctgaatgtggtggcacatgcctgcagtaccagctacttgggaggctaaggcagaagaatcacttgaaccccggaggcagaggttgcagtgagctgagatcgcgccattgcactccaccctgagcacagagagagactccatctcaaaacaaacaaacaaac

SEQ ID NO: 162555 - DNA, 744 bp, Homo sapiens
  Payload ID: 12019
  Gene Symbol: OMA1
  Gene Name: OMA1 zinc metallopeptidase
  ENST ID: ENST00000453710
  CDS Start-End: 194-744
gcttctgcttgagtcagtcctcacgctactcatggatgtctttttaagaatgcatacagttctcattctgttgcccacgccggagtgtagtggcacaattttggctcactgcagtctcttgcctcccaggttcaagtgattctcctgcctcagcctcccaagtagctgggtttacaggtagtcaagtgaaaaaatgagcttcatctgtggattgcagtctgctgctagaaaccatgttttcttccgatttaattcactgtctaactggagaaaatgtaacacattagcatccacctcacggggctgtcatcaagtacaagttaaccatatagtaaataagtatcagggactgggagtaaatcagtgtgacaggtggagttttctgcctggaaactttcatttttatagtacttttaacaacaaaagaacaggaggcctctcaagtaccaaaagtaaggaaatttggaggattaccagcaaatgtactgtatggaatgatgctttttcaagacagctgctaataaaagaagttacagcagtccctagtctgtcagtattgcatcctctaagccctgcttccataagagctattaggaatttccatacttctccacggtttcaagctgctccggttcctctcttgttgatgattcttaaaccagtacagaagttatttgcaatcattgtaggcaggggcataaggaaatggtggcaggcacttcctcctaacaagaaggaagtagt

SEQ ID NO: 162556 - DNA, 1036 bp, Homo sapiens
  Payload ID: 12019
  Gene Symbol: OMA1
  Gene Name: OMA1 zinc metallopeptidase
  ENST ID: ENST00000456980
  CDS Start-End: 60-1036
ttgagtcagtcctcacggtgacgcttttccccagcttttccgagtagtcaagtgaaaaaatgagcttcatctgtggattgcagtctgctgctagaaaccatgttttcttccgatttaattcactgtctaactggagaaaatgtaacacattagcatccacctcacggggctgtcatcaagtacaagttaaccatatagtaaataagtatcagggactgggagtaaatcagtgtgacaggtggagttttctgcctggaaactttcatttttatagtacttttaacaacaaaagaacaggaggcctctcaagtaccaaaagtaaggaaatttggaggattaccagcaaatgtactgtatggaatgatgctttttcaagacagctgctaataaaagaagttacagcagtccctagtctgtcagtattgcatcctctaagccctgcttccataagagctattaggaatttccatacttctccacggtttcaagctgctccggttcctctcttgttgatgattcttaaaccagtacagaagttatttgcaatcattgtaggcaggggcataaggaaatggtggcaggcacttcctcctaacaagaaggaagtagttaaagaaaatataaggaagaataaatggaagctattccttggtttgagtagttttggattgctctttgtggtgttttattttactcacctggaagtaagtccaatcacaggaaggagcaagctactattattggggaaagaacagttcagacttttatcggaactggaatatgaagcatggatggaagaatttaaaaatgatatgctaactgagaaagatgcccgatacctggctgttaaagaagtgctttgtcatctaattgaatgcaataaagatgttccagggatctctcagatcaattgggttattcatgtggttgattccccaattattaatgccttcgtgcttccaaatggacaaatgtttgttttcactggatttttaaatagtgtaaccgatattcatcaactttctttccttctggg

SEQ ID NO: 162557 - DNA, 852 bp, Homo sapiens
  Payload ID: 12019
  Gene Symbol: OMA1
  Gene Name: OMA1 zinc metallopeptidase
  ENST ID: ENST00000419242
  CDS Start-End: 86-852
gtgcgcgcctgcgcataggtcgggtctgcggtgtcaccgctttcgcttctgcttgagtcagtcctcacggtagtcaagtgaaaaaatgagcttcatctgtggattgcagtctgctgctagaaaccatgttttcttccgatttaattcactgtctaactggagaaaatgtaacacattagcatccacctcacggggctgtcatcaagtacaagttaaccatatagtaaataagtatcagggactgggagtaaatcagtgtgacaggtggagttttctgcctggaaactttcatttttatagtacttttaacaacaaaagaacaggaggcctctcaagtaccaaaagtaaggaaatttggaggattaccagcaaatgtactgtatggaatgatgctttttcaagacagctgctaataaaagaagttacagcagtccctagtctgtcagtattgcatcctctaagccctgcttccataagagctattaggaatttccatacttctccacggtttcaagctgctccggttcctctcttgttgatgattcttaaaccagtacagaagttatttgcaatcattgtaggcaggggcataaggaaatggtggcaggcacttcctcctaacaagaaggaagtagttaaagaaaatataaggaagaataaatggaagctattccttggtttgagtagttttggattgctctttgtggtgttttattttactcacctggaagtaagtccaatcacaggaaggagcaagctactattattggggaaagaacagttcagacttttatcggaactggaatatgaagcatggatggaagaatttaaaaatgatatgctaactgagaa

SEQ ID NO: 162558 - DNA, 836 bp, Homo sapiens
  Payload ID: 12019
  Gene Symbol: OMA1
  Gene Name: OMA1 zinc metallopeptidase
  ENST ID: ENST00000426139
  CDS Start-End: 79-836
ggagcgaagggcgccccggccggtatggcgggcaggaagtgcgggtgcgcgcctgcgcataggtagtcaagtgaaaaaatgagcttcatctgtggattgcagtctgctgctagaaaccatgttttcttccgatttaattcactgtctaactggagaaaatgtaacacattagcatccacctcacggggctgtcatcaagtacaagttaaccatatagtaaataagtatcagggactgggagtaaatcagtgtgacaggtggagttttctgcctggaaactttcatttttatagtacttttaacaacaaaagaacaggaggcctctcaagtaccaaaagtaaggaaatttggaggattaccagcaaatgtactgtatggaatgatgctttttcaagacagctgctaataaaagaagttacagcagtccctagtctgtcagtattgcatcctctaagccctgcttccataagagctattaggaatttccatacttctccacggtttcaagctgctccggttcctctcttgttgatgattcttaaaccagtacagaagttatttgcaatcattgtaggcaggggcataaggaaatggtggcaggcacttcctcctaacaagaaggaagtagttaaagaaaatataaggaagaataaatggaagctattccttggtttgagtagttttggattgctctttgtggtgttttattttactcacctggaagtaagtccaatcacaggaaggagcaagctactattattggggaaagaacagttcagacttttatcggaactggaatatgaagcatggatggaagaatttaaaaatgatatgct

SEQ ID NO: 162559 - DNA, 352 bp, Homo sapiens
  Payload ID: 12019
  Gene Symbol: OMA1
  Gene Name: OMA1 zinc metallopeptidase
  ENST ID: ENST00000482274
  CDS Start-End: 91-352
gcttgagtcagtcctcacggtgacgcttttccccagcttttccgagtaggatcgtgcccaggggaggaggcagagtagtcaagtgaaaaaatgagcttcatctgtggattgcagtctgctgctagaaaccatgttttcttccgatttaattcactgtctaactggagaaaatgtaacacattagcatccacctcacggggctgtcatcaagtacaagttaaccatatagtaaataagtatcagggactgggagtaaatcagtgtgacaggtggagttttctgcctggaaactttcatttttatagtacttttaacaacaaaagaacaggaggcctctcaagtaccaaaagta

SEQ ID NO: 162560 - DNA, 695 bp, Homo sapiens
  Payload ID: 12020
  Gene Symbol: OCM
  Gene Name: oncomodulin
  Uniprot ID: P0CE72
  ENST ID: ENST00000242104
  CDS Start-End: 93-422
cagtgggcctgggaagatgtgtttcccctggatgtgcacattcctgtttgtggcttatcgcctctcatttattctgtgtgagtaggtagaaaatgagcatcacggacgtgctcagtgctgacgacattgcagcagcgctccaggaatgccgagacccagacacttttgaaccccaaaaattcttccagacatcaggcctctccaagatgtcagccaatcaggtgaaggatgttttccggttcatagacaacgaccagagcgggtacctggatgaagaagagcttaagtttttcctccagaagtttgagagtggtgccagagaactgaccgagtcagaaaccaagtccttgatggctgcggcggataatgatggagatgggaaaattggagcagaggaattccaggaaatggtgcattcttaaaagccccagtctctggagaaaagagagaaagggataatcacctggaaggattccaaagccctgggaatggggaaccccacatcccatccctacctaatttgttaattttccctgaaaaccttctgcagtttgctcattgttttagtgaggtcacgagggagtcactcctgactttcttggtggtgggtatatgccctgacaacttctgtaagccccccttcccccaacaggcaatgcctctaaaaatcacccaataaagacaggcttctcatc

SEQ ID NO: 162561 - DNA, 623 bp, Homo sapiens
  Payload ID: 12020
  Gene Symbol: OCM
  Gene Name: oncomodulin
  Uniprot ID: P0CE72
  ENST ID: ENST00000416608
  CDS Start-End: 141-470
ggaaatctaagaggttgtaactatcactttttctagcctatataaggtaggtcagtaaggtagcaaaaacacatctgttgttttgctccttcaactctttttcctgattcttcctggggggaaaccgaaaacggtgaaaaatgagcatcacggacgtgctcagtgctgacgacattgcagcagcgctccaggaatgccgagacccagacacttttgaaccccaaaaattcttccagacatcaggcctctccaagatgtcagccaatcaggtgaaggatgttttccggttcatagacaacgaccagagcgggtacctggatgaagaagagcttaagtttttcctccagaagtttgagagtggtgccagagaactgaccgagtcagaaaccaagtccttgatggctgcggcggataatgatggagatgggaaaattggagcagaggaattccaggaaatggtgcattcttaaaagccccagtctctggagaaaagagagaaagggataatcacctggaaggattccaaagccctgggaatggggaaccccacatcccatccctacctaatttgttaattttccctgaaaaccttctgcagtttgctcattgttttagtgaggtca

SEQ ID NO: 162562 - DNA, 696 bp, Homo sapiens
  Payload ID: 12021
  Gene Symbol: OCM2
  Gene Name: oncomodulin 2
  Uniprot ID: P0CE71
  ENST ID: ENST00000257627
  CDS Start-End: 93-422
cagtgggcctgggaagatgtgtttcccctggatgtgcacgttcctgtttgtggcttatcgcctctcgtttattctgtgtgagtaggtagaaaatgagcatcacggacgtgctcagtgctgatgacattgcagcagcgctccaggaatgccaagacccagacacttttgaaccccaaaaattcttccagacgtcaggcctctccaagatgtcagccagtcaggtgaaggatgttttccggttcatagacaacgaccagagcgggtatctggatgaagaagagcttaagtttttcctccagaagtttgagagtggtgccagagaactgaccgagtcagaaaccaagtccttgatggctgcggcggataatgatggagatgggaaaattggagcagaggaattccaggaaatggtgcattcttaaaagccccagtctctggagaaaagagagaaagggataatcacctggaaggattccaaagccctgggaatggggaaccccacatcccatccctacctaatttgttaattttccctgaaaaccttctgcagtttgctcattgttttagcgaggtcacgagagagtcactcatgactttcttggtggtgggtatatgccctgacaacttctgtaagccccccttcccccaacaggcaatgcctctaaaaatcacccaataaagacaggcttctcaaca

SEQ ID NO: 162563 - DNA, 2365 bp, Homo sapiens
  Payload ID: 12022
  Gene Symbol: OIT3
  Gene Name: oncoprotein induced transcript 3
  Uniprot ID: Q8WWZ8
  ENST ID: ENST00000334011
  CDS Start-End: 219-1856
aaagcagtgcttctctctggggccaaggccagagctgtggacaccttatcccactcatcctcatcctcttcctctgataaagcccctaccagtgctgataaagtctttctcgtgagagcctagaggccttaaaaaaaaaagtgcttgaaagagaaggggacaaaggaacaccagtattaagaggattttccagtgtttctggcagttggtccagaaggatgcctccattcctgcttctcacctgcctcttcatcacaggcacctccgtgtcacccgtggccctagatccttgttctgcttacatcagcctgaatgagccctggaggaacactgaccaccagttggatgagtctcaaggtcctcctctatgtgacaaccatgtgaatggggagtggtaccacttcacgggcatggcgggagatgccatgcctaccttctgcataccagaaaaccactgtggaacccacgcacctgtctggctcaatggcagccaccccctagaaggcgacggcattgtgcaacgccaggcttgtgccagcttcaatgggaactgctgtctctggaacaccacggtggaagtcaaggcttgccctggaggctactatgtgtatcgtctgaccaagcccagcgtctgcttccacgtctactgtggtcatttttatgacatctgcgacgaggactgccatggcagctgctcagataccagcgagtgcacatgcgctccaggaactgtgctaggccctgacaggcagacatgctttgatgaaaatgaatgtgagcaaaacaacggtggctgcagtgagatctgtgtgaacctcaaaaactcctaccgctgtgagtgtggggttggccgtgtgctaagaagtgatggcaagacttgtgaagacgttgaaggatgccacaataacaatggtggctgcagccactcttgccttggatctgagaaaggctaccagtgtgaatgtccccggggcctggtgctgtctgaggataaccacacttgccaagtccctgtgttgtgcaaatcaaatgccattgaagtgaacatccccagggagctggttggtggcctggagctcttcctgaccaacacctcctgccgaggagtgtccaacggcacccatgtcaacatcctcttctctctcaagacatgtggtacagtggtcgatgtggtgaatgacaagattgtggccagcaacctcgtgacaggtctacccaagcagaccccggggagcagcggggacttcatcatccgaaccagcaagctgctgatcccggtgacctgcgagtttccacgcctgtacaccatttctgaaggatacgttcccaaccttcgaaactccccactggaaatcatgagccgaaatcatgggatcttcccattcactctggagatcttcaaggacaatgagtttgaagagccttaccgggaagctctgcccaccctcaagcttcgtgactccctctactttggcattgagcccgtggtgcacgtgagcggcttggaaagcttggtggagagctgctttgccacccccacctccaagatcgacgaggtcctgaaatactacctcatccgggatggctgtgtttcagatgactcggtaaagcagtacacatcccgggatcacctagcaaagcacttccaggtccctgtcttcaagtttgtgggcaaagaccacaaggaagtgtttctgcactgccgggttcttgtctgtggagtgttggacgagcgttcccgctgtgcccagggttgccaccggcgaatgcgtcgtggggcaggaggagaggactcagccggtctacagggccagacgctaacaggcggcccgatccgcatcgactgggaggactagttcgtagccatacctcgagtccctgcattggacggctctgctctttggagcttctccccccaccgccctctaagaacatctgccaacagctgggttcagacttcacactgtgagttcagactcccagcaccaactcactctgattctggtccattcagtgggcacaggtcacagcactgctgaacaatgtggcctgggtggggtttcatctttctagggttgaaaactaaactgtccacccagaaagacactcaccccatttccctcatttctttcctacacttaaatacctcgtgtatggtgcaatcagaccacaaaatcagaagctgggtataatatttcaagttacaaaccctagaaaaattaaacagttactgaaattatgacttaaatacccaatgactccttaaatatgtaaattatagttataccttgaaatttcaattcaaatgcagactaattatagggaatttggaagtgtatcaataaaacagtatataattttaaaa

SEQ ID NO: 162564 - DNA, 1602 bp, Homo sapiens
  Payload ID: 12022
  Gene Symbol: OIT3
  Gene Name: oncoprotein induced transcript 3
  Uniprot ID: Q8WWZ8
  ENST ID: ENST00000622652
  CDS Start-End: 216-1181
gcagtgcttctctctggggccaaggccagagctgtggacaccttatcccactcatcctcatcctcttcctctgataaagcccctaccagtgctgataaagtctttctcgtgagagcctagaggccttaaaaaaaaaagtgcttgaaagagaaggggacaaaggaacaccagtattaagaggattttccagtgtttctggcagttggtccagaaggatgcctccattcctgcttctcacctgcctcttcatcacaggcacctccgtgtcacccgtggccctagatccttgttctgcttacatcagcctgaatgagccctggaggaacactgaccaccagttggatgagtctcaaggtcctcctctatgtgacaaccatgtgaatggggagtggtaccacttcacgggcatggcgggagatgccatgcctaccttctgcataccagaaaaccactgtggaacccacgcacctgtctggctcaatggcagccaccccctagaaggcgacggcattgtgcaacgccaggcttgtgccagcttcaatgggaactgctgtctctggaacaccacggtggaagtcaaggcttgccctggaggctactatgtgtatcgtctgaccaagcccagcgtctgcttccacgtctactgtggtcatttttatgacatctgcgacgaggactgccatggcagctgctcagataccagcgagtgcacatgcgctccaggaactgtgctaggccctgacaggcagacatgctttgatgaaaatgaatgtgagcaaaacaacggtggctgcagtgagatctgtgtgaacctcaaaaactcctaccgctgtgagtgtggggttggccgtgtgctaagaagtgatggcaagacttgtgaagacgttgaaggatgccacaataacaatggtggctgcagccactcttgccttggatctgagaaaggctaccagtgtgaatgtccccggggcctggtgctgtctgaggataaccacacttgccaagtccctgtgttgtgcaaatcaaatgccattgaagtgaacatccccagggagctggttggtggcctggagctcttcctgaccaacacctcctgccgaggagtgtccaacggcacccatgtcaacatcctcttctctctcaagacatgtggtacagtggtcgatctgtgtttcagatgactcggtaaagcagtacacatcccgggatcacctagcaaagcacttccaggtccctgtcttcaagtttgtgggcaaagaccacaaggaagtgtttctgcactgccgggttcttgtctgtggagtgttggacgagcgttcccgctgtgcccagggttgccaccggcgaatgcgtcgtggggcaggaggagaggactcagccggtctacagggccagacgctaacaggcggcccgatccgcatcgactgggaggactagttcgtagccatacctcgagtccctgcattggacggctctgctctttggagcttctccccccaccgccctctaagaacatctgccaacagctgggttcagacttcacactgtgagttcagactcccagcaccaactcactctgattctggtccattcagtgggcac

SEQ ID NO: 162565 - DNA, 1854 bp, Homo sapiens
  Payload ID: 12023
  Gene Symbol: OSM
  Gene Name: oncostatin M
  Uniprot ID: P13725
  ENST ID: ENST00000215781
  CDS Start-End: 42-800
gtcacccccagcgggcgcgggccggagcacgggcacccagcatgggggtactgctcacacagaggacgctgctcagtctggtccttgcactcctgtttccaagcatggcgagcatggcggctataggcagctgctcgaaagagtaccgcgtgctccttggccagctccagaagcagacagatctcatgcaggacaccagcagactcctggacccctatatacgtatccaaggcctggatgttcctaaactgagagagcactgcagggagcgccccggggccttccccagtgaggagaccctgagggggctgggcaggcggggcttcctgcagaccctcaatgccacactgggctgcgtcctgcacagactggccgacttagagcagcgcctccccaaggcccaggatttggagaggtctgggctgaacatcgaggacttggagaagctgcagatggcgaggccgaacatcctcgggctcaggaacaacatctactgcatggcccagctgctggacaactcagacacggctgagcccacgaaggctggccggggggcctctcagccgcccacccccacccctgcctcggatgcttttcagcgcaagctggagggctgcaggttcctgcatggctaccatcgcttcatgcactcagtggggcgggtcttcagcaagtggggggagagcccgaaccggagccggagacacagcccccaccaggccctgaggaagggggtgcgcaggaccagaccctccaggaaaggcaagagactcatgaccaggggacagctgccccggtagcctcgagagcaccccttgccggtgaaggatgcggcaggtgctctgtggatgagaggaaccatcgcaggatgacagctcccgggtccccaaacctgttcccctctgctactagccactgagaagtgcactttaagaggtgggagctgggcagacccctctacctcctccaggctgggagacagagtcaggctgttgcgctcccacctcagccccaagttccccaggcccagtggggtggccgggcgggccacgcgggaccgactttccattgattcaggggtctgatgacacaggctgactcatggccgggctgactgcccccctgccttgctccccgaggcctgccggtccttccctctcatgacttgcagggccgttgcccccagacttcctcctttccgtgtttctgaaggggaggtcacagcctgagctggcctcctatgcctcatcatgtcccaaaccagacacctggatgtctgggtgacctcactttaggcagctgtaacagcggcagggtgtcccaggagccctgatccgggggtccagggaatggagctcaggtcccaggccagccccgaagtcgccacgtggcctggggcaggtcactttacctctgtggacctgttttctctttgtgaagctagggagttagaggctgtacaaggcccccactgcctgtcggttgcttggattccctgacgtaaggtggatattaaaaatctgtaaatcaggacaggtggtgcaaatggcgctgggaggtgtacacggaggtctctgtaaaagcagacccacctcccagcgccgggaagcccgtcttgggtcctcgctgctggctgctccccctggtggtggatcctggaattttctcacgcaggagccattgctctcctagagggggtctcagaaactgcgaggccagttccttggagggacatgactaatttatcgatttttatcaatttttatcagttttatatttataagccttatttatgatgtatatttaatgttaatattgtgcaaacttatatttaaaacttgcctggtttctaaa

SEQ ID NO: 162566 - DNA, 1000 bp, Homo sapiens
  Payload ID: 12023
  Gene Symbol: OSM
  Gene Name: oncostatin M
  ENST ID: ENST00000403389
  CDS Start-End: 290-985
ggagggaggcaagagaggtcaggggagagccctggccttgtgtgacctgagtaggaccttctcctgagacttggtttacctgtcaggaaagtggggacatggactggaaggtcttccacatctgttccaggctgcacctctggttgaaaaggcagcctctcctggttctagacagagctgaggacacaagctgctcccgggctgcctgccctgaagccctctcaggcccatctacctggatggccagagcagctgacaaggtctggtccttgcactcctgtttccaagcatggcgagcatggcggctataggcagctgctcgaaagagtaccgcgtgctccttggccagctccagaagcagacagatctcatgcaggacaccagcagactcctggacccctatatacgtatccaaggcctggatgttcctaaactgagagagcactgcagggagcgccccggggccttccccagtgaggagaccctgagggggctgggcaggcggggcttcctgcagaccctcaatgccacactgggctgcgtcctgcacagactggccgacttagagcagcgcctccccaaggcccaggatttggagaggtctgggctgaacatcgaggacttggagaagctgcagatggcgaggccgaacatcctcgggctcaggaacaacatctactgcatggcccagctgctggacaactcagacacggctgagcccacgaaggctggccggggggcctctcagccgcccacccccacccctgcctcggatgcttttcagcgcaagctggagggctgcaggttcctgcatggctaccatcgcttcatgcactcagtggggcgggtcttcagcaagtggggggagagcccgaaccggagccggagacacagcccccaccaggccctgaggaagggggtgcgcaggaccagaccctccaggaaaggcaagagactcatgaccaggggacagctgccccggtagcctcgagagcacccc

SEQ ID NO: 162567 - DNA, 464 bp, Homo sapiens
  Payload ID: 12023
  Gene Symbol: OSM
  Gene Name: oncostatin M
  ENST ID: ENST00000403463
  CDS Start-End: 41-103
tcacccccagcgggcgcgggccggagcacgggcacccagcatgggggtactgctcacacagaggacgctgctcaatacgtatccaaggcctggatgttcctaaactgagagagcactgcagggagcgccccggggccttccccagtgaggagaccctgagggggctgggcaggcggggcttcctgcagaccctcaatgccacactgggctgcgtcctgcacagactggccgacttagagcagcgcctccccaaggcccaggatttggagaggtctgggctgaacatcgaggacttggagaagctgcagatggcgaggccgaacatcctcgggctcaggaacaacatctactgcatggcccagctgctggacaactcagacacggctgagcccacgaaggctggccggggggcctctcagccgcccacccccacccctgcctcggatgcttttcagcgcaagctg

SEQ ID NO: 162568 - DNA, 5539 bp, Homo sapiens
  Payload ID: 12024
  Gene Symbol: OSMR
  Gene Name: oncostatin M receptor
  Uniprot ID: Q99650
  ENST ID: ENST00000274276
  CDS Start-End: 403-3342
gcgcttgccccgcagctgattcatagccccggcccgggccgcctctgcacgtccgccccggagcccgcacccgcgccccacgcgccgccgaggactcggcccggctcgtggagcccttcgcccgcggcgtgagtacccccgacccgcccgtccccgctctgctcgcgccctgccgctgcgccgccctcggtggcttttccgacgggcgagccccgtgctgtgcgggaaagaatccgacaacttcgcagcccatcccggctggacgcgaccgggagtgcagcagcccgttcccctcctcggtgccgcctctgcccagcgtttgcttggctgggctaccacctgcgctcggacggcgctcggagggtcctcgcccccggcctgcctacctgaaaaccagaactgatggctctatttgcagtctttcagacaacattcttcttaacattgctgtccttgaggacttaccagagtgaagtcttggctgaacgtttaccattgactcctgtatcacttaaagtttccaccaattctacgcgtcagagtttgcacttacaatggactgtccacaaccttccttatcatcaggaattgaaaatggtatttcagatccagatcagtaggattgaaacatccaatgtcatctgggtggggaattacagcaccactgtgaagtggaaccaggttctgcattggagctgggaatctgagctccctttggaatgtgccacacactttgtaagaataaagagtttggtggacgatgccaagttccctgagccaaatttctggagcaactggagttcctgggaggaagtcagtgtacaagattctactggacaggatatattgttcgttttccctaaagataagctggtggaagaaggcaccaatgttaccatttgttacgtttctaggaacattcaaaataatgtatcctgttatttggaagggaaacagattcatggagaacaacttgatccacatgtaactgcattcaacttgaatagtgtgcctttcattaggaataaagggacaaatatctattgtgaggcaagtcaaggaaatgtcagtgaaggcatgaaaggcatcgttctttttgtctcaaaagtacttgaggagcccaaggacttttcttgtgaaaccgaggacttcaagactttgcactgtacttgggatcctgggacggacactgccttggggtggtctaaacaaccttcccaaagctacactttatttgaatcattttctggggaaaagaaactttgtacacacaaaaactggtgtaattggcaaataactcaagactcacaagaaacctataacttcacactcatagctgaaaattacttaaggaagagaagtgtcaatatcctttttaacctgactcatcgagtttatttaatgaatccttttagtgtcaactttgaaaatgtaaatgccacaaatgccatcatgacctggaaggtgcactccataaggaataatttcacatatttgtgtcagattgaactccatggtgaaggaaaaatgatgcaatacaatgtttccatcaaggtgaacggtgagtacttcttaagtgaactggaacctgccacagagtacatggcgcgagtacggtgtgctgatgccagccacttctggaaatggagtgaatggagtggtcagaacttcaccacacttgaagctgctccctcagaggcccctgatgtctggagaattgtgagcttggagccaggaaatcatactgtgaccttattctggaagccattatcaaaactgcatgccaatggaaagatcctgttctataatgtagttgtagaaaacctagacaaaccatccagttcagagctccattccattccagcaccagccaacagcacaaaactaatccttgacaggtgttcctaccaaatctgcgtcatagccaacaacagtgtgggtgcttctcctgcttctgtaatagtcatctctgcagaccccgaaaacaaagaggttgaggaagaaagaattgcaggcacagagggtggattctctctgtcttggaaaccccaacctggagatgttataggctatgttgtggactggtgtgaccatacccaggatgtgctcggtgatttccagtggaagaatgtaggtcccaataccacaagcacagtcattagcacagatgcttttaggccaggagttcgatatgacttcagaatttatgggttatctacaaaaaggattgcttgtttattagagaaaaaaacaggatactctcaggaacttgctccttcagacaaccctcacgtgctggtggatacattgacatcccactccttcactctgagttggaaagattactctactgaatctcaacctggttttatacaagggtaccatgtctatctgaaatccaaggcgaggcagtgccacccacgatttgaaaaggcagttctttcagatggttcagaatgttgcaaatacaaaattgacaacccggaagaaaaggcattgattgtggacaacctaaagccagaatccttctatgagtttttcatcactccattcactagtgctggtgaaggccccagtgctacgttcacgaaggtcacgactccggatgaacactcctcgatgctgattcatatcctactgcccatggttttctgcgtcttgctcatcatggtcatgtgctacttgaaaagtcagtggatcaaggagacctgttatcctgacatccctgacccttacaagagcagcatcctgtcattaataaaattcaaggagaaccctcacctaataataatgaatgtcagtgactgtatcccagatgctattgaagttgtaagcaagccagaagggacaaagatacagttcctaggcactaggaagtcactcacagaaaccgagttgactaagcctaactacctttatctccttccaacagaaaagaatcactctggccctggcccctgcatctgttttgagaacttgacctataaccaggcagcttctgactctggctcttgtggccatgttccagtatccccaaaagccccaagtatgctgggactaatgacctcacctgaaaatgtactaaaggcactagaaaaaaactacatgaactccctgggagaaatcccagctggagaaacaagtttgaattatgtgtcccagttggcttcacccatgtttggagacaaggacagtctcccaacaaacccagtagaggcaccacactgttcagagtataaaatgcaaatggcagtctccctgcgtcttgccttgcctcccccgaccgagaatagcagcctctcctcaattacccttttagatccaggtgaacactactgctaaccagcatgccgatttcataccttatgctacacagacattaagaagagcagagctggcaccctgtcatcaccagtggccttggtccttaatcccagtacgatttgcaggtctggtttatataagaccactacagtctggctaggttaaaggccagaggctatggaacttaacactccccattggagcaagcttgccctagagacggcaggatcatgggagcatgcttaccttctgctgtttgttccaggctcacctttagaacaggagacttgagcttgacctaaggatatgcattaaccactctacagactcccactcagtactgtacagggtggctgtggtcctagaagttcagtttttactgaggaaatatttccattaacagcaattattatattgaaggctttaataaaggccacaggagacattactatagcatagattgtcaaatgtaaatttactgagcgtgttttataaaaaactcacaggtgtttgaggccaaaacagattttagacttaccttgaacggataagaatctatagttcactgacacagtaaaattaactctgtgggtgggggcggggggcatagctctaatctaatatataaaatgtgtgatgaatcaacaagatttccacaattcttctgtcaagcttactacagtgaaagaatgggattggcaagtaacttctgacttactgtcagttgtacttctgctccatagacatcagtattctgccatcatttttgatgactacctcagaacataaaaaggaacgtatatcacataattccagtcacagtttttggttcctcttttctttcaagaactatatataaatgacctgttttcacttagcatcctttggactctgcagtaggttgtctgggtcaagataactctcagtcacatttatattcatattatgctaaaatagtaaaatgaaacctcattgttggacataatttagatataactaaaaagttctatgaagtgggaaattccgtgttggctctggagcagctttgtctcctctgaaccaatatatcccaaaccaatatatgcaaagcacctggtacacaactggtattttagtacatgttggttcttttggtgcaatctcagctcactgcagcttccgcctcctagattcaaacaaacagttctcctgccccagcctccagagcacctaggactccaggtgcatgctaccacacctgactagtttttatatttttagtagagattgggttttaccatattggccaggctggtctcaaactcctgaccgcaggtgatccacctgcctcagcttccccaagggctgggattacaggtgtgagccaccatgcccagcctatttgtcacattatttgtcacatttattttacttttatttattttttgagatgaaatttcgctcttgttgcccaggctggagtgcaatggtgcagccttggctcactgcaacctccgcctcccagggtcaagcaattctcctgcctcagcctcctgagtagctgggattacaggcatgcaccaccacacccaggtaattttgtatctttagtagagatggggtttcaccatgttggtcaggctgttctcgaactcctgacctcaggtgatctgcctgccttggcctcccaaagtgctgggattacaggcgtgagccactgcgcctagccgtcacatttctaaacaagcatgaaaggggttcatttttgtcttcttcttgcctgccgtcagcatggtggaaatggctctgcctatgctcatgcttctggtgcccaatgccttgcactgtgccattcaacactatgaagagaaacaagtagccacacctcaaaataatgtggctgtcaacaactggcctaaataaacctacacaaaccagtacttgccttttgctggaaacattgattatgtgctcctcacgtagtagaaagcggtatcctgattagtctaacagttgtgttagactttagggccagtattgtcagcatttatttatttatgtacctttgttatgatgggatatttttcatttgaaacttgttcataaaaatgtcaatgacattgatgactgatttgtacatatttttcatatagttttgtttaaaaaataattcacgcaaaatcttgaagtcatttttgctattgaaataaaccttaattaaaatatttcatcatca

SEQ ID NO: 162569 - DNA, 1740 bp, Homo sapiens
  Payload ID: 12024
  Gene Symbol: OSMR
  Gene Name: oncostatin M receptor
  Uniprot ID: Q99650
  ENST ID: ENST00000502536
  CDS Start-End: 283-1311
gcggccgcctccccccgggactgaagggagggaattcctgtgggtcccaggagtgccaagagtgcgcagcaagacgggaaattgcaaaagacctcacccctctgccctcccccgcggttttccagtaactcccgcccctccgcgcttgccccgcagctgattcatagccccggcccgggccgcctctgcacgtccgccccggagcccgcacccgcgccccacgcgccgccgaggactcggcccggctcgtggagcccttcgcccgcggcaaaaccagaactgatggctctatttgcagtctttcagacaacattcttcttaacattgctgtccttgaggacttaccagagtgaagtcttggctgaacgtttaccattgactcctgtatcacttaaagtttccaccaattctacgcgtcagagtttgcacttacaatggactgtccacaaccttccttatcatcaggaattgaaaatggtatttcagatccagatcagtaggattgaaacatccaatgtcatctgggtggggaattacagcaccactgtgaagtggaaccaggttctgcattggagctgggaatctgagctccctttggaatgtgccacacactttgtaagaataaagagtttggtggacgatgccaagttccctgagccaaatttctggagcaactggagttcctgggaggaagtcagtgtacaagattctactggacaggatatattgttcgttttccctaaagataagctggtggaagaaggcaccaatgttaccatttgttacgtttctaggaacattcaaaataatgtatcctgttatttggaagggaaacagattcatggagaacaacttgatccacatgtaactgcattcaacttgaatagtgtgcctttcattaggaataaagggacaaatatctattgtgaggcaagtcaaggaaatgtcagtgaaggcatgaaaggcatcgttctttttgtctcaaaagtacttgaggagcccaaggacttttcttgtgaaaccgaggacttcaagactttgcactgtacttgggatcctgggacggacactgccttggggtggtctaaacaaccttcccaaagctacactttatttgaatcattttctggggaaaagaaactttgtacacacaaaaactggtgtaattggcaaataactcaagactcacaagaaacctataacttcacactcatagctgaaaattacttaaggaagagaagtgtcaatatcctttttaacctgactcatcgaggtgagactagagttgtcacagcccaccgtggccactaacgtgtctttgtttcacagactgtgtgatcaagtaaatgtgctgtagatctttgcctcattcacagcggaggtgagagttagaatttatacctattgttcatgccacgtttctcctcatggatgcacgcatcccctattatttgtttcttttaataatgtcacgagcaccaatgagcttactacccaacttcaaaactaggactctaacaataacttctgtcatatctcatcctgtaacgcccccaccttcgctccttccgccaagataattatcactttaaattgtgtgcgtgtgtattctcatttcttatgtgatggtaaaaatgcctttattttgtttggttttaatgcatagaaaggacatcaagctgtatgtaataattcagtaattatgtttatataatattaaattgctaatatttgcccata

SEQ ID NO: 162570 - DNA, 361 bp, Homo sapiens
  Payload ID: 12024
  Gene Symbol: OSMR
  Gene Name: oncostatin M receptor
  ENST ID: ENST00000508882
  CDS Start-End: 1-107
ggatcaaggagacctgttatcctgacatccctgacccttacaagagcagcatcctgtcattaataaaattcaagatctcttcaaaagtctggcttaatagaagatagctggattctcatacttgcttctacattcaatctgttgccatatgttgttttggctgaagtattaaagaaaatctagcctcacacagctgagccttcttgagacaccccatcactgcatccagaaatccccgaaaacttagagggaaccacttctaaaggattatggatagtctgctcacaccaatcagaatatggaatatcttgaaagtctgaagaaaaaaataattatttcaattaaagcaccataacggctt

SEQ ID NO: 162571 - DNA, 766 bp, Homo sapiens
  Payload ID: 12024
  Gene Symbol: OSMR
  Gene Name: oncostatin M receptor
  ENST ID: ENST00000513831
  CDS Start-End: 1-567
ctggaacctgccacagagtacatggcgcgagtacggtgtgctgatgccagccacttctggaaatggagtgaatggagtggtcagaacttcaccacacttgaagctgctccctcagaggcccctgatgtctggagaattgtgagcttggagccaggaaatcatactgtgaccttattctggaagccattatcaaaactgcatgccaatggaaagatcctgttctataatgtagttgtagaaaacctagacaaaccatccagttcagagctccattccattccagcaccagccaacagcacaaaactaatccttgacaggtgttcctaccaaatctgcgtcatagccaacaacagtgtgggtgcttctcctgcttctgtaatagtcatctctgcagaccccgaaaacagtgtgtcaacgtgtttcagtgggacagtcccctcagtgtggggagaaggagacttcagccatggctcaggacatttctgtccaggggattcttcaacatacatgggaaattatctcaaatttattcaagtaactgcaaccctaacaaacagtcaccactgagagttggagttactatttatgatctttgtggcttgtgaaataggaattgcatttactattttgtaaaaagtgttgtcagtctttgcacctggaaagagtccatgaacatttccagagatcatcagaactggcatcaactttcaccacagactctgccaactttgtagaataaaagataataactggctaatctcttgcc

SEQ ID NO: 162572 - DNA, 653 bp, Homo sapiens
  Payload ID: 12024
  Gene Symbol: OSMR
  Gene Name: oncostatin M receptor
  ENST ID: ENST00000509237
  CDS Start-End: 1-188
cctcgatgctgattcatatcctactgcccatggttttctgcgtcttgctcatcatggtcatgtgctacttgaaaagtcagtggatcaaggagacctgttatcctgacatccctgacccttacaagagcagcatcctgtcattaataaaattcaagatctcttcaaaagtctggcttaatagaagatagctggattctcatacttgcttctacattcaatctgttgccatatgttgttttggctgaagtattaaagaaaatctagcctcacacagaaaatgaaaataactacagcatgcaaagggcctggacagggctgttcacagtggaaaagacctaatccagggatctgtcagactcaggccccactgtgacctggaaccgtgagaggatcagcatctcagcataacataatttggcatatcagtgtgctgcagctcaccagctgggaaactctgaattagaataccaaaaagaaatttggaaaagtaaaccagagaactttagtcatcactaggtttttctgaaggtgggacgtgatcacttacctgaatgactacatattgcactcagttggttgctgggctggaaacccagaatttcaatacagacacaataaaggcagttatcatctgtatgttcctgtagtccagt

SEQ ID NO: 162573 - DNA, 2092 bp, Homo sapiens
  Payload ID: 12025
  Gene Symbol: ONECUT1
  Gene Name: one cut homeobox 1
  Uniprot ID: Q9UBC0
  ENST ID: ENST00000305901
  CDS Start-End: 129-1526
ccccacagtgagaggaaggaaggcaacagtcgccagcagccgatgtgaagaccggactccgtgcgcccctcgccgcctctgcctggccacatcgatgttgtgtccgccgcctgctcgcccggatcacgatgaacgcgcagctgaccatggaagcgatcggcgagctgcacggggtgagccatgagccggtgcccgcccctgccgacctgctgggcggcagcccccacgcgcgcagctccgtggcgcaccgcggcagccacctgccccccgcgcacccgcgctccatgggcatggcgtccctgctggacggcggcagcggcggcggagattaccaccaccaccaccgggcccctgagcacagcctggccggccccctgcatcccaccatgaccatggcctgcgagactcccccaggtatgagcatgcccaccacctacaccaccttgacccctctgcagccgctgcctcccatctccacagtctcggacaagttcccccaccatcaccaccaccaccatcaccaccaccacccgcaccaccaccagcgcctggcgggcaacgtgagcggtagcttcacgctcatgcgggatgagcgcgggctggcctccatgaataacctctataccccctaccacaaggacgtggccggcatgggccagagcctctcgcccctctccagctccggtctgggcagcatccacaactcccagcaagggctcccccactatgcccacccgggggccgccatgcccaccgacaagatgctcacccccaacggcttcgaagcccaccacccggccatgctcggccgccacggggagcagcacctcacgcccacctcggccggcatggtgcccatcaacggccttcctccgcaccatccccacgcccacctgaacgcccagggccacgggcaactcctgggcacagcccgggagcccaacccttcggtgaccggcgcgcaggtcagcaatggaagtaattcagggcagatggaagagatcaataccaaagaggtggcgcagcgtatcaccaccgagctcaagcgctacagcatcccacaggccatcttcgcgcagagggtgctctgccgctcccaggggaccctctcggacctgctgcgcaaccccaaaccctggagcaaactcaaatccggccgggagaccttccggaggatgtggaagtggctgcaggagccggagttccagcgcatgtccgcgctccgcttagcagcatgcaaaaggaaagaacaagaacatgggaaggatagaggcaacacacccaaaaagcccaggttggtcttcacagatgtccagcgtcgaactctacatgcaatattcaaggaaaataagcgtccatccaaagaattgcaaatcaccatttcccagcagctggggttggagctgagcactgtcagcaacttcttcatgaacgcaagaaggaggagtctggacaagtggcaggacgagggcagctccaattcaggcaactcatcttcttcatcaagcacttgtaccaaagcatgaaggaagaaccacaaactaaaacctcggtggaaaagctttaaattaaaaaaaatttttaaaagaccaggacctcaagatagcaggtttatacttagaaatatttgaagaaaaaaaagcgttatttatagtccaaagaaaccaaagacttagctcacctgcattctgactttgtttggagacacacacttcagcagggcggcgacttggcaagacaaatgatgagcaggaaaacaccactggatctcacaccttcaatccatgaccatcctcgctgtgcttggctgtttagtggtttggagcatagtgattttgagccattgagcggacatcttttaagatcgaactttctcatctgttctaccatgccacgaaggtgtatggtgtctcagtactaccaccaccagtggttacagacttaggcagagctggtcttcagaaatggttgttctataggagtgcaaccaacatggtatggggttgtctgagttcattggattaggagtgtgattttgctcgtctagcctaacgtttgaacctgccaggcccgcaacctaaatgcagattca

SEQ ID NO: 162574 - DNA, 996 bp, Homo sapiens
  Payload ID: 12025
  Gene Symbol: ONECUT1
  Gene Name: one cut homeobox 1
  ENST ID: ENST00000560699
  CDS Start-End: 562-762
ggtcccttgccttgaggggggcccaagggctcagatcttcccataccttcaggcattggcattctgatctgcacttggacagcaattacacttcttggctccacatcagtgcctgccttgctatttcaaagattgcctgtaactcaaattttagggctctgcactaaaaagtaataaattgaccaaaacagagtatataggctgggagttgtctagagggcatcttgcaatttctgtcaaacactgcatgtttccagtcaccatgtgtttctcatcttcctttgcatatgccgccacgggatattcagaatcgacggtttctgaaatcactgctttcgttttcacatctggtgatgatctcatagtcccaaagagaggttatcgaaggaacgcaataaactatgtgctttttgctttctttcctgttgtcttctaaaacagatcaatggggaaaattaaataaacaaacgagcgaagcgcgccacctagtgacctctgtgctcgctgcagattctgcgactgaagtgcgtgagaggagtggctaaagcgattcgagtattgatggagtcacaaaaatcgttcattaagcatgcaaaaggaaagaacaagaacatgggaaggatagaggcaacacacccaaaaagcccaggttggtcttcacagatgtccagcgtcgaactctacatgcaatattcaaggaaaataagcgtccatccaaagaattgcaaatcaccatttcccagcagctggggttggagctgagcactgtcagcaacttcttcatgaacgcaagaaggaggagtctggacaagtggcaggacgagggcagctccaattcaggcaactcatcttcttcatcaagcacttgtaccaaagcatgaaggaagaaccacaaactaaaacctcggtggaaaagctttaaattaaaaaaaatttttaaaagaccaggacctcaagatagcaggtttatacttagaaatatttgaagaaaaaaaa

SEQ ID NO: 162575 - DNA, 1638 bp, Homo sapiens
  Payload ID: 12025
  Gene Symbol: ONECUT1
  Gene Name: one cut homeobox 1
  ENST ID: ENST00000570208
  CDS Start-End: 1-547
cctctataccccctaccacaaggacgtggccggcatgggccagagcctctcgcccctctccagctccggtctgggcagcatccacaactcccagcaagggctcccccactatgcccacccgggggccgccatgcccaccgacaagatgctcacccccaacggcttcgaagcccaccacccggccatgctcggccgccacggggagcagcacctcacgcccacctcggccggcatggtgcccatcaacggccttcctccgcaccatccccacgcccacctgaacgcccagggccacgggcaactcctgggcacagcccgggagcccaacccttcggtgaccggcgcgcaggccatcttcgcgcagagggtgctctgccgctcccaggggaccctctcggacctgctgcgcaaccccaaaccctggagcaaactcaaatccggccgggagaccttccggaggatgtggaagtggctgcaggagccggagttccagcgcatgtccgcgctccgcttagcagggacagcgagggaagctcgtacggcctgaggcggagagaaatccccgcacctggtgagacactctgcgccacctctcagttcagcgatccgggtttgggaagagggatgcaacgcgtgcgtggaatcgcacgcaaatgttcctcgcaggtacctctgacacatcccaggcgctgggctggagcgtgccggagcagcgtcgatgtttggccgaactggctgctgtgaccccctcccgcgctcattcttttggcgctggctggggtgacctcaatctaagagtatgggcaaaaagtttcagagccattgggcggtgggtgtgtagcacagacgagttgtaagggttaggacgctctctgcgcatggaattggctgtggaaaggagagggaggctgaccgtcccaaggtcccagtgagagctgcaaagcaatagccatgtcctgggaccgactccgctgccgactccctgaggactttgcattttgttttattattcctcttcgcgattttcgtctgaatccccgtgcgggaggggggtttggggatgagagtgtgtaaatgacccccaagtctaggagcagaggtctcctgcccgaaaccccaagccccaggtgtttctgagttcagctggaagctctccttggcgcagcgcagacaccgcgcctggctccccgagaccgcggataggcagagaagaaagctgagcccagcccgaaccccaccggggatttcaggaggattcggcgacccttgaggctcttgtgctaccggcaccatatctccacccgtgggctgcccgcgagcaactgaggttccggagggagtgggcgaaggggctgctcctcgtcctgactgctccgtctctccagagcccaagcgggagagtggtggcttctccacgcccctctgtcctccagttgccggcagcctgttgcagagggtcaaaaccctcttgcacgtggcgctgtgtttggggaggcgccttccggtcacgaaataacagcggctggtggaagaagggcgacaggaggaaattcccaccaaattaactaccttttaaaaatcaatatatgttccctccatgtactacttgctgctgccccattaaagagcagagcgaca

SEQ ID NO: 162576 - DNA, 16121 bp, Homo sapiens
  Payload ID: 12026
  Gene Symbol: ONECUT2
  Gene Name: one cut homeobox 2
  Uniprot ID: O95948
  ENST ID: ENST00000491143
  CDS Start-End: 33-1547
gcccccgccgcccccgggccctgatggactgaatgaaggctgcctacaccgcctatcgatgcctcaccaaagacctagaaggctgcgccatgaacccggagctgacaatggaaagtctgggcactttgcacgggccggccggcggcggcagtggcgggggcggcggcgggggcggcgggggcggcggcgggggcccgggccatgagcaggagctgctggccagccccagcccccaccacgcgggccgcggcgccgctggctcgctgcggggccctccgccgcctccaaccgcgcaccaggagctgggcacggcggcagcggcggcagcggcggcgtcgcgctcggccatggtcaccagcatggcctcgatcctggacggcggcgactaccggcccgagctctccatcccgctgcaccacgccatgagcatgtcctgcgactcgtctccgcctggcatgggcatgagcaacacctacaccacgctgacaccgctccagccgctgccacccatctccaccgtgtctgacaagttccaccaccctcacccgcaccaccatccgcaccaccaccaccaccaccaccaccagcgcctgtccggcaacgtcagcggcagcttcaccctcatgcgcgacgagcgcgggctcccggccatgaacaacctctacagtccctacaaggagatgcccggcatgagccagagcctgtccccgctggccgccacgccgctgggcaacgggctaggcggcctccacaacgcgcagcagagtctgcccaactacggtccgccgggccacgacaaaatgctcagccccaacttcgacgcgcaccacactgccatgctgacccgcggtgagcaacacctgtcccgcggcctgggcaccccacctgcggccatgatgtcgcacctgaacggcctgcaccacccgggccacactcagtctcacgggccggtgctggcacccagtcgcgagcggccaccctcgtcctcatcgggctcgcaggtggccacgtcgggccagctggaagaaatcaacaccaaagaggtggcccagcgcatcacagcggagctgaagcgctacagtatcccccaggcgatctttgcgcagagggtgctgtgccggtctcaggggactctctccgacctgctccggaatccaaaaccgtggagtaaactcaaatctggcagggagaccttccgcaggatgtggaagtggcttcaggagcccgagttccagcgcatgtccgccttacgcctggcagcgtgcaaacgcaaagagcaagaaccaaacaaagacaggaacaattcccagaagaagtcccgcctggtgttcactgacctccaacgccgaacactcttcgccatcttcaaggagaacaaacgcccgtcaaaggagatgcagatcaccatttcccagcagctgggcctggagctcacaaccgtcagcaacttcttcatgaacgcccggcgccgcagcctggagaagtggcaagacgatctgagcacagggggctcctcgtccacctccagcacgtgtaccaaagcatgatggaaggactctcacttgggcacaagtcacctccaaatgaggacaacagataccaaaagaaaacaaaggaaaaagacaccggattcctagctggggcccttcactggtgatttgaaagcacaattctcttgcaaagaaacttatattctagctgtaatcataggccaggtgttcttcttttgtttttaatggctatggagtccaagtgcaagctgaaaaattaatctcttagaaccagacactgttctctgagcatgctaagcatcccagaaacccaaatggggccttcctggagcgagttaattccagtatggtgtcaaccaagctcgggattgcttaaaatatcatccatcccacttcaggtcctgtcagcttcttgcagtcagagttcctatgagtaacaataggagtttggcctatgtaaggactctgagtttaggcttccaagatacaacaataagagaagaatctagcaacgagaatgacctcatttgctttccacatgcttagcctcattataccatgttatgtccaagttcacagccacaacatcagaatggtaattactgagcacaagttttaaatatggacgttaaaaaaaaaaatccaaggacctgtttttccaacccagacatcttttcattgaatgatttagaaagctttaagttgatccagcttacaattttttttttctttacctcctggaaatctcatatggtcttggatccgtcaaaaaaaccagtcagttcacttgcgctcaaagtatcaagcacaacaaagataaacagaagtgaggaaggttctgggttcactacatctggattttcaagacacctattgtgaagtcattagggaattgatgagaatatggcttcaagcacattttgcagtttgctacaaattctgttgtacataatgcagacgcacactcaggaggccaatttaactgttaacagtgcatggagcgaatgcagcattttaaaagatctaggtttttttaggtcattaatgtgtccttggttgatcagtcatctggtccctcctactgtgtgttatgaccaccacgtaatccattctcgctctttctgatttggggtttttcctcatccatcccattagtagggatgttttctgtgttttctagcaagaaaaaaaaatcaatcaatcaaacctgcatacatgttactcatgactgtcatctagtcctaaatctcttctgttgttgaatcatccttgcaaaacagctgaatacatctggagaaaacacagcacaccaaagaagcagaatactgcaaaccaaagacatttatgacttgtcattttctagcctaaaaatactgtgattacttttagaaatcagaaaacctctgcaactccgaatggcattcagctcttgcatttggcgcatcatcgggctgagcggaccagctacaccaaggacattagccaagccacccagaggggtggctttgccacaccagttgtcaccttcccatagcaagtggaagagcgcccacagaactctgggagattgcaaaggtcacaatgtgcatatttaccagtgaatggccccgggtggggccacgtgggggtgttcaaagcaagccaaacgctgcaatcattctttacagacacttgagactgacttttttatgaattacttagtcgaaaccaaagaaactttttctgcacctacttctgcaacaaacaaaactgtcccattaaaatgaataaataaatccgtaaatcaatggaaatcaccaccaataagaaggaagcacgccagaaaataaacgaaaacaaaaacagggagacacactgtgttcaaacagacctcttgggacattttttggaagcagattttaaagaaagggttgagacaaagatagaaataaggaagagcctcagtggctgctgcttcatttgacaactcacacggtaatcttaaagctgaagattgtctttaatttgtgcctatgcagtttttcaaaagaacacggaacagagcaacagaaacctcaacagctacaataccaaagatgaggatttctcacaccttttgtttcagttcattatctcctcttgcctggctaaaatactaatagcgccattgaactgtataaaggtaatcaattatgtttctctgagcaacaaaaggaaagggccatttatttgattttattgtttcatttcaattttgtcttatggttttttgccccaacatggaatctctcaaaagtttccatggactccaagtttaagatgttgggatattgaacagttctctctgctcagcagagggtagggaataacattatcacttgaatgttctttgcttaacccttagacttggttccttctatgttcagagtctcatcatcaggggaaggaaagggagtgagggtcagggataggggtcttggtgatgcatcctctcccgagccacagaaccaaagagtttatagaggaatttacagcctcgttttcatgtgattgctacatcctaacagggcttcatttgggggtggggggaaacatgtaaaaataattgccagtttctacttttctattagctttttaaaaatcagctgtaaagttgcatttctaaagaaagatatatataatatataaaatacatatatagatcaacttgacattggtgataaccaaaattattgctgtccaaattcatgtcttgttttggtccagtgcttcatttgctaagtattcggttcagaatttttctcatttctcatgccattccagagttaatttgccactgtggatgatttgaagtattcagatctctatggaagtttctgggacaggtttaaagtcaagatcaagcattttagcatttaacctgttgataaatggatccatggtgtacatgagttttatttgtattcggagtcatctctattctatccctcagcctcgattaaggtggtgagtgaagtgcatccaacagactcggcccagaactgggtcctgacagtggggtgctcatcttctgtaactgttgggaaggctcggtggtccattttcaccagttaaagaatatgaggccagcccagaaatctgttctccaggagctgccctgtcccatctgggtgtgccagaccccctcagtgagcaggtccaccaaagggacttctcacaggggaagcccaactcctgttgcaatgggttgatagatttcctcagggtggtaattaccaattcgtattttgacaagcctatgtgcaaccacagctggcactggggtgggcagtggtgttgggtgggatgggggagagtgtctcaatcctgaagagaaaatataaagcaggttttggggagacttctggagtcctgcccctagagagccccattgttgttctttgtgccccctcctcattccccctatgtgggtctccctatgcaggagctgtgagagaatgtgactctccacaatttttataattcatccttcctaggagattgttcattggctcttcccttgtgtccctttgtcccttgctcatactccatgtttcctttgtcaaaggactaagaaaagagcatatttcagcagaggagtgttcccatgtgggttgatttcaacttgggtatttctaaaagagtccttgtgacatgtgtccagtggaaatggttgctcttttccagactggattgaggaatggagcctgtttgatttggttagtgattctttgacatactaatctcagcgtttgggtctccagcatcctctgaagatgtctagactagtagaggctgcctttgtgacctgacattacaacattggtcaaaccagtcctctgataatcagaagaacatgtcataattgtttaaaaaaaaaaaaaaggcaagaatttctctccaaggagctttaataaatgtctcattccagataatgtcataccagagaaaagtgcttgcttttagaaaattatttacatacatatataaatatatatgtgtatctatacagttatgtatcaaaattttaagccctgcagaatttcaatttgttagaaatctaacagaaaaaaatttctatattgaaaggtaatagaatttaacccagtgagtttactcaaggatttttaaatttaagttaataatttcagagaaaataaccatttgggtgtggttatagtttagtatccattacctcaatccaaggaaaattccaggcattcctcaaccatcaggaaaaggtacagtgtgaaggaacagttctcagccaaatttcacattcttgaggcaacagaaatcaaaacactcagagccattgagtggaaaaacaatttactttattcctttacacaaataggcttgcattgtttttgttttaatgtgattttggtactagggatataattatttcattccaggaaataataaaaaaaaacagacagagccaatacatttctttttttaaaggaaacagcaacaacaataaaaactcagcaccaatatttaaaagcttttccaaaatgtaaaagaagtgtttagcttgcaccatgcataaaggtgcaggctagttgaaccaggaagcatggcacttcctctggagaaatccagaaagagttgcttctaagctcccttttccccctgcaggctcttggcaattgtaggctttagcaaatccagaataattttcaattcaagctaaaataaaatcaacatttggaatgtaaatctgatacacacacacttttctaagtcaaacaacatatttcaaaaccaaaaataaataccttttagataatcagttattttctttgtctatactgggcacccacctactagtgccagtaaattcaagttgaacagatttttaaaatcactattatctgggtatgggggaaacttccccacttttgaaaatgttggtagaattataggaatgtctgtttgattatcattaccaaagtgtcatgacagtatgcctttgtagtgaactcggattttcaggagtttgaatagttggatattttaaaatctaagaagaaaaggcctgtttccaatgttgttgaagaataatgaactctattaaaaagtggagaaaaagataatacatgtggtcaaggttgaccacaaggcccaggcacaactaccttggcgataatcttctagattcgtaacaggttagagctgactttttgtttttgttgttgctgatgctgtgtgattcagacttctcagcctaaccaggaagagtaagtggaaatggtagatgaagaaggggtagagctggtgtatctataactttctgatatttgtctgccaaacttgatatattagtaatttttttatctttagctaagatcaagtcacccctgaaacaacaggagattctagttttaaaataaggccacaaaaatccttacggaatgaagaatggcaccccagttggttgtataagtctcataagataatgatgttgattttaaatatggatgtctcaatgcctgttttctatcaatgatttgtttgtttccaaggtcggggagggaaagaggggagggtttatctgttttagaaagtctcagaatacttataaaatacagaagtagttattaaaatatataggacctcacataggtagatacagaacttaccattgaggctgatgggctgttgtgtgaatcacacaggaccttaaatgaggctcattattctcacacaccaaaatgactctgacagcctgaagcagttattgctagagcccaagctttccttggaggttttggagttaggttgattggaagtaaccagctaataccttttctagtggagaaaaagacattgctaccagcttgttcatcccatagaagtcttccactctgctccatttttagcagcaagcatttcatgtagcataaaccttggcagataagtgtgcctaaggtttatacagtctgtccgcttggatgtatacaaatttagatacatattttaacatgtgttctcatagatgactttataacaacacacattacctataggtgtctagactgtgtacatacaagtgtgtacagacaagcttcatacgtatatactgtaatccgttacaacaaataaattttaaatcatcgtttaacatgtatgtggtacttctacagtgtacattgttttcattatttattgtaacattgaaaaccacagtgcagggaaaacaaaagtatcccagcatcttcatcctgtacacttggaattaatttcatttgggcatatccaagataaactcaactttcaagaaatcttgtatattatttaatcatctgtgttaggatgacacctatgattgatgacttcggttgaatagctttattctggatttttcataactaaagctaaatccaaagacctgaaaaaggacaaaaagaaaaaaaaaaaaagaaaaaacaaagaaaaagaagaaaaaataataaagtcaagcgcaaactgatggggagacagtgggctctggtttccaggattgagacaatggtactgcggtcttggggagactgcgttagctagtggggagtggtgatttttttcatgcttgtcacatctaaatggtctttaacatgagaaagttttagaggttataatttcctgctttgtttttatttagactatcaaatgaagttatacatgttgtcagtcaaaaaatgaagacaccctctgccccaccccacagaatgctttttatcttgtctctttgggttatgacccaacaagctaagtaccattaatgtaattaacttatttaaattagttcctagtacataaatgtataggatttgggtaattatttaatcatccttccttagtttgattctactccttgtacttatttatcaaaacctagaccaatggtgcatcagagatgcaaaattctacttggaatactcttgaagtttagtttgctttataaagcagtgaaattctgttacagacagggaagaaatacaggttacaaaaagagaatttgggatattcttccctcttaaattaacttttaaaatagtctaagtaacaatttttaaattatttaacttaagttcgcagccccacctggtaccaggcgaacttcacctcttaattattgtggccctcggagccttcatattgtaacttatttatttaacttattcagcatctgtgaaaggtgcactgtatagtttatatttttaatttaaaacaacagagagcactgcagtttgtttgctgtcagaacaacagagcaaattttgtggacaagcaatgactattcagcctgaacctgtgcattcagaaaacataagctgagaccctgcttcaccagcctggatttcggggcttctatacagaaactggaaaaataaattttaaaaaaatcgtaaacaaaaagagagaaacccttacactagctgcttccaagaatgaactctgtgtgtatgtaaagcaacaaaacaaaaaaggaaaaaaacaaaaagcagaaaaaagaaaaaaaaaatgaaaaactttctatttctagtgagaaccaaagaaggctacctcactgactttttccatttgtaattttaatcgtgttgatgacaccaaagataccaaagatttctttctctgtgcggtctgcattttgcttgtgctcttttataatttgaacgattttctctgacatatggtatgtacagccacagctcagataccccaaagaaataattatctatgcgacggcggctgctaatttggaaagggatattttctgtgtttctcttatatgtttgctgtctgctcgacatgttcaagatgcgagttcagatgctgctgtaattggattccttaaattctgattacaaattgaggaaggaaactggttggaaatggccttcagtcctagccatggcctctatccccgctgggacctgtcacagtaaagactgccaattactgaaccacagaagctctgaccattgagtagttgagctggaagagaccttaggaatcatttagtccaagccccggtggcccagaggaatgaaatagttatccaaatcaaataactcttgagagtgaaagcccacacatgcctcctggttcctgccccagtgctccgcttattgtacagtgctacctctgcatgagagcggtcccacattgacaaataggatggtggcaatcctttagcaatgagcagggactggggtttatctcttaacattttcagctgtaaaattagtcacaagcattttcagtgtcccattagtacatagtcacatatggtcggttgcttcgtgaaggtggcctgtcttgaaatactagggctcatacgggatttttgccctaggaaaaacatgttgatcccaatgatgtgatcacttttgaacctttccattacaaagcattgtatagataactttttaattcagtaggaggagaaagttcattcttggcctgttggctttgattattatgggtactttaaagtcagtatttatcaagaaagggaacttgaccaccattggcacatgtgacatttaagctcttcagccttttcctttttagttgtaggtgtttacatttcatttctaagccaactctgtatttatgagagaagtttaagccttacatcatttgatactaaagggttatttgtggtaaatgaaaaatgaccccaaaattacagaggaatatgccagtttaagaaatggctacttaaagttgcttctctctttccttcttactcatgaaattaattggtcttcttcaagtttctttagattccattaaatgattaaatcactattaagagccattcatcaacgtgatttgtgtgttagccaatgaatctgtctcagcttttgaccaaatgggttttagacaaatgcaaagatctgcctctagtccatatggctctttttgagtgctagtattttgcatttcacataatgtagttattttgagcttttaaagagagcatttagacaaagaagcaaagagaggaagggaccaatcaactcatcagttccatgcatcaacaaagcatagctagtagaggaatataaatgacagattgacaaactgtaggaaacactgttactctctttctgaagttttcaagcaccatcctatgtgaaagttccctcctgtccaaacaagctcaaggcccatcttctccctatacaaggcaaacctgtaaggccttccttccaaagagtacattgctttggttttcttcctaaattcctattggaattagaactctcagaatccctgggagacagagcaaagatgacttaattcattgagcagcagagctccctataagtgaacatcaccttccccatctttcctactgccacacccatacgagagaggatctagaaagagcgatggcagcctgaacacagaaaacatccccacttggcagacctctcctcagcaatccccccagcctcatgcttcacttgcaaagtgtgacataaccacgggacgagtgccttgcttgaaccaaagcaacgatttagccagtctggacctctctgtgctttttttaattcttcctgtgaatacctcagcttcaactgggcctccatacagtcagttggtgggcttattgtactgtggtgctttgcaatgcaaccctgcaaagaacaagatttgtactaataccaaaggttctttctctatgtctcctcctctgcctccctcgttcttcccttttttctagttcttcacggttccaaagctttactatgaacctgggcatgttggcaatgcagaccgcgcaattccttaccgaattttctcagatatacctcatagacaatagtgtttagagtaatgttattatagcgtatgtaataaattattcactgtttcttttggtaactgtgatttaaaaaaagaaaaaagaaaaaaaagctttatacgttttaggttgtgcttttgtaatagatgaaaaaaggtgcgcttaaaaagaaaatgtatgtttttttccccctttggattttatttatgctggattggggaaagttgcagaatgagcccaaagtttacagtttcatattttgctgaagaaacaatctgtgttcatttgctctgttgaaaagaataattattttctacatttgtgccacttggtctgaacaattaattgttccgtgttaacagtgtagtattatgattagcaactgccaatcagtgctataattttatgcatgaggctaaaaatttagcagtgtgatgcattgtggtcttaatagcaacatttttcattttgaactagatcttcccctttggttcaatggactttatttatgcatgggcgcctattgtttgttagcagttgtggaacagttgtgtatacattaaactgtgaaaatgtacacagttcagcctcagacggtggtaatattggttttattgggagatgtgtcacctcgaaaataccctttacatctgttgggatctgaaaatgagtcacattgaattgggttccagctttataatgagaaacgttattcctaatttttgagttagccaatttgcattccacaaattgggatcctcataacccaaatatatcaccgtatgtgagagggatttgaaagcgagtattgaaaaactcacctttgcatatttaatttccaccaaaaggagttattttggctttatgctcatgaacttagacctaactggccatgtatatgtagatgcaaattcatctagctgtggccctctttgatctctgcttgggaatggctatttttgactatgcgtggtttcttctcgtattttgtgatcaggtcagctcccagtagaaactcaaatggcatcaatattactaactcttctctgcccacttctcttttgtccactctcctagacattcccaccaactgttccagtgatttgggcaaaaatacgcagccatttcccaaaacttcacatgtgcagctatcatggctgtccctccctagacttggaggtgactctcacttaatttttacctgcccaacaatgttccatctaccatctaaaaggtaatataagaagaagttttgaaacccactttaggaaaaccatcttctttaaatccttcaattatctgaggcctctatatgtcaaaactatttttcagttgcaggggattgggcaaacttgttctttcttatacttgggttcaaagacccattctccagtttcatatttcccaaaccaaaatgcttgacataaagccaaatcaactgccaagcacactttattttgcataggagtatgcagcctagggaaccttggttgaaaagcagcagtctgctatgcaaaatattggaaatcactgacagtgtagcattcatattatctgtcaatgagggtatattgggaacgtgctctcgtgaataataaaaagcaacatatttttatttggccttataaattaggttgtggtaatgtaaactttgatatatagtctttttatttttctcttattaatctgccaaagatgggaacagatacaagaatttttcaaattggcttttgtaagacaattgatgattgtaatagtgtttaatcttccagaaagctttatatgttgttccacaataaaattgatatttgtttcagcaaagttttcctgacactcacaaacccacaaactgttcctcttaatgcagatattgtagaatctacaaagttcaaatccatttttgatccaaagaaagtagaggagtatttgagacatgagtgtacccagccctttttttaatcacaggcaatgcatgggtctggctggttacactttgccaagaagacttgtcttatgaaacccaaggtatattttgttatgccattttatgtccttttcttttaacattgtggaaagtggtatgttgaatcaagtgtaagctgagttttccagacaactgaagtagctacatcatgaatgttattttgttattaaagggtttttactcagtgctttgtgccaatggatgtccttttccttggagacacataactacaaaattacctcagcttggcctggttttctctcctgccctcttggggaaacatgggcctggcctgggaaaaggcaggtcatgggctggaaggtaggttttggtactaggaagaaatctctgtatctgtcagctttaaagagaactgggccaaaaatctctaacctcactctctctggactccaacacttccctgcaatcctttggtcttgagcatgtgccagcatgaaggcagactccagttcatacatgaaaggcaagaaaaagaaaatagtaaccttgaatcttctgtgggccaccaggcactcacctttccccaccttgcacactatccagtcaaggctattgcagcccatctggtggctttacatgggacattaccaaaggcttcttcctccatcctggggttgcaaaggatccaggtcccctccatccagtggggctcttccacatcagaagtccccctcccaccatcctctgcatcctgtttagctatcccatctataccttttggagatgattatttagaaaacaaagaaaggtatggaatggggtttcctattgtttgctaggttatattttagcaattctcaattctttgatctggaaaaatacaagagggaaaaggagaccccactatctccctgtgctttgctcccatctcagggggcaggggcagtgcacattgcctatgctgttgatctgtcttgggcgacaggctgaatcacagctattgccccagccaaaaacatggcccatcaatgcctactttatctctgcttgaaaatcctattcaaaaagttgtagagtttgaggtttttatccccccatatcctttgctttggtccagtttggcctttagcataagagtcagctttatctctaggaaagttttttcagattatgacaaggaacctgccacctgggaagaaaagagtccgaagactagcaatcggataggtagtcataccattaacagatacttccttgaaggtagaatattatttcctttctttacagttttgtgttacacaagtccaagtggtgccagcaaacttcttaccgtgaaatgttgtaaaacacctggcatactgaaatttctgaaacaaaaacacaagctccacattgataacttgataaataaccactaaagtttagatgcagggactgagatgatacaggcaaaatcttggtgttggtttctcttttaattcgtatcttcgatcacctaacctttctcaatccaagagcagttcagtcttttctccccaagtctaggatgccaaagagcatcataggaaaagataattagggattgaccagcatttcaattagttctcttcttcatctttgcatttctcaaaagtgttctcctggaccagagggaaagagctggtccattttttttcattctttctattcaaatttttccacccagacaatactttattaacacagatactgtagatccttccttggtcagtgaattattacaagaggagctatccttccaccaaagtgagtgaaaacaagttccagtatcttttcttccatccagttttgttctcagaatccaagtcagtcctgggtcttttctcactttagaccctggcctcagatgtgtttattcttgctatttaaaaatacctttaaatttcacatgctggcctgcagaacttgcatcctttgttctatactgttgactgcttgatggtattgaaaggtgactataatgagggaagaaaggaggaggtaaagagagaagaatttgtcccagatctgtttaaagtttcaaaatttaaaaagggacccattaaattatgggaaaatggctatagagtgtgagcctccgttgaccatatgctcaaagaccgtactctgccacctgccttccaggtagctattctagaaactcagtcctttgtggaaacccaactaccttttaaaagtctctttccagattccaaaaggacaagagatcagagagtcacatatacgcctcttgttttattttcttgctttcacgggtattattgccaagaaaatcgtagggaaaaactttaaacttttcttttcagttgatccctttgacatcacctctcatgtttaaaatcaggaaaacacacccctaaaatttgcactctcttccgttttgaaaaagaaaacccacacacaaatgcacactattaccgtctttcaccctgcgctatatttccaaagtgtattataatccagatattgccccatctcaaacatgttaagtcagactgtgctgaaagactttccagggacggtcaacagggtatatgttcagtggctgccctgaaatcctggtggggatgaggatcacgcttcatcatcaaggggatgcccatcccctgataagctcccagtccttttggaagatttctttgaatgttaattgcattttcagttttgctcatttcccaccccaatgttttgtctgcaacatcgcttacactggattctttctatttttattcctatcattaaatggtagtgctgtaaattctgcaattaatgttaaataaactgctttaattcattg

SEQ ID NO: 162577 - DNA, 8318 bp, Homo sapiens
  Payload ID: 12027
  Gene Symbol: ONECUT3
  Gene Name: one cut homeobox 3
  Uniprot ID: O60422
  ENST ID: ENST00000382349
  CDS Start-End: 1291-2775
caagcgttaccccgggggtggggggggcagaggcaacggggaagcaggaaggggctgaggctggttttggactctgcaccgtagcctctggcctacaagacagagcatcctctagattctggtctggcccctccagatccgcagccctgaccttaccccactggcgggatctagtcccctgggggtctctctgattataggagcccttcccccatctatcccagttcccaggggcccctggggctcacctgtctccaggtgctgagaaaaaggagacccctgcctccccccacattgaagagaagccccagggacaaagaggagtttgcaccagcgacgtctcagaagacaggggatccagcctcagcctccgtgggctggagggtgacaggggctcttagtggtcacccccaggctccagtgcctccagcggccgcactgtaaaaaggccctgcaattagaaggggcctttggcaaccccgaggccgggcagcccattgtacagttggggaaacggaggcccaggtgcccacacatgggcagaggctgacccctggggcgcacggaggccctgacctagccttaggacctcccttttcccccacttcctccacaaagaggttgtgggaagggggctgtgactccgtaggtgtgagtgggagtcgggggaagctgagcttgcagtggggatctagctcctgggggtctgtagggaacggggggggggggggacacgtacattacaggcgaccgtccagccacactcccagaaactccctggagatggacttgggggtgccaggcagaaagccacatctgggactctggagagaatcacacagagacgcgaaatcggagactctgggtcgaggcccccagccccacctgggcagagtctgtcctcggacccccgcccgctgtcccccgggtacggcctgccccagcgggcgcgggcgggcgcagtggccagggacgccgaagccccaagtctggccgacttcggcctgcttggtgctcgagtggggccggggcgggcggagagcgaggctgcgggaggcagcggtggcaggagcgggtgggcgggggcgctgacgtcagacccgggcccgggcgccggcggccgctcccctgccacatcctggtggccgcgctcgcagccgggccgggccgtgcgccgcgcagcctggcagcctcgcgcgcagccaccggggagcgggcgggagtcatgcagcggccttgagcactaggggccggcgctgaggagcgcgcgcggcgggagggcagccgagcatggagctgagcctggagagcctggggggcctgcacagcgtggcccacgcgcaggcgggcgagctgctgagcccgggccacgcgcgctcggcggcggcgcagcaccgcggcctggtggcgcccgggcgcccgggcctggtggccggcatggcgagcctgctggacggcggcggcggcggcggcggtgggggcgccgggggcgcgggcggcgcgggcagcgcgggcggcggcgcggacttccgcggggaactggcgggcccgctgcacccggcaatgggcatggcctgcgaggcgccgggcctgggcggcacctacacgacgctcacgcccctgcagcacctgccgccgctcgcggccgtggccgacaagttccaccagcacgcggcggccgcggccgtggccggggcgcacggcggccatccccacgcgcacccgcacccggcggccgcgccgcccccgccacccccgccgcagcgtctggcggccagcgtgagcggcagcttcaccctcatgcgcgacgagcgggcggcgctcgcctccgtgggccacctctacggaccctacggcaaggagctgcccgccatggggtcgccgctgtcgccgctgcccaacgcgctgccgcccgcgctgcacggcgccccgcagcccccgccgccgccaccacccccgccgctggccgcctacggcccgccaggccacctggctggggacaagctgctgccgcccgccgccttcgagccgcacgccgcgctgctgggacgcgcggaggacgcactggcccgcgggctgcccggaggcggcggcggcacaggcagcggcggagcgggcagcgggagcgccgcggggctgctggcgccgctgggcgggctggcggcggccggggcgcacgggccgcacgggggaggcggcggccccggcgggagcggcggcggccccagcgcgggcgcagcggccgaggagatcaacaccaaggaggtggcgcagcgcatcacggcggagctgaagcgctacagcatcccgcaggcaatcttcgcgcagcggatcctgtgtcgctctcagggcacgctctccgacctgctgcgcaaccccaagccgtggagcaagctcaaatccggccgcgagaccttccgcaggatgtggaagtggctgcaggagccagagttccagcgcatgtcggcgctgcgcttggcagcctgcaagcgcaaggaacaggagcagcagaaggagcgcgccctgcagcccaagaagcagcgcctggtgttcaccgacctgcagcgacgcacgctgatcgccatcttcaaggagaacaagcggccgtccaaggagatgcaggtcaccatctcgcagcagctcggcttggagctcaacaccgtcagcaacttcttcatgaacgcgcggcgccgctgcatgaaccgctgggctgaggagcccagcacggcccccgggggccccgccggcgccacggccactttctccaaggcctgaggcgccccggccccgcgccctccctgcctccacggcctgggcgctgtgcccccacgtcacctccccacatcctgccggcccggagacccgcccccagggggcacctggagggggtgctatccgggccccccacacccggggagggggaagcagcacaccccccagcccaagtgcacaaaaagggccccccttcctccctccatgcccactccctccaggccaaaggaagccctccacccccccccggaggggagggagtgacagaaaggggtttcccagccccctctccattcaggacgcccagagggcctcgagaaaaaccagggctcactgtgttgtcccctaaagcgggtcaagaagcacatactagaaatataaaccgggtatttaaaaatggaattttaaagaataacccctcctccgtcagatcccctgccccaccgagggaggtagtagaaaacttccttcctccccacccgccccggccccctccccagggacctcagccctttccaaagtcgccaaaaacccacatcaagccggatccttacggtcccccaccctctccaaaaccaaccccacccgctggcaggacggcccctgcggccgagaactgagctgcccctctctgcggccaggattcctcgtgccaagaatcgcctgccttaaagtctggggaggggcctgcggcgggcgcccagcacctacgggcgagcacccttcccaccccatcccaggccgcaggggacggggggctcccacgtgcgggtaaattccagacgcccccgccccgccccgtctgttgagttcactttacctttaggcaccttcgtggagcgcaaggaaggacgcagctccggacacgggagaccacgcccaggctcccaggagaaggggacccggccggagaaggcgccgctggggccgcccggaggagcccctctgcacgggcccgtggagacgcttcctgcgtggaaccttctggaatccaccgcccccctttccgcccgcgtcagggtctgaactgggcttgcaggggggcagcggggttgaacgtggtgttggtttccactctcgccaaagagagaagacgccgaggaaggtggattccgcttgctccattttttgccaaaaatatttacaaatgggaagggtcggaaatgaagatgagcgcccccctcccaccccgcgctctcccccgctcctctcatctggtctgggtgacctccgagactggccggccgcgggatcccaggagcccgcctcctccgggggttcaagatccgagtctagaaggaacctcctccctgaaatccccccactcatcggctgcctcccagggaggaggcggcccccctaccccccttgaaaatgcaaaagacatttctagtgaaatgcccctcccctcccccaggtaaaggctacctcactcaagctcatgtctgtgattggaaaatcacgcctgataccaaagatttctcccaaggatttgtgctggatgacaggattccctggcctgggacccggctcggggccccgcctgccgagtgccaccccttcccgaacctgagagcgaaagagagagagagagagagggagagagagggagagaaagggagagagggagggagaggatcgtgaggtcgaagagtgccttcttcttgaaccaaagacgtgtatggagtgttctcttgtccttatcgacttgctctgctcccagctttccaagcgaccggatctgagtgatgcttctagaacatttgggtgttggggggttcccaatagtagaaagggtccccattcctgctcagcaccgcacctctctacccccccacagacacacatgcagacacacacatgcagacaacacgcagacacacacatgcaggcactcacatgcaggcccatgcacacacacgtgcacacacatgcagagacatgcagacacgcaggcacacatgcacacatgcaaagacacgcatgcaggcacacgcagacgcacacagagacacacatgcagatacacatgcacacacacatacacacactggcccctgtttttctgtggtgtcactgggtgccagcaactcggtatctcccacctcccactaaaacctgggccttaatttctctcccgtccccacccctaaattcctgatggatgaacctagagctgtcctgtccactccaggccggactgacgtagcctatgggcccagcaggtccagggcccacgttttaatttctttttaaaaagctttaggtcttgccgggcgcggtggttcacgcctggaatcccagcattttgggaggccgaggcgggtggatcacaaggtcagcagttcaagaccagcctgaccaacatggtgaaaccctgtctctactaaaaatacaaaaaaattagctgggcgaggtggcaggcacctgtaatcccagccacctgggaggctgaggcaggagaatctcttgaaactggaaggcagaggttgcagtgagccgagattgcgccactacactctagcctgggcaacgagagcaaaactccctctcaaaaaaaaaaaaaaaaaaaaaaactttaggtccaagaagatgcaccccattcaacataccatattatttgtctttataccaaggtagcctatagatatacaatgttttaaatttcttttttagaaacagggttttgctctgttacccaggctggagtgcagtggtgcaatcgtagctcactgcagcctcgaccacctgggctcaagtgatcctcctgcctcagcctcccagtagctggggccacaagcacaccccaccatgcccatttaattttttaagggatttcttgtagatatggggtctcactatgctgcccaggctggtcttgaactcctggccccaagggggtcctcctgcctcggcctccaaaagtgctaggattacaggtagatagacatttagtggaggaagaggctctcaaaggcaataaaatgcttctgatccaagagaatcacgctgcagccctggcccagtgagcttcttagaaaatcgatgcctgggcttcaggcactggccggagcacgggcctggcggggtgctgggtctcctagatgccctctgcttggccttcaaggccccaagggtaacacgctagggggcctccagttttgtcccctgctggaaatttaggacttggcttgggatcgttctggttgtggaatgttttagctatgctgaactgtggtcagatcaggtcaagcctcttggtcacagaagtggcccagcagcactttgggaggccgagacaggaggatcgcttgaggccaggagtttgagaccagcctgggcaacacagcaagaccccacttctacaaaaaaaaataaataaagtggcccaggactcctggatccttttcagatatcttcgtatcacacacacacacacacacacacacacacacacacacacacacacacccctacctgtttccggaccccaccccaaacttggccagacccccacagaaggctctatccccgacctgcccgccggcccctcaggccctctcctgcctccccgcatgcccacttggctgtcacataccaaagagcatgcgttctccatgcagggatcaacacctccagcacaattccttcgagcctttgacaattttctctgaaatacctcaaaatatttaatgtatagtttatgtgattaaaaaaaaatccttagctagtttttggaatacgtgacttgaagctttataccgttaaattataattttgcagacgatggcatgtcgtttctttgacgagttccgtgggagacgcattgaatgtcagggctggagaccagagggaaagttagagggagcgtgatcgcgagagagactgcggcagaaaggaccagtggcgtttacagatttcttatttaaatgagtcctttaggaaagaaaggaagagagagagagagcgagcgcaagagagagagagagggagagagagggagagggagagagagaggcagaggtatacctttctgttctctggcttgttctgtttcttgttttctggagtcatgtcttataagagtatttattattctctgtgttctgtgttcaaatgtaatttaagaaaaaaaaaggaagaaaaatgcaaaaaaaaaagacaaaatggaatttgagttggtgcatgactaatgtactctttcttgacgctaattgtaataaagtggtcagggtggggggcggggggcgtggcccggttccgtgtcgcatctgtgtgtctggtgcctgatcggtgctgttcagtggtttttcgttactgtttctttcctcctttctaaggaactgtgtccagccgggacaggtggacggggccccaggtagagggggcgggaacagagcctcagtagccgggtctcctccacctgcctgtccatctccacccgagatgccacctgcctgccccagccaggcgggagccaccgagcgtccccccctcagttcctggttcttgggggcactctggtgtcatcgatatcttagacccccccaaccccccatcacccggttgctttcactctagcatgaattcccaagtgtcttgttcagaggagacagacaatcagcctattcttgtcttgttgcccagggtggtgggggacgggagtgtgccccaacttcctgagatctgaaggaccctcctgagggccccaacagcaggcaccagcaccccctccccccccacctccacccagacagcctcggcctccctccctgggctgggcatgagtccgcctttctgtccagcccgggaggcagggggtgtacgcctgcagagacccctccctcccagcccactttcggagcctacagaacagaggactccccaaaatcatcaaagggggctctgggacaatgtcctctgcctctgactcctcttgtgccatgaggccacgtccctgagccatccccagatagtccctggaggtggaaaggggcacagatgtgccagcttgggaacagaggctggaggagagggcggcaggggagagatgagaggggccgcttttgggacaggccccagtaggggggggcggggtagctaaacggggtgcttctcaccccataaagcagcaagccctggtctggagggctgggcctggggctgagggctcagctgacctcaaatctgaaatgatgccggggccaggatgctccttgcaccagcaggagcttgggccatttcacattctctgccccaagcggtttaagcaaaatcaggccagtagactcctggggctcctcctcgtggccctgtcagaccacgcaggggctggttttggtggaatgagctcagccgggggtgacggaagagccaggaggccctgcggccttgagtgttttgaatagactggaactgagggctgctttcaggggagacaccacttggaccctccaaagtcccctcccctccagggacaggggagagaagcccttttccaccttcacccttgggcgacaggcttaaaagctaaaaaaaaaaaaaaa

SEQ ID NO: 162578 - DNA, 478 bp, Homo sapiens
  Payload ID: 12028
  Gene Symbol: OOEP
  Gene Name: oocyte expressed protein
  Uniprot ID: A6NGQ2
  ENST ID: ENST00000370359
  CDS Start-End: 1-450
atggtcgatgatgctggtgccgctgagtcccagcggggcaaacagactccggcccactccctggagcagctgcgtaggttaccacttccgccgccacagattcgcatccggccctggtggtttccggtgcaggaactgagagaccctttggtgttctacctagaggcatggctggcagacgagctctttggcccagaccgagccataattccagaaatggagtggacgagccaggccctgctgacagtggacatagtggactcagggaacctagtcgaaatcaccgttttcgggcggccccgtgtacagaatcgggtgaagagcatgctcctgtgcctggcatggtttcaccgagaacatcgtgcccgagctgagaagatgaaacaccttgagaagaacttgaaggcccatgcatcagacccccactctccccaggatcctgttgcttaagacaacatagttactgttgggaacatct

SEQ ID NO: 162579 - DNA, 1007 bp, Homo sapiens
  Payload ID: 12028
  Gene Symbol: OOEP
  Gene Name: oocyte expressed protein
  ENST ID: ENST00000370363
  CDS Start-End: 494-778
gcggccacggcctccgggggcctagaggtgcctctccagcgaccacctctgccgacactatatccctcaggacctgttcgattcaactcctccgccggcctcctctctggcgctcgggacactgtcgagcttcgccgactagcaacgacccacgtagaggccttgggagctcctccgtggtgggacattgttccaagaaggggcgcgtccgacgtcgttgccgtccagctctgcaccacctgaccgtgacgtcgtaagagtagcgtgccagggaagccacgcagccgctacttaaggagcccgcacgaggctagcccccccgcccacgctctctatcccgcccacttcgcactgatttcacgcagccattggccaagacggggtgtcgccgtgttgcccaggcaggtcttgaactcttggcttctggcttcaagtgatcttccagcctcggcctcccaaagtgctgggattacagtcagccactgcaccggaaatgttttcaaccgtgacccataaaggcccagaccgagccataattccagaaatggagtggacgagccaggccctgctgacagtggacatagtggactcagggaacctagtcgaaatcaccgttttcgggcggccccgtgtacagaatcgggtgaagagcatgctcctgtgcctggcatggtttcaccgagaacatcgtgcccgagctgagaagatgaaacaccttgagaagaacttgaaggcccatgcatcagacccccactctccccaggatcctgttgcttaagacaacatagttactgttgggaacatcttaactttctaacttttgctgctaaagttgaagaaaagcaagtatagcattcttaaatccccgtattcctttttcctgtgtcttgatggattgtggtttattttgttgcaagagtgagtttgaactattctaataaagaaatggctattttgccaaaagcattaagatcttcacacacttataataaagcaaatttataaaa

SEQ ID NO: 162580 - DNA, 964 bp, Homo sapiens
  Payload ID: 12028
  Gene Symbol: OOEP
  Gene Name: oocyte expressed protein
  ENST ID: ENST00000441145
  CDS Start-End: 764-964
gctcttcaaagcaaaacacagcggcagttcctcgtgaccagcggccacggcctccgggggcctagaggtgcctctccagcgaccacctctgccgacactatatccctcaggacctgttcgattcaactcctccgccggcctcctctctggcgctcgggacactgtcgagcttcgccgactagcaacgacccacgtagaggccttgggagctcctccgtggtgggacattgttccaagaaggggcgcgtccgacgtcgttgccgtccagctctgcaccacctgaccgtgacgtcgtaagagtagcgtgccagggaagccacgcagccgctacttaaggagcccgcacgaggctagcccccccgcccacgctctctatcccgcccacttcgcactgatttcacgcagccattggccagtgagcgttgtgggcgggactttcccagttttagccaatcggttttctgaaccgtgggagtgtgccttgaagtagtcgatgtgccccgccccccacccccccactgtgtattcctttccaggcgtgggactttttccaaacgcccaatttgctccctcccctactggacacacacctcgggttcctggcatctcagtgccttggaaacttttttttttctttttaaatagagacggggtgtcgccgtgttgcccaggcaggtcttgaactcttggcttctggcttcaagtgatcttccagcctcggcctcccaaagtgctgggattacagtcagccactgcaccggaaatgttttcaaccgtgacccataaaggcccagaccgagccataattccagaaatggagtggacgagccaggccctgctgacagtggacatagtggactcagggaacctagtcgaaatcaccgttttcgggcggccccgtgtacagaatcgggtgaagagcatgctcctgtgcctggcatggtttcaccgagaacatcgtgcc

SEQ ID NO: 162581 - DNA, 1633 bp, Homo sapiens
  Payload ID: 12029
  Gene Symbol: OOSP2
  Gene Name: oocyte secreted protein 2
  Uniprot ID: Q86WS3
  ENST ID: ENST00000278855
  CDS Start-End: 186-662
aatcaagagagtctcagcctttaggtagctgacactgtgataagagcatcctgtgaactacccaaataaggaggaaaacgaacgcagctgagcatgggatgccatataaaaatcacttaaaccagtcgccactccttgtttcctgagttgtcctgtgctggaggtctgctcagacgaaggtctccatggcgttagaagtcttgatgctcctcgctgtcttgatttggaccggtgctgagaacctccatgtgaaaataagttgctctctggactggttgatggtctcagttatcccagttgcagaaagcagaaatctgtatatatttgcggatgaattacatctgggaatgggctgccctgcaaatcggatacatacatatgtatatgagtttatatatcttgttcgtgattgtggcatcaggacaagggtagtttctgaggaaactctcctttttcaaaccgagctgtactttaccccaaggaatatagatcatgaccctcaggaaatccatttggagtgttccacctctaggaaatcagtgtggcttacaccagtttctactgagaatgaaataaaattggatcctagtccttttattgctgactttcagacaacagcagaagagttaggattattatcttctagtccaaacttgctctgagctaaaggagaaatggaaacttgaagctggtgttatgtattttgcaggaaaacagtttcattttttcatagcaaaaatatagttggtgtatatctctccttaagtctctggtttctaaaaaccctacttcagtaaaggtcctgattagttgattagtgaatgtgtatttctaaatatttgtattcagtaggggtatggctgattaatttaacattaactattaggtaattcatattatacatttaagttctttctgttctgtgtagaagattcagaaatatgtcttcaaagacaatgacttgatctaattgataagaacctccaataaatatgttctaatatttttcaggaagaataaagaatagagagagacatataaatgtgcaagaggcaaaactttgagcatagtgtaaaatttaacatattaactctcacgaaaggcaaaatccttttatgtgcagatactttaattcatgtagattttcctattaatcagtaaagttgaatcctaacaataatgccatgtgacaacctatttagattattccagaattaaattcaatttattttctagagctcaagtaaccactaccttaactgaaatttgatgttaggtttcccttgttcctccgaatggttcttccacactcaaaataattgaatggttgagttggttaagcaaagagttatcctgccacctaagagcattcattaaatgattatttattaccacctactttatactatcttcctttctttaaacatggagtctaaatatgtaatatatcaaaaaatacttctgatttggtagatttcttatatcaagggtgagaattgaactgtgccattggctattcaatagcttattgaatgtatgttttggatgccacatcctcctggaagcaaattttgccaagatactgtttattattatttttaattaaagtgatactattccattttcaattaaa

SEQ ID NO: 162582 - DNA, 496 bp, Homo sapiens
  Payload ID: 12029
  Gene Symbol: OOSP2
  Gene Name: oocyte secreted protein 2
  ENST ID: ENST00000532905
  CDS Start-End: 65-325
tgtcttgatttggaccggtgctgagaacctccatgtgaaaataagttgctctctggactggttgatggtctcagttatcccagttgcagaaagcagaaatctgtatatatttgcggatgaattacatctgggaatgggctgccctgcaaatcggatacatacatatgtatatgagtttatatatcttgttcgtgattgtggcatcaggacaagggtagtttctgaggaaactctcctttttcaaaccgagctgtactttaccccaaggaatatagatcatgaccctcaggaaatccatttggagtgttccacctctagtgtttgatgcagaaatcatggggagactatctggaattagttcttctgtaagcctatctgctcaaatcctgtaccaagagtccacgaggatctagaaggcatagtatgctggctctatgccatactcctgaatgactattctgtatatgatcatgatattaaacagtggtaaaactga

SEQ ID NO: 162583 - DNA, 1236 bp, Homo sapiens
  Payload ID: 12030
  Gene Symbol: OIP5
  Gene Name: Opa interacting protein 5
  Uniprot ID: O43482
  ENST ID: ENST00000220514
  CDS Start-End: 61-750
gagctgtgcttggggcggggcctggcgtgtattcgaaaggaaggcgccggctgcgggaagatggcggctcagccgctgcggcatcgctcacgttgtgcaacgccgccccggggggacttttgtggtggcactgagagggcgattgaccaagcttcttttacgacctccatggagtgggatacgcaggtggtgaaggggtcctcgccgctcggccccgcagggctgggggctgaggagccagccgccggcccgcagctgccgtcttggctgcagcctgagaggtgcgctgtgttccagtgcgcacagtgtcacgcagtgctcgccgactcggtgcacctcgcctgggacctgtcgcggtccctcggggccgtggtcttctccagagttacaaataacgtcgttttggaagcgcccttcctagttggcattgaaggttcactcaaaggcagtacttacaaccttttattctgtggttcttgtgggattcccgttggtttccatctgtattctacccatgctgccctggctgccttgagaggtcacttctgcctttccagtgacaaaatggtgtgctatctcttaaaaacaaaagccatagtaaatgcatcagagatggatattcaaaatgttcctctatcagaaaagattgcagagctgaaagagaagatagtgctaacgcacaatcgcttaaaatcactaatgaagattctgagtgaagtgactcctgaccagtccaagccagaaaactgatcctgtaccaaagcttgagtgtcaggttcaggctttattgctgtcttcaacaacaggtgctgcttagtcatttcttgaaaaagattggcttcaagaatggaggggaaatgcagtttctatttacctttaggctgattttccaaattatttgtgaagctgtttttagaagatgagagactaaggattcttctcttttatagctatttgccttaagaacttactttagattcttattgaattcataatacttatctctgaaaatgtctttgactgtaaatttaggaattaagatgcagagtcccatgtgtcctctgatctaaagttgcatggttggtctgaaaatagagttgggcttaatgttgacttctattactcctgcatggagcagttgttatgaatactaatacatcactttttaacttctgtaaaatacagatcataatattctataggtaatgtttaataaattgcctgaataatatacaa

SEQ ID NO: 162584 - DNA, 485 bp, Homo sapiens
  Payload ID: 12030
  Gene Symbol: OIP5
  Gene Name: Opa interacting protein 5
  ENST ID: ENST00000560640
  CDS Start-End: 1-485
gagggcgattgaccaagcttcttttacgacctccatggagtgggatacgcaggtggtgaaggggtcctcgccgctcggccccgcagggctgggggctgaggagccagccgccggcccgcagctgccgtcttggctgcagcctgagaggtgcgctgtgttccagtgcgcacagtgtcacgcagtgctcgccgactcggtgcacctcgcctgggacctgtcgcggtccctcggggccgtggtcttctccagagttacaaataacgtcgttttggaagcgcccttcctagttggcattgaaggttcactcaaaggcagctatctcttaaaaacaaaagccatagtaaatgcatcagagatggatattcaaaatgttcctctatcagaaaagattgcagagctgaaagagaagatagtgctaacgcacaatcgcttaaaatcactaatgaagattctgagtgaagtgactcctgaccagtccaagccag

SEQ ID NO: 162585 - DNA, 3369 bp, Homo sapiens
  Payload ID: 12031
  Gene Symbol: OPRL1
  Gene Name: opiate receptor-like 1
  Uniprot ID: P41146
  ENST ID: ENST00000349451
  CDS Start-End: 413-1525
cgaccaggtggggcgggtcgtggcggggggcagggtcccctccggagggccctgggttagagtctgggcgtggacgcgcccctcataggggtcattggggcatagaggcatagagccggcttctccagcttgggattcacgtgtttttcaagggctaacggaaatgctgagatctaaaagcatgtttattgctgccaaggcctgacgatgaaacttcaagtcaaattacttcgggctgccggctcactcggctgctgcgtctggtctggcgtctgctgagaagatcctcttctaccctgctctgcacctgtgctcgactgccagccggctgagggcgggggtctccacggtggtcccagctcccaaggaggttgcagaagtaccgtacagagtggatttgcagggcagtggcatggagcccctcttccccgcgccgttctgggaggttatctacggcagccaccttcagggcaacctgtccctcctgagccccaaccacagtctgctgcccccgcatctgctgctcaatgccagccacggcgccttcctgcccctcgggctcaaggtcaccatcgtggggctctacctggccgtgtgtgtcggagggctcctggggaactgccttgtcatgtacgtcatcctcaggcacaccaaaatgaagacagccaccaatatttacatctttaacctggccctggccgacactctggtcctgctgacgctgcccttccagggcacggacatcctcctgggcttctggccgtttgggaatgcgctgtgcaagacagtcattgccattgactactacaacatgttcaccagcaccttcaccctaactgccatgagtgtggatcgctatgtagccatctgccaccccatccgtgccctcgacgtccgcacgtccagcaaagcccaggctgtcaatgtggccatctgggccctggcctctgttgtcggtgttcccgttgccatcatgggctcggcacaggtcgaggatgaagagatcgagtgcctggtggagatccctacccctcaggattactggggcccggtgtttgccatctgcatcttcctcttctccttcatcgtccccgtgctcgtcatctctgtctgctacagcctcatgatccggcggctccgtggagtccgcctgctctcgggctcccgagagaaggaccggaacctgcggcgcatcactcggctggtgctggtggtagtggctgtgttcgtgggctgctggacgcctgtccaggtcttcgtgctggcccaagggctgggggttcagccgagcagcgagactgccgtggccattctgcgcttctgcacggccctgggctacgtcaacagctgcctcaaccccatcctctacgccttcctggatgagaacttcaaggcctgcttccgcaagttctgctgtgcatctgccctgcgccgggacgtgcaggtgtctgaccgcgtgcgcagcattgccaaggacgtggccctggcctgcaagacctctgagacggtaccgcggcccgcatgactaggcgtggacctgcccatggtgcctgtcagcccgcagagcccatctacgcccaacacagagctcacacaggtcactgctctctaggcggacacaccctgggccctgagcatccagagcctgggatgggcttttccctgtgggccagggatgctcggtcccagaggaggacctagtgacatcatgggacaggtcaaagcattagggccacctccatggccccagacagactaaagctgccctcctggtgcagggccgaggggacacaaggacctacctggaagcagctgacatgctggtggacggccgtgactggagcccgtgcccctccctccccgtgcttcatgtgactcttggcctctctgctgctgcgttggcagaaccctgggtgggcaggcacccggaggaggagcagcagctgtgtcatcctgtgccccccatgtgctgtgtgctgtttgcatggcagggctccagctgccttcagccctgtgacgtctcctcagggcagctggacaggcttggcactgcccgggaagtgcagcaggcagcttttctttggggtgggacttgccctgagcttggagctgccacctggaggacttgcctgttccgactccacctgtgcagccggggccaccccaggagaaagtgtccaggtgggggctggcagtccctggctgcagaccccgagctggccctgggccagccgcacctctgaaggttttctgtgtgctgcacggtgcaggcctcatccctgactgcagcttgactctgggcccaacccccatttcccttcaggagaccagcgagaggccctggcccattccctccagcggtgcaatgaactatcatgctgtggaccgtcaacccagccctgcttctcagtgtggggcaggtgtctcaggacgaaggcgccgcgtgaccacatgggcagctctgttcacaaagtggaggcctcgttttcctggtcttgactgctctgtttgggtgggagaagattctctgggggtccccacatcctcccaaggctcccctcacagcctctcctttgcttgaagccagaggtcagtggccgtgctgtgttgcgggggaagctgtgtggaaggagaagctggtggccacagcagagtcctgctctggggacgcctgcttcatttacaagcctcaagatggctctgtgtagggcctgagcttgctgcccaacgggaggatggcttcacagcagagccagcatgaggggtggggcctggcagggcttgcttgagccaaactgcaaaggctgtggtggctgtgaggacactgcgggggttggggggggggcgtctgtacctcaggggatgccccgctgtggtcacccagagaatcacccttcctggtctacagatggaagctgcaggttggtgactttgcaaatgcacttcctacagatgaactattaaaagacctgcaacattgaaaaaactcattttttccaccaaaaccttggccaggtaacctaccttaggcacctgcaaagaacaggaagtgatggctgtctcgcaacagagcctgggctgctcctcctgctctggggagtctaggccgtggggactgttctggggaggctcatgctgtctccatgacgtctgtggcaggagtccctgaggacgggagctgcctagctacagttttcttgccaaggcgaggtgttttgtgaatctgtgctgatgtaatgtgcaccttcacgtatttatgcatgtggcaagcgttacttcctgtgcacgtagccagccctgggtctgtctctggggtaatgaaaaaggaccctaataaacacctgctcactggctgggtattctttgtaa

SEQ ID NO: 162586 - DNA, 3321 bp, Homo sapiens
  Payload ID: 12031
  Gene Symbol: OPRL1
  Gene Name: opiate receptor-like 1
  Uniprot ID: P41146
  ENST ID: ENST00000336866
  CDS Start-End: 365-1477
acggagccgcacggtagtagatgggggtgtggccgtggcccccgactctgctcggcggggccgttcctgctttgccatccgtgtgggacttccacgacagtggaggcacgagagctgggccccatatgctgcttgcccagcttgggaaagaggaggctgctgcaaaggaccgatcggcggcttcgggctgccggctcactcggctgctgcgtctggtctggcgtctgctgagaagatcctcttctaccctgctctgcacctgtgctcgactgccagccggctgagggcgggggtctccacggtggtcccagctcccaaggaggttgcagaagtaccgtacagagtggatttgcagggcagtggcatggagcccctcttccccgcgccgttctgggaggttatctacggcagccaccttcagggcaacctgtccctcctgagccccaaccacagtctgctgcccccgcatctgctgctcaatgccagccacggcgccttcctgcccctcgggctcaaggtcaccatcgtggggctctacctggccgtgtgtgtcggagggctcctggggaactgccttgtcatgtacgtcatcctcaggcacaccaaaatgaagacagccaccaatatttacatctttaacctggccctggccgacactctggtcctgctgacgctgcccttccagggcacggacatcctcctgggcttctggccgtttgggaatgcgctgtgcaagacagtcattgccattgactactacaacatgttcaccagcaccttcaccctaactgccatgagtgtggatcgctatgtagccatctgccaccccatccgtgccctcgacgtccgcacgtccagcaaagcccaggctgtcaatgtggccatctgggccctggcctctgttgtcggtgttcccgttgccatcatgggctcggcacaggtcgaggatgaagagatcgagtgcctggtggagatccctacccctcaggattactggggcccggtgtttgccatctgcatcttcctcttctccttcatcgtccccgtgctcgtcatctctgtctgctacagcctcatgatccggcggctccgtggagtccgcctgctctcgggctcccgagagaaggaccggaacctgcggcgcatcactcggctggtgctggtggtagtggctgtgttcgtgggctgctggacgcctgtccaggtcttcgtgctggcccaagggctgggggttcagccgagcagcgagactgccgtggccattctgcgcttctgcacggccctgggctacgtcaacagctgcctcaaccccatcctctacgccttcctggatgagaacttcaaggcctgcttccgcaagttctgctgtgcatctgccctgcgccgggacgtgcaggtgtctgaccgcgtgcgcagcattgccaaggacgtggccctggcctgcaagacctctgagacggtaccgcggcccgcatgactaggcgtggacctgcccatggtgcctgtcagcccgcagagcccatctacgcccaacacagagctcacacaggtcactgctctctaggcggacacaccctgggccctgagcatccagagcctgggatgggcttttccctgtgggccagggatgctcggtcccagaggaggacctagtgacatcatgggacaggtcaaagcattagggccacctccatggccccagacagactaaagctgccctcctggtgcagggccgaggggacacaaggacctacctggaagcagctgacatgctggtggacggccgtgactggagcccgtgcccctccctccccgtgcttcatgtgactcttggcctctctgctgctgcgttggcagaaccctgggtgggcaggcacccggaggaggagcagcagctgtgtcatcctgtgccccccatgtgctgtgtgctgtttgcatggcagggctccagctgccttcagccctgtgacgtctcctcagggcagctggacaggcttggcactgcccgggaagtgcagcaggcagcttttctttggggtgggacttgccctgagcttggagctgccacctggaggacttgcctgttccgactccacctgtgcagccggggccaccccaggagaaagtgtccaggtgggggctggcagtccctggctgcagaccccgagctggccctgggccagccgcacctctgaaggttttctgtgtgctgcacggtgcaggcctcatccctgactgcagcttgactctgggcccaacccccatttcccttcaggagaccagcgagaggccctggcccattccctccagcggtgcaatgaactatcatgctgtggaccgtcaacccagccctgcttctcagtgtggggcaggtgtctcaggacgaaggcgccgcgtgaccacatgggcagctctgttcacaaagtggaggcctcgttttcctggtcttgactgctctgtttgggtgggagaagattctctgggggtccccacatcctcccaaggctcccctcacagcctctcctttgcttgaagccagaggtcagtggccgtgctgtgttgcgggggaagctgtgtggaaggagaagctggtggccacagcagagtcctgctctggggacgcctgcttcatttacaagcctcaagatggctctgtgtagggcctgagcttgctgcccaacgggaggatggcttcacagcagagccagcatgaggggtggggcctggcagggcttgcttgagccaaactgcaaaggctgtggtggctgtgaggacactgcgggggttggggggggggcgtctgtacctcaggggatgccccgctgtggtcacccagagaatcacccttcctggtctacagatggaagctgcaggttggtgactttgcaaatgcacttcctacagatgaactattaaaagacctgcaacattgaaaaaactcattttttccaccaaaaccttggccaggtaacctaccttaggcacctgcaaagaacaggaagtgatggctgtctcgcaacagagcctgggctgctcctcctgctctggggagtctaggccgtggggactgttctggggaggctcatgctgtctccatgacgtctgtggcaggagtccctgaggacgggagctgcctagctacagttttcttgccaaggcgaggtgttttgtgaatctgtgctgatgtaatgtgcaccttcacgtatttatgcatgtggcaagcgttacttcctgtgcacgtagccagccctgggtctgtctctggggtaatgaaaaaggaccctaataaacacctgctcactggctgggtattctttgtaa

SEQ ID NO: 162587 - DNA, 3147 bp, Homo sapiens
  Payload ID: 12031
  Gene Symbol: OPRL1
  Gene Name: opiate receptor-like 1
  Uniprot ID: P41146
  ENST ID: ENST00000355631
  CDS Start-End: 191-1303
ggggtgtggccgtggcccccgactctgctcggcggggccgttcctgctttgccatccgtgtgggacttccacgacagtggaggcacgagagctgggccccatatgctgcttgcccagcttgggaaagaggaggctgctgcaaaggaccgatcggcgggtaccgtacagagtggatttgcagggcagtggcatggagcccctcttccccgcgccgttctgggaggttatctacggcagccaccttcagggcaacctgtccctcctgagccccaaccacagtctgctgcccccgcatctgctgctcaatgccagccacggcgccttcctgcccctcgggctcaaggtcaccatcgtggggctctacctggccgtgtgtgtcggagggctcctggggaactgccttgtcatgtacgtcatcctcaggcacaccaaaatgaagacagccaccaatatttacatctttaacctggccctggccgacactctggtcctgctgacgctgcccttccagggcacggacatcctcctgggcttctggccgtttgggaatgcgctgtgcaagacagtcattgccattgactactacaacatgttcaccagcaccttcaccctaactgccatgagtgtggatcgctatgtagccatctgccaccccatccgtgccctcgacgtccgcacgtccagcaaagcccaggctgtcaatgtggccatctgggccctggcctctgttgtcggtgttcccgttgccatcatgggctcggcacaggtcgaggatgaagagatcgagtgcctggtggagatccctacccctcaggattactggggcccggtgtttgccatctgcatcttcctcttctccttcatcgtccccgtgctcgtcatctctgtctgctacagcctcatgatccggcggctccgtggagtccgcctgctctcgggctcccgagagaaggaccggaacctgcggcgcatcactcggctggtgctggtggtagtggctgtgttcgtgggctgctggacgcctgtccaggtcttcgtgctggcccaagggctgggggttcagccgagcagcgagactgccgtggccattctgcgcttctgcacggccctgggctacgtcaacagctgcctcaaccccatcctctacgccttcctggatgagaacttcaaggcctgcttccgcaagttctgctgtgcatctgccctgcgccgggacgtgcaggtgtctgaccgcgtgcgcagcattgccaaggacgtggccctggcctgcaagacctctgagacggtaccgcggcccgcatgactaggcgtggacctgcccatggtgcctgtcagcccgcagagcccatctacgcccaacacagagctcacacaggtcactgctctctaggcggacacaccctgggccctgagcatccagagcctgggatgggcttttccctgtgggccagggatgctcggtcccagaggaggacctagtgacatcatgggacaggtcaaagcattagggccacctccatggccccagacagactaaagctgccctcctggtgcagggccgaggggacacaaggacctacctggaagcagctgacatgctggtggacggccgtgactggagcccgtgcccctccctccccgtgcttcatgtgactcttggcctctctgctgctgcgttggcagaaccctgggtgggcaggcacccggaggaggagcagcagctgtgtcatcctgtgccccccatgtgctgtgtgctgtttgcatggcagggctccagctgccttcagccctgtgacgtctcctcagggcagctggacaggcttggcactgcccgggaagtgcagcaggcagcttttctttggggtgggacttgccctgagcttggagctgccacctggaggacttgcctgttccgactccacctgtgcagccggggccaccccaggagaaagtgtccaggtgggggctggcagtccctggctgcagaccccgagctggccctgggccagccgcacctctgaaggttttctgtgtgctgcacggtgcaggcctcatccctgactgcagcttgactctgggcccaacccccatttcccttcaggagaccagcgagaggccctggcccattccctccagcggtgcaatgaactatcatgctgtggaccgtcaacccagccctgcttctcagtgtggggcaggtgtctcaggacgaaggcgccgcgtgaccacatgggcagctctgttcacaaagtggaggcctcgttttcctggtcttgactgctctgtttgggtgggagaagattctctgggggtccccacatcctcccaaggctcccctcacagcctctcctttgcttgaagccagaggtcagtggccgtgctgtgttgcgggggaagctgtgtggaaggagaagctggtggccacagcagagtcctgctctggggacgcctgcttcatttacaagcctcaagatggctctgtgtagggcctgagcttgctgcccaacgggaggatggcttcacagcagagccagcatgaggggtggggcctggcagggcttgcttgagccaaactgcaaaggctgtggtggctgtgaggacactgcgggggttggggggggggcgtctgtacctcaggggatgccccgctgtggtcacccagagaatcacccttcctggtctacagatggaagctgcaggttggtgactttgcaaatgcacttcctacagatgaactattaaaagacctgcaacattgaaaaaactcattttttccaccaaaaccttggccaggtaacctaccttaggcacctgcaaagaacaggaagtgatggctgtctcgcaacagagcctgggctgctcctcctgctctggggagtctaggccgtggggactgttctggggaggctcatgctgtctccatgacgtctgtggcaggagtccctgaggacgggagctgcctagctacagttttcttgccaaggcgaggtgttttgtgaatctgtgctgatgtaatgtgcaccttcacgtatttatgcatgtggcaagcgttacttcctgtgcacgtagccagccctgggtctgtctctggggtaatgaaaaaggaccctaataaacacctgctcactggctgggtattctttgtaa

SEQ ID NO: 162588 - DNA, 2191 bp, Homo sapiens
  Payload ID: 12031
  Gene Symbol: OPRL1
  Gene Name: opiate receptor-like 1
  ENST ID: ENST00000615600
  CDS Start-End: 1-880
gcacaccaaaatgaagacagccaccaatatttacatctttaacctggccctggccgacactctggtcctgctgacgctgcccttccagggcacggacatcctcctgggcttctggccgtttgggaatgcgctgtgcaagacagtcattgccattgactactacaacatgttcaccagcaccttcaccctaactgccatgagtgtggatcgctatgtagccatctgccaccccatccgtgccctcgacgtccgcacgtccagcaaagcccaggctgtcaatgtggccatctgggccctggcctctgttgtcggtgttcccgttgccatcatgggctcggcacaggtcgaggatgaagagatcgagtgcctggtggagatccctacccctcaggattactggggcccggtgtttgccatctgcatcttcctcttctccttcatcgtccccgtgctcgtcatctctgtctgctacagcctcatgatccggcggctccgtggagtccgcctgctctcgggctcccgagagaaggaccggaacctgcggcgcatcactcggctggtgctggtggtagtggctgtgttcgtgggctgctggacgcctgtccaggtcttcgtgctggcccaagggctgggggttcagccgagcagcgagactgccgtggccattctgcgcttctgcacggccctgggctacgtcaacagctgcctcaaccccatcctctacgccttcctggatgagaacttcaaggcctgcttccgcaagttctgctgtgcatctgccctgcgccgggacgtgcaggtgtctgaccgcgtgcgcagcattgccaaggacgtggccctggcctgcaagacctctgagacggtaccgcggcccgcatgactaggcgtggacctgcccatggtgcctgtcagcccgcagagcccatctacgcccaacacagagctcacacaggtcactgctctctaggcggacacaccctgggccctgagcatccagagcctgggatgggcttttccctgtgggccagggatgctcggtcccagaggaggacctagtgacatcatgggacaggtcaaagcattagggccacctccatggccccagacagactaaagctgccctcctggtgcagggccgaggggacacaaggacctacctggaagcagctgacatgctggtggacggccgtgactggagcccgtgcccctccctccccgtgcttcatgtgactcttggcctctctgctgctgcgttggcagaaccctgggtgggcaggcacccggaggaggagcagcagctgtgtcatcctgtgccccccatgtgctgtgtgctgtttgcatggcagggctccagctgccttcagccctgtgacgtctcctcagggcagctggacaggcttggcactgcccgggaagtgcagcaggcagcttttctttggggtgggacttgccctgagcttggagctgccacctggaggacttgcctgttccgactccacctgtgcagccggggccaccccaggagaaagtgtccaggtgggggctggcagtccctggctgcagaccccgagctggccctgggccagccgcacctctgaaggttttctgtgtgctgcacggtgcaggcctcatccctgactgcagcttgactctgggcccaacccccatttcccttcaggagaccagcgagaggccctggcccattccctccagcggtgcaatgaactatcatgctgtggaccgtcaacccagccctgcttctcagtgtggggcaggtgtctcaggacgaaggcgccgcgtgaccacatgggcagctctgttcacaaagtggaggcctcgttttcctggtcttgactgctctgtttgggtgggagaagattctctgggggtccccacatcctcccaaggctcccctcacagcctctcctttgcttgaagccagaggtcagtggccgtgctgtgttgcgggggaagctgtgtggaaggagaagctggtggccacagcagagtcctgctctggggacgcctgcttcatttacaagcctcaagatggctctgtgtagggcctgagcttgctgcccaacgggaggatggcttcacagcagagccagcatgaggggtggggcctggcagggcttgcttgagccaaactgcaaaggctgtggtggctgtgaggacactgcgggggttg

SEQ ID NO: 162589 - DNA, 2724 bp, Homo sapiens
  Payload ID: 12031
  Gene Symbol: OPRL1
  Gene Name: opiate receptor-like 1
  ENST ID: ENST00000627060
  CDS Start-End: 1-880
gcacaccaaaatgaagacagccaccaatatttacatctttaacctggccctggccgacactctggtcctgctgacgctgcccttccagggcacggacatcctcctgggcttctggccgtttgggaatgcgctgtgcaagacagtcattgccattgactactacaacatgttcaccagcaccttcaccctaactgccatgagtgtggatcgctatgtagccatctgccaccccatccgtgccctcgacgtccgcacgtccagcaaagcccaggctgtcaatgtggccatctgggccctggcctctgttgtcggtgttcccgttgccatcatgggctcggcacaggtcgaggatgaagagatcgagtgcctggtggagatccctacccctcaggattactggggcccggtgtttgccatctgcatcttcctcttctccttcatcgtccccgtgctcgtcatctctgtctgctacagcctcatgatccggcggctccgtggagtccgcctgctctcgggctcccgagagaaggaccggaacctgcggcgcatcactcggctggtgctggtggtagtggctgtgttcgtgggctgctggacgcctgtccaggtcttcgtgctggcccaagggctgggggttcagccgagcagcgagactgccgtggccattctgcgcttctgcacggccctgggctacgtcaacagctgcctcaaccccatcctctacgccttcctggatgagaacttcaaggcctgcttccgcaagttctgctgtgcatctgccctgcgccgggacgtgcaggtgtctgaccgcgtgcgcagcattgccaaggacgtggccctggcctgcaagacctctgagacggtaccgcggcccgcatgactaggcgtggacctgcccatggtgcctgtcagcccgcagagcccatctacgcccaacacagagctcacacaggtcactgctctctaggcggacacaccctgggccctgagcatccagagcctgggatgggcttttccctgtgggccagggatgctcggtcccagaggaggacctagtgacatcatgggacaggtcaaagcattagggccacctccatggccccagacagactaaagctgccctcctggtgcagggccgaggggacacaaggacctacctggaagcagctgacatgctggtggacggccgtgactggagcccgtgcccctccctccccgtgcttcatgtgactcttggcctctctgctgctgcgttggcagaaccctgggtgggcaggcacccggaggaggagcagcagctgtgtcatcctgtgccccccatgtgctgtgtgctgtttgcatggcagggctccagctgccttcagccctgtgacgtctcctcagggcagctggacaggcttggcactgcccgggaagtgcagcaggcagcttttctttggggtgggacttgccctgagcttggagctgccacctggaggacttgcctgttccgactccacctgtgcagccggggccaccccaggagaaagtgtccaggtgggggctggcagtccctggctgcagaccccgagctggccctgggccagccgcacctctgaaggttttctgtgtgctgcacggtgcaggcctcatccctgactgcagcttgactctgggcccaacccccatttcccttcaggagaccagcgagaggccctggcccattccctccagcggtgcaatgaactatcatgctgtggaccgtcaacccagccctgcttctcagtgtggggcaggtgtctcaggacgaaggcgccgcgtgaccacatgggcagctctgttcacaaagtggaggcctcgttttcctggtcttgactgctctgtttgggtgggagaagattctctgggggtccccacatcctcccaaggctcccctcacagcctctcctttgcttgaagccagaggtcagtggccgtgctgtgttgcgggggaagctgtgtggaaggagaagctggtggccacagcagagtcctgctctggggacgcctgcttcatttacaagcctcaagatggctctgtgtagggcctgagcttgctgcccaacgggaggatggcttcacagcagagccagcatgaggggtggggcctggcagggcttgcttgagccaaactgcaaaggctgtggtggctgtgaggacactgcgggggttggggggggggcgtctgtacctcaggggatgccccgctgtggtcacccagagaatcacccttcctggtctacagatggaagctgcaggttggtgactttgcaaatgcacttcctacagatgaactattaaaagacctgcaacattgaaaaaactcattttttccaccaaaaccttggccaggtaacctaccttaggcacctgcaaagaacaggaagtgatggctgtctcgcaacagagcctgggctgctcctcctgctctggggagtctaggccgtggggactgttctggggaggctcatgctgtctccatgacgtctgtggcaggagtccctgaggacgggagctgcctagctacagttttcttgccaaggcgaggtgttttgtgaatctgtgctgatgtaatgtgcaccttcacgtatttatgcatgtggcaagcgttacttcctgtgcacgtagccagccctgggtctgtctctggggtaatgaaaaaggaccctaataaacacctgctcactggctgggtattctttgtaa

SEQ ID NO: 162590 - DNA, 2724 bp, Homo sapiens; identical to SEQ ID NO: 162589
  Payload ID: 12031
  Gene Symbol: OPRL1
  Gene Name: opiate receptor-like 1
  ENST ID: ENST00000625570
  CDS Start-End: 1-880

SEQ ID NO: 162591 - DNA, 6833 bp, Homo sapiens
  Payload ID: 12032
  Gene Symbol: OPCML
  Gene Name: opioid binding protein/cell adhesion molecule-like
  Uniprot ID: Q14982
  ENST ID: ENST00000331898
  CDS Start-End: 580-1617
cccgccttggaactttttgccgccttggggttccagatgcgagacctggggctgggggacacgtacatctgtccatgtgtgtgatctaataaaccatttcctcctctccttgaagccgcagctttttatgacagctcctgtatgtcagagacacttgccttcttctttgggttataaacttttgatgccagagctctgcagaacgtgcccaactgaatcttaaagtagcgtctcgaagagagaggcagagaaagcgcaatctgtgaccttcatccccgcaccttgcttcttcctctcccctcctggccgcctccctcctccccaggggagcgtcaagaaagctctttttggatgcaggagggggcatctggttctgctaggctggaaagctgaggcaggatctgaggaagaattctcagactccggagagcccggactcctctcttctccttccccctgctcctggcgaactctgccccttccctcctccccgcaccgcttcccgagcccgctggtgcgcggggcgggggaccaggactgtgcggctgccggagtcctgggaagttgtggctgtcgagaatgggggtctgtgggtacctgttcctgccctggaagtgcctcgtggtcgtgtctctcaggctgctgttccttgtacccacaggagtgcccgtgcgcagcggagatgccaccttccccaaagctatggacaacgtgacggtccggcagggggagagcgccaccctcaggtgtaccatagatgaccgggtaacccgggtggcctggctaaaccgcagcaccatcctctacgctgggaatgacaagtggtccatagaccctcgtgtgatcatcctggtcaatacaccaacccagtacagcatcatgatccaaaatgtggatgtgtatgacgaaggtccgtacacctgctctgtgcagacagacaatcatcccaaaacgtcccgggttcacctaatagtgcaagttcctcctcagatcatgaatatctcctcagacatcactgtgaatgagggaagcagtgtgaccctgctgtgtcttgctattggcagaccagagccaactgtgacatggagacacctgtcagtcaaggaaggccagggctttgtaagtgaggatgagtacctggagatctctgacatcaagcgagaccagtccggggagtacgaatgcagcgcgttgaacgatgtcgctgcgcccgatgtgcggaaagtaaaaatcactgtaaactatcctccctatatctcaaaagccaagaacactggtgtttcagtcggtcagaagggcatcctgagctgtgaagcctctgcagtccccatggctgaattccagtggttcaaggaagaaaccaggttagccactggtctggatggaatgaggattgaaaacaaaggccgcatgtccactctgactttcttcaatgtttcagaaaaggattatgggaactatacttgtgtggccacgaacaagcttgggaacaccaatgccagcatcacattgtatgggcctggagcagtcattgatggtgtaaactcggcctccagagcactggcttgtctctggctatcagggaccctcttagcccacttcttcatcaagttttgataagaaatcctaggtcctctgagcaacgcctgcttctccatatcacagactttaatctacactgcggagagcaaaccagcttgggcttctttttgtttttttctgttattctagatttgttttctttttgtttttgtttatttgtttgtttgcttttatttccagcttgaatgagtggggttgggggcggggtgggcagggttctaccacgtgtaggataatcattcattggtgtgtccaaaaatggggtctgctcctgctaccttgacccttccctttcctctgcttctctcctcatcatcattcccaacaacatcctctgccacacacaacaaaacgtaagtttcatttgggcaaaaattgagcctcacaataaacaccctgaagacacaacttgacttataacatagtgcacagcaagagctacatccaagtgtcctattatctgtgattattttcttaatgacaatgtacatatgcccccatccatgttaattattatctaattccattagggttcacgtcttttctttctgggacactatcctactatatccatatctatagatttcaatatagatgattgtgccatcttctgtagcccctccgctctactcattccttccaccatctgcagagatttgaagtttggggctatgcatgaaacccaacactaaattttgcaagtcaagtaaccaaaaaagggggaggcattttgaagatagaacctctattttaaaaagagaagttcaactcataaacgtgattgataggtggctgatttatttaggttttgtcaagctatctatcaaagtaatggtacagttacccatctactcaaatatctgatttatctcaccatccaattatctacccacctgtcttcctctctagcaatctatttactgtttatcaatctatcaatgtaattgtctaacactcctttctattctctccctactactcactatcaattcatccccatatgaatctctaaccatattgtatctctcccactgtattcatttatacaccatcagcagacattggcatcttcaaaattatctttcaacttctgtgaaagccaacgatctcacaggttaacaaaatacaaaagcaataccctgtgttgtggactctttaaaatctggtatcctatccacccaagggagacactaacagataggccaaagtagcaagctaatgatcagtcactcactattcccagaagagcctgtgttttctaaaacactttcttgggaagcagatcagcctagaaaagttttgattagcactgtggttttccttttgcacttgaaggacaaaggtgccagcctttatgcttctctcaacccttcaagaaagtacatgtcaggaacctatggctggctttccttagcagcaagaacttgagagaaaaacacatctgtctctgcaatgcaaagtgaagagtccacccgcctgagtgggatgacttcagctagagtctcctttctgctccagttctggtttaatctgtttgaaaactatccagtaaaaagctgatggaggccaattacatggcgggtgtattgacaactctggtatttgtttcaggaagctcttctaagctgagggcacttgagcaactgacttaattttcaagcacttgattaacacaacactgcaaacagaagggagaaagtgtcagtgacacagtttcctctgatgcagctgcttctccaatggctttggggaagaacttcaccagctcttcaggttcaaagcagacccagcatacaaacaagagctgagccacctttgctgtcttgtctcctgggacgagaaggactcatccagcaaagttgcctgggattcaaaataaaggcattgcagaccgcacaggtgtgctgcagggactgatccacagagaggatgagaatgcagcatcaatcgcagacctgccctgcctcagttggaaaaccttttcaggccctcagtctaaaaaataaaaaatatgagcaccattgaattctgtgcccttaatgcttaactggtcttcttcctctggtatcagtgtcctctttgtttttgtccatcaaggcacatgagtgtgacctctgccatggggaaacacacacagagatatctatacatatatacatacatacaaacataggctatcttggcacactaaatgctaagcactgtcttaagaggtagagctggtgtgagtgaaattaatgttacattttccagctgtaaacagacatctgcatttcctagtgagctgccaggagccagattcgggaaccgtaactgatgtgccaggaatggtgcattgattcccagttccagggatgatcatgagcaggcgcaaaatcagaattaaaggtcgcacatagacgtttcagatctgtcaccaccttcagcatctggagttgagttggtgtcagatagtgtatgagaattaaatgtgtcatctgagcatgctactgatgataaatttgttactttggagttgaataaatgtgaaggctgtgaagagtggacagtcttggagaacacagtgcttgaaatggacaagctggacctattcctcactccaagacttgttctacaggaaagggtccatgctcctttggccaagatcatcagaacctctcaacccaacaaggctggcttcagggccactatggaaccctgctgttcccccttccaaaggatactaagatgcccctctggtgggtacctatcccagccacgtttcagagggagagaaatgctacagttgatcctcatctgtctggggtaaagacaacaaagtaaatacaacccaaggcaactggggtactcactgggagtgaaaatgacttcttcacaacagacatatttctgcttctgtgtttttgtgtttctttggtggggatggcttcatgggagagtggctgtcacccatcattttgaagcatatagaacaacaaatgcttacacaagacaatatccacacttttccaacttcacacacggagagtacatggagaatgcctacaggctagatttgttcagggtgccagtagtgggcatggggtgggggcaaggcaggacaaaacatacaagtctgagcaagtacatctcttgcaggttttccacatgaaaaggaagccaaataagtcctgttaggagattaggtgagaggaattagcaatgtagggactctgaaacccttccccttcccaaaacagagttcatatgcacttccaccaaagtaatgccaatgaaagtgctcgtgttaaggctgcagccaagcttgtttttcagtagtttaatgtcaagtgcctgatacagtcgactgcaagtctaaacaagcatgtttagtttttctcattcttgctttaattcagggagggggagatgtagagaagtggttgtgaaaacatgtacaggctttatgcagagcactgcgcatggctgttctgctgcaactgtgctccacgaaacagaagaaaaggtaaggtgttgtgtcacaaagaggccccagtctctttcttcttacatccatgcctcttactagatgatacatttacagattgggcagtttgttctcaaaacctgggtgagaagactattcctggactctagcaacttcaaaactgaggctgggtttcagaatctttttctgcatcaattcagtcaatttgccttcaacaaagagaagtcagcaagttctatttatgctgaaagaactattccatgagaaaagcagagaaccccaaagtgggcaggcaaccccgacgagagcttatccctgtggcggcatcaggagtggctgtacattgaattttcaagtgctggttggctgtcgccagcccatggtaggaggggaggaatggcttaagatgaggtaagatctggtggtggggcatctttcctcaattccatactgactttgatcttgagaaagaaaaactggctatgcattacctaaaaccagtccaaaatgaaacagaccaacacacacacaaaagcaaattgtcaatccctttggaattaagggaagcagcataaggtttttctttttggaaaaaatgcatttattttctttttctccaacagcaagaatcttttgttttcattttgcacgtgaccttatcttggaaactcttatacccaattgcctcccctcctattattcagagcttccctgtctttttacttgaagacaaataagtttgagcacttgagtaaaacttcacaggtgtgtaagtaggaaggcaacattttcaaaaagagaccatatgatgagaacgcctaatgatcaccacatgcaaacaaacaaaactgccagtctcatttcccacatttcttacttaagagaagagaagtaaatgaaaggaagaagaaatagatttgtaattaaagatgtggcaaaaaagatagggctgagccagttcaatttagccttcaggtgcagaatacttagagtccaaagaaatgtggagtggacttaattagatgcagttgtctttatcctgaaagtagtgagctaagcctaatttccagcattttgaaagagattcctttttgtttctttccatggtgccctctttaaggcacagagttgctccacaccactgggtggagaaagaaagattgcgaaccctcgaccatccttttgaggctacattctatgttatttggcagatttataaagctatcagtaataacaatgctatgtactgcaagctgcccttgtgttagttaaagggagcatttttaatcgttcggaaattttcgtgacatgtcaagtgcagttgtgaggactgtgtgggtgaacgaaaatgtgtctgtcaagttcagagtcctttagatttaaaaaaaaattatgacttatcaatggtgccgttatagctgtgtcagacaatgggtgtgcccattctcacaattatccttcaaaaaaaatctatgttcaaatgctttaaaaatttatcacacgatacaagagtatgactttgtcagccttctagagttctttttttcttttattttctttcgtattttttccttcaaaaaatcaatgaagacttgatttctgtcaataattgtatcaagggtgaatatactacctgaattttgtgcatgttacattgtagttgtaaccttttctaattcaggatgaatacgagatggttgtgattgtgcagtgtaccaataaagttcgagaaatttgtaacttt

SEQ ID NO: 162592 - DNA, 1302 bp, Homo sapiens
  Payload ID: 12032
  Gene Symbol: OPCML
  Gene Name: opioid binding protein/cell adhesion molecule-like
  Uniprot ID: Q14982
  ENST ID: ENST00000374778
  CDS Start-End: 215-1129
gcgccgggcggcgctcccccggctggccgcgagtcgccgaccgggctgcagaggacggccaccgaccggacgaccctggctgcgccggctgcgcgtccccgccttggaactttttgccgccttggggttccagatgcgagacctggggctgggggacacgtacatctgtccatgagtgcccgtgcgcagcggagatgccaccttccccaaagctatggacaacgtgacggtccggcagggggagagcgccaccctcaggtgtaccatagatgaccgggtaacccgggtggcctggctaaaccgcagcaccatcctctacgctgggaatgacaagtggtccatagaccctcgtgtgatcatcctggtcaatacaccaacccagtacagcatcatgatccaaaatgtggatgtgtatgacgaaggtccgtacacctgctctgtgcagacagacaatcatcccaaaacgtcccgggttcacctaatagtgcaagttcctcctcagatcatgaatatctcctcagacatcactgtgaatgagggaagcagtgtgaccctgctgtgtcttgctattggcagaccagagccaactgtgacatggagacacctgtcagtcaaggaaggccagggctttgtaagtgaggatgagtacctggagatctctgacatcaagcgagaccagtccggggagtacgaatgcagcgcgttgaacgatgtcgctgcgcccgatgtgcggaaagtaaaaatcactgtaaactatcctccctatatctcaaaagccaagaacactggtgtttcagtcggtcagaagggcatcctgagctgtgaagcctctgcagtccccatggctgaattccagtggttcaaggaagaaaccaggttagccactggtctggatggaatgaggattgaaaacaaaggccgcatgtccactctgactttcttcaatgtttcagaaaaggattatgggaactatacttgtgtggccacgaacaagcttgggaacaccaatgccagcatcacattgtatgggcctggagcagtcattgatggtgtaaactcggcctccagagcactggcttgtctctggctatcagggaccctcttagcccacttcttcatcaagttttgataagaaatcctaggtcctctgagcaacgcctgcttctccatatcacagactttaatctacactgcggagagcaaaccagcttgggcttctttttgtttttttctgttattctagatttgttttctttttgtttttgtttatttgtttgtttgcttttatttccagcttgaatg

SEQ ID NO: 162593 - DNA, 6424 bp, Homo sapiens
  Payload ID: 12032
  Gene Symbol: OPCML
  Gene Name: opioid binding protein/cell adhesion molecule-like
  Uniprot ID: Q14982
  ENST ID: ENST00000524381
  CDS Start-End: 196-1212
tgtgcaagaaaagaaatcagagacgctgcctgcctgctcccatctctcgcgcgctctctctctcttctgctctctccctccctttgcaaacattggatttaaacctgctcagaattcagcacagaggaaggcagcagcggtagcagcagcagaagcagtagcaagcccggcagctgagagcaccgcagcgtcgagatgtaccatcctgcctactgggtcgtcttctcggcgacaactgccctgctcttcatcccaggagtgcccgtgcgcagcggagatgccaccttccccaaagctatggacaacgtgacggtccggcagggggagagcgccaccctcaggtgtaccatagatgaccgggtaacccgggtggcctggctaaaccgcagcaccatcctctacgctgggaatgacaagtggtccatagaccctcgtgtgatcatcctggtcaatacaccaacccagtacagcatcatgatccaaaatgtggatgtgtatgacgaaggtccgtacacctgctctgtgcagacagacaatcatcccaaaacgtcccgggttcacctaatagtgcaagttcctcctcagatcatgaatatctcctcagacatcactgtgaatgagggaagcagtgtgaccctgctgtgtcttgctattggcagaccagagccaactgtgacatggagacacctgtcagtcaaggaaggccagggctttgtaagtgaggatgagtacctggagatctctgacatcaagcgagaccagtccggggagtacgaatgcagcgcgttgaacgatgtcgctgcgcccgatgtgcggaaagtaaaaatcactgtaaactatcctccctatatctcaaaagccaagaacactggtgtttcagtcggtcagaagggcatcctgagctgtgaagcctctgcagtccccatggctgaattccagtggttcaaggaagaaaccaggttagccactggtctggatggaatgaggattgaaaacaaaggccgcatgtccactctgactttcttcaatgtttcagaaaaggattatgggaactatacttgtgtggccacgaacaagcttgggaacaccaatgccagcatcacattgtatgggcctggagcagtcattgatggtgtaaactcggcctccagagcactggcttgtctctggctatcagggaccctcttagcccacttcttcatcaagttttgataagaaatcctaggtcctctgagcaacgcctgcttctccatatcacagactttaatctacactgcggagagcaaaccagcttgggcttctttttgtttttttctgttattctagatttgttttctttttgtttttgtttatttgtttgtttgcttttatttccagcttgaatgagtggggttgggggcggggtgggcagggttctaccacgtgtaggataatcattcattggtgtgtccaaaaatggggtctgctcctgctaccttgacccttccctttcctctgcttctctcctcatcatcattcccaacaacatcctctgccacacacaacaaaacgtaagtttcatttgggcaaaaattgagcctcacaataaacaccctgaagacacaacttgacttataacatagtgcacagcaagagctacatccaagtgtcctattatctgtgattattttcttaatgacaatgtacatatgcccccatccatgttaattattatctaattccattagggttcacgtcttttctttctgggacactatcctactatatccatatctatagatttcaatatagatgattgtgccatcttctgtagcccctccgctctactcattccttccaccatctgcagagatttgaagtttggggctatgcatgaaacccaacactaaattttgcaagtcaagtaaccaaaaaagggggaggcattttgaagatagaacctctattttaaaaagagaagttcaactcataaacgtgattgataggtggctgatttatttaggttttgtcaagctatctatcaaagtaatggtacagttacccatctactcaaatatctgatttatctcaccatccaattatctacccacctgtcttcctctctagcaatctatttactgtttatcaatctatcaatgtaattgtctaacactcctttctattctctccctactactcactatcaattcatccccatatgaatctctaaccatattgtatctctcccactgtattcatttatacaccatcagcagacattggcatcttcaaaattatctttcaacttctgtgaaagccaacgatctcacaggttaacaaaatacaaaagcaataccctgtgttgtggactctttaaaatctggtatcctatccacccaagggagacactaacagataggccaaagtagcaagctaatgatcagtcactcactattcccagaagagcctgtgttttctaaaacactttcttgggaagcagatcagcctagaaaagttttgattagcactgtggttttccttttgcacttgaaggacaaaggtgccagcctttatgcttctctcaacccttcaagaaagtacatgtcaggaacctatggctggctttccttagcagcaagaacttgagagaaaaacacatctgtctctgcaatgcaaagtgaagagtccacccgcctgagtgggatgacttcagctagagtctcctttctgctccagttctggtttaatctgtttgaaaactatccagtaaaaagctgatggaggccaattacatggcgggtgtattgacaactctggtatttgtttcaggaagctcttctaagctgagggcacttgagcaactgacttaattttcaagcacttgattaacacaacactgcaaacagaagggagaaagtgtcagtgacacagtttcctctgatgcagctgcttctccaatggctttggggaagaacttcaccagctcttcaggttcaaagcagacccagcatacaaacaagagctgagccacctttgctgtcttgtctcctgggacgagaaggactcatccagcaaagttgcctgggattcaaaataaaggcattgcagaccgcacaggtgtgctgcagggactgatccacagagaggatgagaatgcagcatcaatcgcagacctgccctgcctcagttggaaaaccttttcaggccctcagtctaaaaaataaaaaatatgagcaccattgaattctgtgcccttaatgcttaactggtcttcttcctctggtatcagtgtcctctttgtttttgtccatcaaggcacatgagtgtgacctctgccatggggaaacacacacagagatatctatacatatatacatacatacaaacataggctatcttggcacactaaatgctaagcactgtcttaagaggtagagctggtgtgagtgaaattaatgttacattttccagctgtaaacagacatctgcatttcctagtgagctgccaggagccagattcgggaaccgtaactgatgtgccaggaatggtgcattgattcccagttccagggatgatcatgagcaggcgcaaaatcagaattaaaggtcgcacatagacgtttcagatctgtcaccaccttcagcatctggagttgagttggtgtcagatagtgtatgagaattaaatgtgtcatctgagcatgctactgatgataaatttgttactttggagttgaataaatgtgaaggctgtgaagagtggacagtcttggagaacacagtgcttgaaatggacaagctggacctattcctcactccaagacttgttctacaggaaagggtccatgctcctttggccaagatcatcagaacctctcaacccaacaaggctggcttcagggccactatggaaccctgctgttcccccttccaaaggatactaagatgcccctctggtgggtacctatcccagccacgtttcagagggagagaaatgctacagttgatcctcatctgtctggggtaaagacaacaaagtaaatacaacccaaggcaactggggtactcactgggagtgaaaatgacttcttcacaacagacatatttctgcttctgtgtttttgtgtttctttggtggggatggcttcatgggagagtggctgtcacccatcattttgaagcatatagaacaacaaatgcttacacaagacaatatccacacttttccaacttcacacacggagagtacatggagaatgcctacaggctagatttgttcagggtgccagtagtgggcatggggtgggggcaaggcaggacaaaacatacaagtctgagcaagtacatctcttgcaggttttccacatgaaaaggaagccaaataagtcctgttaggagattaggtgagaggaattagcaatgtagggactctgaaacccttccccttcccaaaacagagttcatatgcacttccaccaaagtaatgccaatgaaagtgctcgtgttaaggctgcagccaagcttgtttttcagtagtttaatgtcaagtgcctgatacagtcgactgcaagtctaaacaagcatgtttagtttttctcattcttgctttaattcagggagggggagatgtagagaagtggttgtgaaaacatgtacaggctttatgcagagcactgcgcatggctgttctgctgcaactgtgctccacgaaacagaagaaaaggtaaggtgttgtgtcacaaagaggccccagtctctttcttcttacatccatgcctcttactagatgatacatttacagattgggcagtttgttctcaaaacctgggtgagaagactattcctggactctagcaacttcaaaactgaggctgggtttcagaatctttttctgcatcaattcagtcaatttgccttcaacaaagagaagtcagcaagttctatttatgctgaaagaactattccatgagaaaagcagagaaccccaaagtgggcaggcaaccccgacgagagcttatccctgtggcggcatcaggagtggctgtacattgaattttcaagtgctggttggctgtcgccagcccatggtaggaggggaggaatggcttaagatgaggtaagatctggtggtggggcatctttcctcaattccatactgactttgatcttgagaaagaaaaactggctatgcattacctaaaaccagtccaaaatgaaacagaccaacacacacacaaaagcaaattgtcaatccctttggaattaagggaagcagcataaggtttttctttttggaaaaaatgcatttattttctttttctccaacagcaagaatcttttgttttcattttgcacgtgaccttatcttggaaactcttatacccaattgcctcccctcctattattcagagcttccctgtctttttacttgaagacaaataagtttgagcacttgagtaaaacttcacaggtgtgtaagtaggaaggcaacattttcaaaaagagaccatatgatgagaacgcctaatgatcaccacatgcaaacaaacaaaactgccagtctcatttcccacatttcttacttaagagaagagaagtaaatgaaaggaagaagaaatagatttgtaattaaagatgtggcaaaaaagatagggctgagccagttcaatttagccttcaggtgcagaatacttagagtccaaagaaatgtggagtggacttaattagatgcagttgtctttatcctgaaagtagtgagctaagcctaatttccagcattttgaaagagattcctttttgtttctttccatggtgccctctttaaggcacagagttgctccacaccactgggtggagaaagaaagattgcgaaccctcgaccatccttttgaggctacattctatgttatttggcagatttataaagctatcagtaataacaatgctatgtactgcaagctgcccttgtgttagttaaagggagcatttttaatcgttcggaaattttcgtgacatgtcaagtgcagttgtgaggactgtgtgggtgaacgaaaatgtgtctgtcaagttcagagtcctttagatttaaaaaaaaattatgacttatcaatggtgccgttatagctgtgtcagacaatgggtgtgcccattctcacaattatccttcaaaaaaaatctatgttcaaatgctttaaaaatttatcacacgatacaagagtatgactttgtcagccttctagagttctttttttcttttattttctttcgtattttttccttcaaaaaatcaatgaagacttgatttctgtcaataattgtatcaagggtgaatatactacctgaattttgtgcatgttacattgtagttgtaaccttttctaattcaggatgaatacgagatggttgtgattgtgcagtgtaccaataaagttcgagaaatttgtaa

SEQ ID NO: 162594 - DNA, 6277 bp, Homo sapiens
  Payload ID: 12032
  Gene Symbol: OPCML
  Gene Name: opioid binding protein/cell adhesion molecule-like
  Uniprot ID: Q14982
  ENST ID: ENST00000541867
  CDS Start-End: 1-1065
atgggggtctgtgggtacctgttcctgccctggaagtgcctcgtggtcgtgtctctcaggctgctgttccttgtacccacaggagtgcccgtgcgcagcggagatgccaccttccccaaagctatggacaacgtgacggtccggcagggggagagcgccacccttaggtgtaccatagatgaccgggtaacccgggtggcctggctaaaccgcagcaccatcctctacgctgggaatgacaagtggtccatagaccctcgtgtgatcatcctggtcaatacaccaacccagtacagcatcatgatccaaaatgtggatgtgtatgacgaaggtccgtacacctgctctgtgcagacagacaatcatcccaaaacgtcccgggttcacctaatagtgcaagttcctcctcagatcatgaatatctcctcagacatcactgtgaatgagggaagcagtgtgaccctgctgtgtcttgctattggcagaccagagccaactgtgacatggagacacctgtcagtcaaggaaggccagggctttgtaagtgaggatgagtacctggagatctctgacatcaagcgagaccagtccggggagtacgaatgcagcgcgttgaacgatgtcgctgcgcccgatgtgcggaaagtaaaaatcactgtaaactatcctccctatatctcaaaagccaagaacactggtgtttcagtcggtcagaagggcatcctgagctgtgaagcctctgcagtccccatggctgaattccagtggttcaaggaagaaaccaggttagccactggtctggatggaatgaggattgaaaacaaaggccgcatgtccactctgactttcttcaatgtttcagaaaaggattatgggaactatacttgtgtggccacgaacaagcttgggaacaccaatgccagcatcacattgtatgaaataagcccctcatcagcagtggcagggcctggagcagtcattgatggtgtaaactcggcctccagagcactggcttgtctctggctatcagggaccctcttagcccacttcttcatcaagttttgataagaaatcctaggtcctctgagcaacgcctgcttctccatatcacagactttaatctacactgcggagagcaaaccagcttgggcttctttttgtttttttctgttattctagatttgttttctttttgtttttgtttatttgtttgtttgcttttatttccagcttgaatgagtggggttgggggcggggtgggcagggttctaccacgtgtaggataatcattcattggtgtgtccaaaaatggggtctgctcctgctaccttgacccttccctttcctctgcttctctcctcatcatcattcccaacaacatcctctgccacacacaacaaaacgtaagtttcatttgggcaaaaattgagcctcacaataaacaccctgaagacacaacttgacttataacatagtgcacagcaagagctacatccaagtgtcctattatctgtgattattttcttaatgacaatgtacatatgcccccatccatgttaattattatctaattccattagggttcacgtcttttctttctgggacactatcctactatatccatatctatagatttcaatatagatgattgtgccatcttctgtagcccctccgctctactcattccttccaccatctgcagagatttgaagtttggggctatgcatgaaacccaacactaaattttgcaagtcaagtaaccaaaaaagggggaggcattttgaagatagaacctctattttaaaaagagaagttcaactcataaacgtgattgataggtggctgatttatttaggttttgtcaagctatctatcaaagtaatggtacagttacccatctactcaaatatctgatttatctcaccatccaattatctacccacctgtcttcctctctagcaatctatttactgtttatcaatctatcaatgtaattgtctaacactcctttctattctctccctactactcactatcaattcatccccatatgaatctctaaccatattgtatctctcccactgtattcatttatacaccatcagcagacattggcatcttcaaaattatctttcaacttctgtgaaagccaacgatctcacaggttaacaaaatacaaaagcaataccctgtgttgtggactctttaaaatctggtatcctatccacccaagggagacactaacagataggccaaagtagcaagctaatgatcagtcactcactattcccagaagagcctgtgttttctaaaacactttcttgggaagcagatcagcctagaaaagttttgattagcactgtggttttccttttgcacttgaaggacaaaggtgccagcctttatgcttctctcaacccttcaagaaagtacatgtcaggaacctatggctggctttccttagcagcaagaacttgagagaaaaacacatctgtctctgcaatgcaaagtgaagagtccacccgcctgagtgggatgacttcagctagagtctcctttctgctccagttctggtttaatctgtttgaaaactatccagtaaaaagctgatggaggccaattacatggcgggtgtattgacaactctggtatttgtttcaggaagctcttctaagctgagggcacttgagcaactgacttaattttcaagcacttgattaacacaacactgcaaacagaagggagaaagtgtcagtgacacagtttcctctgatgcagctgcttctccaatggctttggggaagaacttcaccagctcttcaggttcaaagcagacccagcatacaaacaagagctgagccacctttgctgtcttgtctcctgggacgagaaggactcatccagcaaagttgcctgggattcaaaataaaggcattgcagaccgcacaggtgtgctgcagggactgatccacagagaggatgagaatgcagcatcaatcgcagacctgccctgcctcagttggaaaaccttttcaggccctcagtctaaaaaataaaaaatatgagcaccattgaattctgtgcccttaatgcttaactggtcttcttcctctggtatcagtgtcctctttgtttttgtccatcaaggcacatgagtgtgacctctgccatggggaaacacacacagagatatctatacatatatacatacatacaaacataggctatcttggcacactaaatgctaagcactgtcttaagaggtagagctggtgtgagtgaaattaatgttacattttccagctgtaaacagacatctgcatttcctagtgagctgccaggagccagattcgggaaccgtaactgatgtgccaggaatggtgcattgattcccagttccagggatgatcatgagcaggcgcaaaatcagaattaaaggtcgcacatagacgtttcagatctgtcaccaccttcagcatctggagttgagttggtgtcagatagtgtatgagaattaaatgtgtcatctgagcatgctactgatgataaatttgttactttggagttgaataaatgtgaaggctgtgaagagtggacagtcttggagaacacagtgcttgaaatggacaagctggacctattcctcactccaagacttgttctacaggaaagggtccatgctcctttggccaagatcatcagaacctctcaacccaacaaggctggcttcagggccactatggaaccctgctgttcccccttccaaaggatactaagatgcccctctggtgggtacctatcccagccacgtttcagagggagagaaatgctacagttgatcctcatctgtctggggtaaagacaacaaagtaaatacaacccaaggcaactggggtactcactgggagtgaaaatgacttcttcacaacagacatatttctgcttctgtgtttttgtgtttctttggtggggatggcttcatgggagagtggctgtcacccatcattttgaagcatatagaacaacaaatgcttacacaagacaatatccacacttttccaacttcacacacggagagtacatggagaatgcctacaggctagatttgttcagggtgccagtagtgggcatggggtgggggcaaggcaggacaaaacatacaagtctgagcaagtacatctcttgcaggttttccacatgaaaaggaagccaaataagtcctgttaggagattaggtgagaggaattagcaatgtagggactctgaaacccttccccttcccaaaacagagttcatatgcacttccaccaaagtaatgccaatgaaagtgctcgtgttaaggctgcagccaagcttgtttttcagtagtttaatgtcaagtgcctgatacagtcgactgcaagtctaaacaagcatgtttagtttttctcattcttgctttaattcagggagggggagatgtagagaagtggttgtgaaaacatgtacaggctttatgcagagcactgcgcatggctgttctgctgcaactgtgctccacgaaacagaagaaaaggtaaggtgttgtgtcacaaagaggccccagtctctttcttcttacatccatgcctcttactagatgatacatttacagattgggcagtttgttctcaaaacctgggtgagaagactattcctggactctagcaacttcaaaactgaggctgggtttcagaatctttttctgcatcaattcagtcaatttgccttcaacaaagagaagtcagcaagttctatttatgctgaaagaactattccatgagaaaagcagagaaccccaaagtgggcaggcaaccccgacgagagcttatccctgtggcggcatcaggagtggctgtacattgaattttcaagtgctggttggctgtcgccagcccatggtaggaggggaggaatggcttaagatgaggtaagatctggtggtggggcatctttcctcaattccatactgactttgatcttgagaaagaaaaactggctatgcattacctaaaaccagtccaaaatgaaacagaccaacacacacacaaaagcaaattgtcaatccctttggaattaagggaagcagcataaggtttttctttttggaaaaaatgcatttattttctttttctccaacagcaagaatcttttgttttcattttgcacgtgaccttatcttggaaactcttatacccaattgcctcccctcctattattcagagcttccctgtctttttacttgaagacaaataagtttgagcacttgagtaaaacttcacaggtgtgtaagtaggaaggcaacattttcaaaaagagaccatatgatgagaacgcctaatgatcaccacatgcaaacaaacaaaactgccagtctcatttcccacatttcttacttaagagaagagaagtaaatgaaaggaagaagaaatagatttgtaattaaagatgtggcaaaaaagatagggctgagccagttcaatttagccttcaggtgcagaatacttagagtccaaagaaatgtggagtggacttaattagatgcagttgtctttatcctgaaagtagtgagctaagcctaatttccagcattttgaaagagattcctttttgtttctttccatggtgccctctttaaggcacagagttgctccacaccactgggtggagaaagaaagattgcgaaccctcgaccatccttttgaggctacattctatgttatttggcagatttataaagctatcagtaataacaatgctatgtactgcaagctgcccttgtgttagttaaagggagcatttttaatcgttcggaaattttcgtgacatgtcaagtgcagttgtgaggactgtgtgggtgaacgaaaatgtgtctgtcaagttcagagtcctttagatttaaaaaaaaattatgacttatcaatggtgccgttatagctgtgtcagacaatgggtgtgcccattctcacaattatccttcaaaaaaaatctatgttcaaatgctttaaaaatttatcacacgatacaagagtatgactttgtcagccttctagagttctttttttcttttattttctttcgtattttttccttcaaaaaatcaatgaagacttgatttctgtcaataattgtatcaagggtgaatatactacctgaattttgtgcatgttacattgtagttgtaaccttttctaattcaggatgaatacgagatggttgtgattgtgcagtgtaccaataaagttcgagaaatttgtaa

SEQ ID NO: 162595 - DNA, 6250 bp, Homo sapiens
  Payload ID: 12032
  Gene Symbol: OPCML
  Gene Name: opioid binding protein/cell adhesion molecule-like
  Uniprot ID: Q14982
  ENST ID: ENST00000612177
  CDS Start-End: 1-1038
atgggggtctgtgggtacctgttcctgccctggaagtgcctcgtggtcgtgtctctcaggctgctgttccttgtacccacaggagtgcccgtgcgcagcggagatgccaccttccccaaagctatggacaacgtgacggtccggcagggggagagcgccacccttaggtgtaccatagatgaccgggtaacccgggtggcctggctaaaccgcagcaccatcctctacgctgggaatgacaagtggtccatagaccctcgtgtgatcatcctggtcaatacaccaacccagtacagcatcatgatccaaaatgtggatgtgtatgacgaaggtccgtacacctgctctgtgcagacagacaatcatcccaaaacgtcccgggttcacctaatagtgcaagttcctcctcagatcatgaatatctcctcagacatcactgtgaatgagggaagcagtgtgaccctgctgtgtcttgctattggcagaccagagccaactgtgacatggagacacctgtcagtcaaggaaggccagggctttgtaagtgaggatgagtacctggagatctctgacatcaagcgagaccagtccggggagtacgaatgcagcgcgttgaacgatgtcgctgcgcccgatgtgcggaaagtaaaaatcactgtaaactatcctccctatatctcaaaagccaagaacactggtgtttcagtcggtcagaagggcatcctgagctgtgaagcctctgcagtccccatggctgaattccagtggttcaaggaagaaaccaggttagccactggtctggatggaatgaggattgaaaacaaaggccgcatgtccactctgactttcttcaatgtttcagaaaaggattatgggaactatacttgtgtggccacgaacaagcttgggaacaccaatgccagcatcacattgtatgggcctggagcagtcattgatggtgtaaactcggcctccagagcactggcttgtctctggctatcagggaccctcttagcccacttcttcatcaagttttgataagaaatcctaggtcctctgagcaacgcctgcttctccatatcacagactttaatctacactgcggagagcaaaccagcttgggcttctttttgtttttttctgttattctagatttgttttctttttgtttttgtttatttgtttgtttgcttttatttccagcttgaatgagtggggttgggggcggggtgggcagggttctaccacgtgtaggataatcattcattggtgtgtccaaaaatggggtctgctcctgctaccttgacccttccctttcctctgcttctctcctcatcatcattcccaacaacatcctctgccacacacaacaaaacgtaagtttcatttgggcaaaaattgagcctcacaataaacaccctgaagacacaacttgacttataacatagtgcacagcaagagctacatccaagtgtcctattatctgtgattattttcttaatgacaatgtacatatgcccccatccatgttaattattatctaattccattagggttcacgtcttttctttctgggacactatcctactatatccatatctatagatttcaatatagatgattgtgccatcttctgtagcccctccgctctactcattccttccaccatctgcagagatttgaagtttggggctatgcatgaaacccaacactaaattttgcaagtcaagtaaccaaaaaagggggaggcattttgaagatagaacctctattttaaaaagagaagttcaactcataaacgtgattgataggtggctgatttatttaggttttgtcaagctatctatcaaagtaatggtacagttacccatctactcaaatatctgatttatctcaccatccaattatctacccacctgtcttcctctctagcaatctatttactgtttatcaatctatcaatgtaattgtctaacactcctttctattctctccctactactcactatcaattcatccccatatgaatctctaaccatattgtatctctcccactgtattcatttatacaccatcagcagacattggcatcttcaaaattatctttcaacttctgtgaaagccaacgatctcacaggttaacaaaatacaaaagcaataccctgtgttgtggactctttaaaatctggtatcctatccacccaagggagacactaacagataggccaaagtagcaagctaatgatcagtcactcactattcccagaagagcctgtgttttctaaaacactttcttgggaagcagatcagcctagaaaagttttgattagcactgtggttttccttttgcacttgaaggacaaaggtgccagcctttatgcttctctcaacccttcaagaaagtacatgtcaggaacctatggctggctttccttagcagcaagaacttgagagaaaaacacatctgtctctgcaatgcaaagtgaagagtccacccgcctgagtgggatgacttcagctagagtctcctttctgctccagttctggtttaatctgtttgaaaactatccagtaaaaagctgatggaggccaattacatggcgggtgtattgacaactctggtatttgtttcaggaagctcttctaagctgagggcacttgagcaactgacttaattttcaagcacttgattaacacaacactgcaaacagaagggagaaagtgtcagtgacacagtttcctctgatgcagctgcttctccaatggctttggggaagaacttcaccagctcttcaggttcaaagcagacccagcatacaaacaagagctgagccacctttgctgtcttgtctcctgggacgagaaggactcatccagcaaagttgcctgggattcaaaataaaggcattgcagaccgcacaggtgtgctgcagggactgatccacagagaggatgagaatgcagcatcaatcgcagacctgccctgcctcagttggaaaaccttttcaggccctcagtctaaaaaataaaaaatatgagcaccattgaattctgtgcccttaatgcttaactggtcttcttcctctggtatcagtgtcctctttgtttttgtccatcaaggcacatgagtgtgacctctgccatggggaaacacacacagagatatctatacatatatacatacatacaaacataggctatcttggcacactaaatgctaagcactgtcttaagaggtagagctggtgtgagtgaaattaatgttacattttccagctgtaaacagacatctgcatttcctagtgagctgccaggagccagattcgggaaccgtaactgatgtgccaggaatggtgcattgattcccagttccagggatgatcatgagcaggcgcaaaatcagaattaaaggtcgcacatagacgtttcagatctgtcaccaccttcagcatctggagttgagttggtgtcagatagtgtatgagaattaaatgtgtcatctgagcatgctactgatgataaatttgttactttggagttgaataaatgtgaaggctgtgaagagtggacagtcttggagaacacagtgcttgaaatggacaagctggacctattcctcactccaagacttgttctacaggaaagggtccatgctcctttggccaagatcatcagaacctctcaacccaacaaggctggcttcagggccactatggaaccctgctgttcccccttccaaaggatactaagatgcccctctggtgggtacctatcccagccacgtttcagagggagagaaatgctacagttgatcctcatctgtctggggtaaagacaacaaagtaaatacaacccaaggcaactggggtactcactgggagtgaaaatgacttcttcacaacagacatatttctgcttctgtgtttttgtgtttctttggtggggatggcttcatgggagagtggctgtcacccatcattttgaagcatatagaacaacaaatgcttacacaagacaatatccacacttttccaacttcacacacggagagtacatggagaatgcctacaggctagatttgttcagggtgccagtagtgggcatggggtgggggcaaggcaggacaaaacatacaagtctgagcaagtacatctcttgcaggttttccacatgaaaaggaagccaaataagtcctgttaggagattaggtgagaggaattagcaatgtagggactctgaaacccttccccttcccaaaacagagttcatatgcacttccaccaaagtaatgccaatgaaagtgctcgtgttaaggctgcagccaagcttgtttttcagtagtttaatgtcaagtgcctgatacagtcgactgcaagtctaaacaagcatgtttagtttttctcattcttgctttaattcagggagggggagatgtagagaagtggttgtgaaaacatgtacaggctttatgcagagcactgcgcatggctgttctgctgcaactgtgctccacgaaacagaagaaaaggtaaggtgttgtgtcacaaagaggccccagtctctttcttcttacatccatgcctcttactagatgatacatttacagattgggcagtttgttctcaaaacctgggtgagaagactattcctggactctagcaacttcaaaactgaggctgggtttcagaatctttttctgcatcaattcagtcaatttgccttcaacaaagagaagtcagcaagttctatttatgctgaaagaactattccatgagaaaagcagagaaccccaaagtgggcaggcaaccccgacgagagcttatccctgtggcggcatcaggagtggctgtacattgaattttcaagtgctggttggctgtcgccagcccatggtaggaggggaggaatggcttaagatgaggtaagatctggtggtggggcatctttcctcaattccatactgactttgatcttgagaaagaaaaactggctatgcattacctaaaaccagtccaaaatgaaacagaccaacacacacacaaaagcaaattgtcaatccctttggaattaagggaagcagcataaggtttttctttttggaaaaaatgcatttattttctttttctccaacagcaagaatcttttgttttcattttgcacgtgaccttatcttggaaactcttatacccaattgcctcccctcctattattcagagcttccctgtctttttacttgaagacaaataagtttgagcacttgagtaaaacttcacaggtgtgtaagtaggaaggcaacattttcaaaaagagaccatatgatgagaacgcctaatgatcaccacatgcaaacaaacaaaactgccagtctcatttcccacatttcttacttaagagaagagaagtaaatgaaaggaagaagaaatagatttgtaattaaagatgtggcaaaaaagatagggctgagccagttcaatttagccttcaggtgcagaatacttagagtccaaagaaatgtggagtggacttaattagatgcagttgtctttatcctgaaagtagtgagctaagcctaatttccagcattttgaaagagattcctttttgtttctttccatggtgccctctttaaggcacagagttgctccacaccactgggtggagaaagaaagattgcgaaccctcgaccatccttttgaggctacattctatgttatttggcagatttataaagctatcagtaataacaatgctatgtactgcaagctgcccttgtgttagttaaagggagcatttttaatcgttcggaaattttcgtgacatgtcaagtgcagttgtgaggactgtgtgggtgaacgaaaatgtgtctgtcaagttcagagtcctttagatttaaaaaaaaattatgacttatcaatggtgccgttatagctgtgtcagacaatgggtgtgcccattctcacaattatccttcaaaaaaaatctatgttcaaatgctttaaaaatttatcacacgatacaagagtatgactttgtcagccttctagagttctttttttcttttattttctttcgtattttttccttcaaaaaatcaatgaagacttgatttctgtcaataattgtatcaagggtgaatatactacctgaattttgtgcatgttacattgtagttgtaaccttttctaattcaggatgaatacgagatggttgtgattgtgcagtgtaccaataaagttcgagaaatttgtaa

SEQ ID NO: 162596 - DNA, 2410 bp, Homo sapiens
  Payload ID: 12033
  Gene Symbol: OGFR
  Gene Name: opioid growth factor receptor
  Uniprot ID: Q9NZT2
  ENST ID: ENST00000290291
  CDS Start-End: 26-2059
agcgcgagccccgccgccgccgagcatggacgaccccgactgcgactccacctgggaggaggacgaggaggatgcggaggacgcggaggacgaggactgcgaggacggcgaggccgccggcgcgagggacgcggacgcaggggacgaggacgaggagtcggaggagccgcgggcggcgcggcccagctcgttccagtccagaatgacagggtccagaaactggcgagccacgagggacatgtgtaggtatcggcacaactatccggatctggtggaacgagactgcaatggggacacgccaaacctgagtttctacagaaatgagatccgcttcctgcccaacggctgtttcattgaggacattcttcagaactggacggacaactatgacctccttgaggacaatcactcctacatccagtggctgtttcctctgcgagaaccaggagtgaactggcatgccaagcccctcacgctcagggaggtcgaggtgtttaaaagctcccaggagatccaggagcggcttgtccgggcctacgagctcatgctgggcttctacgggatccggctggaggaccgaggcacgggcacggtgggccgagcacagaactaccagaagcgcttccagaacctgaactggcgcagccacaacaacctccgcatcacacgcatcctcaagtcgctgggtgagctgggcctcgagcacttccaggcgccgctggtccgcttcttcctggaggagacgctggtgcggcgggagctgccgggggtgcggcagagtgccctggactacttcatgttcgccgtgcgctgccgacaccagcgccgccagctggtgcacttcgcctgggagcacttccggccccgctgcaagttcgtctgggggccccaagacaagctgcggaggttcaagcccagctctctgccccatccgctcgagggctccaggaaggtggaggaggaaggaagccccggggaccccgaccacgaggccagcacccagggtcggacctgtgggccagagcatagcaagggtgggggcagggtggacgaggggccccagccacggagcgtggagccccaggatgcgggacccctggagaggagccagggggatgaggcagggggccacggggaagataggccggagcccttaagccccaaagagagcaagaagaggaagctggagctgagccggcgggagcagccgcccacagagccaggccctcagagtgcctcagaggtggagaagatcgctctgaatttggaggggtgtgccctcagccagggcagcctcaggacggggacccaggaagtgggcggtcaggaccctggggaggcagtgcagccctgccgccaacccctgggagccagggtggccgacaaggtgaggaagcggaggaaggtggatgagggtgctggggacagtgctgcggtggccagtggtggtgcccagaccttggcccttgccgggtcccctgccccatcggggcaccccaaggctggacacagtgagaacggggttgaggaggacacagaaggtcgaacggggcccaaagaaggtacccctgggagcccatcggagaccccaggccccagcccagcaggacctgcaggggacgagccagccgagagcccatcggagaccccaggcccccgcccagcaggacctgcaggggacgagccagccgagagcccatcggagaccccaggcccccgcccggcaggacctgcaggggacgagccagccgagagcccatcggagaccccaggccccagcccggcaggacctacaagggatgagccagccgagagcccatcggagaccccaggcccccgcccggcaggacctgcaggggacgagccagccgagagcccatcggagaccccaggcccccgcccggcaggacctgcaggggacgagccagccgagagcccatcggagaccccaggccccagcccggcaggacctacaagggatgagccagccaaggcgggggaggcagcagagttgcaggacgcagaggtggagtcttctgccaagtctgggaagccttaaggaaaggagtgcccgtcggcgtcttggtcctcctgtccctgctgcaggggctggggcctccggagctgctgcgggctcccctcaggctctgcttcgtgacccgtgacccatgacccacagtgctggcctcctgtggggccactatagcagccaccagaagccgcgaggccctcagggaagcccaaggcctgcagaagcctcctggcctggctgtgtcttccccacccagctctcccctgcgcccctgtctttgtaaattgacccttctggagtggggggcggcgggcagggctgcttttcttagtctgataccaagcaaggccttttctgaataaattcatttgactttga

SEQ ID NO: 162597 - DNA, 4506 bp, Homo sapiens
  Payload ID: 12033
  Gene Symbol: OGFR
  Gene Name: opioid growth factor receptor
  ENST ID: ENST00000370461
  CDS Start-End: 2278-4155
actggagttcctcaggccgctctcctgaagcggtgctcagaggccctgaccatcctgccaggcgcccgtgacccctgacctcttccctctgcctcctgctgtggcttctgtccacaagcccctccccttcccctttggacccctcaggcctccccagctgcctgcgctggaccctggcggggctgtttcactttttcctgggcagtgtcatgtatgcacctgtgggctgactgtgtggccacatccagtcaggacccagcctccagaactgacccagggaggctcccgctggccccaggaaggagaagtagaaactgatgatcaggcggggcgagagaaccacaccagcggccctgttgagaaatcaggccgagaggtcggtggcggtggctcaggcctgtaatcccagcactttcggaggcctgggcagtcggatcaccagaggtcaggagtccaagattagcctggccaacatggtgaaactgttgtctctactaaaaatacaacattagccaggcgtgatgggcacctgtaatcccagttcctccagagattgaagcaggagaatcgcttaaacctgggaggtggaggttgcagtgagtggagattgcctgggaggtggaggttgcagtgagtggagattgcctgggaggtggagattgcatgaagctccatctcgaggggaaaaaaataagaaagaaaaatcaggcagagaggcaacgccaggtcccagctggagctcagcggggagccaggggatacagtggctgaccgggcctcctaaccccccttctagcactcccccaggatcctgggtcccaattgttgccctggacaaatacgcccattcctgccctacccaccgagtgaggctcagccccaggccccccaccctcatcacaaggtcagggctgtgtcccaccatcctcatcactaggtacttccggccctttgctcagccccatgatgcttggcctgcagagatgggggctgaagggcttggggcatcaaggggacctgacatcttgctgagaagccatcactagacagggctggaggctggagactcagggcctgccctcaccgtggccagtgaggcgtggggttgggcagggaaggggcattcattcattagaccctgccagaagcacctgggtccccttctggggctacaggtggtgaggccactgcccccaagaacacagcctggtgactttagtgtacaaagcagggggagtctccaggggcacagaacagaggctaaagccagggtggaggtggccagcaggcctaggaggaggagagggtcagggccacaccccaggggaggtgcatgtcagccaggggccaccctaaggtggaagccaggagtcccaaaggggcctagagaaggagcagccccccacctggctaccgcagccctctctggttctgtgcagggtattgggatgcgttactgaggcccaaatctgccccactgggaacccccaaaaaagagccagggcaggagaatgagagggaggagccatgaaacccccgccctttaaagacagctctgtggcagctggcccaggccctgcagccctcaccacgttgggactcacttgggggtctcccatgggggtcctaatcccatctcttttcttcccagtccagaatgacagggtccagaaactggcgagccacgagggacatgtgtaggtatcggcacaactatccggtacgtacctgcccctgccccgggacacagaaccctcccgccagctgctcttctcaggcagaatgtcccaggttctactggaaggctggcctggcttgctgtgccagggccacagttctgggcaggaccctgcctggggcacagcctggtatagattcagagccctgcccttcccctctcgcgggagaccgggggcatccccctacttttctgagcttcagcacaccgtcgccttgcaaacatggccatagtgccagcctcgtgatgcacacgtgtggggtccgtgataccgcccacacagcaccccacccccatgccagccctgtctcctgcaggttgtcctcagccattaccctccacacccctgaatcacggaaacccctgtgctgccttcagggtgctgaggaggggacctgccaggcctggcctggctggcgaaatggggaaggggggtccctggggcttggaggcagctgctgtcctctgaatggcccccacctgcagagtgaggagccaggcgggctcttggggtattgggccagcctggaggtttgcagatgcgcctccccgaaagacacggagggccccagggcagcttgtgtctgatggatccctgctgtcccctttctctggctcttcaggatctggtggaacgagactgcaatggggacacgccaaacctgagtttctacagaaatgagatccgcttcctgcccaacggctgtttcattgaggacattcttcagaactggacggacaactatgacctccttgaggacaatcactcctacatccagtggctgtttcctctgcgagaaccaggagtgaactggcatgccaagcccctcacgctcagggaggtcgaggtgtttaaaagctcccaggagatccaggagcggcttgtccgggcctacgagctcatgctgggcttctacgggatccggctggaggaccgaggcacgggcacggtgggccgagcacagaactaccagaagcgcttccagaacctgaactggcgcagccacaacaacctccgcatcacacgcatcctcaagtcgctgggtgagctgggcctcgagcacttccaggcgccgctggtccgcttcttcctggaggagacgctggtgcggcgggagctgccgggggtgcggcagagtgccctggactacttcatgttcgccgtgcgctgccgacaccagcgccgccagctggtgcacttcgcctgggagcacttccggccccgctgcaagttcgtctgggggccccaagacaagctgcggaggttcaagcccagctctctgccccatccgctcgagggctccaggaaggtggaggaggaaggaagccccggggaccccgaccacgaggccagcacccagggtcggacctgtgggccagagcatagcaagggtgggggcagggtggacgaggggccccagccacggagcgtggagccccaggatgcgggacccctggagaggagccagggggatgaggcagggggccacggggaagataggccggagcccttaagccccaaagagagcaagaagaggaagctggagctgagccggcgggagcagccgcccacagagccaggccctcagagtgcctcagaggtggagaagatcgctctgaatttggaggggtgtgccctcagccagggcagcctcaggacggggacccaggaagtgggcggtcaggaccctggggaggcagtgcagccctgccgccaacccctgggagccagggtggccgacaaggtgaggaagcggaggaaggtggatgagggtgctggggacagtgctgcggtggccagtggtggtgcccagaccttggcccttgccgggtcccctgccccatcggggcaccccaaggctggacacagtgagaacggggttgaggaggacacagaaggtcgaacggggcccaaagaaggtacccctgggagcccatcggagaccccaggccccagcccagcaggacctgcaggggacgagccagccgagagcccatcggagaccccaggcccccgcccagcaggacctgcaggggacgagccagccgagagcccatcggagaccccaggcccccgcccggcaggacctgcaggggacgagccagccgagagcccatcggagaccccaggccccagcccggcaggacctacaagggatgagccagccgagagcccatcggagaccccaggcccccgcccggcaggacctgcaggggacgagccagccgagagcccatcggagaccccaggcccccgcccggcaggacctgcaggggacgagccagccgagagcccatcggagaccccaggccccagcccggcaggacctacaagggatgagccagccaaggcgggggaggcagcagagttgcaggacgcagaggtggagtcttctgccaagtctgggaagccttaaggaaaggagtgcccgtcggcgtcttggtcctcctgtccctgctgcaggggctggggcctccggagctgctgcgggctcccctcaggctctgcttcgtgacccgtgacccatgacccacagtgctggcctcctgtggggccactatagcagccaccagaagccgcgaggccctcagggaagcccaaggcctgcagaagcctcctggcctggctgtgtcttccccacccagctctcccctgcgcccctgtctttgtaaattgacccttctggagtggggggcggcgggcagggctgcttttcttagtctgataccaagcaaggccttttctgaataaattcatttgactttga

SEQ ID NO: 162598 - DNA, 553 bp, Homo sapiens
  Payload ID: 12033
  Gene Symbol: OGFR
  Gene Name: opioid growth factor receptor
  ENST ID: ENST00000450048
  CDS Start-End: 271-553
agaaggagcagccccccacctggctaccgcagccctctctggttctgtgcagggtattgggatgcgttactgaggcccaaatctgccccactgggaacccccaaaaaagagccagggcaggagaatgagagggaggagccatgaaacccccgccctttaaagacagctctgtggcagctggcccaggccctgcagccctcaccacgttgggactcacttgggggtctcccatgggggtcctaatcccatctcttttcttcccagtccagaatgacagggtccagaaactggcgagccacgagggacatgtgtaggtatcggcacaactatccggatctggtggaacgagactgcaatggggacacgccaaacctgagtttctacagaaatgagatccgcttcctgcccaacggctgtttcattgaggacattcttcagaactggacggacaactatgacctccttgaggacaatcactcctacatccagtggctgtttcctctgcgagaaccaggagtgaactggcatgccaagcccctcacgctcagggagg

SEQ ID NO: 162599 - DNA, 1194 bp, Homo sapiens
  Payload ID: 12033
  Gene Symbol: OGFR
  Gene Name: opioid growth factor receptor
  ENST ID: ENST00000621591
  CDS Start-End: 8-1180
gccgagcatggacgaccccgactgcgactccacctgggaggaggacgaggaggatgcggaggacgcggaggacgaggactgcgaggacggcgaggccgccggcgcgagggacgcggacgcaggggacgaggacgaggagtcggaggagccgcgggcggcgcggcccagctcgttccagtccagaatgacagggtccagaaactggcgagccacgagggacatgtgtaggtatcggcacaactatccggatctggtggaacgagactgcaatggggacacgccaaacctgagtttctacagaaatgagatccgcttcctgcccaacggctgtttcattgaggacattcttcagaactggacggacaactatgacctccttgaggacaatcactcctacatccagtggctgtttcctctgcgagaaccaggagtgaactggcatgccaagcccctcacgctcagggaggtcgaggtgtttaaaagctcccaggagatccaggagcggcttgtccgggcctacgagctcatgctgggcttctacgggatccggctggaggaccgaggcacgggcacggtgggccgagcacagaactaccagaagcgcttccagaacctgaactggcgcagccacaacaacctccgcatcacacgcatcctcaagtcgctgggtgagctgggcctcgagcacttccaggcgccgctggtccgcttcttcctggaggagacgctggtgcggcgggagctgccgggggtgcggcagagtgccctggactacttcatgttcgccgtgcgctgccgacaccagcgccgccagctggtgcacttcgcctgggagcacttccggccccgctgcaagttcgtctgggggccccaagacaagctgcggaggttcaagcccagctctctgccccatccgctcgagggctccaggaaggtggaggaggaaggacctgcaggggacgagccagccgagagcccatcggagaccccaggccccagcccggcaggacctacaagggatgagccagccaaggcgggggaggcagaagcctccggcctggctgtgtcttcccacccagctctcccctgcgcccctgtctttgtaaatcccttctggagtggggggcggcgggcagggctgcttcttagtctgataccaagcaaggccttttctgaataaattcatttgacttt

SEQ ID NO: 162600 - DNA, 8391 bp, Homo sapiens
  Payload ID: 12034
  Gene Symbol: OGFRL1
  Gene Name: opioid growth factor receptor-like 1
  Uniprot ID: Q5TC84
  ENST ID: ENST00000370435
  CDS Start-End: 135-1490
gctgaggcagtgcggggcgggcgcgcctaggctgccgcccagcgccctcgccgcggccatgcccgggccctagagcgcctgccgcagcttgcgccccgcagccccgcagccccgcgcccgccgccgcctcttcaatgggcaacctgctcggcggggtcagcttccgcgagcccaccaccgtggaggactgcgactccacctggcagaccgactcggagcccgagcccgaagaaccagggccgggcggcggcagcgagggcccggggcaggagtccgagcagcccgcgcagcccccggagcaagccggcgggcggcccggcgccagccccgcgccggacgaggacgccgaggcggcgggcgccgagcagggtggtgattccactgaagcaactgccaaaccaaagagaagtttttatgctgccagggatttgtacaagtaccgacaccagtacccaaacttcaaagatatccgatatcaaaatgacttgagcaatcttcgtttttataagaataaaattccattcaagccagatggtgtttacattgaagaagttctaagtaaatggaaaggagattatgaaaaactggagcacaaccacacttacattcaatggcttttccccctgagagaacaaggcttgaacttctatgccaaagaactaactacatatgaaattgaggaattcaaaaaaacaaaagaagcaattagaagattcctcctggcttataaaatgatgctagaattttttggaataaaactgactgataaaactggaaatgttgctcgggctgttaactggcaggaaagatttcagcatctgaatgagtcccagcacaactatttaagaatcactcgtattcttaaaagccttggtgagcttggatatgaaagttttaaatctcctcttgtaaaatttattcttcatgaagctcttgtggagaatactattcccaatattaagcagagtgctctagagtattttgtttatacaattagagacagaagagaaaggagaaagctcctgcggttcgcccagaaacactacacgccttcagagaactttatctggggaccgcctcgaaaagaacagtcggagggaagcaaagcccagaaaatgtcttcccctctcgcctccagtcataacagtcaaacttctatgcacaaaaaagccaaggactccaaaaattcctcctcagctgttcatttaaatagcaaaacagctgaagacaaaaaagtggcaccaaaagagcctgtggaagagacagacaggcccagcccagagcccagcaatgaagctgccaagccaagaaatacagagaaggacagtaatgctgagaacatgaattctcaacctgagaaaacagttactactcccacagaaaaaaaggagagtgtatctcctgagaataacgaagaaggtggaaatgataaccaagacaatgaaaatcctggaaatacaaattgccatgatgttgtactagtacagtgaattatcagaaaacccagaagccagtttaggctagagaggaaaaaactactgtatcatttatcctaaagaacagagatgaggtcaatttcaaattttagccatctgtttgtgatttctgtcataagcattttgttgtttgtttttttattttggatgacaatgaattgaatatctaataaggagatttaagataagacccaataaatgaatgtattctgtaatgcttttaggatgtgaattttcaaattttgtatataataattactttgagaatattttcagagtatctagaaattaccatgtagtatttggtatacaaaatacattcttttgagacattatagtctacatgaaggaaatcaagaggataatttcattggattgctacacttttacctgatttatggctttattttactttattttattttattattattttttgagacggagtctctgttgcccaggctggagtgcagtggcatgatctcggctcactgcaacctctgcctcctggactcaaacgattctcctgcctcagcctcctgagtagctgggattacaggcgtgtgccaccacgcctggctaatttttgtatttttagtagagacggggtttcaccatgttggtcaggctggtctcaaactcctgacctcatgatccacccgcctcggcctcccaaagtgctgggattacaggcatgagccaccatgtctggctgattaattttttttttaactgtaagagtttgatcttttcaaatgtgttcagaaactaatttggattctttgattctagtatctcaacgtgtttatttttagattctgataagtgaaatggatgtccttgtggagctctggcctccccagcttatctatcagtcctgctgtcctcacctccttgcctctttccatgcttacccttaagccaccatctttctcagctagcgtgtgtgtttctagtgtagttggccctccatattcaggggtccagcatctgtggattcaaccaaccgcagattgaaaatatttgttggaaaaaatggatggttacatctctactaaatatgtgcagtccttttatttgtcattattctctaaacaatacagtataacaactattgacatagcatttatattgtatgtattaggtattgtaagtaatttagagatgatttaaagtattttacataagggacttgagcattcctagattttggtaactgcagagggtcctggaaccaaccccctacagatatcaagggaccactatacacattaggatgatctatattgaaatctacatggaacagagtgggacttctaattgtatgacttcaagattttgctttgtttaaattaataactgttttcagaattaagtgcttaaaaacaaatttgattgaaaagttcaagacaagaattttgctctctatggctgttccatataaatttgatggttgattctgaatgtaaatgactgaagaattaaaaaataagaaattcctttttaaaaggcatgcctcttgcactgtgaacaagacagtagtcccttaaaccatgaatatgtcagtgttctatggattacgaaattagtaatgttgcttagcccaaacgtgttttttaaaaagtatagttttgtacatctctaagttatcaaacttcaaaattgagaacaaatttaaaagtccatatatgcaactctagtaagcacttaataggttacatagcactggttaagaacaattaattttgtttctatattattactaattattattacaaatcaaaaaacactgtgataagaacttcaaagcatatatacaaatatagttaaagcaatgaatagatgaaacatgtctactttatttcatttagaaaggaattaacttttttgttaggcttttaagaaaagttctattcattttaatcccctagggaatttgtaatatgtcctacttcatatcatcttctgttgcctctattgatccacattttctgcagtggatttcttgaaaagaatcacacttatagtatgcctctagaaatatgattttactgctttgaagtttacatgaaacatgccagttgcttaactctaattttttatatgaatctcagtagcacttttgttgtacattgtgttccaataagtatagtatggaacactttctcatttttagttcccataatatgccagtttttgctttcctagtgttctgtgagtattaggatttggcaatctgcttttgcatttcaatttctgttttacatgcaagaaaaacatggacactcttacgtggtgcttgtagctgtgtctccgtagagctcagtaaatagttctacagggtttagaggatgagaagcgattgtcaaattaggctgaattgtagaacacaaataatttaattcaaaataacttaccaattttatatacatgataaagtattcagacaactttctaaatgcataatagtaaaagattgtgaccagatattatgatattaataaagttaccagatactaaaatcaatgaatgtaatttgaattacttagaaattgtatattagagcccttatgagtaaaaacatttcatttagcaacttaacttttagaatattcttcctacttagggattttgattagattgtaacattaaattcgagaatatttagtctcaagagaaacacttcctggcatccatcttaaatagtggccttttcccactatggtgtttttaaatgcatattcatatataatagtatgtttcttacatttaatccctaaataacttagataatcattcagtggagaacaagtaaaaggatatcattccttttggagataaacattgagtgtctagaatttttttctattaatgctttgtatattagttttttaaataagatctatagatatgtatttatgtgtgtcttatatatgaaacagtgctctgggtttgactcctatgttttgtaattttaaaaactacgatatgcttgcagaaattcattgagaagctgttataaaaaatgcagtgaagcatgaccaaatagctaaaaatattactgaatctttacaaatatataatctttattgttgtactgtggagtgcaaggatactaaatattggctattgataaaatactaacttgcatttcatggcaaatagatgttatatcgcttgattagtctagaacatttctaatattttgtgctttcatatatcaaaggagattatgtgaaactatttttaaatactgtaaagtgacatatagttataagatatatttctgtacagtagagaaagagtttataacatgaagaatattgtaccattatacattttcattctcgatctcataagaaattcaaaagaataatgatagaggtgaaaatatgtttactttctctaaatcaagcctagttgtcaactcaaaaattatgttgcatagttttattttgaatttaggttttgggactacttttttccagcttcaatgagaaaataaaatctacaactcaggagttactagagaagttctaagtatttttttgctaagtagtaaaaatataaacatatgaaaatgccataatgcctgtcatagtcattgtttcatattttgtcatataaaatcacctaccctgcttctagttttatactttaatctgagtgaaagtatgatgtggtggaaagaaaaaacagtacagtattacatctgagttagtctttgaaaaatcatagtagtaaatgaacctcaacactgagtggtcaaaaattgggttaaccaatggggggagaatatttggttaattgttttaatattaaattttcaagtttataatagagttatggttgagtagtcatccatactgagtaatcacgcattttttaaactataattgaggctcttctaaagctttgttttctaatctaagatacaaaggatattcttgatcttgcttgattgtaactacatctaccagtctttaatgtctgtttggggtgagtggcgatcctctgttgtaggaatgtttttgaagatttctattttgttttccacttaggaaattcccctctctcatttggggtatatgcgttgagtataaggtaggctgtatttagacacactagaatcattaaatgtaggtgaagttgtagagaaaaatggcctgggtcaatgtaggatctagaaaattaggagtgtacatttgctggcttctttttgagttttgtactgtttattacaggaacatatttgtgtggctaatctctagggtgacagtgagtactaccctgctccttctgcattctagttatccaacacacccagcagattgtgttcagggacagaatgtgtttttagaaatcccttattattgaaatgaataataatatagctataaatatgaatgtctggaggtatccagatgtgccttaacaaatgtaaatggttttcattcagaagtttacatttttattacattataaaatctcatcattgggaactttctaaaccatgaatatcagttcttttaatgaaatttaggtggtgctttatcattttggagaagttgctgtttgggacaatagcatcagtttatcaagaagtgtactcaccatgatattcaacaatgtgttacatttgacaaaacgtgtttagagtaagaaagactaactatactgtctgttatatttatttatgctttttgtagtttagctacatactataattttcattttaaacgttccttagttactacaaataatatttatgttttgcttcttcttagatgtaggcggatgcagaaatagaattatgttagagaaattattaaaagtttaattccagtaggcagttggagaaatctgaaactaatttgaaaaacttttatgctgtagtctcattagaatcattttaaaagcactgttcttgcatttttcctagactacagagagtgttctttgtcattttttttcctattctgttgtgaagtttattgtttcagttatttgagggaaataacctcttaatatgtttattttcctgaactaaagttttcatgtagagaatacaattaaatgttttgtgttatgacccaaactggctggaagtagagttcagagagggagaagggacaagaatcagtgtgggcatctcaggaaagtggcgccagtgctgggctccagccttctccactggcatgatgggtcctcagattctcctctggataatgagggtgttgggcactgtgagctctgacttctggggaggataggccatcatggactccatacacaattttgatgggtatcagttctcataaaatacctgctacaatttatttattttgtagttgtttagaaaactgtgagcagttgggcattagtaaattgtagttatatcttaacgatcttgggaatcattgaaatatgagtttttttccctcactcctatttatttaattaaaaaattagggaagttgttcattcacagctgtatattaatataaaatctctttataaaatgattcagagaaaaggcagtagtggtcacttactgtgctaaaatacctttttctctaaaaatatttaagctttagggtttgtcatagttttactttttaaattatactttgtgtaacaatttacgttaactagaaaaattagatatataataagttttggtactaagaaacatttacattctacactcattagtcaaatgaacttttctttcccagtgctaacagattttgtttcatgtgaagaaaaataaaatacaaatgaaataaaagtctagaaacagcaacaggaaactcaccacagaaataaagacataacccttgataagtttgtgtaagtgccagaattattggaagcaggtgacgaatgattaagaaaagctttattgtggggacatgctttaagaatcagctctgtatttgtgccaaggagatcaggtattggtgtgcaaacagatcccattaatactctgatttgaaccatgaattccacctactctgcgttgaagccctccagtagactgatagatgtaatcaaatgatcagctaccaagtttaattcctttgcctgtgtgtagcaacagttggtagttttacaagttaagttgatggtctggctgcagataagagaaagactcagtgataggtggtttgtgagtgaagtaacttccacactgtcaagagttgacagcatattaattgtgtggcattataattgtgagaaacaaatgagagcaaaatgttaggtcctttgacaagcattttcctcctgtttttaaaaagggctttaagttgtttcctatgtaaggtaatctttcttttttagtattatctaagaaggatggtagattatgtcattttggaaactattgtgtcccttgtattttaaatatttcaggaaaatgcctacgattgttacaaagatgtgtgttttacttataacataagctctgattctccagtggccactgggccttctctgtgctctgtattcaactgcagtatgaattacagaatgctgtgcatgttcgttagtaccaataccatgtgtatgtggtagaagttgtaaccagtttctggatctgtatggtactataaaatacttattttataattctgtaaccgtatggcagtgttatgccaaaaatgtataaagagcaatagtttttgttgcttactgctgtattttaaaatattgtttctaaaataatagagttagagttccttttgagtaattatttttaagaactattgccaaatatacatcctgtaaaactaataaaagccactccatcttagataacattttagcattgtgctagagtacattatggtgattttgcacgattaaaatatttttaaagaactagaaaaaa

SEQ ID NO: 162601 - DNA, 9345 bp, Homo sapiens
  Payload ID: 12035
  Gene Symbol: OPRD1
  Gene Name: opioid receptor, delta 1
  Uniprot ID: P41143
  ENST ID: ENST00000234961
  CDS Start-End: 243-1361
ccgaggagcctgcggctgctcctggctcacagcgctccgggcgaggagagcgggcggacgccgggggctgggccggtgcgggcggcgaggcaggcggacgaggcgcagagacagcggggcggccggggcgcggcagccggcggcgtcggggccgcggcctctgccttgccgctcccctcgcgtcggatccccgcgcccagggcgcacggtggagagggacgcggcggagccggccggcagccatggaaccggccccctccgccggcgccgagctgcagcccccgctcttcgccaacgcctcggacgcctaccctagcgcctgccccagcgctggcgccaatgcgtcggggccgccaggcgcgcggagcgcctcgtccctcgccctggcaatcgccatcaccgcgctctactcggccgtgtgcgccgtggggctgctgggcaacgtgcttgtcatgttcggcatcgtccggtacactaagatgaagacggccaccaacatctacatcttcaacctggccttagccgatgcgctggccaccagcacgctgcctttccagagtgccaagtacctgatggagacgtggcccttcggcgagctgctctgcaaggctgtgctctccatcgactactacaatatgttcaccagcatcttcacgctcaccatgatgagtgttgaccgctacatcgctgtctgccaccctgtcaaggccctggacttccgcacgcctgccaaggccaagctgatcaacatctgtatctgggtcctggcctcaggcgttggcgtgcccatcatggtcatggctgtgacccgtccccgggacggggcagtggtgtgcatgctccagttccccagccccagctggtactgggacacggtgaccaagatctgcgtgttcctcttcgccttcgtggtgcccatcctcatcatcaccgtgtgctatggcctcatgctgctgcgcctgcgcagtgtgcgcctgctgtcgggctccaaggagaaggaccgcagcctgcggcgcatcacgcgcatggtgctggtggttgtgggcgccttcgtggtgtgttgggcgcccatccacatcttcgtcatcgtctggacgctggtggacatcgaccggcgcgacccgctggtggtggctgcgctgcacctgtgcatcgcgctgggctacgccaatagcagcctcaaccccgtgctctacgctttcctcgacgagaacttcaagcgctgcttccgccagctctgccgcaagccctgcggccgcccagaccccagcagcttcagccgcgcccgcgaagccacggcccgcgagcgtgtcaccgcctgcaccccgtccgatggtcccggcggtggcgctgccgcctgaccaggccatccggcccccagagcgcccctccctagtgacccggaggccacatgagtcccagtgggaggcgcgagccatgatgtggagtggggcagtagaaggtcggaggcttgggaccgccagatggggcctctgtttcggagacgggaccgggccgctagatgggcatggggtgggcctctggtttggggcgaggcagaggacagatcaatggcgcagtgcctctggtctgggtgccccgtccacggctctaggtggggcgggaaagccagtgactccaggagaggagcgggacctgtggctctacaactgagtccttaaacagggcatctccaggaaggcggggcttcaaccttgagacagcttcggtttctaacttggagccggactttcggagttgggggtccgggcccaggacccagaaagggcagtggtggggacagttgcttgaaaactgagctgcaagactgggcctctgtgtagtagggaggagcctcctgtgaggggagacccagagacaggacagctgggtgtggctacagctgaagatttggtcaccagatagggcgcctgtgcaaagggcctgtggcctcatctttggatacgggatacagtcccagccctgagttctagcaaggggcaaggctcgctgaggtccaggtccgacttgacacctttataaatagaatataaaagactgaggggccaggcgtggtggctcaagcctgtaatcccagcactttgggaggccgaggcaggtggatggacatgagcccaggagttcgagactagtctgggcaacatgggagaccctgtcgctacaaaaaatacaaaattagccaggcatggtggtgtgtacctgcaggcctagctccttggaaggtgagaggatcacttgatcccaggagtttgaagctgcagtgagctatggtggtgccactgcactccagcctgggggacagagtaagactctgtctctcaaaaaggagagagagggagaatgagggaagaagagataggaagagagagaaacagtataccttttatctctttgacaggcatgtatttccttggaatgggcaggaatccctcagaatcggtggccacagtggggcttgggacaggacagcagagcggggggcagccactccaggatagggtaataagacaggaccttggttggagtagggtccccagaactgagtactaatgggggcccagaggcttgggaaggagaaggcttccaaaaccagttcgaaaacccagacccggagtggacctccgtgccaaggggtggtggtgggtgggtggaggaagaggtgggctcctgcttcaaggttaggtcttccagtggaaggtggatgctttctgtgagtccccagggccctagtttctctggcccagatactggaggacagaggaccacctacttagatcccgtagatggtaagtggtgcctgggactcttgagggcggggggcggggtatgagaagcatcagttcgcacttggtgctgggtcctgggccctgataagaacctggatgaaatcctcttccattctcccaacatctggctgcatccatgtgtctggtgtcaatgactccagtgaactggaactgcccatatggggacctgaccttgaaggaactggggggagaagcttttgtaactgcaatgccggcatcagtgtgtgtccccctctgcctttccccccaggctccccaggtcccccacctgctccagcccagctgtccccttcacgctgctgagagtgatatccacctggagttgggtgtagaagtttttcttttcattggttcggcattttattcaggcactcctggatctttgcttcccagaatatcagtgtctgtccttgttctctgtacctcccccgtgcctcatctcctctccctccgctgctgtcccctccctcaccaacactgcctcagtaatgcacccctgactccctattgaagcagtgtgctgacatccttgtaaaaacaaatttaattttcttccttttttgggacagatggaaagaaattgacgtctttgtctcaaacaaaagaaaaaagaaaaagaaacaatatacttcttttccctttgacagccatgtctttggaacaaaagctgggaggctgtcactccagcagggactgaatagcatgcagggggctggggacttaggcaccaagaggggctttgggcacattagggggaagggatgctctcagagggcaaagcacagcccccttctcagggtgaggctcccagcagccccagacccggggatgtgcctcctttgggaaatggctaccccgggtcctggaaagatgtggggccatgcccagcactcacatccagcctgccaagccattgtgacctggggtcccaagccacctagatcactctcactaccttgtgaccacagagacccctgtgtctgagggtgggaggtcgtcagcatggcaggagacacttctcctcatcaggggtcctcctgtgaatgctttgggggtatggcagaaaaagggacaatctaggaactggggaagactcctgaaggaggtgacattggagccaggctgtttactctccctgcaggacctgtgtcccctcccaggataggcctgtttcaaggctgcttgaagcccactcactgccatctcctgtgtctgtaacagatctggctgttttttgccccttctgatatgtaaatctgtcctgaggtcagcagggcccgggtccggaccacgtgtgtttaaggtagtgcaaacttgtattgaaatctacttcatgccaagcatgcactctgggcatcaggactcggaatgagtcagccttggccctgccctcagaaagcctgagccagtgttgggagataaagcatcaacagatgattgcacctcagtgtgatgagtgcggtgacagggagccccagggagggtgtcacagggaagtgccttttctagcttttcactaaaacacatgtttgtcgcagttctgtaagaggtggaaaagggtcggggaccctgaaggatgaataggagttggccaccaaaaagaggaaatagcgtgtgcggaggcatggggatgtttaaatgcttggcaaacccaacaagttgggtgcagctggagcatggggcttaactaagctcttctgtgtgccaggctctctgccaggtgtcttgtgtgcatcagcccacctgatcctcaggacagcctggtgaggaagtagtgttatccccattgaggacaaagagagctgaggctgagagaggtcaggctacttgctcctaagtcacagggcctgttcgtagtggcagaacttgggtccctggaattccagggtccatgtttccagttaattccaggcatcagtgaagtagaaaggccttagaagctggaaccccagaatgaggttttgaagacctaaaaccaaatggaaaaatctaaaggaaacgagcaattttccatgaacttttgttcctcctgaagctctccaaatcttcacgtttcagaatgtactgtgcatggtgcattttaaagctctaaattgacagtgtaattctagatcgtcacagggttctcaaaactgcagagtaggtctgtttcccccaaaatttccatttatctccctccaggaggagggagggaagtttttgcccctgatttcaaaatgtcctactgtttcagatctcttcttcttcatcatcttttttttttttttttcagccagtgtcttgctctgttgcccagtctggagtgcaagtgcagtggtgcagtcatagctcactgcagtctcaaactcctgggctcaagtgatcttcccacctcagcctcctgagaatctgggacgacgggtgtgtgacaccatgcccagcaattttatttttatttttattcatttattttgtttgggtttttttttttctgagacagggtctccctctgtcgcataggctggagtgcagtggcaccatctcggctcattgcaacctccgcctcctgggttcaagtcatcctcccgcctcagcctcctgagtagctgggattacaggtgtgcaccaccataacccagctaatatttttatttttagtagagacggggtttcaccatttggccaaactggtctcgaactcctgacctcaggggatctgcccgcctcagcttcccaaagtgctgggattacaggcgtgagccaccaagcccggccaatttttttttttttcaatagagaccagagtgtctctgtgttgcccagactggtcttgaacttctgtcctcaagcaattctcctgccttggcctcccaaagtactgggtttacaggtgtgagccactgtgcccagctctcatacctcgtcttgatgcagtagaagtagtggttaagcctggaatcagatcttggttttccctctctgagcctcagtttcctcatctgtagagtagacttccttcacgggtggttgtgaggatttaatgtatgtatagggataaggcccagaacgtaagtaaactctaagtacatggtaagtggcagtcactgcttacaagtggagccagggttcagggtcagagctagagacctacagggaagagtaggtgagctgtcggggctagtgatggagagagagaagagactggagatccagcttggggatccccttgcttcctggcccaggagccaccatggagagtgagaagctgccagagaagcaggaggaggatggagagaatgtgctaccatggaaactggaggaggagggcgttcccaggaggagggagtgatggataatgtcaagtgtcataagagaggatgcgagtagggagggcaggagggtgatgggagctctccaatttagttttttacatggcccaggcagcccccaagcctggatcaaatcccagctctcaagctaactggctgtgtgacctagacaagggatttgccttctctgagcttcagtttccttctagagttgagatgtgggaattggtccatctctaatacgatcatcagcctcacttaataagagtcctagctttgccgaattcttggccacgtgctagcagtgtgatcttaggcaagtcacttcacctccacgagagcactctctgaaagctagagatatggtaagcaaagtgccaccaaagtgcctggcacatagtggggcctcgatacaggcttattctctgataattacacgtgtgccagaggcagctgctctaaggaggcttgctgggcttggaattagaaatgctcctcaagggctgggtgcagtggctcacgcctgtaatcctagcactttgggaggccaaggcgggtggatcatgaggtcaggagttcaacaccagcctgaccaacatggtgaaaccctgtctgtactaaaaacacaaaaattagccaggcgtggtggcgtgcacctgtaatcccagctactcaggaggctgaggcgggagaatcgcctgaacccaggaagcagaggttacagtgagccaagatcttgccactgtactccagcctgggcgacagagcgagactctgtctgaaaaaaaaaaaaaattaaaaagaaatgctcctcaagttggagagggcccactagcatcctgagaggacttggaagaacaacagtccaggctgggcacctgctgggtctctgtccaaaggccagccctctctttgtgtcagccgcagatccctcacctagggcatgactactggctgccagctcccactaacacctgctgcagatccagactgaagccggccccagcggccccaaagcccctaggaagtgaccaccccccatccctggcacccagatcctggcccctgcactcacacacaaaacacatacagatgcctctctttcatcatgtatttattcctttatttctgggagccgggaggagtgacgggagcaaatcaggacctggccgccccacgctgagcttgcagatattgagagttgggtgacagatggctgtgtggttcaggctgcaggcagcttgggaattcaaaatggggcttagagaggagctggagggggccctcgaggtggacgtagtgatgcagtagggcatggcactgcgaggttgcccgggttctagtcccagcaccatcaccggggatgagccgtttcagagtgtggcactctgtcacactccatttcattgagaggccactgagacattatcaatgggtaatgtacagcacttccatggcataactcatttaatcttcacagcatgatgatgaggtaggcatagtatcattacctccattttacagatggggaaactgaggctcagagaagggaatgacttgcccaagaccacatggcttctcagtgattggctcagctaggatcccacctttggtccttcaagtccacttcctctgctttcctcttcctgcaccctgagaggaaatgctctgagtataccgagggtcctcaggagactctcacatccagctcacagtcacaggctgagcattccctgtgctgggttctgtacctcatcatgttggcagcagaggcacgtgccagctgctcaaaaaactgctgtaaccttggtagatccctctccccatccatttcttccttgccttggaagtcctgcttgtttgataattttctgactgactgccatgttgttgccttgtgaccttgggcatgtcatttcactctgagccatttctcagtcatggatgacagcacttagctgatgagaagttgagaagattcagaaagaggctatgagtgaaggaccttgtctgttttggtcatgaaagtgttcccaggaaatgcaaatggacacacagtagttatctactgagctaatgaacaatgtccctggtgcatagtaagtgcccaataaaatgcagcttttttcatattatctaatgttttaggccatgcctgcaccaacccatgcttctttttttttttctttctttctttctttttttttttttaagacagagtctcactctgtcacccaggctgaagtgcaatggcgagatctcggctcactgcaacctccgccgcccgggttcaagcaattctcctgcctcagcctgctgagtagctgggattacaggcacgtgcccggctaattttgtatttttagtagagacggggtttcgccgtgttggccaggctggtctcgaactcctgacctcaactgatccacccacctcggcctcccaaagtgctaggattacaggcatgagccaccgtgcccagcccaacccatggttcttaatgctgcaggtgggtccggagaaaggcttttctcttttaaccatctccttgaatttcagaaggtgggacaacatgtgctggaaagcagttcttaagaggacatcttttcccaagctccttagccttagctgtcctctcctgccctcaccaggactgccctctcagggacccaagaggaagggacagcctggaaaggaagaaggtcccgggccatctgcgtcatggggatggagtcccttggcgtgtgccggtgcaaatacactcctgtaacggggctcatctagaatctcctctcggaatgaggagaccgcaaatgtggttttgaatcttcattgtccacttcattgctgtggtgttgggcaggtctctgtccctctctgggcctctgcacgatggaggggtaggagttgatggttctgaaggctctgccatcctggaaaagaactgagacacttccctcatgttcctgggtcccagaaacagacatctgttggtaaaatctactgggcatttgcccagagacagggaaaagaatgcctgggggtctgtaataggagctgccccaattaggggcagggaggcgggcatgtaaaaaaggaagcttaaagctttgttttcaggctttttgcctaccccaggctccatcttggtaccaagtactcaaccttctgttttctcaataaagtgagccctcttctcggtgtctgca

SEQ ID NO: 162602 - DNA, 1217 bp, Homo sapiens
  Payload ID: 12035
  Gene Symbol: OPRD1
  Gene Name: opioid receptor, delta 1
  ENST ID: ENST00000621425
  CDS Start-End: 243-1217
ccgaggagcctgcggctgctcctggctcacagcgctccgggcgaggagagcgggcggacgccgggggctgggccggtgcgggcggcgaggcaggcggacgaggcgcagagacagcggggcggccggggcgcggcagccggcggcgtcggggccgcggcctctgccttgccgctcccctcgcgtcggatccccgcgcccagggcgcacggtggagagggacgcggcggagccggccggcagccatggaaccggccccctccgccggcgccgagctgcagcccccgctcttcgccaacgcctcggacgcctaccctagcgcctgccccagcgctggcgccaatgcgtcggggccgccaggcgcgcggagcgcctcgtccctcgccctggcaatcgccatcaccgcgctctactcggccgtgtgcgccgtggggctgctgggcaacgtgcttgtcatgttcggcatcgtccggtacactaagatgaagacggccaccaacatctacatcttcaacctggccttagccgatgcgctggccaccagcacgctgcctttccagagtgccaagtacctgatggagacgtggcccttcggcgagctgctctgcaaggctgtgctctccatcgactactacaatatgttcaccagcatcttcacgctcaccatgatgagtgttgaccgctacatcgctgtctgccaccctgtcaaggccctggacttccgcacgcctgccaaggccaagctgatcaacatctgtatctgggtcctggcctcaggcgttggcgtgcccatcatggtcatggctgtgacccgtccccgggacggggcagtggtgtgcatgctccagttccccagccccagctggtactgggacacggtgaccaagatctgcgtgttcctcttcgccttcgtggtgtgttgggcgcccatccacatcttcgtcatcgtctggacgctggtggacatcgaccggcgcgacccgctggtggtggctgcgctgcacctgtgcatcgcgctgggctacgccaatagcagcctcaaccccgtgctctacgctttcctcgacgagaacttcaagcgctgcttccgccagctctgccgcaagccctgcggccgcccagaccccagcagcttcagccgcgcccgcgaagccacggcccgcgagcgtgtcaccgcctgcaccccgtccgatggtcccggcggtggcgctgccgcctga

SEQ ID NO: 162603 - DNA, 5014 bp, Homo sapiens
  Payload ID: 12036
  Gene Symbol: OPRK1
  Gene Name: opioid receptor, kappa 1
  Uniprot ID: P41145
  ENST ID: ENST00000265572
  CDS Start-End: 299-1441
agccgcgtcccggctgcgtcccgccggtcccgccccgccccgccccgcagagccgccgccagtagtgggagacgtgcgctgagaggcgggggctgcgctcggcggaacagcagccctcgggcggagagcggggccggggtccgagagcaggtgatgccaagagctgagcgggactcgtgagcgcgcggttcagcacctaccagggcgtcccgtaaaaaacctcgccttcgcctgtctctgggaaccatagcgccgcaggtgccgcctgtcctcgccttcctgctgcaatcgccccaccatggactccccgatccagatcttccgcggggagccgggccctacctgcgccccgagcgcctgcctgccccccaacagcagcgcctggtttcccggctgggccgagcccgacagcaacggcagcgccggctcggaggacgcgcagctggagcccgcgcacatctccccggccatcccggtcatcatcacggcggtctactccgtagtgttcgtcgtgggcttggtgggcaactcgctggtcatgttcgtgatcatccgatacacaaagatgaagacagcaaccaacatttacatatttaacctggctttggcagatgctttagttactacaaccatgccctttcagagtacggtctacttgatgaattcctggccttttggggatgtgctgtgcaagatagtaatttccattgattactacaacatgttcaccagcatcttcaccttgaccatgatgagcgtggaccgctacattgccgtgtgccaccccgtgaaggctttggacttccgcacacccttgaaggcaaagatcatcaatatctgcatctggctgctgtcgtcatctgttggcatctctgcaatagtccttggaggcaccaaagtcagggaagacgtcgatgtcattgagtgctccttgcagttcccagatgatgactactcctggtgggacctcttcatgaagatctgcgtcttcatctttgccttcgtgatccctgtcctcatcatcatcgtctgctacaccctgatgatcctgcgtctcaagagcgtccggctcctttctggctcccgagagaaagatcgcaacctgcgtaggatcaccagactggtcctggtggtggtggcagtcttcgtcgtctgctggactcccattcacatattcatcctggtggaggctctggggagcacctcccacagcacagctgctctctccagctattacttctgcatcgccttaggctataccaacagtagcctgaatcccattctctacgcctttcttgatgaaaacttcaagcggtgtttccgggacttctgctttccactgaagatgaggatggagcggcagagcactagcagagtccgaaatacagttcaggatcctgcttacctgagggacatcgatgggatgaataaaccagtatgactagtcgtggagatgtcttcgtacagttcttcgggaagagaggagttcaatgatctaggtttaactcagatcactactgcagtctgacatgaaaagatagaatttaaaataaacttttagagatctcatggtctgaagtcatcagatgcagaccacgttcgtgatcagtggaaacatcaaggacaaaaggtccacgcaacacatgcacctcttctctagggcacagaagcgaggcagagcctcagttcctctgatgaacaagggaacaggtcttttccttctggtttgctaggtaaggttcagcacccatctgctgtggccttcctatgaaacgtagtttcaaaagctcggtttaagaaaaaaggaaaagaaaaaacattgctttcagagctcaatgggcatccaatccagatgtttcacaatgacagcaacaacctccaacggaatgggaactatttccagggttcatgcccagctcactgtatgctgtgtggacatgcatttcatgtggctgtgtggtaagaattacagcttacatatggcttggacccacatctgaggaatctgatgttcacttataccagaacattatcttgctatttatgaaattatttaaacgttcaaaagattgtttttaacatggtttaatttcccaaaaactacagttttttttcttagcatgctattcaggtaaacagtcttataataaagcatgtcccattgtcaagaaacataaagtggtgtgaataccactgaaaatatatatatagtatcttctgtaaataatagtacctgtgtgaataaggaataggcttgcctcccagccaggcaatttcctgagggcacactaatgatatcccctgagttgctaagttgatgctgagacattttgctgggaattagtcatggcatgatctctttcagactccctgaataccatttagtcccgtaacagtgctcacaactcatgtgctaatgaatcacaaaggctttaactagctcccaggttgtagccttcgcaggatctagtttatttgccacatctctttatgaacatatagcgattcgcagatctctctattcacggagaggaaggtgttttgcttctgtagatctcaaggtactattttgtggctctcagcaggaagtagaattgttcctaaatgtgtgctgaatgaggacatgatgtccctcctggtgccaggacacatcctgcatggcattctgtgaagggcatacctgctgaggataatgccaggagcagcacatttagggtaattttgctaaaacttccagatgacatataaattccctctttttccccctgaaacttaccatttcagaggtaatggctttttctgtaatttgcctgagaagaaaaaagggataatttagaaataacactccaagcctatatattactagggctgcatcctctggaatttaatagaaaaattgaatatatagccctatgtaactacagacatcattacaactgttaagttctgttcaccatgcaagttctcggtggtgtatgtactctcaccttttggaaacaaaaccttgcattgaaggttttacacatggcttcagaatgttactctgaccatgtttgcctctactccagattatcatggcacctaacacagatgacatatggcagaatggaagtgatttctcctaatgaaaatgaagtgctcttttgagtatttcttgttttattgagattcctatctgcccttgtatttttataactgaatgtaaataggaattgcttaaatactggtttacactaatcccatagttaaaaatcttggctatggtacaggaaggatatctatatagaggatagttccagaaacaagccctggtgaaataggaaatataaaaacttctttatggaacaggaaaacccaagagactttctcgtcagattcctttccagtgcaaagtataacagagataggattatgagatgaaatcacagtagtgtgtttcctttaattttttctgtcttctttttttttttttttttttttgagacggagtctcgctctgttgcccaggctggagtgcggtagcacagtcttggctcactgcaacctccacctcctgggttcaagcgattctcctgcctctgcctcctaagtagctgggattacaggcgtgcaccgccaagcccggctaatttttgtatttttagtagagacggggtttcaccatgttatgcaggctggtctcaaactcctgacctcagaatattcacctgcctcggcctcccaaagtgctgggattacagatgtgaatggccacgcctggcctgtttcctttaagttagcacttcacgtgctcttacagcgttaattgccattattggtttgcctgattttcctgcatctcctcatatgtaagtctgcagcccaaggagagaatagtagctgtatgtgcccacaaggggtgtccaagcttcttgattcttgttaatatcgactccccaacattgaaaaaggagtgaagaagggaatatcattttagggtactgctttaaaggaatgataaagtaaacaacgtagcagggaaaataccacttgcacaaatgtatttctttgtcaaagtgtgtacacgctttctgtttgtcctgatgtcctgctgtgaagcagggaccacattgccatttattcattgttccaggcaatgcatttgtccaaacccctctggctctctgatatctctcatttcttgatgttcctattctctgacctcaacaaggaggacactgtctgttgtgtctctttgagactagaactccatgtgtttaaccttcagatccattctctacatgaaccctattctttccaccctggtaagaaggtctggaagacaggtcctaacgaggggtcagagaaggcacagagaaatgaaccagccatgcaggggcagcactgaggaggaaaccccccactctaactgggaggagagtggaaacactcttagtatctcagagtagttaccaatctaagagcatccttcgagtttaagtcaaaactctaggcttaataccaaaaataatacatcatttggaaaaatagcttggagaaaaaaaatcaataaagagtcacataaaatcttaagaaaatggttctattctgtgatatattactaagaaatacagttcttaaacgtgtataactattgtcagacaatttataggtgtttcatctagtcctgggatgaaatacgatgactcatgcaaattcagggagcacactggctgactttaaattggaacattgtaaagtgaaagctgtgaaaggttgtgtgtcctatcaatgagatttattttctaaccaagagctgttcggatgattcagtataaatacgaaaatcacatccaaaaacggtataacccagcttccttaaggcaattttcttctctgaaacaagaatatactcatatgttctttactataatgtatatgatttttatcttgtactttaaaagatgataattatgcattgtatatacgattgtgtgccttgcaataaaatcaaaactgtacctgctgaaaatca

SEQ ID NO: 162604 - DNA, 2041 bp, Homo sapiens
  Payload ID: 12036
  Gene Symbol: OPRK1
  Gene Name: opioid receptor, kappa 1
  ENST ID: ENST00000522508
  CDS Start-End: 219-569
gagaggcgggggctgcgctcggcggaacagcagccctcgggcggagagcggggccggggtccgagagcaggtgatgccaagagctgagcgggactcgtgagcgcgcggttcagcacctaccagggcgtcccgtaaaaaacctcgccttcgcctgtctctgggaaccatagcgccgcaggtgccgcctgtcctcgccttcctgctgcaatcgccccaccatggactccccgatccagatcttccgcggggagccgggccctacctgcgccccgagcgcctgcctgccccccaacagcagcgcctggtttcccggctgggccgagcccgacagcaacggcagcgccggctcggaggacgcgcagctggagcccgcgcacatctccccggccatcccggtcatcatcacggcggtctactccgtagtgttcgtcgtgggcttggtgggcaactcgctggtcatgttcgtgatcatccggttggaatttcaatggaagacgacaaaaccatgtgatgaattgagagatcccaaagggactggtgtgaagccgggcagggaagccttggattaagaatggctggagtggccgggcgcggtggctcaggcccgtaatcccagcactttgggaggccgaggcaggtggatcacgagatacacaaagatgaagacagcaaccaacatttacatatttaacctggctttggcagatgctttagttactacaaccatgccctttcagagtacggtctacttgatgaattcctggccttttggggatgtgctgtgcaagatagtaatttccattgattactacaacatgttcaccagcatcttcaccttgaccatgatgagcgtggaccgctacattgccgtgtgccaccccgtgaaggctttggacttccgcacacccttgaaggcaaagatcatcaatatctgcatctggctgctgtcgtcatctgttggcatctctgcaatagtccttggaggcaccaaagtcagggaagacgtcgatgtcattgagtgctccttgcagttcccagatgatgactactcctggtgggacctcttcatgaagatctgcgtcttcatctttgccttcgtgatccctgtcctcatcatcatcgtctgctacaccctgatgatcctgcgtctcaagagcgtccggctcctttctggctcccgagagaaagatcgcaacctgcgtaggatcaccagactggtcctggtggtggtggcagtcttcgtcgtctgctggactcccattcacatattcatcctggtggaggctctggggagcacctcccacagcacagctgctctctccagctattacttctgcatcgccttaggctataccaacagtagcctgaatcccattctctacgcctttcttgatgaaaacttcaagcggtgtttccgggacttctgctttccactgaagatgaggatggagcggcagagcactagcagagtccgaaatacagttcaggatcctgcttacctgagggacatcgatgggatgaataaaccagtatgactagtcgtggagatgtcttcgtacagttcttcgggaagagaggagttcaatgatctaggtttaactcagatcactactgcagtctgacatgaaaagatagaatttaaaataaacttttagagatctcatggtctgaagtcatcagatgcagaccacgttcgtgatcagtggaaacatcaaggacaaaaggtccacgcaacacatgcacctcttctctagggcacagaagcgaggcagagcctcagttcctctgatgaacaagggaacaggtcttttccttctggtttgctaggtaaggttcagcacccatctgctgtggccttcctatgaaacgtagtttcaaaagctcggtttaagaaaaaaggaaaagaaaaaacattgctttcagagctcaatgggcatccaatccagatgtttcacaatgacagcaacaacctccaacggaatgggaactatttccagggttcatgcccagctcactgtatgctgtgtggacatgcatttca

SEQ ID NO: 162605 - DNA, 1602 bp, Homo sapiens
  Payload ID: 12036
  Gene Symbol: OPRK1
  Gene Name: opioid receptor, kappa 1
  Uniprot ID: P41145
  ENST ID: ENST00000520287
  CDS Start-End: 376-1518
gagctccgtgctgggaggtgggaagggggcttgaccctggggactcaggcagtctggggacagttccaccaggggccggtgcctagaattggtgagggaggcacctcaggggctgggggagaaggagcgagcgctcttcgcccctctctggcacccagcggcgcgcctgctggccggaaaggcagcgagaagtccgttctccctgtcctgcccccggcgacttgcggcccgggtgggagtccgcaggctccgggtccccagcgccgctggccagggcgcgggcaaagtttgcctctccgcgtccagccggttctttcgctcccgcagcgccgcaggtgccgcctgtcctcgccttcctgctgcaatcgccccaccatggactccccgatccagatcttccgcggggagccgggccctacctgcgccccgagcgcctgcctgccccccaacagcagcgcctggtttcccggctgggccgagcccgacagcaacggcagcgccggctcggaggacgcgcagctggagcccgcgcacatctccccggccatcccggtcatcatcacggcggtctactccgtagtgttcgtcgtgggcttggtgggcaactcgctggtcatgttcgtgatcatccgatacacaaagatgaagacagcaaccaacatttacatatttaacctggctttggcagatgctttagttactacaaccatgccctttcagagtacggtctacttgatgaattcctggccttttggggatgtgctgtgcaagatagtaatttccattgattactacaacatgttcaccagcatcttcaccttgaccatgatgagcgtggaccgctacattgccgtgtgccaccccgtgaaggctttggacttccgcacacccttgaaggcaaagatcatcaatatctgcatctggctgctgtcgtcatctgttggcatctctgcaatagtccttggaggcaccaaagtcagggaagacgtcgatgtcattgagtgctccttgcagttcccagatgatgactactcctggtgggacctcttcatgaagatctgcgtcttcatctttgccttcgtgatccctgtcctcatcatcatcgtctgctacaccctgatgatcctgcgtctcaagagcgtccggctcctttctggctcccgagagaaagatcgcaacctgcgtaggatcaccagactggtcctggtggtggtggcagtcttcgtcgtctgctggactcccattcacatattcatcctggtggaggctctggggagcacctcccacagcacagctgctctctccagctattacttctgcatcgccttaggctataccaacagtagcctgaatcccattctctacgcctttcttgatgaaaacttcaagcggtgtttccgggacttctgctttccactgaagatgaggatggagcggcagagcactagcagagtccgaaatacagttcaggatcctgcttacctgagggacatcgatgggatgaataaaccagtatgactagtcgtggagatgtcttcgtacagttcttcgggaagagaggagttcaatgatctaggtttaactcagatcactactgcagtc

SEQ ID NO: 162606 - DNA, 1195 bp, Homo sapiens
  Payload ID: 12036
  Gene Symbol: OPRK1
  Gene Name: opioid receptor, kappa 1
  Uniprot ID: P41145
  ENST ID: ENST00000524278
  CDS Start-End: 226-1101
acatctcagcagataactttgttcccctcaccatcacacaagcaccagtgtctgccaattttgaagccaaccctcgtttctctgtaaagagaagtacgctaggatggtcttgagttaaagtgtcactggggagcatttctaagtctctggaacaccctccgccctgttgcctggccaccatagccttcccggtgctcacaactcaagttccccagatacacaaagatgaagacagcaaccaacatttacatatttaacctggctttggcagatgctttagttactacaaccatgccctttcagagtacggtctacttgatgaattcctggccttttggggatgtgctgtgcaagatagtaatttccattgattactacaacatgttcaccagcatcttcaccttgaccatgatgagcgtggaccgctacattgccgtgtgccaccccgtgaaggctttggacttccgcacacccttgaaggcaaagatcatcaatatctgcatctggctgctgtcgtcatctgttggcatctctgcaatagtccttggaggcaccaaagtcagggaagacgtcgatgtcattgagtgctccttgcagttcccagatgatgactactcctggtgggacctcttcatgaagatctgcgtcttcatctttgccttcgtgatccctgtcctcatcatcatcgtctgctacaccctgatgatcctgcgtctcaagagcgtccggctcctttctggctcccgagagaaagatcgcaacctgcgtaggatcaccagactggtcctggtggtggtggcagtcttcgtcgtctgctggactcccattcacatattcatcctggtggaggctctggggagcacctcccacagcacagctgctctctccagctattacttctgcatcgccttaggctataccaacagtagcctgaatcccattctctacgcctttcttgatgaaaacttcaagcggtgtttccgggacttctgctttccactgaagatgaggatggagcggcagagcactagcagagtccgaaatacagttcaggatcctgcttacctgagggacatcgatgggatgaataaaccagtatgactagtcgtggagatgtcttcgtacagttcttcgggaagagaggagttcaatgatctaggtttaactcagatcactactgcagtctgacatgaaa

SEQ ID NO: 162607 - DNA, 4682 bp, Homo sapiens
  Payload ID: 12036
  Gene Symbol: OPRK1
  Gene Name: opioid receptor, kappa 1
  ENST ID: ENST00000613482
  CDS Start-End: 1-1101
atggactccccgatccagatcttccgcggggagccgggccctacctgcgccccgagcgcctgcctgccccccaacagcagcgccggctcggaggacgcgcagctggagcccgcgcacatctccccggccatcccggtcatcatcacggcggtctactccgtagtgttcgtcgtgggcttggtgggcaactcgctggtcatgttcgtgatcatccgatacacaaagatgaagacagcaaccaacatttacatatttaacctggctttggcagatgctttagttactacaaccatgccctttcagagtacggtctacttgatgaattcctggccttttggggatgtgctgtgcaagatagtaatttccattgattactacaacatgttcaccagcatcttcaccttgaccatgatgagcgtggaccgctacattgccgtgtgccaccccgtgaaggctttggacttccgcacacccttgaaggcaaagatcatcaatatctgcatctggctgctgtcgtcatctgttggcatctctgcaatagtccttggaggcaccaaagtcagggaagacgtcgatgtcattgagtgctccttgcagttcccagatgatgactactcctggtgggacctcttcatgaagatctgcgtcttcatctttgccttcgtgatccctgtcctcatcatcatcgtctgctacaccctgatgatcctgcgtctcaagagcgtccggctcctttctggctcccgagagaaagatcgcaacctgcgtaggatcaccagactggtcctggtggtggtggcagtcttcgtcgtctgctggactcccattcacatattcatcctggtggaggctctggggagcacctcccacagcacagctgctctctccagctattacttctgcatcgccttaggctataccaacagtagcctgaatcccattctctacgcctttcttgatgaaaacttcaagcggtgtttccgggacttctgctttccactgaagatgaggatggagcggcagagcactagcagagtccgaaatacagttcaggatcctgcttacctgagggacatcgatgggatgaataaaccagtatgactagtcgtggagatgtcttcgtacagttcttcgggaagagaggagttcaatgatctaggtttaactcagatcactactgcagtctgacatgaaaagatagaatttaaaataaacttttagagatctcatggtctgaagtcatcagatgcagaccacgttcgtgatcagtggaaacatcaaggacaaaaggtccacgcaacacatgcacctcttctctagggcacagaagcgaggcagagcctcagttcctctgatgaacaagggaacaggtcttttccttctggtttgctaggtaaggttcagcacccatctgctgtggccttcctatgaaacgtagtttcaaaagctcggtttaagaaaaaaggaaaagaaaaaacattgctttcagagctcaatgggcatccaatccagatgtttcacaatgacagcaacaacctccaacggaatgggaactatttccagggttcatgcccagctcactgtatgctgtgtggacatgcatttcatgtggctgtgtggtaagaattacagcttacatatggcttggacccacatctgaggaatctgatgttcacttataccagaacattatcttgctatttatgaaattatttaaacgttcaaaagattgtttttaacatggtttaatttcccaaaaactacagttttttttcttagcatgctattcaggtaaacagtcttataataaagcatgtcccattgtcaagaaacataaagtggtgtgaataccactgaaaatatatatatagtatcttctgtaaataatagtacctgtgtgaataaggaataggcttgcctcccagccaggcaatttcctgagggcacactaatgatatcccctgagttgctaagttgatgctgagacattttgctgggaattagtcatggcatgatctctttcagactccctgaataccatttagtcccgtaacagtgctcacaactcatgtgctaatgaatcacaaaggctttaactagctcccaggttgtagccttcgcaggatctagtttatttgccacatctctttatgaacatatagcgattcgcagatctctctattcacggagaggaaggtgttttgcttctgtagatctcaaggtactattttgtggctctcagcaggaagtagaattgttcctaaatgtgtgctgaatgaggacatgatgtccctcctggtgccaggacacatcctgcatggcattctgtgaagggcatacctgctgaggataatgccaggagcagcacatttagggtaattttgctaaaacttccagatgacatataaattccctctttttccccctgaaacttaccatttcagaggtaatggctttttctgtaatttgcctgagaagaaaaaagggataatttagaaataacactccaagcctatatattactagggctgcatcctctggaatttaatagaaaaattgaatatatagccctatgtaactacagacatcattacaactgttaagttctgttcaccatgcaagttctcggtggtgtatgtactctcaccttttggaaacaaaaccttgcattgaaggttttacacatggcttcagaatgttactctgaccatgtttgcctctactccagattatcatggcacctaacacagatgacatatggcagaatggaagtgatttctcctaatgaaaatgaagtgctcttttgagtatttcttgttttattgagattcctatctgcccttgtatttttataactgaatgtaaataggaattgcttaaatactggtttacactaatcccatagttaaaaatcttggctatggtacaggaaggatatctatatagaggatagttccagaaacaagccctggtgaaataggaaatataaaaacttctttatggaacaggaaaacccaagagactttctcgtcagattcctttccagtgcaaagtataacagagataggattatgagatgaaatcacagtagtgtgtttcctttaattttttctgtcttctttttttttttttttttttttgagacggagtctcgctctgttgcccaggctggagtgcggtagcacagtcttggctcactgcaacctccacctcctgggttcaagcgattctcctgcctctgcctcctaagtagctgggattacaggcgtgcaccgccaagcccggctaatttttgtatttttagtagagacggggtttcaccatgttatgcaggctggtctcaaactcctgacctcagaatattcacctgcctcggcctcccaaagtgctgggattacagatgtgaatggccacgcctggcctgtttcctttaagttagcacttcacgtgctcttacagcgttaattgccattattggtttgcctgattttcctgcatctcctcatatgtaagtctgcagcccaaggagagaatagtagctgtatgtgcccacaaggggtgtccaagcttcttgattcttgttaatatcgactccccaacattgaaaaaggagtgaagaagggaatatcattttagggtactgctttaaaggaatgataaagtaaacaacgtagcagggaaaataccacttgcacaaatgtatttctttgtcaaagtgtgtacacgctttctgtttgtcctgatgtcctgctgtgaagcagggaccacattgccatttattcattgttccaggcaatgcatttgtccaaacccctctggctctctgatatctctcatttcttgatgttcctattctctgacctcaacaaggaggacactgtctgttgtgtctctttgagactagaactccatgtgtttaaccttcagatccattctctacatgaaccctattctttccaccctggtaagaaggtctggaagacaggtcctaacgaggggtcagagaaggcacagagaaatgaaccagccatgcaggggcagcactgaggaggaaaccccccactctaactgggaggagagtggaaacactcttagtatctcagagtagttaccaatctaagagcatccttcgagtttaagtcaaaactctaggcttaataccaaaaataatacatcatttggaaaaatagcttggagaaaaaaaatcaataaagagtcacataaaatcttaagaaaatggttctattctgtgatatattactaagaaatacagttcttaaacgtgtataactattgtcagacaatttataggtgtttcatctagtcctgggatgaaatacgatgactcatgcaaattcagggagcacactggctgactttaaattggaacattgtaaagtgaaagctgtgaaaggttgtgtgtcctatcaatgagatttattttctaaccaagagctgttcggatgattcagtataaatacgaaaatcacatccaaaaacggtataacccagcttccttaaggcaattttcttctctgaaacaagaatatactcatatgttctttactataatgtatatgatttttatcttgtactttaaaagatgataattatgcattgtatatacgattgtgtgccttgcaataaaatcaaaactgtacctgctgaaaatcacaacagtc

SEQ ID NO: 162608 - DNA, 5196 bp, Homo sapiens
  Payload ID: 12036
  Gene Symbol: OPRK1
  Gene Name: opioid receptor, kappa 1
  Uniprot ID: P41145
  ENST ID: ENST00000612786
  CDS Start-End: 740-1615
agccgcgtcccggctgcgtcccgccggtcccgccccgccccgccccgcagagccgccgccagtagtgggagacgtgcgctgagaggcgggggctgcgctcggcggaacagcagccctcgggcggagagcggggccggggtccgagagcaggtgatgccaagagctgagcgggactcgtgagcgcgcggttcagcacctaccagggcgtcccgtaaaaaacctcgccttcgcctgtctctgggaaccatagcgccgcaggtgccgcctgtcctcgccttcctgctgcaatcgccccaccatggactccccgatccagatcttccgcggggagccgggccctacctgcgccccgagcgcctgcctgccccccaacagcagcgcctggtttcccggctgggccgagcccgacagcaacggcagcgccggctcggaggacgcgcagctggagcccgcgcacatctccccggccatcccggtcatcatcacggcggtctactccgtagtgttcgtcgtgggcttggtgggcaactcgctggtcatgttcgtgatcatccggttggaatttcaatggaagacgacaaaaccatgtgatgaattgagagatcccaaagggactggtgtgaagccgggcagggaagccttggattaagaatggctggagtggccgggcgcggtggctcaggcccgtaatcccagcactttgggaggccgaggcaggtggatcacgagatacacaaagatgaagacagcaaccaacatttacatatttaacctggctttggcagatgctttagttactacaaccatgccctttcagagtacggtctacttgatgaattcctggccttttggggatgtgctgtgcaagatagtaatttccattgattactacaacatgttcaccagcatcttcaccttgaccatgatgagcgtggaccgctacattgccgtgtgccaccccgtgaaggctttggacttccgcacacccttgaaggcaaagatcatcaatatctgcatctggctgctgtcgtcatctgttggcatctctgcaatagtccttggaggcaccaaagtcagggaagacgtcgatgtcattgagtgctccttgcagttcccagatgatgactactcctggtgggacctcttcatgaagatctgcgtcttcatctttgccttcgtgatccctgtcctcatcatcatcgtctgctacaccctgatgatcctgcgtctcaagagcgtccggctcctttctggctcccgagagaaagatcgcaacctgcgtaggatcaccagactggtcctggtggtggtggcagtcttcgtcgtctgctggactcccattcacatattcatcctggtggaggctctggggagcacctcccacagcacagctgctctctccagctattacttctgcatcgccttaggctataccaacagtagcctgaatcccattctctacgcctttcttgatgaaaacttcaagcggtgtttccgggacttctgctttccactgaagatgaggatggagcggcagagcactagcagagtccgaaatacagttcaggatcctgcttacctgagggacatcgatgggatgaataaaccagtatgactagtcgtggagatgtcttcgtacagttcttcgggaagagaggagttcaatgatctaggtttaactcagatcactactgcagtctgacatgaaaagatagaatttaaaataaacttttagagatctcatggtctgaagtcatcagatgcagaccacgttcgtgatcagtggaaacatcaaggacaaaaggtccacgcaacacatgcacctcttctctagggcacagaagcgaggcagagcctcagttcctctgatgaacaagggaacaggtcttttccttctggtttgctaggtaaggttcagcacccatctgctgtggccttcctatgaaacgtagtttcaaaagctcggtttaagaaaaaaggaaaagaaaaaacattgctttcagagctcaatgggcatccaatccagatgtttcacaatgacagcaacaacctccaacggaatgggaactatttccagggttcatgcccagctcactgtatgctgtgtggacatgcatttcatgtggctgtgtggtaagaattacagcttacatatggcttggacccacatctgaggaatctgatgttcacttataccagaacattatcttgctatttatgaaattatttaaacgttcaaaagattgtttttaacatggtttaatttcccaaaaactacagttttttttcttagcatgctattcaggtaaacagtcttataataaagcatgtcccattgtcaagaaacataaagtggtgtgaataccactgaaaatatatatatagtatcttctgtaaataatagtacctgtgtgaataaggaataggcttgcctcccagccaggcaatttcctgagggcacactaatgatatcccctgagttgctaagttgatgctgagacattttgctgggaattagtcatggcatgatctctttcagactccctgaataccatttagtcccgtaacagtgctcacaactcatgtgctaatgaatcacaaaggctttaactagctcccaggttgtagccttcgcaggatctagtttatttgccacatctctttatgaacatatagcgattcgcagatctctctattcacggagaggaaggtgttttgcttctgtagatctcaaggtactattttgtggctctcagcaggaagtagaattgttcctaaatgtgtgctgaatgaggacatgatgtccctcctggtgccaggacacatcctgcatggcattctgtgaagggcatacctgctgaggataatgccaggagcagcacatttagggtaattttgctaaaacttccagatgacatataaattccctctttttccccctgaaacttaccatttcagaggtaatggctttttctgtaatttgcctgagaagaaaaaagggataatttagaaataacactccaagcctatatattactagggctgcatcctctggaatttaatagaaaaattgaatatatagccctatgtaactacagacatcattacaactgttaagttctgttcaccatgcaagttctcggtggtgtatgtactctcaccttttggaaacaaaaccttgcattgaaggttttacacatggcttcagaatgttactctgaccatgtttgcctctactccagattatcatggcacctaacacagatgacatatggcagaatggaagtgatttctcctaatgaaaatgaagtgctcttttgagtatttcttgttttattgagattcctatctgcccttgtatttttataactgaatgtaaataggaattgcttaaatactggtttacactaatcccatagttaaaaatcttggctatggtacaggaaggatatctatatagaggatagttccagaaacaagccctggtgaaataggaaatataaaaacttctttatggaacaggaaaacccaagagactttctcgtcagattcctttccagtgcaaagtataacagagataggattatgagatgaaatcacagtagtgtgtttcctttaattttttctgtcttctttttttttttttttttttttgagacggagtctcgctctgttgcccaggctggagtgcggtagcacagtcttggctcactgcaacctccacctcctgggttcaagcgattctcctgcctctgcctcctaagtagctgggattacaggcgtgcaccgccaagcccggctaatttttgtatttttagtagagacggggtttcaccatgttatgcaggctggtctcaaactcctgacctcagaatattcacctgcctcggcctcccaaagtgctgggattacagatgtgaatggccacgcctggcctgtttcctttaagttagcacttcacgtgctcttacagcgttaattgccattattggtttgcctgattttcctgcatctcctcatatgtaagtctgcagcccaaggagagaatagtagctgtatgtgcccacaaggggtgtccaagcttcttgattcttgttaatatcgactccccaacattgaaaaaggagtgaagaagggaatatcattttagggtactgctttaaaggaatgataaagtaaacaacgtagcagggaaaataccacttgcacaaatgtatttctttgtcaaagtgtgtacacgctttctgtttgtcctgatgtcctgctgtgaagcagggaccacattgccatttattcattgttccaggcaatgcatttgtccaaacccctctggctctctgatatctctcatttcttgatgttcctattctctgacctcaacaaggaggacactgtctgttgtgtctctttgagactagaactccatgtgtttaaccttcagatccattctctacatgaaccctattctttccaccctggtaagaaggtctggaagacaggtcctaacgaggggtcagagaaggcacagagaaatgaaccagccatgcaggggcagcactgaggaggaaaccccccactctaactgggaggagagtggaaacactcttagtatctcagagtagttaccaatctaagagcatccttcgagtttaagtcaaaactctaggcttaataccaaaaataatacatcatttggaaaaatagcttggagaaaaaaaatcaataaagagtcacataaaatcttaagaaaatggttctattctgtgatatattactaagaaatacagttcttaaacgtgtataactattgtcagacaatttataggtgtttcatctagtcctgggatgaaatacgatgactcatgcaaattcagggagcacactggctgactttaaattggaacattgtaaagtgaaagctgtgaaaggttgtgtgtcctatcaatgagatttattttctaaccaagagctgttcggatgattcagtataaatacgaaaatcacatccaaaaacggtataacccagcttccttaaggcaattttcttctctgaaacaagaatatactcatatgttctttactataatgtatatgatttttatcttgtactttaaaagatgataattatgcattgtatatacgattgtgtgccttgcaataaaatcaaaactgtacctgctgaaaatcacaacagtc

SEQ ID NO: 162609 - DNA, 1465 bp, Homo sapiens
  Payload ID: 12037
  Gene Symbol: OPRM1
  Gene Name: opioid receptor, mu 1
  Uniprot ID: P35372
  ENST ID: ENST00000229768
  CDS Start-End: 51-1391
cggtgctcctggctacctcgcacagcggtgcccgcccggccgtcagtaccatggacagcagcgctgcccccacgaacgccagcaattgcactgatgccttggcgtactcaagttgctccccagcacccagccccggttcctgggtcaacttgtcccacttagatggcaacctgtccgacccatgcggtccgaaccgcaccgacctgggcgggagagacagcctgtgccctccgaccggcagtccctccatgatcacggccatcacgatcatggccctctactccatcgtgtgcgtggtggggctcttcggaaacttcctggtcatgtatgtgattgtcagatacaccaagatgaagactgccaccaacatctacattttcaaccttgctctggcagatgccttagccaccagtaccctgcccttccagagtgtgaattacctaatgggaacatggccatttggaaccatcctttgcaagatagtgatctccatagattactataacatgttcaccagcatattcaccctctgcaccatgagtgttgatcgatacattgcagtctgccaccctgtcaaggccttagatttccgtactccccgaaatgccaaaattatcaatgtctgcaactggatcctctcttcagccattggtcttcctgtaatgttcatggctacaacaaaatacaggcaaggttccatagattgtacactaacattctctcatccaacctggtactgggaaaacctgctgaagatctgtgttttcatcttcgccttcattatgccagtgctcatcattaccgtgtgctatggactgatgatcttgcgcctcaagagtgtccgcatgctctctggctccaaagaaaaggacaggaatcttcgaaggatcaccaggatggtgctggtggtggtggctgtgttcatcgtctgctggactcccattcacatttacgtcatcattaaagccttggttacaatcccagaaactacgttccagactgtttcttggcacttctgcattgctctaggttacacaaacagctgcctcaacccagtcctttatgcatttctggatgaaaacttcaaacgatgcttcagagagttctgtatcccaacctcttccaacattgagcaacaaaactccactcgaattcgtcagaacactagagaccacccctccacggccaatacagtggatagaactaatcatcagtgcctacctataccttccctgtcttgctgggctctagagcaaggctgcttggttgtgtaccctggaccactgcaaggacctcttgtcagatatgacctcccagctatccttcactcgtcctgccttcgtggaaatactgctcccagcccgtctggtggagcatttctcctgagttaagcatgattattcttcagttgcccgacactgcccttgactcccttccaaattcggcattttcacatcagtatggc

SEQ ID NO: 162610 - DNA, 2178 bp, Homo sapiens
  Payload ID: 12037
  Gene Symbol: OPRM1
  Gene Name: opioid receptor, mu 1
  Uniprot ID: P35372
  ENST ID: ENST00000330432
  CDS Start-End: 238-1440
gatgagcctctgtgaactactaaggtgggagggggctatacgcagaggagaatgtcagatgctcagctcggtcccctccgcctgacgctcctctctgtctcagccaggactggtttctgtaagaaacagcaggagctgtggcagcggcgaaaggaagcggctgaggcgcttggaacccgaaaagtctcggtgctcctggctacctcgcacagcggtgcccgcccggccgtcagtaccatggacagcagcgctgcccccacgaacgccagcaattgcactgatgccttggcgtactcaagttgctccccagcacccagccccggttcctgggtcaacttgtcccacttagatggcaacctgtccgacccatgcggtccgaaccgcaccgacctgggcgggagagacagcctgtgccctccgaccggcagtccctccatgatcacggccatcacgatcatggccctctactccatcgtgtgcgtggtggggctcttcggaaacttcctggtcatgtatgtgattgtcagatacaccaagatgaagactgccaccaacatctacattttcaaccttgctctggcagatgccttagccaccagtaccctgcccttccagagtgtgaattacctaatgggaacatggccatttggaaccatcctttgcaagatagtgatctccatagattactataacatgttcaccagcatattcaccctctgcaccatgagtgttgatcgatacattgcagtctgccaccctgtcaaggccttagatttccgtactccccgaaatgccaaaattatcaatgtctgcaactggatcctctcttcagccattggtcttcctgtaatgttcatggctacaacaaaatacaggcaaggttccatagattgtacactaacattctctcatccaacctggtactgggaaaacctgctgaagatctgtgttttcatcttcgccttcattatgccagtgctcatcattaccgtgtgctatggactgatgatcttgcgcctcaagagtgtccgcatgctctctggctccaaagaaaaggacaggaatcttcgaaggatcaccaggatggtgctggtggtggtggctgtgttcatcgtctgctggactcccattcacatttacgtcatcattaaagccttggttacaatcccagaaactacgttccagactgtttcttggcacttctgcattgctctaggttacacaaacagctgcctcaacccagtcctttatgcatttctggatgaaaacttcaaacgatgcttcagagagttctgtatcccaacctcttccaacattgagcaacaaaactccactcgaattcgtcagaacactagagaccacccctccacggccaatacagtggatagaactaatcatcagctagaaaatctggaagcagaaactgctccgttgccctaacagggtctcatgccattccgaccttcaccaagcttagaagccaccatgtatgtggaagcaggttgcttcaagaatgtgtaggaggctctaattctctaggaaagtgcctgcttttaggtcatccaacctctttcctctctggccactctgctctgcacattagagggacagccaaaagtaagtggagcatttggaaggaaaggaatataccacaccgaggagtccagtttgtgcaagacacccagtggaaccaaaacccatcgtggtatgtgaattgaagtcatcataaaaggtgacccttctgtctgtaagattttattttcaagcaaatatttatgacctcaacaaagaagaaccatcttttgttaagttcaccgtagtaacacataaagtaaatgctacctctgatcaaagcaccttgaatggaaggtccgagtctttttagtgttttgcaagggaatgaatccattattctattttagacttttaacttcaccttaaaattagcatctggctaaggcatcattttcacctccatttcttggttttgtattgtttaaaaaaataacatctctttcatctagctccataattgcaagggaagagattagcatgaaaggtaatctgaaacacagtcatgtgtcagctgtagaaaggttgattctcatgcactgcaaatacttccaaagagtcatcatgggggatttttcattcttaggctttcagtggtttgttcct

SEQ ID NO: 162611 - DNA, 1389 bp, Homo sapiens
  Payload ID: 12037
  Gene Symbol: OPRM1
  Gene Name: opioid receptor, mu 1
  Uniprot ID: P35372
  ENST ID: ENST00000337049
  CDS Start-End: 51-1307
cggtgctcctggctacctcgcacagcggtgcccgcccggccgtcagtaccatggacagcagcgctgcccccacgaacgccagcaattgcactgatgccttggcgtactcaagttgctccccagcacccagccccggttcctgggtcaacttgtcccacttagatggcaacctgtccgacccatgcggtccgaaccgcaccgacctgggcgggagagacagcctgtgccctccgaccggcagtccctccatgatcacggccatcacgatcatggccctctactccatcgtgtgcgtggtggggctcttcggaaacttcctggtcatgtatgtgattgtcagatacaccaagatgaagactgccaccaacatctacattttcaaccttgctctggcagatgccttagccaccagtaccctgcccttccagagtgtgaattacctaatgggaacatggccatttggaaccatcctttgcaagatagtgatctccatagattactataacatgttcaccagcatattcaccctctgcaccatgagtgttgatcgatacattgcagtctgccaccctgtcaaggccttagatttccgtactccccgaaatgccaaaattatcaatgtctgcaactggatcctctcttcagccattggtcttcctgtaatgttcatggctacaacaaaatacaggcaaggttccatagattgtacactaacattctctcatccaacctggtactgggaaaacctgctgaagatctgtgttttcatcttcgccttcattatgccagtgctcatcattaccgtgtgctatggactgatgatcttgcgcctcaagagtgtccgcatgctctctggctccaaagaaaaggacaggaatcttcgaaggatcaccaggatggtgctggtggtggtggctgtgttcatcgtctgctggactcccattcacatttacgtcatcattaaagccttggttacaatcccagaaactacgttccagactgtttcttggcacttctgcattgctctaggttacacaaacagctgcctcaacccagtcctttatgcatttctggatgaaaacttcaaacgatgcttcagagagttctgtatcccaacctcttccaacattgagcaacaaaactccactcgaattcgtcagaacactagagaccacccctccacggccaatacagtggatagaactaatcatcagccacccttggcagtcagcatggcccagatctttacacgatatcctcctccgactcatcgtgagaaaacctgcaatgattacatgaagaggtagataatgtattaccctgatttggtaggtaaagtattatcctgatttatgtgacagagtgaaaggcaacttttaattgttaacc

SEQ ID NO: 162612 - DNA, 1737 bp, Homo sapiens
  Payload ID: 12037
  Gene Symbol: OPRM1
  Gene Name: opioid receptor, mu 1
  ENST ID: ENST00000360422
  CDS Start-End: 258-1688
gctaccaaagactaactctatctctctccccaacccttctctccatctccctcctttagatgtgtttgcacagaagagtgcccagtgaagagacctactccttggatcgctttgcgcaaaatccaccccttttccctcctccctcccttccagcctccgaatcccgcatggcccacgctcccctcctgcagcggtgcggggcaggtgatgagcctctgtgaactactaaggtgggagggggctatacgcagaggagaatgtcagatgctcagctcggtcccctccgcctgacgctcctctctgtctcagccaggactggtttctgtaagaaacagcaggagctgtggcagcggcgaaaggaagcggctgaggcgcttggaacccgaaaagtctcggtgctcctggctacctcgcacagcggtgcccgcccggccgtcagtaccatggacagcagcgctgcccccacgaacgccagcaattgcactgatgccttggcgtactcaagttgctccccagcacccagccccggttcctgggtcaacttgtcccacttagatggcaacctgtccgacccatgcggtccgaaccgcaccgacctgggcgggagagacagcctgtgccctccgaccggcagtccctccatgatcacggccatcacgatcatggccctctactccatcgtgtgcgtggtggggctcttcggaaacttcctggtcatgtatgtgattgtcagatacaccaagatgaagactgccaccaacatctacattttcaaccttgctctggcagatgccttagccaccagtaccctgcccttccagagtgtgaattacctaatgggaacatggccatttggaaccatcctttgcaagatagtgatctccatagattactataacatgttcaccagcatattcaccctctgcaccatgagtgttgatcgatacattgcagtctgccaccctgtcaaggccttagatttccgtactccccgaaatgccaaaattatcaatgtctgcaactggatcctctcttcagccattggtcttcctgtaatgttcatggctacaacaaaatacaggcaaggttccatagattgtacactaacattctctcatccaacctggtactgggaaaacctgctgaagatctgtgttttcatcttcgccttcattatgccagtgctcatcattaccgtgtgctatggactgatgatcttgcgcctcaagagtgtccgcatgctctctggctccaaagaaaaggacaggaatcttcgaaggatcaccaggatggtgctggtggtggtggctgtgttcatcgtctgctggactcccattcacatttacgtcatcattaaagccttggttacaatcccagaaactacgttccagactgtttcttggcacttctgcattgctctaggttacacaaacagctgcctcaacccagtcctttatgcatttctggatgaaaacttcaaacgatgcttcagagagttctgtatcccaacctcttccaacattgagcaacaaaactccactcgaattcgtcagaacactagagaccacccctccacggccaatacagtggatagaactaatcatcagaattattatataattcatagatgttgctgcaatacccctcttatttctcaaaagccagtcttgctctggttctgtgattaaagagagagggtgagtgccttgcccactgtggtcatggatgcaagatatt

SEQ ID NO: 162613 - DNA, 2033 bp, Homo sapiens
  Payload ID: 12037
  Gene Symbol: OPRM1
  Gene Name: opioid receptor, mu 1
  Uniprot ID: P35372
  ENST ID: ENST00000434900
  CDS Start-End: 519-2000
cctgtaaagaaaatgatgagggctaaatccatcagcaccaaagctgggaagccctccaggttcatttggaagaaaatactcctctgagctcaaaggaagtgtgatctgtcacaatattgtatgcctgcactaagtttgcatcctgaaaactcactggaagataggaaagcaagcatgaaaaagcagccgggtcagacaggcttctggattcagtgtgtggacatgactttgcctgcatgaattgcccctttctcctacaaacaagagaattcggtcaagtggatgtggcagaactgggctgctctgagatgatagaaaagggctcctgcttttcctgtaattgcagccccttgttcttgtggttgctacatgcaataaatgtaattctatgagaaggaccagcccttacatcccatcaaaatgtttcctggaaacctggagcacagaactctgatatcctctcacactgtggcaggagaagcagcacaaggcacaatgctgaaatagcatggtccaggatgtgtttgcacagaagagtgcccagtgaagagacctactccttggatcgctttgcgcaaaatccaccccttttccctcctccctcccttccagcctccgaatcccgcatggcccacgctcccctcctgcagcggtgcggggcagccaggactggtttctgtaagaaacagcaggagctgtggcagcggcgaaaggaagcggctgaggcgcttggaacccgaaaagtctcggtgctcctggctacctcgcacagcggtgcccgcccggccgtcagtaccatggacagcagcgctgcccccacgaacgccagcaattgcactgatgccttggcgtactcaagttgctccccagcacccagccccggttcctgggtcaacttgtcccacttagatggcaacctgtccgacccatgcggtccgaaccgcaccgacctgggcgggagagacagcctgtgccctccgaccggcagtccctccatgatcacggccatcacgatcatggccctctactccatcgtgtgcgtggtggggctcttcggaaacttcctggtcatgtatgtgattgtcagatacaccaagatgaagactgccaccaacatctacattttcaaccttgctctggcagatgccttagccaccagtaccctgcccttccagagtgtgaattacctaatgggaacatggccatttggaaccatcctttgcaagatagtgatctccatagattactataacatgttcaccagcatattcaccctctgcaccatgagtgttgatcgatacattgcagtctgccaccctgtcaaggccttagatttccgtactccccgaaatgccaaaattatcaatgtctgcaactggatcctctcttcagccattggtcttcctgtaatgttcatggctacaacaaaatacaggcaaggttccatagattgtacactaacattctctcatccaacctggtactgggaaaacctgctgaagatctgtgttttcatcttcgccttcattatgccagtgctcatcattaccgtgtgctatggactgatgatcttgcgcctcaagagtgtccgcatgctctctggctccaaagaaaaggacaggaatcttcgaaggatcaccaggatggtgctggtggtggtggctgtgttcatcgtctgctggactcccattcacatttacgtcatcattaaagccttggttacaatcccagaaactacgttccagactgtttcttggcacttctgcattgctctaggttacacaaacagctgcctcaacccagtcctttatgcatttctggatgaaaacttcaaacgatgcttcagagagttctgtatcccaacctcttccaacattgagcaacaaaactccactcgaattcgtcagaacactagagaccacccctccacggccaatacagtggatagaactaatcatcagctagaaaatctggaagcagaaactgctccgttgccctaacagggtctcatgccattccgaccttcaccaagc

SEQ ID NO: 162614 - DNA, 2485 bp, Homo sapiens
  Payload ID: 12037
  Gene Symbol: OPRM1
  Gene Name: opioid receptor, mu 1
  Uniprot ID: P35372
  ENST ID: ENST00000414028
  CDS Start-End: 51-1262
cggtgctcctggctacctcgcacagcggtgcccgcccggccgtcagtaccatggacagcagcgctgcccccacgaacgccagcaattgcactgatgccttggcgtactcaagttgctccccagcacccagccccggttcctgggtcaacttgtcccacttagatggcaacctgtccgacccatgcggtccgaaccgcaccgacctgggcgggagagacagcctgtgccctccgaccggcagtccctccatgatcacggccatcacgatcatggccctctactccatcgtgtgcgtggtggggctcttcggaaacttcctggtcatgtatgtgattgtcagatacaccaagatgaagactgccaccaacatctacattttcaaccttgctctggcagatgccttagccaccagtaccctgcccttccagagtgtgaattacctaatgggaacatggccatttggaaccatcctttgcaagatagtgatctccatagattactataacatgttcaccagcatattcaccctctgcaccatgagtgttgatcgatacattgcagtctgccaccctgtcaaggccttagatttccgtactccccgaaatgccaaaattatcaatgtctgcaactggatcctctcttcagccattggtcttcctgtaatgttcatggctacaacaaaatacaggcaaggttccatagattgtacactaacattctctcatccaacctggtactgggaaaacctgctgaagatctgtgttttcatcttcgccttcattatgccagtgctcatcattaccgtgtgctatggactgatgatcttgcgcctcaagagtgtccgcatgctctctggctccaaagaaaaggacaggaatcttcgaaggatcaccaggatggtgctggtggtggtggctgtgttcatcgtctgctggactcccattcacatttacgtcatcattaaagccttggttacaatcccagaaactacgttccagactgtttcttggcacttctgcattgctctaggttacacaaacagctgcctcaacccagtcctttatgcatttctggatgaaaacttcaaacgatgcttcagagagttctgtatcccaacctcttccaacattgagcaacaaaactccactcgaattcgtcagaacactagagaccacccctccacggccaatacagtggatagaactaatcatcagggacctccagccaagtttgttgctgaccaacttgccgggtcgtcttgaaaagggggcttacaggtgttccaagcccgtgttttatcctgaagtatccctcaacacagaaaaacgacctcataacacaaaatacaccagcttaaaaatagcctttgaattatttttcacattaatcaaaactttacagaggagataaacactgatttttttattttattttattttattttattttattttattgccattcattcaaccgtttgcacagagagaaagaagacagaaatctgactggtaagaaattgttacccttttgccagcatgccaggcttctgggttccctttccctgagcggccctagtgatccggcttgcggcaccatcgcctacgggccaagctgcatcataaaggaaatttttttttttcattctggccagagcaaaacacatgtgataaaacataggcattagctactctgcttagcaccaaatatcagactagcttaaatttgcccccagatgggttccatcatctttaatccgacctctgacttgcagtttcaacacgtgctctctgggcaaaacagttgccctgagtaacagaaaagataggaaaggaaaaggagagagagaaaaacgtgccagtggaagggtggggaaggtgaaatgatcaaggaggccagagaaagactcacctattgcagcaacactgtagaagttcaggcagctgcttctcggtagcaaaaggatcttttccagcaatcctattagctctcaagtttccccttttagggaggaaaaagctccccatgtcccgcgatcctgtacatgtccaaccctgccatccacagccatcagcaaagagtgcaagacagattaatccaaagagaatagcaattaatatcccatagcatcaaagctgttcttagccaagagggactttaacgagaggggtctctaacaccctaaatcttagaagagactctaaccatcctaagtagggcctctaaccccgctttataaacttttaattgactcccatcttaacagttgcaatccatggaggaatgcttgataacctcggtgataagataaaaaaccaagcatactagaagtgttctctaaaattaaaaatacagtagttactagagaaaaattttagtccaaaaatccaactatagaaacatagaatgtgagaggtagcacataagaaataagtcatggggattttatttcatggaccagcaatatgatgataaaagccatctaacc

SEQ ID NO: 162615 - DNA, 1402 bp, Homo sapiens
  Payload ID: 12037
  Gene Symbol: OPRM1
  Gene Name: opioid receptor, mu 1
  Uniprot ID: P35372
  ENST ID: ENST00000419506
  CDS Start-End: 51-1313
cggtgctcctggctacctcgcacagcggtgcccgcccggccgtcagtaccatggacagcagcgctgcccccacgaacgccagcaattgcactgatgccttggcgtactcaagttgctccccagcacccagccccggttcctgggtcaacttgtcccacttagatggcaacctgtccgacccatgcggtccgaaccgcaccgacctgggcgggagagacagcctgtgccctccgaccggcagtccctccatgatcacggccatcacgatcatggccctctactccatcgtgtgcgtggtggggctcttcggaaacttcctggtcatgtatgtgattgtcagatacaccaagatgaagactgccaccaacatctacattttcaaccttgctctggcagatgccttagccaccagtaccctgcccttccagagtgtgaattacctaatgggaacatggccatttggaaccatcctttgcaagatagtgatctccatagattactataacatgttcaccagcatattcaccctctgcaccatgagtgttgatcgatacattgcagtctgccaccctgtcaaggccttagatttccgtactccccgaaatgccaaaattatcaatgtctgcaactggatcctctcttcagccattggtcttcctgtaatgttcatggctacaacaaaatacaggcaaggttccatagattgtacactaacattctctcatccaacctggtactgggaaaacctgctgaagatctgtgttttcatcttcgccttcattatgccagtgctcatcattaccgtgtgctatggactgatgatcttgcgcctcaagagtgtccgcatgctctctggctccaaagaaaaggacaggaatcttcgaaggatcaccaggatggtgctggtggtggtggctgtgttcatcgtctgctggactcccattcacatttacgtcatcattaaagccttggttacaatcccagaaactacgttccagactgtttcttggcacttctgcattgctctaggttacacaaacagctgcctcaacccagtcctttatgcatttctggatgaaaacttcaaacgatgcttcagagagttctgtatcccaacctcttccaacattgagcaacaaaactccactcgaattcgtcagaacactagagaccacccctccacggccaatacagtggatagaactaatcatcaggtggaattgaacctggactgtcactgtgaaaatgcaaagccttggccactgagctacaatgcagggcagtctccatttcccttcccaggaagagtctagagcattaattttgagtttgcaaaggcttgtaactatttcatatgatttttagagctgactatgacatgaaccctaaaattcctgttccc

SEQ ID NO: 162616 - DNA, 1352 bp, Homo sapiens
  Payload ID: 12037
  Gene Symbol: OPRM1
  Gene Name: opioid receptor, mu 1
  Uniprot ID: P35372
  ENST ID: ENST00000452687
  CDS Start-End: 90-1310
gaaaggaagcggctgaggcgcttggaacccgaaaagtctcggtgctcctggctacctcgcacagcggtgcccgcccggccgtcagtaccatggacagcagcgctgcccccacgaacgccagcaattgcactgatgccttggcgtactcaagttgctccccagcacccagccccggttcctgggtcaacttgtcccacttagatggcaacctgtccgacccatgcggtccgaaccgcaccgacctgggcgggagagacagcctgtgccctccgaccggcagtccctccatgatcacggccatcacgatcatggccctctactccatcgtgtgcgtggtggggctcttcggaaacttcctggtcatgtatgtgattgtcagatacaccaagatgaagactgccaccaacatctacattttcaaccttgctctggcagatgccttagccaccagtaccctgcccttccagagtgtgaattacctaatgggaacatggccatttggaaccatcctttgcaagatagtgatctccatagattactataacatgttcaccagcatattcaccctctgcaccatgagtgttgatcgatacattgcagtctgccaccctgtcaaggccttagatttccgtactccccgaaatgccaaaattatcaatgtctgcaactggatcctctcttcagccattggtcttcctgtaatgttcatggctacaacaaaatacaggcaaggttccatagattgtacactaacattctctcatccaacctggtactgggaaaacctgctgaagatctgtgttttcatcttcgccttcattatgccagtgctcatcattaccgtgtgctatggactgatgatcttgcgcctcaagagtgtccgcatgctctctggctccaaagaaaaggacaggaatcttcgaaggatcaccaggatggtgctggtggtggtggctgtgttcatcgtctgctggactcccattcacatttacgtcatcattaaagccttggttacaatcccagaaactacgttccagactgtttcttggcacttctgcattgctctaggttacacaaacagctgcctcaacccagtcctttatgcatttctggatgaaaacttcaaacgatgcttcagagagttctgtatcccaacctcttccaacattgagcaacaaaactccactcgaattcgtcagaacactagagaccacccctccacggccaatacagtggatagaactaatcatcagaaaatagatttatttcaaaagtcatctttactcaactgtgagcataccaagggctaataattacaatattttcccgtgaaagaatataagattggaagc

SEQ ID NO: 162617 - DNA, 1481 bp, Homo sapiens
  Payload ID: 12037
  Gene Symbol: OPRM1
  Gene Name: opioid receptor, mu 1
  Uniprot ID: P35372
  ENST ID: ENST00000428397
  CDS Start-End: 197-1375
gcagaggagaatgtcagatgctcagctcggtcccctccgcctgacgctcctctctgtctcagccaggactggtttctgtaagaaacagcaggagctgtggcagcggcgaaaggaagcggctgaggcgcttggaacccgaaaagtctcggtgctcctggctacctcgcacagcggtgcccgcccggccgtcagtaccatggacagcagcgctgcccccacgaacgccagcaattgcactgatgccttggcgtactcaagttgctccccagcacccagccccggttcctgggtcaacttgtcccacttagatggcaacctgtccgacccatgcggtccgaaccgcaccgacctgggcgggagagacagcctgtgccctccgaccggcagtccctccatgatcacggccatcacgatcatggccctctactccatcgtgtgcgtggtggggctcttcggaaacttcctggtcatgtatgtgattgtcagatacaccaagatgaagactgccaccaacatctacattttcaaccttgctctggcagatgccttagccaccagtaccctgcccttccagagtgtgaattacctaatgggaacatggccatttggaaccatcctttgcaagatagtgatctccatagattactataacatgttcaccagcatattcaccctctgcaccatgagtgttgatcgatacattgcagtctgccaccctgtcaaggccttagatttccgtactccccgaaatgccaaaattatcaatgtctgcaactggatcctctcttcagccattggtcttcctgtaatgttcatggctacaacaaaatacaggcaaggttccatagattgtacactaacattctctcatccaacctggtactgggaaaacctgctgaagatctgtgttttcatcttcgccttcattatgccagtgctcatcattaccgtgtgctatggactgatgatcttgcgcctcaagagtgtccgcatgctctctggctccaaagaaaaggacaggaatcttcgaaggatcaccaggatggtgctggtggtggtggctgtgttcatcgtctgctggactcccattcacatttacgtcatcattaaagccttggttacaatcccagaaactacgttccagactgtttcttggcacttctgcattgctctaggttacacaaacagctgcctcaacccagtcctttatgcatttctggatgaaaacttcaaacgatgcttcagagagttctgtatcccaacctcttccaacattgagcaacaaaactccactcgaattcgtcagaacactagagaccacccctccacggccaatacagtggatagaactaatcatcaggtacgcagtctctagaattaggtatatctactggggatgacataaaaattataaggctttgtgctaaactaggagtttaatccattatagaggatgagaatggagggaagaggggaagcaa

SEQ ID NO: 162618 - DNA, 2217 bp, Homo sapiens
  Payload ID: 12037
  Gene Symbol: OPRM1
  Gene Name: opioid receptor, mu 1
  Uniprot ID: P35372
  ENST ID: ENST00000435918
  CDS Start-End: 51-1244
cggtgctcctggctacctcgcacagcggtgcccgcccggccgtcagtaccatggacagcagcgctgcccccacgaacgccagcaattgcactgatgccttggcgtactcaagttgctccccagcacccagccccggttcctgggtcaacttgtcccacttagatggcaacctgtccgacccatgcggtccgaaccgcaccgacctgggcgggagagacagcctgtgccctccgaccggcagtccctccatgatcacggccatcacgatcatggccctctactccatcgtgtgcgtggtggggctcttcggaaacttcctggtcatgtatgtgattgtcagatacaccaagatgaagactgccaccaacatctacattttcaaccttgctctggcagatgccttagccaccagtaccctgcccttccagagtgtgaattacctaatgggaacatggccatttggaaccatcctttgcaagatagtgatctccatagattactataacatgttcaccagcatattcaccctctgcaccatgagtgttgatcgatacattgcagtctgccaccctgtcaaggccttagatttccgtactccccgaaatgccaaaattatcaatgtctgcaactggatcctctcttcagccattggtcttcctgtaatgttcatggctacaacaaaatacaggcaaggttccatagattgtacactaacattctctcatccaacctggtactgggaaaacctgctgaagatctgtgttttcatcttcgccttcattatgccagtgctcatcattaccgtgtgctatggactgatgatcttgcgcctcaagagtgtccgcatgctctctggctccaaagaaaaggacaggaatcttcgaaggatcaccaggatggtgctggtggtggtggctgtgttcatcgtctgctggactcccattcacatttacgtcatcattaaagccttggttacaatcccagaaactacgttccagactgtttcttggcacttctgcattgctctaggttacacaaacagctgcctcaacccagtcctttatgcatttctggatgaaaacttcaaacgatgcttcagagagttctgtatcccaacctcttccaacattgagcaacaaaactccactcgaattcgtcagaacactagagaccacccctccacggccaatacagtggatagaactaatcatcagagagaaagaagacagaaatctgactggtaagaaattgttacccttttgccagcatgccaggcttctgggttccctttccctgagcggccctagtgatccggcttgcggcaccatcgcctacgggccaagctgcatcataaaggaaatttttttttttcattctggccagagcaaaacacatgtgataaaacataggcattagctactctgcttagcaccaaatatcagactagcttaaatttgcccccagatgggttccatcatctttaatccgacctctgacttgcagtttcaacacgtgctctctgggcaaaacagttgccctgagtaacagaaaagataggaaaggaaaaggagagagagaaaaacgtgccagtggaagggtggggaaggtgaaatgatcaaggaggccagagaaagactcacctattgcagcaacactgtagaagttcaggcagctgcttctcggtagcaaaaggatcttttccagcaatcctattagctctcaagtttccccttttagggaggaaaaagctccccatgtcccgcgatcctgtacatgtccaaccctgccatccacagccatcagcaaagagtgcaagacagattaatccaaagagaatagcaattaatatcccatagcatcaaagctgttcttagccaagagggactttaacgagaggggtctctaacaccctaaatcttagaagagactctaaccatcctaagtagggcctctaaccccgctttataaacttttaattgactcccatcttaacagttgcaatccatggaggaatgcttgataacctcggtgataagataaaaaaccaagcatactagaagtgttctctaaaattaaaaatacagtagttactagagaaaaattttagtccaaaaatccaactatagaaacatagaatgtgagaggtagcacataagaaataagtcatggggattttatttcatggaccagcaatatgatgataaaagccatctaacc

SEQ ID NO: 162619 - DNA, 1468 bp, Homo sapiens
  Payload ID: 12037
  Gene Symbol: OPRM1
  Gene Name: opioid receptor, mu 1
  Uniprot ID: P35372
  ENST ID: ENST00000522739
  CDS Start-End: 71-1279
gcttggaacccgaaaagtctcggtgctcctggctacctcgcacagcggtgcccgcccggccgtcagtaccatggacagcagcgctgcccccacgaacgccagcaattgcactgatgccttggcgtactcaagttgctccccagcacccagccccggttcctgggtcaacttgtcccacttagatggcaacctgtccgacccatgcggtccgaaccgcaccgacctgggcgggagagacagcctgtgccctccgaccggcagtccctccatgatcacggccatcacgatcatggccctctactccatcgtgtgcgtggtggggctcttcggaaacttcctggtcatgtatgtgattgtcagatacaccaagatgaagactgccaccaacatctacattttcaaccttgctctggcagatgccttagccaccagtaccctgcccttccagagtgtgaattacctaatgggaacatggccatttggaaccatcctttgcaagatagtgatctccatagattactataacatgttcaccagcatattcaccctctgcaccatgagtgttgatcgatacattgcagtctgccaccctgtcaaggccttagatttccgtactccccgaaatgccaaaattatcaatgtctgcaactggatcctctcttcagccattggtcttcctgtaatgttcatggctacaacaaaatacaggcaaggttccatagattgtacactaacattctctcatccaacctggtactgggaaaacctgctgaagatctgtgttttcatcttcgccttcattatgccagtgctcatcattaccgtgtgctatggactgatgatcttgcgcctcaagagtgtccgcatgctctctggctccaaagaaaaggacaggaatcttcgaaggatcaccaggatggtgctggtggtggtggctgtgttcatcgtctgctggactcccattcacatttacgtcatcattaaagccttggttacaatcccagaaactacgttccagactgtttcttggcacttctgcattgctctaggttacacaaacagctgcctcaacccagtcctttatgcatttctggatgaaaacttcaaacgatgcttcagagagttctgtatcccaacctcttccaacattgagcaacaaaactccactcgaattcgtcagaacactagagaccacccctccacggccaatacagtggatagaactaatcatcagatcagagatccaatatcaaaccttcccagggtgtctgtattctgacaactgtccactgaggcaatttccatacagcgcaaagtggagtggcgatttggcagttatcaagctagaaaatctggaagcagaaactgctccgttgccctaacagggtctcatgccattccgaccttcaccaagcttagaagccaccatgtatgtggaagcaggttgcttcaagaatgtgtaggaggc

SEQ ID NO: 162620 - DNA, 2459 bp, Homo sapiens
  Payload ID: 12037
  Gene Symbol: OPRM1
  Gene Name: opioid receptor, mu 1
  Uniprot ID: P35372
  ENST ID: ENST00000522236
  CDS Start-End: 1309-2211
ggctagcatgctaattaactatgcataaccacgtttcctttcaccatgttgaaccctgacataatttttttttccacaaacacctcactctggagaaggaaatgattttttttaattaaaataaacatacattggaaatacttagtgctaaaataagcctgaaggaaaggttggaagtatgatgagtcagaaaactgactgtaaagaaaccaattacttaacataaaacaccattaaagataagccacgaaatgtaaggtctgctgggtaggaaagtggcaaatgcaatgaagcatgtctttagatcatgcaggtctataaccaacggtgaatctagcaaaagttattttctcttttggggagaaacttcttcttattaaaaaaataaaaaatgtttcaacttcttgagcaccaaggtcaattattctaaatcttaaaaccacagttttaattttgcttttttgttggtttttgtactttggagtatttgtctacattatcctttttatatttgccatatttaaagtccaaactaaaagcaaattattttctctcctcaagttaaatggctctatctttttctttaaaatccattaagaaagtgaaactcccaaagtaagtccaaaaaaaagcccccaagtctgaaaatgtggagcttttctggcagtaatgcagcttctgcaagtattgcagaccagatcaggtatcagaattttaaagcttcagtaacaaagctgtcctattgaccctgaggagatttatgaaatcactttcctgatgttattgaaaccaaaacactttcctggacactgaattcagtcctaaacaaagggcctccaaccaacagctgtcttgggctgaatgagttagactcaacctcgtgtgacggaaaaacagtaaacacaagctaacatttaaaaggaattgatggcaccgtgtaaatcagaagcccaaggagggcctggcttcaggtgtggggttctctctcacgctctcaaatccacatcctccggattaggtccattttcagacaagctcctccagcaactacataccatgcgtcttctcaggtgtgggtcctgcaggaaaactaatacactctttgtccataagtctcaaaataaactctcactggctctggttggaacatgagagcatccttgccattcaccatggccccggtcactaaacgtcttcacgccctggactggtaatacagcctatcccaaagcacctggactgagaacgggaaatgagtggttcccagagtgaaactgaggtactattactaaattaagatacaccaagatgaagactgccaccaacatctacattttcaaccttgctctggcagatgccttagccaccagtaccctgcccttccagagtgtgaattacctaatgggaacatggccatttggaaccatcctttgcaagatagtgatctccatagattactataacatgttcaccagcatattcaccctctgcaccatgagtgttgatcgatacattgcagtctgccaccctgtcaaggccttagatttccgtactccccgaaatgccaaaattatcaatgtctgcaactggatcctctcttcagccattggtcttcctgtaatgttcatggctacaacaaaatacaggcaaggttccatagattgtacactaacattctctcatccaacctggtactgggaaaacctgctgaagatctgtgttttcatcttcgccttcattatgccagtgctcatcattaccgtgtgctatggactgatgatcttgcgcctcaagagtgtccgcatgctctctggctccaaagaaaaggacaggaatcttcgaaggatcaccaggatggtgctggtggtggtggctgtgttcatcgtctgctggactcccattcacatttacgtcatcattaaagccttggttacaatcccagaaactacgttccagactgtttcttggcacttctgcattgctctaggttacacaaacagctgcctcaacccagtcctttatgcatttctggatgaaaacttcaaacgatgcttcagagagttctgtatcccaacctcttccaacattgagcaacaaaactccactcgaattcgtcagaacactagagaccacccctccacggccaatacagtggatagaactaatcatcagctagaaaatctggaagcagaaactgctccgttgccctaacagggtctcatgccattccgaccttcaccaagcttagaagccaccatgtatgtggaagcaggttgcttcaagaatgtgtaggaggctctaattctctaggaaagtgcctgcttttaggtcatccaacctctttcctctctggccactctgctctgcacattagagggacagccaaaagtaagtggagcatttggaaggaaaggaatataccacaccgaggagtccagtttgtgcaagacacccagtgg

SEQ ID NO: 162621 - DNA, 2440 bp, Homo sapiens
  Payload ID: 12037
  Gene Symbol: OPRM1
  Gene Name: opioid receptor, mu 1
  Uniprot ID: P35372
  ENST ID: ENST00000522555
  CDS Start-End: 1290-2192
ggctagcatgctaattaactatgcataaccacgtttcctttcaccatgttgaaccctgacataatttttttttccacaaacacctcactctggagaaggaaatgattttttttaattaaaataaacatacattggaaatacttagtgctaaaataagcctgaaggaaaggttggaagtatgatgagtcagaaaactgactgtaaagaaaccaattacttaacataaaacaccattaaagataagccacgaaatgtaaggtctgctgggtaggaaagtggcaaatgcaatgaagcatgtctttagatcatgcaggtctataaccaacggtgaatctagcaaaagttattttctcttttggggagaaacttcttcttattaaaaaaataaaaaatgtttcaacttcttgagcaccaaggtcaattattctaaatcttaaaaccacagttttaattttgcttttttgttggtttttgtactttggagtatttgtctacattatcctttttatatttgccatatttaaagtccaaactaaaagcaaattattttctctcctcaagttaaatggctctatctttttctttaaaatccattaagaaagtgaaactcccaaagtaagtccaaaaaaaagcccccaagtctgaaaatgtggagcttttctggcagtaatgcagcttctgcaagtattgcagaccagatcaggtatcagaattttaaagcttcagtaacaaagctgtcctattgaccctgaggagatttatgaaatcactttcctgatgttattgaaaccaaaacactttcctggacactgaattcagtcctaaacaaagggcctccaaccaacagctgtcttgggctgaatgagttagactcaacctcgtgtgacggaaaaacagtaaacacaagctaacatttaaaaggaattgatggcaccgtgtaaatcagaagcccaaggagggcctggcttcaggtgtggggttctctctcacgctctcaaatccacatcctccggattaggtccattttcagacaagctcctccagcaactacataccatgcgtcttctcaggtgtgggtcctgcaggaaaactaatacactctttgtccataagtctcaaaataaactctcactggctctggttggaacatgagagcatccttgccattcaccatggccccggtcactaaacgtcttcacgccctggactggtaatacagcctatcccaaagcacctggactgagaacgggaaatgagtggttcccagagtgaaactgagatacaccaagatgaagactgccaccaacatctacattttcaaccttgctctggcagatgccttagccaccagtaccctgcccttccagagtgtgaattacctaatgggaacatggccatttggaaccatcctttgcaagatagtgatctccatagattactataacatgttcaccagcatattcaccctctgcaccatgagtgttgatcgatacattgcagtctgccaccctgtcaaggccttagatttccgtactccccgaaatgccaaaattatcaatgtctgcaactggatcctctcttcagccattggtcttcctgtaatgttcatggctacaacaaaatacaggcaaggttccatagattgtacactaacattctctcatccaacctggtactgggaaaacctgctgaagatctgtgttttcatcttcgccttcattatgccagtgctcatcattaccgtgtgctatggactgatgatcttgcgcctcaagagtgtccgcatgctctctggctccaaagaaaaggacaggaatcttcgaaggatcaccaggatggtgctggtggtggtggctgtgttcatcgtctgctggactcccattcacatttacgtcatcattaaagccttggttacaatcccagaaactacgttccagactgtttcttggcacttctgcattgctctaggttacacaaacagctgcctcaacccagtcctttatgcatttctggatgaaaacttcaaacgatgcttcagagagttctgtatcccaacctcttccaacattgagcaacaaaactccactcgaattcgtcagaacactagagaccacccctccacggccaatacagtggatagaactaatcatcagctagaaaatctggaagcagaaactgctccgttgccctaacagggtctcatgccattccgaccttcaccaagcttagaagccaccatgtatgtggaagcaggttgcttcaagaatgtgtaggaggctctaattctctaggaaagtgcctgcttttaggtcatccaacctctttcctctctggccactctgctctgcacattagagggacagccaaaagtaagtggagcatttggaaggaaaggaatataccacaccgaggagtccagtttgtgcaagacacccagtgg

SEQ ID NO: 162622 - DNA, 1251 bp, Homo sapiens
  Payload ID: 12037
  Gene Symbol: OPRM1
  Gene Name: opioid receptor, mu 1
  Uniprot ID: P35372
  ENST ID: ENST00000524163
  CDS Start-End: 51-1220
cggtgctcctggctacctcgcacagcggtgcccgcccggccgtcagtaccatggacagcagcgctgcccccacgaacgccagcaattgcactgatgccttggcgtactcaagttgctccccagcacccagccccggttcctgggtcaacttgtcccacttagatggcaacctgtccgacccatgcggtccgaaccgcaccgacctgggcgggagagacagcctgtgccctccgaccggcagtccctccatgatcacggccatcacgatcatggccctctactccatcgtgtgcgtggtggggctcttcggaaacttcctggtcatgtatgtgattgtcagatacaccaagatgaagactgccaccaacatctacattttcaaccttgctctggcagatgccttagccaccagtaccctgcccttccagagtgtgaattacctaatgggaacatggccatttggaaccatcctttgcaagatagtgatctccatagattactataacatgttcaccagcatattcaccctctgcaccatgagtgttgatcgatacattgcagtctgccaccctgtcaaggccttagatttccgtactccccgaaatgccaaaattatcaatgtctgcaactggatcctctcttcagccattggtcttcctgtaatgttcatggctacaacaaaatacaggcaaggttccatagattgtacactaacattctctcatccaacctggtactgggaaaacctgctgaagatctgtgttttcatcttcgccttcattatgccagtgctcatcattaccgtgtgctatggactgatgatcttgcgcctcaagagtgtccgcatgctctctggctccaaagaaaaggacaggaatcttcgaaggatcaccaggatggtgctggtggtggtggctgtgttcatcgtctgctggactcccattcacatttacgtcatcattaaagccttggttacaatcccagaaactacgttccagactgtttcttggcacttctgcattgctctaggttacacaaacagctgcctcaacccagtcctttatgcatttctggatgaaaacttcaaacgatgcttcagagagttctgtatcccaacctcttccaacattgagcaacaaaactccactcgaattcgtcagaacactagagaccacccctccacggccaatacagtggatagaactaatcatcagagctgactatgacatgaaccctaaaattcctgttccc

SEQ ID NO: 162623 - DNA, 1001 bp, Homo sapiens
  Payload ID: 12037
  Gene Symbol: OPRM1
  Gene Name: opioid receptor, mu 1
  ENST ID: ENST00000520282
  CDS Start-End: 514-1001
gtcttcctgtaaagaaaatgatgagggctaaatccatcagcaccaaagctgggaagccctccaggttcatttggaagaaaatactcctctgagctcaaaggaagtgtgatctgtcacaatattgtatgcctgcactaagtttgcatcctgaaaactcactggaagataggaaagcaagcatgaaaaagcagccgggtcagacaggcttctggattcagtgtgtggacatgactttgcctgcatgaattgcccctttctcctacaaacaagagaattcggtcaagtggatgtggcagaactgggctgctctgagatgatagaaaagggctcctgcttttcctgtaattgcagccccttgttcttgtggttgctacatgcaataaatgtaattctatgagaaggaccagcccttacatcccatcaaaatgtttcctggaaacctggagcacagaactctgatatcctctcacactgtggcaggagaagcagcacaaggcacaatgctgaaatagcatggtccaggccaggactggtttctgtaagaaacagcaggagctgtggcagcggcgaaaggaagcggctgaggcgcttggaacccgaaaagtctcggtgctcctggctacctcgcacagcggtgcccgcccggccgtcagtaccatggacagcagcgctgcccccacgaacgccagcaattgcactgatgccttggcgtactcaagttgctccccagcacccagccccggttcctgggtcaacttgtcccacttagatggcaacctgtccgacccatgcggtccgaaccgcaccgacctgggcgggagagacagcctgtgccctccgaccggcagtccctccatgatcacggccatcacgatcatggccctctactccatcgtgtgcgtggtggggctcttcggaaacttcctggtcatgtatgtgattgtcagatacaccaagatgaagactgccaccaacatctacattttcaaccttgctctggc

SEQ ID NO: 162624 - DNA, 1060 bp, Homo sapiens
  Payload ID: 12037
  Gene Symbol: OPRM1
  Gene Name: opioid receptor, mu 1
  Uniprot ID: P35372
  ENST ID: ENST00000518759
  CDS Start-End: 13-972
cctgtaaagaaaatgatgagggctaaatccatcagcaccaaagctgggaagccctccagatacaccaagatgaagactgccaccaacatctacattttcaaccttgctctggcagatgccttagccaccagtaccctgcccttccagagtgtgaattacctaatgggaacatggccatttggaaccatcctttgcaagatagtgatctccatagattactataacatgttcaccagcatattcaccctctgcaccatgagtgttgatcgatacattgcagtctgccaccctgtcaaggccttagatttccgtactccccgaaatgccaaaattatcaatgtctgcaactggatcctctcttcagccattggtcttcctgtaatgttcatggctacaacaaaatacaggcaaggttccatagattgtacactaacattctctcatccaacctggtactgggaaaacctgctgaagatctgtgttttcatcttcgccttcattatgccagtgctcatcattaccgtgtgctatggactgatgatcttgcgcctcaagagtgtccgcatgctctctggctccaaagaaaaggacaggaatcttcgaaggatcaccaggatggtgctggtggtggtggctgtgttcatcgtctgctggactcccattcacatttacgtcatcattaaagccttggttacaatcccagaaactacgttccagactgtttcttggcacttctgcattgctctaggttacacaaacagctgcctcaacccagtcctttatgcatttctggatgaaaacttcaaacgatgcttcagagagttctgtatcccaacctcttccaacattgagcaacaaaactccactcgaattcgtcagaacactagagaccacccctccacggccaatacagtggatagaactaatcatcagctagaaaatctggaagcagaaactgctccgttgccctaacagggtctcatgccattccgaccttcaccaagcttagaagccaccatgtatgtggaagcaggttgcttcaagaatgtgtaggaggctc

SEQ ID NO: 162625 - DNA, 1045 bp, Homo sapiens
  Payload ID: 12037
  Gene Symbol: OPRM1
  Gene Name: opioid receptor, mu 1
  Uniprot ID: P35372
  ENST ID: ENST00000524150
  CDS Start-End: 67-627
ggaacccgaaaagtctcggtgctcctggctacctcgcacagcggtgcccgcccggccgtcagtaccatggacagcagcgctgcccccacgaacgccagcaattgcactgatgccttggcgtactcaagttgctccccagcacccagccccggttcctgggtcaacttgtcccacttagatggcaacctgtccgacccatgcggtccgaaccgcaccgacctgggcgggagagacagcctgtgccctccgaccggcagtccctccatgatcacggccatcacgatcatggccctctactccatcgtgtgcgtggtggggctcttcggaaacttcctggtcatgtatgtgattgtcaggttccatagattgtacactaacattctctcatccaacctggtactgggaaaacctgctgaagatctgtgttttcatcttcgccttcattatgccagtgctcatcattaccgtgtgctatggactgatgatcttgcgcctcaagagtgtccgcatgctctctggctccaaagaaaaggacaggaatcttcgaaggatcaccaggatggtgctggtggtggtggctgtgttcatcgtctgctggactcccattcacatttacgtcatcattaaagccttggttacaatcccagaaactacgttccagactgtttcttggcacttctgcattgctctaggttacacaaacagctgcctcaacccagtcctttatgcatttctggatgaaaacttcaaacgatgcttcagagagttctgtatcccaacctcttccaacattgagcaacaaaactccactcgaattcgtcagaacactagagaccacccctccacggccaatacagtggatagaactaatcatcagccacccttggcagtcagcatggcccagatctttacacgatatcctcctccgactcatcgtgagaaaacctgcaatgattacatgaagaggtagataatgtattaccctgatttggtaggtaaagtattatcctgatttatgtgacagagtgaaaggcaacttttaatt

SEQ ID NO: 162626 - DNA, 1519 bp, Homo sapiens
  Payload ID: 12037
  Gene Symbol: OPRM1
  Gene Name: opioid receptor, mu 1
  Uniprot ID: P35372
  ENST ID: ENST00000520708
  CDS Start-End: 529-1431
cctgtaaagaaaatgatgagggctaaatccatcagcaccaaagctgggaagccctccaggttcatttggaagaaaatactcctctgagctcaaaggaagtgtgatctgtcacaatattgtatgcctgcactaagtttgcatcctgaaaactcactggaagataggaaagcaagcatgaaaaagcagccgggtcagacaggcttctggattcagtgtgtggacatgactttgcctgcatgaattgcccctttctcctacaaacaagagaattcggtcaagtggatgtggcagaactgggctgctctgagatgatagaaaagggctcctgcttttcctgtaattgcagccccttgttcttgtggttgctacatgcaataaatgtaattctatgagaaggaccagcccttacatcccatcaaaatgtttcctggaaacctggagcacagaactctgatatcctctcacactgtggcaggagaagcagcacaaggcacaatgctgaaatagcatggtccaggatacaccaagatgaagactgccaccaacatctacattttcaaccttgctctggcagatgccttagccaccagtaccctgcccttccagagtgtgaattacctaatgggaacatggccatttggaaccatcctttgcaagatagtgatctccatagattactataacatgttcaccagcatattcaccctctgcaccatgagtgttgatcgatacattgcagtctgccaccctgtcaaggccttagatttccgtactccccgaaatgccaaaattatcaatgtctgcaactggatcctctcttcagccattggtcttcctgtaatgttcatggctacaacaaaatacaggcaaggttccatagattgtacactaacattctctcatccaacctggtactgggaaaacctgctgaagatctgtgttttcatcttcgccttcattatgccagtgctcatcattaccgtgtgctatggactgatgatcttgcgcctcaagagtgtccgcatgctctctggctccaaagaaaaggacaggaatcttcgaaggatcaccaggatggtgctggtggtggtggctgtgttcatcgtctgctggactcccattcacatttacgtcatcattaaagccttggttacaatcccagaaactacgttccagactgtttcttggcacttctgcattgctctaggttacacaaacagctgcctcaacccagtcctttatgcatttctggatgaaaacttcaaacgatgcttcagagagttctgtatcccaacctcttccaacattgagcaacaaaactccactcgaattcgtcagaacactagagaccacccctccacggccaatacagtggatagaactaatcatcagctagaaaatctggaagcagaaactgctccgttgccctaacagggtctcatgccattccgaccttcaccaagcttagaagccaccatgtatgtggaagcaggttgcttcaagaatgtgtaggaggctc

SEQ ID NO: 162627 - DNA, 2594 bp, Homo sapiens
  Payload ID: 12037
  Gene Symbol: OPRM1
  Gene Name: opioid receptor, mu 1
  Uniprot ID: P35372
  ENST ID: ENST00000519083
  CDS Start-End: 51-1259
cggtgctcctggctacctcgcacagcggtgcccgcccggccgtcagtaccatggacagcagcgctgcccccacgaacgccagcaattgcactgatgccttggcgtactcaagttgctccccagcacccagccccggttcctgggtcaacttgtcccacttagatggcaacctgtccgacccatgcggtccgaaccgcaccgacctgggcgggagagacagcctgtgccctccgaccggcagtccctccatgatcacggccatcacgatcatggccctctactccatcgtgtgcgtggtggggctcttcggaaacttcctggtcatgtatgtgattgtcagatacaccaagatgaagactgccaccaacatctacattttcaaccttgctctggcagatgccttagccaccagtaccctgcccttccagagtgtgaattacctaatgggaacatggccatttggaaccatcctttgcaagatagtgatctccatagattactataacatgttcaccagcatattcaccctctgcaccatgagtgttgatcgatacattgcagtctgccaccctgtcaaggccttagatttccgtactccccgaaatgccaaaattatcaatgtctgcaactggatcctctcttcagccattggtcttcctgtaatgttcatggctacaacaaaatacaggcaaggttccatagattgtacactaacattctctcatccaacctggtactgggaaaacctgctgaagatctgtgttttcatcttcgccttcattatgccagtgctcatcattaccgtgtgctatggactgatgatcttgcgcctcaagagtgtccgcatgctctctggctccaaagaaaaggacaggaatcttcgaaggatcaccaggatggtgctggtggtggtggctgtgttcatcgtctgctggactcccattcacatttacgtcatcattaaagccttggttacaatcccagaaactacgttccagactgtttcttggcacttctgcattgctctaggttacacaaacagctgcctcaacccagtcctttatgcatttctggatgaaaacttcaaacgatgcttcagagagttctgtatcccaacctcttccaacattgagcaacaaaactccactcgaattcgtcagaacactagagaccacccctccacggccaatacagtggatagaactaatcatcagatcagagatccaatatcaaaccttcccagggtgtctgtattctgacaactgtccactgaggcaatttccatacagcgcaaagtggagtggcgatttggcagttatcaagggacctccagccaagtttgttgctgaccaacttgccgggtcgtcttgaaaagggggcttacaggtgttccaagcccgtgttttatcctgaagtatccctcaacacagaaaaacgacctcataacacaaaatacaccagcttaaaaatagcctttgaattatttttcacattaatcaaaactttacagaggagataaacactgatttttttattttattttattttattttattttattttattgccattcattcaaccgtttgcacagagagaaagaagacagaaatctgactggtaagaaattgttacccttttgccagcatgccaggcttctgggttccctttccctgagcggccctagtgatccggcttgcggcaccatcgcctacgggccaagctgcatcataaaggaaatttttttttttcattctggccagagcaaaacacatgtgataaaacataggcattagctactctgcttagcaccaaatatcagactagcttaaatttgcccccagatgggttccatcatctttaatccgacctctgacttgcagtttcaacacgtgctctctgggcaaaacagttgccctgagtaacagaaaagataggaaaggaaaaggagagagagaaaaacgtgccagtggaagggtggggaaggtgaaatgatcaaggaggccagagaaagactcacctattgcagcaacactgtagaagttcaggcagctgcttctcggtagcaaaaggatcttttccagcaatcctattagctctcaagtttccccttttagggaggaaaaagctccccatgtcccgcgatcctgtacatgtccaaccctgccatccacagccatcagcaaagagtgcaagacagattaatccaaagagaatagcaattaatatcccatagcatcaaagctgttcttagccaagagggactttaacgagaggggtctctaacaccctaaatcttagaagagactctaaccatcctaagtagggcctctaaccccgctttataaacttttaattgactcccatcttaacagttgcaatccatggaggaatgcttgataacctcggtgataagataaaaaaccaagcatactagaagtgttctctaaaattaaaaatacagtagttactagagaaaaattttagtccaaaaatccaactatagaaacatagaatgtgagaggtagcacataagaaataagtcatggggattttatttcatggaccagcaatatgatgataaaagccatctaacc

SEQ ID NO: 162628 - DNA, 1261 bp, Homo sapiens
  Payload ID: 12038
  Gene Symbol: OPN1LW
  Gene Name: opsin 1 (cone pigments), long-wave-sensitive
  Uniprot ID: P04000
  ENST ID: ENST00000369951
  CDS Start-End: 61-1155
cgtgaccctcaggtgatgcgccagggccggctgccgtcggggacagggctttccatagccatggcccagcagtggagcctccaaaggctcgcaggccgccatccgcaggacagctatgaggacagcacccagtccagcatcttcacctacaccaacagcaactccaccagaggccccttcgaaggcccgaattaccacatcgctcccagatgggtgtaccacctcaccagtgtctggatgatctttgtggtcactgcatccgtcttcacaaatgggcttgtgctggcggccaccatgaagttcaagaagctgcgccacccgctgaactggatcctggtgaacctggcggtcgctgacctagcagagaccgtcatcgccagcactatcagcattgtgaaccaggtctctggctacttcgtgctgggccaccctatgtgtgtcctggagggctacaccgtctccctgtgtgggatcacaggtctctggtctctggccatcatttcctgggagagatggatggtggtctgcaagccctttggcaatgtgagatttgatgccaagctggccatcgtgggcattgccttctcctggatctgggctgctgtgtggacagccccgcccatctttggttggagcaggtactggccccacggcctgaagacttcatgcggcccagacgtgttcagcggcagctcgtaccccggggtgcagtcttacatgattgtcctcatggtcacctgctgcatcatcccactcgctatcatcatgctctgctacctccaagtgtggctggccatccgagcggtggcaaagcagcagaaagagtctgaatccacccagaaggcagagaaggaagtgacgcgcatggtggtggtgatgatctttgcgtactgcgtctgctggggaccctacaccttcttcgcatgctttgctgctgccaaccctggttacgccttccaccctttgatggctgccctgccggcctactttgccaaaagtgccactatctacaaccccgttatctatgtctttatgaaccggcagtttcgaaactgcatcttgcagcttttcgggaagaaggttgacgatggctctgaactctccagcgcctccaaaacggaggtctcatctgtgtcctcggtatcgcctgcatgaggtctgcctcctacccatcccgcccaccggggctttggccacctctcctttccccctccttctccatccctgtaaaataaatgtaatttatctttgccaaaaccaa

SEQ ID NO: 162629 - DNA, 592 bp, Homo sapiens
  Payload ID: 12038
  Gene Symbol: OPN1LW
  Gene Name: opsin 1 (cone pigments), long-wave-sensitive
  ENST ID: ENST00000442922
  CDS Start-End: 1-495
atcacaggtctctggtctctggccatcatttcctgggagagatggatggtggtctgcaagccctttggcaatgtgagatttgatgccaagctggccatcgtgggcattgccttctcctggatctgggctgctgtgtggacagccccgcccatctttggttggagcaggtactggccccacggcctgaagacttcatgcggcccagacgtgttcagcggcagctcgtaccccggggtgcagtcttacatgattgtcctcatggtcacctgctgcatcatcccactcgctatcatcatgctctgctacctccaagtgtggctggccatccgagcggtggcaaagcagcagaaagagtctgaatccacccagaaggcagagaaggaatttcgaaactgcatcttgcagcttttcgggaagaaggttgacgatggctctgaactctccagcgcctccaaaacggaggtctcatctgtgtcctcggtatcgcctgcatgaggtctgcctcctacccatcccgcccaccggggctttggccacctctcctttccccctccttctccatccctgtaaaataaatgtaatttatctttgc

SEQ ID NO: 162630 - DNA, 588 bp, Homo sapiens
  Payload ID: 12039
  Gene Symbol: OPN1MW
  Gene Name: opsin 1 (cone pigments), medium-wave-sensitive
  ENST ID: ENST00000596998
  CDS Start-End: 1-493
cacaggtctctggtctctggccatcatttcctgggagagatggatggtggtctgcaagccctttggcaatgtgagatttgatgccaagctggccatcgtgggcattgccttctcctggatctgggctgctgtgtggacagccccgcccatctttggttggagcaggtactggccccacggcctgaagacttcatgcggcccagacgtgttcagcggcagctcgtaccccggggtgcagtcttacatgattgtcctcatggtcacctgctgcatcaccccactcagcatcatcgtgctctgctacctccaagtgtggctggccatccgagcggtggcaaagcagcagaaagagtctgaatccacccagaaggcagagaaggaatttcgaaactgcatcttgcagcttttcgggaagaaggttgacgatggctctgaactctccagcgcctccaaaacggaggtctcatctgtgtcctcggtatcgcctgcatgaggtctgcctcctacccatcccgcccaccggggctttggccacctctcctttccccctccttctccatccctgtaaaataaatgtaatttatcttt

SEQ ID NO: 162631 - DNA, 1242 bp, Homo sapiens
  Payload ID: 12039
  Gene Symbol: OPN1MW
  Gene Name: opsin 1 (cone pigments), medium-wave-sensitive
  Uniprot ID: P04001
  ENST ID: ENST00000595290
  CDS Start-End: 83-1177
cccactggccggtataaagcaccgtgaccctcaggtgacgcaccagggccggctgccgtcggggacagggctttccatagccatggcccagcagtggagcctccaaaggctcgcaggccgccatccgcaggacagctatgaggacagcacccagtccagcatcttcacctacaccaacagcaactccaccagaggccccttcgaaggcccgaattaccacatcgctcccagatgggtgtaccacctcaccagtgtctggatgatctttgtggtcattgcatccgtcttcacaaatgggcttgtgctggcggccaccatgaagttcaagaagctgcgccacccgctgaactggatcctggtgaacctggcggtcgctgacctggcagagaccgtcatcgccagcactatcagcgttgtgaaccaggtctatggctacttcgtgctgggccaccctatgtgtgtcctggagggctacaccgtctccctgtgtgggatcacaggtctctggtctctggccatcatttcctgggagagatggatggtggtctgcaagccctttggcaatgtgagatttgatgccaagctggccatcgtgggcattgccttctcctggatctgggctgctgtgtggacagccccgcccatctttggttggagcaggtactggccccacggcctgaagacttcatgcggcccagacgtgttcagcggcagctcgtaccccggggtgcagtcttacatgattgtcctcatggtcacctgctgcatcaccccactcagcatcatcgtgctctgctacctccaagtgtggctggccatccgagcggtggcaaagcagcagaaagagtctgaatccacccagaaggcagagaaggaagtgacgcgcatggtggtggtgatggtcctggcattctgcttctgctggggaccatacgccttcttcgcatgctttgctgctgccaaccctggctaccccttccaccctttgatggctgccctgccggccttctttgccaaaagtgccactatctacaaccccgttatctatgtctttatgaaccggcagtttcgaaactgcatcttgcagcttttcgggaagaaggttgacgatggctctgaactctccagcgcctccaaaacggaggtctcatctgtgtcctcggtatcgcctgcatgaggtctgcctcctacccatcccgcccaccggggctttggccacctctcctttccccctccttctcc

SEQ ID NO: 162632 - DNA, 1261 bp, Homo sapiens
  Payload ID: 12040
  Gene Symbol: OPN1MW2
  Gene Name: opsin 1 (cone pigments), medium-wave-sensitive 2
  Uniprot ID: P04001
  ENST ID: ENST00000369929
  CDS Start-End: 61-1155
cgtgaccctcaggtgacgcaccagggccggctgccgtcggggacagggctttccatagccatggcccagcagtggagcctccaaaggctcgcaggccgccatccgcaggacagctatgaggacagcacccagtccagcatcttcacctacaccaacagcaactccaccagaggccccttcgaaggcccgaattaccacatcgctcccagatgggtgtaccacctcaccagtgtctggatgatctttgtggtcattgcatccgtcttcacaaatgggcttgtgctggcggccaccatgaagttcaagaagctgcgccacccgctgaactggatcctggtgaacctggcggtcgctgacctggcagagaccgtcatcgccagcactatcagcgttgtgaaccaggtctatggctacttcgtgctgggccaccctatgtgtgtcctggagggctacaccgtctccctgtgtgggatcacaggtctctggtctctggccatcatttcctgggagagatggatggtggtctgcaagccctttggcaatgtgagatttgatgccaagctggccatcgtgggcattgccttctcctggatctgggctgctgtgtggacagccccgcccatctttggttggagcaggtactggccccacggcctgaagacttcatgcggcccagacgtgttcagcggcagctcgtaccccggggtgcagtcttacatgattgtcctcatggtcacctgctgcatcaccccactcagcatcatcgtgctctgctacctccaagtgtggctggccatccgagcggtggcaaagcagcagaaagagtctgaatccacccagaaggcagagaaggaagtgacgcgcatggtggtggtgatggtcctggcattctgcttctgctggggaccctacgccttcttcgcatgctttgctgctgccaaccctggctaccccttccaccctttgatggctgccctgccggccttctttgccaaaagtgccactatctacaaccccgttatctatgtctttatgaaccggcagtttcgaaactgcatcttgcagcttttcgggaagaaggttgacgatggctctgaactctccagcgcctccaaaacggaggtctcatctgtgtcctcggtatcgcctgcatgaggtctgcctcctacccatcccgcccaccggggctttggccacctctcctttccccctccttctccatccctgtaaaataaatgtaatttatctttgccaaaaccaa

SEQ ID NO: 162633 - DNA, 590 bp, Homo sapiens
  Payload ID: 12040
  Gene Symbol: OPN1MW2
  Gene Name: opsin 1 (cone pigments), medium-wave-sensitive 2
  ENST ID: ENST00000430419
  CDS Start-End: 1-493
cacaggtctctggtctctggccatcatttcctgggagagatggatggtggtctgcaagccctttggcaatgtgagatttgatgccaagctggccatcgtgggcattgccttctcctggatctgggctgctgtgtggacagccccgcccatctttggttggagcaggtactggccccacggcctgaagacttcatgcggcccagacgtgttcagcggcagctcgtaccccggggtgcagtcttacatgattgtcctcatggtcacctgctgcatcaccccactcagcatcatcgtgctctgctacctccaagtgtggctggccatccgagcggtggcaaagcagcagaaagagtctgaatccacccagaaggcagagaaggaatttcgaaactgcatcttgcagcttttcgggaagaaggttgacgatggctctgaactctccagcgcctccaaaacggaggtctcatctgtgtcctcggtatcgcctgcatgaggtctgcctcctacccatcccgcccaccggggctttggccacctctcctttccccctccttctccatccctgtaaaataaatgtaatttatctttgc

SEQ ID NO: 162634 - DNA, 1998 bp, Homo sapiens
  Payload ID: 12041
  Gene Symbol: OPN1MW3
  Gene Name: opsin 1 (cone pigments), medium-wave-sensitive 3
  Uniprot ID: P04001
  ENST ID: ENST00000599405
  CDS Start-End: 83-1177
cccactggccggtataaagcaccgtgaccctcaggtgacgcaccagggccggctgccgtcggggacagggctttccatagccatggcccagcagtggagcctccaaaggctcgcaggccgccatccgcaggacagctatgaggacagcacccagtccagcatcttcacctacaccaacagcaactccaccagaggccccttcgaaggcccgaattaccacatcgctcccagatgggtgtaccacctcaccagtgtctggatgatctttgtggtcattgcatccgtcttcacaaatgggcttgtgctggcggccaccatgaagttcaagaagctgcgccacccgctgaactggatcctggtgaacctggcggtcgctgacctggcagagaccgtcatcgccagcactatcagcgttgtgaaccaggtctatggctacttcgtgctgggccaccctatgtgtgtcctggagggctacaccgtctccctgtgtgggatcacaggtctctggtctctggccatcatttcctgggagagatggatggtggtctgcaagccctttggcaatgtgagatttgatgccaagctggccatcgtgggcattgccttctcctggatctgggctgctgtgtggacagccccgcccatctttggttggagcaggtactggccccacggcctgaagacttcatgcggcccagacgtgttcagcggcagctcgtaccccggggtgcagtcttacatgattgtcctcatggtcacctgctgcatcaccccactcagcatcatcgtgctctgctacctccaagtgtggctggccatccgagcggtggcaaagcagcagaaagagtctgaatccacccagaaggcagagaaggaagtgacgcgcatggtggtggtgatggtcctggcattctgcttctgctggggaccctacgccttcttcgcatgctttgctgctgccaaccctggctaccccttccaccctttgatggctgccctgccggccttctttgccaaaagtgccactatctacaaccccgttatctatgtctttatgaaccggcagtttcgaaactgcatcttgcagcttttcgggaagaaggttgacgatggctctgaactctccagcgcctccaaaacggaggtctcatctgtgtcctcggtatcgcctgcatgaggtctgcctcctacccatcccgcccaccggggctttggccacctctcctttccccctccttctccatccctgtaaaataaatgtaatttatctttgccaaaaccaacaaagtcacagaggctttcactgcagtgtgggaccacctgagcctctgcgtgtgcaggcactgggtctcgagagggtgcaagggggataaagaggagagagcgcttcatagactttaagttttcccgagcctcatgtctaccgatggcgtgaaaggatcctggcaaaacagaagtgtgaggcaggtgggcgtctatatccatttcaccaggctggtggttacataatcggcaagcaagagctgtggaggggcttgctggatgccctcagcacccaggaggagggagggagctagcaagctaaggcaggtggccctcctggccccttaaggtccatctgctggaggcccagagtccttggagtacagtctacacctggaggggacccattcctgccagtctgtggcagggatggcgcgccacctctgccaggccaggaccccaagcccgatcagcatcagcatggtgcaggtgcacaggcgtgagctgatcagtgacgaggggcaggcacacaaggtggagacaaagaccaagaggacggttgccagtgagaggcgcggactcaggaacttgaacaacatctgcgggggacggctttggaggtgctccgctgcctccagttgggtgacttgctgtagcatctccagcttggatattcggctcttgaaggtctccgtgatctcctgcaggagacgaaaatgcacgcaccagaagtca

SEQ ID NO: 162635 - DNA, 1096 bp, Homo sapiens
  Payload ID: 12042
  Gene Symbol: OPN1SW
  Gene Name: opsin 1 (cone pigments), short-wave-sensitive
  Uniprot ID: P03999
  ENST ID: ENST00000249389
  CDS Start-End: 1-1047
atgagaaaaatgtcggaggaagagttttatctgttcaaaaatatctcttcagtggggccgtgggatgggcctcagtaccacattgcccctgtctgggccttctacctccaggcagctttcatgggcactgtcttccttatagggttcccactcaatgccatggtgctggtggccacactgcgctacaaaaagttgcggcagcccctcaactacattctggtcaacgtgtccttcggaggcttcctcctctgcatcttctctgtcttccctgtcttcgtcgccagctgtaacggatacttcgtcttcggtcgccatgtttgtgctttggagggcttcctgggcactgtagcaggtctggttacaggatggtcactggccttcctggcctttgagcgctacattgtcatctgtaagcccttcggcaacttccgcttcagctccaagcatgcactgacggtggtcctggctacctggaccattggtattggcgtctccatcccacccttctttggctggagccggttcatccctgagggcctgcagtgttcctgtggccctgactggtacaccgtgggcaccaaataccgcagcgagtcctatacgtggttcctcttcatcttctgcttcattgtgcctctctccctcatctgcttctcctacactcagctgctgagggccctgaaagctgttgcagctcagcagcaggagtcagctacgacccagaaggctgaacgggaggtgagccgcatggtggttgtgatggtaggatccttctgtgtctgctacgtgccctacgcggccttcgccatgtacatggtcaacaaccgtaaccatgggctggacttacggcttgtcaccattccttcattcttctccaagagtgcttgcatctacaatcccatcatctactgcttcatgaataagcagttccaagcttgcatcatgaagatggtgtgtgggaaggccatgacagatgaatccgacacatgcagctcccagaaaacagaagtttctactgtctcgtctacccaagttggccccaactgaggacccaatattggcctgtttgcaacagctagaattaaattttactttt

SEQ ID NO: 162636 - DNA, 2620 bp, Homo sapiens
  Payload ID: 12043
  Gene Symbol: OPN3
  Gene Name: opsin 3
  Uniprot ID: Q9H1Y3
  ENST ID: ENST00000366554
  CDS Start-End: 108-1316
atggctagagcaggcggcggagccccaaccccacccagtgcggagcgcgccgcgagccccgccgcaagctgagcgcctccgcccgccaggcgcgccggcgccgggccatgtactcggggaaccgcagcggcggccacggctactgggacggcggcggggccgcgggcgctgaggggccggcgccggcggggacactgagccccgcgcccctcttcagccccggcacctacgagcgcctggcgctgctgctgggctccattgggctgctgggcgtcggcaacaacctgctggtgctcgtcctctactacaagttccagcggctccgcactcccactcacctcctcctggtcaacatcagcctcagcgacctgctggtgtccctcttcggggtcacctttaccttcgtgtcctgcctgaggaacggctgggtgtgggacaccgtgggctgcgtgtgggacgggtttagcggcagcctcttcgggattgtttccattgccaccctaaccgtgctggcctatgaacgttacattcgcgtggtccatgccagagtgatcaatttttcctgggcctggagggccattacctacatctggctctactcactggcgtgggcaggagcacctctcctgggatggaacaggtacatcctggacgtacacggactaggctgcactgtggactggaaatccaaggatgccaacgattcctcctttgtgcttttcttatttcttggctgcctggtggtgcccctgggtgtcatagcccattgctatggccatattctatattccattcgaatgcttcgttgtgtggaagatcttcagacaattcaagtgatcaagattttaaaatatgaaaagaaactggccaaaatgtgctttttaatgatattcaccttcctggtctgttggatgccttatatcgtgatctgcttcttggtggttaatggtcatggtcacctggtcactccaacaatatctattgtttcgtacctctttgctaaatcgaacactgtatacaatccagtgatttatgtcttcatgatcagaaagtttcgaagatcccttttgcagcttctgtgcctccgactgctgaggtgccagaggcctgctaaagacctaccagcagctggaagtgaaatgcagatcagacccattgtgatgtcacagaaagatggggacaggccaaagaaaaaagtgactttcaactcttcttccatcatttttatcatcaccagtgatgaatcactgtcagttgacgacagcgacaaaaccaatgggtccaaagttgatgtaatccaagttcgtcctttgtaggaatgaagaatggcaacgaaagatggggccttaaattggatgccacttttggactttcatcataagaagtgtctggaatacccgttctatgtaatatcaacagaaccttgtggtccagcaggaaatccgaattgcccatatgctcttgggcctcaggaagaggttgaacaaaaacaaattcttttaattcaacgggtgctttacataatgaaaaaaccacttgtggcacacgatgggcatctaacatcatcatcttctaatgtgttggagattttcatttcaaatatattttttaaattactctattttccaaaacacgtaatgcatttttctcgaaaataccttactgtaaaaataactgtcgcgtacacatgtgtgaagtagctagaacatactgaattttttttgtactgttggactctattcagtgtcatgtcctatatctgatcaagttatcaaggagataattctagaatgaaaaagaaaatcctcttgttggaaacaaaagacgttttatatgtgcagtatgacaaagaggagtttcagagacaactttgaatccttgtcagcctggagaccagcaccagaggaatctacaaggcaaactcccatatatttgcttcccccaaattgctgcccctacagactcaaagctctttttctttgttttgttgtttctctaaaaatttactgttctttgtcgatgctatataagccagggagttctaagacgccagctctttgagatttgctcattcccctgtatttcccacatatatattacatatacccgctaataaatttatgtttgtttttctcttgtcaatctgtcttttgttataggggccccagccaaggaacctaaagtgggtagaaggaaaaattattttttctttccctacaaactgaacatggattattagaactcaaggttttcattgacaatatagaaaagaaacactgaatcattttattttattgcccaatttttatttcttatatgactctagtgtttcatcttcataattaatcatgtttgaaggatttctgagtgactcagcagcctgttaaagaaggatgaaccaaagaaaacatttcactaaatgtgcttttaaaaatcaagtgtattgctggttctgctgcagtatgtagtcgaagaataaattagtaaattgcttctgagggtctgaaattgaataaagtaatggctttgtatttctataaaagttgtctccccttgtttcctttccattctggcacatgtagacatttaatttatgaataaaaccctttcctgtccttca

SEQ ID NO: 162637 - DNA, 2308 bp, Homo sapiens
  Payload ID: 12044
  Gene Symbol: OPN4
  Gene Name: opsin 4
  Uniprot ID: Q9UHM6
  ENST ID: ENST00000241891
  CDS Start-End: 168-1604
agcagctccaggctggatctgcgccggacacaggagaaagcagcgggtaggctaagcaggggtgctgaggatggaggaaagttgggaggctgagcacagctgaagtcctgagctccctgtgcccttgacttctctgtgggctcgagcaaggaccatcccaactcaggatgaaccctccttcggggccaagagtcccgcccagcccaacccaagagcccagctgcatggccaccccagcaccacccagctggtgggacagctcccagagcagcatctccagcctgggccggcttccatccatcagtcccacagcacctgggacttgggctgctgcctgggtccccctccccacggttgatgttccagaccatgcccactataccctgggcacagtgatcttgctggtgggactcacggggatgctgggcaacctgacggtcatctataccttctgcaggagcagaagcctccggacacctgccaacatgttcattatcaacctcgcggtcagcgacttcctcatgtccttcacccaggcccctgtcttcttcaccagtagcctctataagcagtggctctttggggagacaggctgcgagttctatgccttctgtggagctctctttggcatttcctccatgatcaccctgacggccatcgccctggaccgctacctggtaatcacacgcccgctggccacctttggtgtggcgtccaagaggcgtgcggcatttgtcctgctgggcgtttggctctatgccctggcctggagtctgccacccttcttcggctggagcgcctacgtgcccgaggggttgctgacatcctgctcctgggactacatgagcttcacgccggccgtgcgtgcctacaccatgcttctctgctgcttcgtgttcttcctccctctgcttatcatcatctactgctacatcttcatcttcagggccatccgggagacaggacgggctctccagaccttcggggcctgcaagggcaatggcgagtccctgtggcagcggcagcggctgcagagcgagtgcaagatggccaagatcatgctgctggtcatcctcctcttcgtgctctcctgggctccctattccgctgtggccctggtggcctttgctgggtacgcacacgtcctgacaccctacatgagctcggtgccagccgtcatcgccaaggcctctgcaatccacaaccccatcatttacgccatcacccaccccaagtacagggtggccattgcccagcacctgccctgcctgggggtgctgctgggtgtatcacgccggcacagtcgcccctaccccagctaccgctccacccaccgctccacgctgaccagccacacctccaacctcagctggatctccatacggaggcgccaggagtccctgggctcggagagtgaggtgggctggacacacatggaggcagcagctgtgtggggagctgcccagcaagcaaatgggcggtccctctacggtcagggtctggaggacttggaagccaaggcaccccccagaccccagggacacgaagcagagactccagggaagaccaaggggctgatccccagccaggaccccaggatgtaggacgcccactggctctccctttcttctgagacacatccagcccccccacgtctccctcatatacacagacccaggattatgctgtgagcctgcaggctttggaagtggccctgtcacccgtgctgcacgggattcacagccccagccccatggcccctctccacacctcaaaactcctgccccataacgtcctccgcatccactttccagctcagcagccgcacccgaggctcagcctgaggggtatgtgcccaggccctcccacttcccgagttgtctgcctctcctcaaatgctgtgtgctgcaattgtccaggcgatgacaatggtgatggctccagagaacacaccagctatttatgagcctctgcccccaggctgggcctgtcactggcataggaaggccagccccgcatctcccactgccaacagctgaagccgagcacagacctccctttgcacgctggaacagttactcacctgtggcttcttcccccagtgtaccgttccactgtggcccacattcttgtgcacgcgggcatttgcaggcacgctctcgcgtagttacctatctgaatgcacaccaagcacatgcgtgcacactctgcgtctgtgattcatttcatgtagtggtctaagctcctcccagggctgtgtggatctgacagggtataggaaaataaaaagcggagaaggtgtcttcag

SEQ ID NO: 162638 - DNA, 2401 bp, Homo sapiens
  Payload ID: 12044
  Gene Symbol: OPN4
  Gene Name: opsin 4
  Uniprot ID: Q9UHM6
  ENST ID: ENST00000372071
  CDS Start-End: 228-1697
ataactgcgacactcactcatttgcgcttcaccagacacagagcaaccgccagccccaagagcagctccaggctggatctgcgccggacacaggagaaagcagcgggtaggctaagcaggggtgctgaggatggaggaaagttgggaggctgagcacagctgaagtcctgagctccctgtgcccttgacttctctgtgggctcgagcaaggaccatcccaactcaggatgaaccctccttcggggccaagagtcccgcccagcccaacccaagagcccagctgcatggccaccccagcaccacccagctggtgggacagctcccagagcagcatctccagcctgggccggcttccatccatcagtcccacagcacctgggacttgggctgctgcctgggtccccctccccacggttgatgttccagaccatgcccactataccctgggcacagtgatcttgctggtgggactcacggggatgctgggcaacctgacggtcatctataccttctgcagagctgtgcttcgtggagtcactgtgatgatgcagagcagaagcctccggacacctgccaacatgttcattatcaacctcgcggtcagcgacttcctcatgtccttcacccaggcccctgtcttcttcaccagtagcctctataagcagtggctctttggggagacaggctgcgagttctatgccttctgtggagctctctttggcatttcctccatgatcaccctgacggccatcgccctggaccgctacctggtaatcacacgcccgctggccacctttggtgtggcgtccaagaggcgtgcggcatttgtcctgctgggcgtttggctctatgccctggcctggagtctgccacccttcttcggctggagcgcctacgtgcccgaggggttgctgacatcctgctcctgggactacatgagcttcacgccggccgtgcgtgcctacaccatgcttctctgctgcttcgtgttcttcctccctctgcttatcatcatctactgctacatcttcatcttcagggccatccgggagacaggacgggctctccagaccttcggggcctgcaagggcaatggcgagtccctgtggcagcggcagcggctgcagagcgagtgcaagatggccaagatcatgctgctggtcatcctcctcttcgtgctctcctgggctccctattccgctgtggccctggtggcctttgctgggtacgcacacgtcctgacaccctacatgagctcggtgccagccgtcatcgccaaggcctctgcaatccacaaccccatcatttacgccatcacccaccccaagtacagggtggccattgcccagcacctgccctgcctgggggtgctgctgggtgtatcacgccggcacagtcgcccctaccccagctaccgctccacccaccgctccacgctgaccagccacacctccaacctcagctggatctccatacggaggcgccaggagtccctgggctcggagagtgaggtgggctggacacacatggaggcagcagctgtgtggggagctgcccagcaagcaaatgggcggtccctctacggtcagggtctggaggacttggaagccaaggcaccccccagaccccagggacacgaagcagagactccagggaagaccaaggggctgatccccagccaggaccccaggatgtaggacgcccactggctctccctttcttctgagacacatccagcccccccacgtctccctcatatacacagacccaggattatgctgtgagcctgcaggctttggaagtggccctgtcacccgtgctgcacgggattcacagccccagccccatggcccctctccacacctcaaaactcctgccccataacgtcctccgcatccactttccagctcagcagccgcacccgaggctcagcctgaggggtatgtgcccaggccctcccacttcccgagttgtctgcctctcctcaaatgctgtgtgctgcaattgtccaggcgatgacaatggtgatggctccagagaacacaccagctatttatgagcctctgcccccaggctgggcctgtcactggcataggaaggccagccccgcatctcccactgccaacagctgaagccgagcacagacctccctttgcacgctggaacagttactcacctgtggcttcttcccccagtgtaccgttccactgtggcccacattcttgtgcacgcgggcatttgcaggcacgctctcgcgtagttacctatctgaatgcacaccaagcacatgcgtgcacactctgcgtctgtgattcatttcatgtagtggtctaagctcctcccagggctgtgtggatctgacagggtataggaaaataaaaagcggagaaggtgtcttcag

SEQ ID NO: 162639 - DNA, 1653 bp, Homo sapiens
  Payload ID: 12044
  Gene Symbol: OPN4
  Gene Name: opsin 4
  ENST ID: ENST00000443292
  CDS Start-End: 168-1653
agcagctccaggctggatctgcgccggacacaggagaaagcagcgggtaggctaagcaggggtgctgaggatggaggaaagttgggaggctgagcacagctgaagtcctgagctccctgtgcccttgacttctctgtgggctcgagcaaggaccatcccaactcaggatgaaccctccttcggggccaagagtcccgcccagcccaacccaagagcccagctgcatggccaccccagcaccacccagctggtgggacagctcccagagcagcatctccagcctgggccggcttccatccatcagtcccacagcacctgggacttgggctgctgcctgggtccccctccccacggttgatgttccagaccatgcccactataccctgggcacagtgatcttgctggtgggactcacggggatgctgggcaacctgacggtcatctataccttctgcagagctgtgcttcgtggagtcactgtgatgatgcagagcagaagcctccggacacctgccaacatgttcattatcaacctcgcggtcagcgacttcctcatgtccttcacccaggcccctgtcttcttcaccagtagcctctataagcagtggctctttggggagacaggctgcgagttctatgccttctgtggagctctctttggcatttcctccatgatcaccctgacggccatcgccctggaccgctacctggtaatcacacgcccgctggccacctttggtgtggcgtccaagaggcgtgcggcatttgtcctgctgggcgtttggctctatgccctggcctggagtctgccacccttcttcggctggagcgcctacgtgcccgaggggttgctgacatcctgctcctgggactacatgagcttcacgccggccgtgcgtgcctacaccatgcttctctgctgcttcgtgttcttcctccctctgcttatcatcatctactgctacatcttcatcttcagggccatccgggagacaggacgggctctccagaccttcggggcctgcaagggcaatggcgagtccctgtggcagcggcagcggctgcagagcgagtgcaagatggccaagatcatgctgctggtcatcctcctcttcgtgctctcctgggctccctattccgctgtggccctggtggcctttgctgggtacgcacacgtcctgacaccctacatgagctcggtgccagccgtcatcgccaaggcctctgcaatccacaaccccatcatttacgccatcacccaccccaagtacagggtggccattgcccagcacctgccctgcctgggggtgctgctgggtgtatcacgccggcacagtcgcccctaccccagctaccgctccacccaccgctccacgctgaccagccacacctccaacctcagctggatctccatacggaggcgccaggagtccctgggctcggagagtgaggtgggctggacacacatggaggcagcagctgtgtggggagctgcccagcaagcaaatgggcggtccctctacggtcagggtctggaggacttggaagccaaggcaccccccagaccccagggacacgaagcagagactccagggaagaggcgagcttcatcaggcaggagccagaggccagagagacagcgtgcagctccag

SEQ ID NO: 162640 - DNA, 1801 bp, Homo sapiens
  Payload ID: 12045
  Gene Symbol: OPN5
  Gene Name: opsin 5
  Uniprot ID: Q6U736
  ENST ID: ENST00000371211
  CDS Start-End: 29-1093
ttcagatccctcgtggttcgagaacagaatggcgttaaatcacactgccctgcctcaggacgagcgcctgccccattaccttcgagatggggatccttttgcttccaaactttcttgggaagcggatttagtggctggcttttacctaacaataattgggattctgtccacatttggaaatggatatgtcctttacatgtcttctagacgaaagaagaagctgagacccgctgaaataatgactatcaatttagcagtctgtgatctggggatttcagttgtaggcaagccgttcaccatcatctcttgcttttgtcaccgctgggtgtttggctggatcggctgccgctggtatggatgggctggatttttctttggctgtggaagccttatcaccatgactgctgtcagcctggatcgatatttgaaaatctgctatttatcttatggggtttggctgaaaagaaagcacgcctacatctgcctggcagccatctgggcctatgcttccttctggaccaccatgcccttggtaggtctgggggactacgtacctgagcccttcggaacctcgtgcaccctggactggtggctggcccaggcctcggtagggggccaggttttcatcctgaacatcctcttcttctgcctcttgctcccaacggctgtgatcgtgttctcctacgtaaagatcattgccaaggttaagtcctcttccaaagaagtagctcatttcgacagtcggatccatagcagccatgtgctggaaatgaaactgacaaaggtagcgatgttgatttgtgctggattcctgattgcctggattccttatgcagtggtgtctgtgtggtcagcttttggaaggccagactccattcccatacagctctctgtggtgccaaccctacttgcaaaatctgcagcgatgtacaatcccatcatttaccaagttattgattacaaatttgcctgttgccaaactggtggtttgaaagcaaccaagaagaagtctctggaaggcttcaggctgcacaccgtaaccacagtcaggaagtcttctgctgtgctggaaattcatgaagagtgggaataacaaatgttctggttgtgaagagtgcatctgaagtgcttacacggcgtctggcatatgcagagaaattagcttacaaatgttatttttctgacttctcgcctccactccacttaccctgtcaggaaaaaataattcacaaggaatatcaaaacaatgatgcaccctaggagtatccaagtatcttaactgagttatctcattctggtatagtggcagagttataactaaagagtgccagaaacccacgctttaaacatcctgcagtgcacacctcggtctcgtcagtaaggacttcactttcttctgaactggggcttgtgaaagctggcctgaaaagcctgattcaaggagatcaggctgtgtctctgactggagcagctacactccccatctgtaatttgatttgttctattgcagatgatgtactgggcagaggtgagtgtggattggtgaaaatctgtttttatgactggcaaagcagtgcaggggggtctttcactgataagaagcatcatcagtagggtttgtccctgatgcctttacaacagcatctgagcacctctcaagtttttccaggccagctccagtttcagtgaggagagtgtgggctttctattccccaaatattcttactacagttaatatgtaggttactgccccagcccaactgcaggttcccagatgtgagttccatgtaggcagaaactg

SEQ ID NO: 162641 - DNA, 1142 bp, Homo sapiens
  Payload ID: 12045
  Gene Symbol: OPN5
  Gene Name: opsin 5
  ENST ID: ENST00000393699
  CDS Start-End: 1-1062
atggcgttaaatcacactgccctgcctcaggacgagcgcctgccccattaccttcgagatggggatccttttgcttccaaactttcttgggaagcggatttagtggctggcttttacctaacaataattgggattctgtccacatttggaaatggatatgtcctttacatgtcttctagacgaaagaagaagctgagacccgctgaaataatgactatcaatttagcagtctgtgatctggggatttcagttgtaggcaagccgttcaccatcatctcttgcttttgtcaccgctgggtgtttggctggatcggctgccgctggtatggatgggctggatttttctttggctgtggaagccttatcaccatgactgctgtcagcctggatcgatatttgaaaatctgctatttatcttatggggtttggctgaaaagaaagcacgcctacatctgcctggcagccatctgggcctatgcttccttctggaccaccatgcccttggtaggtctgggggactacgtacctgagcccttcggaacctcgtgcaccctggactggtggctggcccaggcctcggtagggggccaggttttcatcctgaacatcctcttcttctgcctcttgctcccaacggctgtgatcgtgttctcctacgtaaagatcattgccaaggttaagtcctcttccaaagaagtagctcatttcgacagtcggatccatagcagccatgtgctggaaatgaaactgacaaaggtagcgatgttgatttgtgctggattcctgattgcctggattccttatgcagtggtgtctgtgtggtcagcttttggaaggccagactccattcccatacagctctctgtggtgccaaccctacttgcaaaatctgcagcgatgtacaatcccatcatttaccaagttattgattacaaatttgcctgttgccaaactggtggtttgaaagcaaccaagaagaagtctctggaaggcttcaggctgcacaccgtaaccacagtcaggaagtcttctgctgtgctggaaattcatgaagaggtatgaagatggatacagcatcactatggacactcgtattcacttatttgcctcttcactgctgtaaacatttgattgtggccaca

SEQ ID NO: 162642 - DNA, 1931 bp, Homo sapiens
  Payload ID: 12045
  Gene Symbol: OPN5
  Gene Name: opsin 5
  ENST ID: ENST00000489301
  CDS Start-End: 86-1234
tatgaaatggttcaagctggcttattcaggtctgctgagatctctactggtttgcttttcagatccctcgtggttcgagaacagaatggcgttaaatcacactgccctgcctcaggacgagcgcctgccccattaccttcgagatggggatccttttgcttccaaactttcttgggaagcggatttagtggctggcttttacctaacaataattgggattctgtccacatttggaaatggatatgtcctttacatgtcttctagacgaaagaagaagctgagacccgctgaaataatgactatcaatttagcagtctgtgatctggggatttcagttgtaggcaagccgttcaccatcatctcttgcttttgtcaccgctgggtgtttggctggatcggctgccgctggtatggatgggctggatttttctttggctgtggaagccttatcaccatgactgctgtcagcctggatcgatatttgaaaatctgctatttatcttatggggtttggctgaaaagaaagcacgcctacatctgcctggcagccatctgggcctatgcttccttctggaccaccatgcccttggtaggtctgggggactacgtacctgagcccttcggaacctcgtgcaccctggactggtggctggcccaggcctcggtagggggccaggttttcatcctgaacatcctcttcttctgcctcttgctcccaacggctgtgatcgtgttctcctacgtaaagatcattgccaaggttaagtcctcttccaaagaagtagctcatttcgacagtcggatccatagcagccatgtgctggaaatgaaactgacaaaggtagcgatgttgatttgtgctggattcctgattgcctggattccttatgcagtggtgtctgtgtggtcagcttttggaaggccagactccattcccatacagctctctgtggtgccaaccctacttgcaaaatctgcagcgatgtacaatcccatcatttaccaagttattgattacaaatttgcctgttgccaaactggtggtttgaaagcaaccaagaagaagtctctggaaggcttcaggctgcacaccgtaaccacagtcaggaagtcttctgctgtgctggaaattcatgaagagggcaggaacaaatctgctagtcccaataatctggatgcagacagtcatagtaatgatgatgactgtggtaagaaatatgaacctatattctgaggccaagaaacctcttacctgttcaccagggcttcagaaatgaatggcaaactccaatatattttttgaaatgcagaaaataatttagagtattatttgtatttggcttttaaacttgagaaaatacacagccaatgccaactgaagtgttatcgaagtttaatcatgagtatgtaacatatatcagctactccctcttcaatcttcacagatttttgtaaaatagtgacccaagatggaaaggatattctaagcaatgggaaggcaaagagtcgcttaagcttttcattcattgtgatagcaactgaacttcttaatgtatttattgttataaaaatgtgcttgaaaccaccaattattttttcctgtagatggttagaacttttaatattgtctgggaaacttctagaagcataatttgtcaagtcaacctgcatacagcatttgtaagtactctctatgagaacactcagaaaatgttacagtttctgactcattctctctagcccagttgtgtgttaaactgaaggacacacttgactattgcactaggaaaaatgggttaggttctttttatctctgtcagtttccctttatccacacatttaaaataatttctctcttttctttttaagtcacagctgtgttattcaagtgcacttttttttttcaataaagaaaatatactgcattggca

SEQ ID NO: 162643 - DNA, 6381 bp, Homo sapiens
  Payload ID: 12046
  Gene Symbol: OPA1
  Gene Name: optic atrophy 1 (autosomal dominant)
  ENST ID: ENST00000361828
  CDS Start-End: 235-3171
gtgctgcccgcctagaaagggtgaagtggttgtttccgtgacggactgagtacgggtgcctgtcaggctcttgcggaagtccatgcgccattgggagggcctcggccgcggctctgtgcccttgctgctgagggccacttcctgggtcattcctggaccgggagccgggctggggctcacacgggggctcccgcgtggccgtctcggcgcctgcgtgacctccccgccggcgggatgtggcgactacgtcgggccgctgtggcctgtgaggtctgccagtctttagtgaaacacagctctggaataaaaggaagtttaccactacaaaaactacatctggtttcacgaagcatttatcattcacatcatcctaccttaaagcttcaacgaccccaattaaggacatcctttcagcagttctcttctctgacaaaccttcctttacgtaaactgaaattctctccaattaaatatggctaccagcctcgcaggaatttttggccagcaagattagctacgagactcttaaaacttcgctatctcatactaggatcggctgttgggggtggctacacagccaaaaagacttttgatcagtggaaagatatgataccggaccttagtgaatataaatggattgtgcctgacattgtgtgggaaattgatgagtatatcgattttgagaaaattagaaaagcccttcctagttcagaagaccttgtaaagttagcaccagactttgacaagattgttgaaagccttagcttattgaaggacttttttacctcaggtcacaaattggttagtgaagtcataggagcttctgacctacttctcttgttaggttctccggaagaaacggcgtttagagcaacagatcgtggatctgaaagtgacaagcattttagaaaggtgtcagacaaagagaaaattgaccaacttcaggaagaacttctgcacactcagttgaagtatcagagaatcttggaacgattagaaaaggagaacaaagaattgagaaaattagtattgcagaaagatgacaaaggcattcatcatagaaagcttaagaaatctttgattgacatgtattctgaagttcttgatgttctctctgattatgatgccagttataatacgcaagatcatctgccacgggttgttgtggttggagatcagagtgctggaaagactagtgtgttggaaatgattgcccaagctcgaatattcccaagaggatctggggagatgatgacacgttctccagttaaggtgactctgagtgaaggtcctcaccatgtggccctatttaaagatagttctcgggagtttgatcttaccaaagaagaagatcttgcagcattaagacatgaaatagaacttcgaatgaggaaaaatgtgaaagaaggctgtaccgttagccctgagaccatatccttaaatgtaaaaggccctggactacagaggatggtgcttgttgacttaccaggtgtgattaatactgtgacatcaggcatggctcctgacacaaaggaaactattttcagtatcagcaaagcttacatgcagaatcctaatgccatcatactgtgtattcaagatggatctgtggatgctgaacgcagtattgttacagacttggtcagtcaaatggaccctcatggaaggagaaccatattcgttttgaccaaagtagacctggcagagaaaaatgtagccagtccaagcaggattcagcagataattgaaggaaagctcttcccaatgaaagctttaggttattttgctgttgtaacaggaaaagggaacagctctgaaagcattgaagctataagagaatatgaagaagagttttttcagaattcaaagctcctaaagacaagcatgctaaaggcacaccaagtgactacaagaaatttaagccttgcagtatcagactgcttttggaaaatggtacgagagtctgttgaacaacaggctgatagtttcaaagcaacacgttttaaccttgaaactgaatggaagaataactatcctcgcctgcgggaacttgaccggaatgaactatttgaaaaagctaaaaatgaaatccttgatgaagttatcagtctgagccaggttacaccaaaacattgggaggaaatccttcaacaatctttgtgggaaagagtatcaactcatgtgattgaaaacatctaccttccagctgcgcagaccatgaattcaggaacttttaacaccacagtggatatcaagcttaaacagtggactgataaacaacttcctaataaagcagtagaggttgcttgggagaccctacaagaagaattttcccgctttatgacagaaccgaaagggaaagagcatgatgacatatttgataaacttaaagaggctgttaaggaagaaagtattaaacgacacaagtggaatgactttgcggaggacagcttgagggttattcaacacaatgctttggaagaccgatccatatctgataaacagcaatgggatgcagctatttattttatggaagaggctctgcaggctcgtctcaaggatactgaaaatgcaattgaaaacatggtgggtccagactggaaaaagaggtggttatactggaagaatcggacccaagaacagtgtgttcacaatgaaaccaagaatgaattggagaagatgttgaaatgtaatgaggagcacccagcttatcttgcaagtgatgaaataaccacagtccggaagaaccttgaatcccgaggagtagaagtagatccaagcttgattaaggatacttggcatcaagtttatagaagacattttttaaaaacagctctaaaccattgtaacctttgtcgaagaggtttttattactaccaaaggcattttgtagattctgagttggaatgcaatgatgtggtcttgttttggcgtatacagcgcatgcttgctatcaccgcaaatactttaaggcaacaacttacaaatactgaagttaggcgattagagaaaaatgttaaagaggtattggaagattttgctgaagatggtgagaagaagattaaattgcttactggtaaacgcgttcaactggcggaagacctcaagaaagttagagaaattcaagaaaaacttgatgctttcattgaagctcttcatcaggagaaataaattaaaatcgtactcataatcagctctgcatacatctgaagaacaaaaacatcaacgtcttttgtccagcctctttttcttctgctgttccacctttctaaacatacaataaagtcatgggataaaaataatcgatgtatgttacgggcgctttaaccatcagctgcctctcgaatggaagaacagtggtaatggattaacatcctattttgttgtactaaagtgacaaatcggaataatataattggtatggccattaggttcagtccttgaagataagaaacttgttctctgtttgttgtcttatttgtggtggcactcgtttaatggattaactgaggttgctcaatgttcagtttcttttccagaaatacaatgctaggtgttttgaaataaaacttatatagcaattgtttaaagttatcaattgtatataaaatcacagtagcctgctaaatcattgtatgtgtctgtagtattctattcccagaaactatttgaccatgataattcagtttatattcaccacatgaaagaaaaatgggtaacagaagaacccttaaaacaggttaatttggattgtaacgttcagtgaaagaaatttcaacccttcatagccagcgaagaaatttgccttggaagccaagtcagtaccagcttacctatttgattcagttgctgttttctcactctctatatccatttgaaattgatttattttagatgttgtatacttacgttaggctttctgttaatagtggtttttctcctgttgacagagccaccggattatgacacaggatgaggaagattaaggataatcaattgactaatttcatttagaatattatcaaacatttcaactaggtatcagaaaaaggctttctttcataagactattttaaatagaaattatttcaacaattaaagtaatgttgaccatccccctctcagctgaataaagaaaaatttagttcaatttattgcaatttaattacaatactaccttcacaacattttcatgtgttttaaataaatattttttaattggctaaaggacattcaagcaaagaaatgctttctttacttaaaatgtctatctcatttgctgccttttcactaagcctttactttgttaataaaagtgtccattgtgtgatgtttttgattttacagtttgctaaatcttattttcttggagttgctttttggtaacagccccattgctactccccattttattgttttacatcaatgcatgcttcgttgtgatccctcaagatgtaacacttggtatgctcggttgaggatatgaaaaaatacttccgaaaccaggaattcaatgtatgtttgttttatactgtttgataagaaaagtaggtccagccttaagcagcacagatgcgctggtagatgcatagtcaggaactttttttatttcttttaggtctagggacaggagtgaatagaaagggaggagagctctattatgttctatacacagattaggagatgaccttactgggtacacccctctaaccagtgcttacaggttaatgcatgttaatgaatatttttgcagttgtaaagcataacaattacaactacacatctatttctaaagaataaaacaggaccatatttatttacttctgtcaactatagaaagaaagaccttcagctgtatttccacagatttctcccaaggaaaaggctaatattagtcactactgttatcacatccctttgtataagttttaaaaagagatggagggagatcttcatttctttgaggagatcagtattgtaacgtatgtgaatagatgataacaattaatattactaaaagtcccacatgagagtcctgacgccctctccatgccccacagtaatgtggcttctttcatgggtttttttttcttctttttagctgatctcatcctaagcatgctttatttttccttgaaagctaggtatttatcaactgcagatgttattgaaagaaaataaaattcagtctcaagagtaaaccctgtgtcttgtgtctgtagttcaaaagtcagaaatgattctaatttaaacaaaaagatactaaatatacagaagttaaattcgaactagccacagaatcatttgtttttatgtcagaatttgcaaagagtggagtggacaaagctctgtatggaagactgaacaactgtaaatagatgatatccaaacttaatttggctaggacttcaattttaaaaatcagtgtacctaggcagtgcacagcacgaaataagtggcccttgcagcttccccgtttaacccactgtgctatagttgcgggtggaacagtcaacctttctagtagtttatgatattgccctctttgtattcccattttctacagttttttccgcagacttctttctgcaaattattcagcctccaaatgcaaatgaatgatataaaaataagtagggaacatggcagagagtggtgcttcccagcctcacaatgtgggaatttgacataggatgagagtcagagtataggtttaaaagataaaatctttagttaataattttgtatttatttattctagatgtatgtatctgaggaaagaaatctggtatttttgctttccaataaaggggatcaaagtaatggtttttctctcagttctctaagctggtctatgttatagctctagcagtatggaaatgtgctttaaaatatgcttaccttttgaatgatcatggctatatgttgttgagatatttgaaacttaccttgttttcacttgtgcactgtgaatgaactttgtattatttttttaaaaccttcacattacgtgtagatattattgcaacttatattttgcctgagcttgatcaaaggtcatttgtgtagatgagtaattaaaaaatatttaaatcacattataattctattattggagagcatcttttaaatttttttctgttttaacgagggaaagagaaacctgtatacctagggtcattatttgaccccatagtataaccagattcatggtctaacaagctctcagtgtggcttttctctgaatgcttgaatttcacatgccttgcatttcacagttgtactccatggtcaaccggtgctttttttcacatcgtggtacttgtcaaaacattttgttattttccttggtaaaatatataaaaaaggttttctaatttc

SEQ ID NO: 162644 - DNA, 6439 bp, Homo sapiens
  Payload ID: 12046
  Gene Symbol: OPA1
  Gene Name: optic atrophy 1 (autosomal dominant)
  Uniprot ID: O60313
  ENST ID: ENST00000361908
  CDS Start-End: 235-3228
gtgctgcccgcctagaaagggtgaagtggttgtttccgtgacggactgagtacgggtgcctgtcaggctcttgcggaagtccatgcgccattgggagggcctcggccgcggctctgtgcccttgctgctgagggccacttcctgggtcattcctggaccgggagccgggctggggctcacacgggggctcccgcgtggccgtctcggcgcctgcgtgacctccccgccggcgggatgtggcgactacgtcgggccgctgtggcctgtgaggtctgccagtctttagtgaaacacagctctggaataaaaggaagtttaccactacaaaaactacatctggtttcacgaagcatttatcattcacatcatcctaccttaaagcttcaacgaccccaattaaggacatcctttcagcagttctcttctctgacaaaccttcctttacgtaaactgaaattctctccaattaaatatggctaccagcctcgcaggaatttttggccagcaagattagctacgagactcttaaaacttcgctatctcatactaggatcggctgttgggggtggctacacagccaaaaagacttttgatcagtggaaagatatgataccggaccttagtgaatataaatggattgtgcctgacattgtgtgggaaattgatgagtatatcgattttgagaaaattagaaaagcccttcctagttcagaagaccttgtaaagttagcaccagactttgacaagattgttgaaagccttagcttattgaaggacttttttacctcaggttctccggaagaaacggcgtttagagcaacagatcgtggatctgaaagtgacaagcattttagaaagggtctgcttggtgagctcattctcttacaacaacaaattcaagagcatgaagaggaagcgcgcagagccgctggccaatatagcacgagctatgcccaacagaagcgcaaggtgtcagacaaagagaaaattgaccaacttcaggaagaacttctgcacactcagttgaagtatcagagaatcttggaacgattagaaaaggagaacaaagaattgagaaaattagtattgcagaaagatgacaaaggcattcatcatagaaagcttaagaaatctttgattgacatgtattctgaagttcttgatgttctctctgattatgatgccagttataatacgcaagatcatctgccacgggttgttgtggttggagatcagagtgctggaaagactagtgtgttggaaatgattgcccaagctcgaatattcccaagaggatctggggagatgatgacacgttctccagttaaggtgactctgagtgaaggtcctcaccatgtggccctatttaaagatagttctcgggagtttgatcttaccaaagaagaagatcttgcagcattaagacatgaaatagaacttcgaatgaggaaaaatgtgaaagaaggctgtaccgttagccctgagaccatatccttaaatgtaaaaggccctggactacagaggatggtgcttgttgacttaccaggtgtgattaatactgtgacatcaggcatggctcctgacacaaaggaaactattttcagtatcagcaaagcttacatgcagaatcctaatgccatcatactgtgtattcaagatggatctgtggatgctgaacgcagtattgttacagacttggtcagtcaaatggaccctcatggaaggagaaccatattcgttttgaccaaagtagacctggcagagaaaaatgtagccagtccaagcaggattcagcagataattgaaggaaagctcttcccaatgaaagctttaggttattttgctgttgtaacaggaaaagggaacagctctgaaagcattgaagctataagagaatatgaagaagagttttttcagaattcaaagctcctaaagacaagcatgctaaaggcacaccaagtgactacaagaaatttaagccttgcagtatcagactgcttttggaaaatggtacgagagtctgttgaacaacaggctgatagtttcaaagcaacacgttttaaccttgaaactgaatggaagaataactatcctcgcctgcgggaacttgaccggaatgaactatttgaaaaagctaaaaatgaaatccttgatgaagttatcagtctgagccaggttacaccaaaacattgggaggaaatccttcaacaatctttgtgggaaagagtatcaactcatgtgattgaaaacatctaccttccagctgcgcagaccatgaattcaggaacttttaacaccacagtggatatcaagcttaaacagtggactgataaacaacttcctaataaagcagtagaggttgcttgggagaccctacaagaagaattttcccgctttatgacagaaccgaaagggaaagagcatgatgacatatttgataaacttaaagaggctgttaaggaagaaagtattaaacgacacaagtggaatgactttgcggaggacagcttgagggttattcaacacaatgctttggaagaccgatccatatctgataaacagcaatgggatgcagctatttattttatggaagaggctctgcaggctcgtctcaaggatactgaaaatgcaattgaaaacatggtgggtccagactggaaaaagaggtggttatactggaagaatcggacccaagaacagtgtgttcacaatgaaaccaagaatgaattggagaagatgttgaaatgtaatgaggagcacccagcttatcttgcaagtgatgaaataaccacagtccggaagaaccttgaatcccgaggagtagaagtagatccaagcttgattaaggatacttggcatcaagtttatagaagacattttttaaaaacagctctaaaccattgtaacctttgtcgaagaggtttttattactaccaaaggcattttgtagattctgagttggaatgcaatgatgtggtcttgttttggcgtatacagcgcatgcttgctatcaccgcaaatactttaaggcaacaacttacaaatactgaagttaggcgattagagaaaaatgttaaagaggtattggaagattttgctgaagatggtgagaagaagattaaattgcttactggtaaacgcgttcaactggcggaagacctcaagaaagttagagaaattcaagaaaaacttgatgctttcattgaagctcttcatcaggagaaataaattaaaatcgtactcataatcagctctgcatacatctgaagaacaaaaacatcaacgtcttttgtccagcctctttttcttctgctgttccacctttctaaacatacaataaagtcatgggataaaaataatcgatgtatgttacgggcgctttaaccatcagctgcctctcgaatggaagaacagtggtaatggattaacatcctattttgttgtactaaagtgacaaatcggaataatataattggtatggccattaggttcagtccttgaagataagaaacttgttctctgtttgttgtcttatttgtggtggcactcgtttaatggattaactgaggttgctcaatgttcagtttcttttccagaaatacaatgctaggtgttttgaaataaaacttatatagcaattgtttaaagttatcaattgtatataaaatcacagtagcctgctaaatcattgtatgtgtctgtagtattctattcccagaaactatttgaccatgataattcagtttatattcaccacatgaaagaaaaatgggtaacagaagaacccttaaaacaggttaatttggattgtaacgttcagtgaaagaaatttcaacccttcatagccagcgaagaaatttgccttggaagccaagtcagtaccagcttacctatttgattcagttgctgttttctcactctctatatccatttgaaattgatttattttagatgttgtatacttacgttaggctttctgttaatagtggtttttctcctgttgacagagccaccggattatgacacaggatgaggaagattaaggataatcaattgactaatttcatttagaatattatcaaacatttcaactaggtatcagaaaaaggctttctttcataagactattttaaatagaaattatttcaacaattaaagtaatgttgaccatccccctctcagctgaataaagaaaaatttagttcaatttattgcaatttaattacaatactaccttcacaacattttcatgtgttttaaataaatattttttaattggctaaaggacattcaagcaaagaaatgctttctttacttaaaatgtctatctcatttgctgccttttcactaagcctttactttgttaataaaagtgtccattgtgtgatgtttttgattttacagtttgctaaatcttattttcttggagttgctttttggtaacagccccattgctactccccattttattgttttacatcaatgcatgcttcgttgtgatccctcaagatgtaacacttggtatgctcggttgaggatatgaaaaaatacttccgaaaccaggaattcaatgtatgtttgttttatactgtttgataagaaaagtaggtccagccttaagcagcacagatgcgctggtagatgcatagtcaggaactttttttatttcttttaggtctagggacaggagtgaatagaaagggaggagagctctattatgttctatacacagattaggagatgaccttactgggtacacccctctaaccagtgcttacaggttaatgcatgttaatgaatatttttgcagttgtaaagcataacaattacaactacacatctatttctaaagaataaaacaggaccatatttatttacttctgtcaactatagaaagaaagaccttcagctgtatttccacagatttctcccaaggaaaaggctaatattagtcactactgttatcacatccctttgtataagttttaaaaagagatggagggagatcttcatttctttgaggagatcagtattgtaacgtatgtgaatagatgataacaattaatattactaaaagtcccacatgagagtcctgacgccctctccatgccccacagtaatgtggcttctttcatgggtttttttttcttctttttagctgatctcatcctaagcatgctttatttttccttgaaagctaggtatttatcaactgcagatgttattgaaagaaaataaaattcagtctcaagagtaaaccctgtgtcttgtgtctgtagttcaaaagtcagaaatgattctaatttaaacaaaaagatactaaatatacagaagttaaattcgaactagccacagaatcatttgtttttatgtcagaatttgcaaagagtggagtggacaaagctctgtatggaagactgaacaactgtaaatagatgatatccaaacttaatttggctaggacttcaattttaaaaatcagtgtacctaggcagtgcacagcacgaaataagtggcccttgcagcttccccgtttaacccactgtgctatagttgcgggtggaacagtcaacctttctagtagtttatgatattgccctctttgtattcccattttctacagttttttccgcagacttctttctgcaaattattcagcctccaaatgcaaatgaatgatataaaaataagtagggaacatggcagagagtggtgcttcccagcctcacaatgtgggaatttgacataggatgagagtcagagtataggtttaaaagataaaatctttagttaataattttgtatttatttattctagatgtatgtatctgaggaaagaaatctggtatttttgctttccaataaaggggatcaaagtaatggtttttctctcagttctctaagctggtctatgttatagctctagcagtatggaaatgtgctttaaaatatgcttaccttttgaatgatcatggctatatgttgttgagatatttgaaacttaccttgttttcacttgtgcactgtgaatgaactttgtattatttttttaaaaccttcacattacgtgtagatattattgcaacttatattttgcctgagcttgatcaaaggtcatttgtgtagatgagtaattaaaaaatatttaaatcacattataattctattattggagagcatcttttaaatttttttctgttttaacgagggaaagagaaacctgtatacctagggtcattatttgaccccatagtataaccagattcatggtctaacaagctctcagtgtggcttttctctgaatgcttgaatttcacatgccttgcatttcacagttgtactccatggtcaaccggtgctttttttcacatcgtggtacttgtcaaaacattttgttattttccttggtaaaatatataaaaaaggttttctaatttca

SEQ ID NO: 162645 - DNA, 6330 bp, Homo sapiens
  Payload ID: 12046
  Gene Symbol: OPA1
  Gene Name: optic atrophy 1 (autosomal dominant)
  ENST ID: ENST00000361150
  CDS Start-End: 235-3120
gtgctgcccgcctagaaagggtgaagtggttgtttccgtgacggactgagtacgggtgcctgtcaggctcttgcggaagtccatgcgccattgggagggcctcggccgcggctctgtgcccttgctgctgagggccacttcctgggtcattcctggaccgggagccgggctggggctcacacgggggctcccgcgtggccgtctcggcgcctgcgtgacctccccgccggcgggatgtggcgactacgtcgggccgctgtggcctgtgaggtctgccagtctttagtgaaacacagctctggaataaaaggaagtttaccactacaaaaactacatctggtttcacgaagcatttatcattcacatcatcctaccttaaagcttcaacgaccccaattaaggacatcctttcagcagttctcttctctgacaaaccttcctttacgtaaactgaaattctctccaattaaatatggctaccagcctcgcaggaatttttggccagcaagattagctacgagactcttaaaacttcgctatctcatactaggatcggctgttgggggtggctacacagccaaaaagacttttgatcagtggaaagatatgataccggaccttagtgaatataaatggattgtgcctgacattgtgtgggaaattgatgagtatatcgattttggttctccggaagaaacggcgtttagagcaacagatcgtggatctgaaagtgacaagcattttagaaagggtctgcttggtgagctcattctcttacaacaacaaattcaagagcatgaagaggaagcgcgcagagccgctggccaatatagcacgagctatgcccaacagaagcgcaaggtgtcagacaaagagaaaattgaccaacttcaggaagaacttctgcacactcagttgaagtatcagagaatcttggaacgattagaaaaggagaacaaagaattgagaaaattagtattgcagaaagatgacaaaggcattcatcatagaaagcttaagaaatctttgattgacatgtattctgaagttcttgatgttctctctgattatgatgccagttataatacgcaagatcatctgccacgggttgttgtggttggagatcagagtgctggaaagactagtgtgttggaaatgattgcccaagctcgaatattcccaagaggatctggggagatgatgacacgttctccagttaaggtgactctgagtgaaggtcctcaccatgtggccctatttaaagatagttctcgggagtttgatcttaccaaagaagaagatcttgcagcattaagacatgaaatagaacttcgaatgaggaaaaatgtgaaagaaggctgtaccgttagccctgagaccatatccttaaatgtaaaaggccctggactacagaggatggtgcttgttgacttaccaggtgtgattaatactgtgacatcaggcatggctcctgacacaaaggaaactattttcagtatcagcaaagcttacatgcagaatcctaatgccatcatactgtgtattcaagatggatctgtggatgctgaacgcagtattgttacagacttggtcagtcaaatggaccctcatggaaggagaaccatattcgttttgaccaaagtagacctggcagagaaaaatgtagccagtccaagcaggattcagcagataattgaaggaaagctcttcccaatgaaagctttaggttattttgctgttgtaacaggaaaagggaacagctctgaaagcattgaagctataagagaatatgaagaagagttttttcagaattcaaagctcctaaagacaagcatgctaaaggcacaccaagtgactacaagaaatttaagccttgcagtatcagactgcttttggaaaatggtacgagagtctgttgaacaacaggctgatagtttcaaagcaacacgttttaaccttgaaactgaatggaagaataactatcctcgcctgcgggaacttgaccggaatgaactatttgaaaaagctaaaaatgaaatccttgatgaagttatcagtctgagccaggttacaccaaaacattgggaggaaatccttcaacaatctttgtgggaaagagtatcaactcatgtgattgaaaacatctaccttccagctgcgcagaccatgaattcaggaacttttaacaccacagtggatatcaagcttaaacagtggactgataaacaacttcctaataaagcagtagaggttgcttgggagaccctacaagaagaattttcccgctttatgacagaaccgaaagggaaagagcatgatgacatatttgataaacttaaagaggctgttaaggaagaaagtattaaacgacacaagtggaatgactttgcggaggacagcttgagggttattcaacacaatgctttggaagaccgatccatatctgataaacagcaatgggatgcagctatttattttatggaagaggctctgcaggctcgtctcaaggatactgaaaatgcaattgaaaacatggtgggtccagactggaaaaagaggtggttatactggaagaatcggacccaagaacagtgtgttcacaatgaaaccaagaatgaattggagaagatgttgaaatgtaatgaggagcacccagcttatcttgcaagtgatgaaataaccacagtccggaagaaccttgaatcccgaggagtagaagtagatccaagcttgattaaggatacttggcatcaagtttatagaagacattttttaaaaacagctctaaaccattgtaacctttgtcgaagaggtttttattactaccaaaggcattttgtagattctgagttggaatgcaatgatgtggtcttgttttggcgtatacagcgcatgcttgctatcaccgcaaatactttaaggcaacaacttacaaatactgaagttaggcgattagagaaaaatgttaaagaggtattggaagattttgctgaagatggtgagaagaagattaaattgcttactggtaaacgcgttcaactggcggaagacctcaagaaagttagagaaattcaagaaaaacttgatgctttcattgaagctcttcatcaggagaaataaattaaaatcgtactcataatcagctctgcatacatctgaagaacaaaaacatcaacgtcttttgtccagcctctttttcttctgctgttccacctttctaaacatacaataaagtcatgggataaaaataatcgatgtatgttacgggcgctttaaccatcagctgcctctcgaatggaagaacagtggtaatggattaacatcctattttgttgtactaaagtgacaaatcggaataatataattggtatggccattaggttcagtccttgaagataagaaacttgttctctgtttgttgtcttatttgtggtggcactcgtttaatggattaactgaggttgctcaatgttcagtttcttttccagaaatacaatgctaggtgttttgaaataaaacttatatagcaattgtttaaagttatcaattgtatataaaatcacagtagcctgctaaatcattgtatgtgtctgtagtattctattcccagaaactatttgaccatgataattcagtttatattcaccacatgaaagaaaaatgggtaacagaagaacccttaaaacaggttaatttggattgtaacgttcagtgaaagaaatttcaacccttcatagccagcgaagaaatttgccttggaagccaagtcagtaccagcttacctatttgattcagttgctgttttctcactctctatatccatttgaaattgatttattttagatgttgtatacttacgttaggctttctgttaatagtggtttttctcctgttgacagagccaccggattatgacacaggatgaggaagattaaggataatcaattgactaatttcatttagaatattatcaaacatttcaactaggtatcagaaaaaggctttctttcataagactattttaaatagaaattatttcaacaattaaagtaatgttgaccatccccctctcagctgaataaagaaaaatttagttcaatttattgcaatttaattacaatactaccttcacaacattttcatgtgttttaaataaatattttttaattggctaaaggacattcaagcaaagaaatgctttctttacttaaaatgtctatctcatttgctgccttttcactaagcctttactttgttaataaaagtgtccattgtgtgatgtttttgattttacagtttgctaaatcttattttcttggagttgctttttggtaacagccccattgctactccccattttattgttttacatcaatgcatgcttcgttgtgatccctcaagatgtaacacttggtatgctcggttgaggatatgaaaaaatacttccgaaaccaggaattcaatgtatgtttgttttatactgtttgataagaaaagtaggtccagccttaagcagcacagatgcgctggtagatgcatagtcaggaactttttttatttcttttaggtctagggacaggagtgaatagaaagggaggagagctctattatgttctatacacagattaggagatgaccttactgggtacacccctctaaccagtgcttacaggttaatgcatgttaatgaatatttttgcagttgtaaagcataacaattacaactacacatctatttctaaagaataaaacaggaccatatttatttacttctgtcaactatagaaagaaagaccttcagctgtatttccacagatttctcccaaggaaaaggctaatattagtcactactgttatcacatccctttgtataagttttaaaaagagatggagggagatcttcatttctttgaggagatcagtattgtaacgtatgtgaatagatgataacaattaatattactaaaagtcccacatgagagtcctgacgccctctccatgccccacagtaatgtggcttctttcatgggtttttttttcttctttttagctgatctcatcctaagcatgctttatttttccttgaaagctaggtatttatcaactgcagatgttattgaaagaaaataaaattcagtctcaagagtaaaccctgtgtcttgtgtctgtagttcaaaagtcagaaatgattctaatttaaacaaaaagatactaaatatacagaagttaaattcgaactagccacagaatcatttgtttttatgtcagaatttgcaaagagtggagtggacaaagctctgtatggaagactgaacaactgtaaatagatgatatccaaacttaatttggctaggacttcaattttaaaaatcagtgtacctaggcagtgcacagcacgaaataagtggcccttgcagcttccccgtttaacccactgtgctatagttgcgggtggaacagtcaacctttctagtagtttatgatattgccctctttgtattcccattttctacagttttttccgcagacttctttctgcaaattattcagcctccaaatgcaaatgaatgatataaaaataagtagggaacatggcagagagtggtgcttcccagcctcacaatgtgggaatttgacataggatgagagtcagagtataggtttaaaagataaaatctttagttaataattttgtatttatttattctagatgtatgtatctgaggaaagaaatctggtatttttgctttccaataaaggggatcaaagtaatggtttttctctcagttctctaagctggtctatgttatagctctagcagtatggaaatgtgctttaaaatatgcttaccttttgaatgatcatggctatatgttgttgagatatttgaaacttaccttgttttcacttgtgcactgtgaatgaactttgtattatttttttaaaaccttcacattacgtgtagatattattgcaacttatattttgcctgagcttgatcaaaggtcatttgtgtagatgagtaattaaaaaatatttaaatcacattataattctattattggagagcatcttttaaatttttttctgttttaacgagggaaagagaaacctgtatacctagggtcattatttgaccccatagtataaccagattcatggtctaacaagctctcagtgtggcttttctctgaatgcttgaatttcacatgccttgcatttcacagttgtactccatggtcaaccggtgctttttttcacatcgtggtacttgtcaaaacattttgttattttccttggtaaaatatataaaaaaggttttctaatttc

SEQ ID NO: 162646 - DNA, 6384 bp, Homo sapiens
  Payload ID: 12046
  Gene Symbol: OPA1
  Gene Name: optic atrophy 1 (autosomal dominant)
  ENST ID: ENST00000361715
  CDS Start-End: 235-3174
gtgctgcccgcctagaaagggtgaagtggttgtttccgtgacggactgagtacgggtgcctgtcaggctcttgcggaagtccatgcgccattgggagggcctcggccgcggctctgtgcccttgctgctgagggccacttcctgggtcattcctggaccgggagccgggctggggctcacacgggggctcccgcgtggccgtctcggcgcctgcgtgacctccccgccggcgggatgtggcgactacgtcgggccgctgtggcctgtgaggtctgccagtctttagtgaaacacagctctggaataaaaggaagtttaccactacaaaaactacatctggtttcacgaagcatttatcattcacatcatcctaccttaaagcttcaacgaccccaattaaggacatcctttcagcagttctcttctctgacaaaccttcctttacgtaaactgaaattctctccaattaaatatggctaccagcctcgcaggaatttttggccagcaagattagctacgagactcttaaaacttcgctatctcatactaggatcggctgttgggggtggctacacagccaaaaagacttttgatcagtggaaagatatgataccggaccttagtgaatataaatggattgtgcctgacattgtgtgggaaattgatgagtatatcgattttggtcacaaattggttagtgaagtcataggagcttctgacctacttctcttgttaggttctccggaagaaacggcgtttagagcaacagatcgtggatctgaaagtgacaagcattttagaaagggtctgcttggtgagctcattctcttacaacaacaaattcaagagcatgaagaggaagcgcgcagagccgctggccaatatagcacgagctatgcccaacagaagcgcaaggtgtcagacaaagagaaaattgaccaacttcaggaagaacttctgcacactcagttgaagtatcagagaatcttggaacgattagaaaaggagaacaaagaattgagaaaattagtattgcagaaagatgacaaaggcattcatcatagaaagcttaagaaatctttgattgacatgtattctgaagttcttgatgttctctctgattatgatgccagttataatacgcaagatcatctgccacgggttgttgtggttggagatcagagtgctggaaagactagtgtgttggaaatgattgcccaagctcgaatattcccaagaggatctggggagatgatgacacgttctccagttaaggtgactctgagtgaaggtcctcaccatgtggccctatttaaagatagttctcgggagtttgatcttaccaaagaagaagatcttgcagcattaagacatgaaatagaacttcgaatgaggaaaaatgtgaaagaaggctgtaccgttagccctgagaccatatccttaaatgtaaaaggccctggactacagaggatggtgcttgttgacttaccaggtgtgattaatactgtgacatcaggcatggctcctgacacaaaggaaactattttcagtatcagcaaagcttacatgcagaatcctaatgccatcatactgtgtattcaagatggatctgtggatgctgaacgcagtattgttacagacttggtcagtcaaatggaccctcatggaaggagaaccatattcgttttgaccaaagtagacctggcagagaaaaatgtagccagtccaagcaggattcagcagataattgaaggaaagctcttcccaatgaaagctttaggttattttgctgttgtaacaggaaaagggaacagctctgaaagcattgaagctataagagaatatgaagaagagttttttcagaattcaaagctcctaaagacaagcatgctaaaggcacaccaagtgactacaagaaatttaagccttgcagtatcagactgcttttggaaaatggtacgagagtctgttgaacaacaggctgatagtttcaaagcaacacgttttaaccttgaaactgaatggaagaataactatcctcgcctgcgggaacttgaccggaatgaactatttgaaaaagctaaaaatgaaatccttgatgaagttatcagtctgagccaggttacaccaaaacattgggaggaaatccttcaacaatctttgtgggaaagagtatcaactcatgtgattgaaaacatctaccttccagctgcgcagaccatgaattcaggaacttttaacaccacagtggatatcaagcttaaacagtggactgataaacaacttcctaataaagcagtagaggttgcttgggagaccctacaagaagaattttcccgctttatgacagaaccgaaagggaaagagcatgatgacatatttgataaacttaaagaggctgttaaggaagaaagtattaaacgacacaagtggaatgactttgcggaggacagcttgagggttattcaacacaatgctttggaagaccgatccatatctgataaacagcaatgggatgcagctatttattttatggaagaggctctgcaggctcgtctcaaggatactgaaaatgcaattgaaaacatggtgggtccagactggaaaaagaggtggttatactggaagaatcggacccaagaacagtgtgttcacaatgaaaccaagaatgaattggagaagatgttgaaatgtaatgaggagcacccagcttatcttgcaagtgatgaaataaccacagtccggaagaaccttgaatcccgaggagtagaagtagatccaagcttgattaaggatacttggcatcaagtttatagaagacattttttaaaaacagctctaaaccattgtaacctttgtcgaagaggtttttattactaccaaaggcattttgtagattctgagttggaatgcaatgatgtggtcttgttttggcgtatacagcgcatgcttgctatcaccgcaaatactttaaggcaacaacttacaaatactgaagttaggcgattagagaaaaatgttaaagaggtattggaagattttgctgaagatggtgagaagaagattaaattgcttactggtaaacgcgttcaactggcggaagacctcaagaaagttagagaaattcaagaaaaacttgatgctttcattgaagctcttcatcaggagaaataaattaaaatcgtactcataatcagctctgcatacatctgaagaacaaaaacatcaacgtcttttgtccagcctctttttcttctgctgttccacctttctaaacatacaataaagtcatgggataaaaataatcgatgtatgttacgggcgctttaaccatcagctgcctctcgaatggaagaacagtggtaatggattaacatcctattttgttgtactaaagtgacaaatcggaataatataattggtatggccattaggttcagtccttgaagataagaaacttgttctctgtttgttgtcttatttgtggtggcactcgtttaatggattaactgaggttgctcaatgttcagtttcttttccagaaatacaatgctaggtgttttgaaataaaacttatatagcaattgtttaaagttatcaattgtatataaaatcacagtagcctgctaaatcattgtatgtgtctgtagtattctattcccagaaactatttgaccatgataattcagtttatattcaccacatgaaagaaaaatgggtaacagaagaacccttaaaacaggttaatttggattgtaacgttcagtgaaagaaatttcaacccttcatagccagcgaagaaatttgccttggaagccaagtcagtaccagcttacctatttgattcagttgctgttttctcactctctatatccatttgaaattgatttattttagatgttgtatacttacgttaggctttctgttaatagtggtttttctcctgttgacagagccaccggattatgacacaggatgaggaagattaaggataatcaattgactaatttcatttagaatattatcaaacatttcaactaggtatcagaaaaaggctttctttcataagactattttaaatagaaattatttcaacaattaaagtaatgttgaccatccccctctcagctgaataaagaaaaatttagttcaatttattgcaatttaattacaatactaccttcacaacattttcatgtgttttaaataaatattttttaattggctaaaggacattcaagcaaagaaatgctttctttacttaaaatgtctatctcatttgctgccttttcactaagcctttactttgttaataaaagtgtccattgtgtgatgtttttgattttacagtttgctaaatcttattttcttggagttgctttttggtaacagccccattgctactccccattttattgttttacatcaatgcatgcttcgttgtgatccctcaagatgtaacacttggtatgctcggttgaggatatgaaaaaatacttccgaaaccaggaattcaatgtatgtttgttttatactgtttgataagaaaagtaggtccagccttaagcagcacagatgcgctggtagatgcatagtcaggaactttttttatttcttttaggtctagggacaggagtgaatagaaagggaggagagctctattatgttctatacacagattaggagatgaccttactgggtacacccctctaaccagtgcttacaggttaatgcatgttaatgaatatttttgcagttgtaaagcataacaattacaactacacatctatttctaaagaataaaacaggaccatatttatttacttctgtcaactatagaaagaaagaccttcagctgtatttccacagatttctcccaaggaaaaggctaatattagtcactactgttatcacatccctttgtataagttttaaaaagagatggagggagatcttcatttctttgaggagatcagtattgtaacgtatgtgaatagatgataacaattaatattactaaaagtcccacatgagagtcctgacgccctctccatgccccacagtaatgtggcttctttcatgggtttttttttcttctttttagctgatctcatcctaagcatgctttatttttccttgaaagctaggtatttatcaactgcagatgttattgaaagaaaataaaattcagtctcaagagtaaaccctgtgtcttgtgtctgtagttcaaaagtcagaaatgattctaatttaaacaaaaagatactaaatatacagaagttaaattcgaactagccacagaatcatttgtttttatgtcagaatttgcaaagagtggagtggacaaagctctgtatggaagactgaacaactgtaaatagatgatatccaaacttaatttggctaggacttcaattttaaaaatcagtgtacctaggcagtgcacagcacgaaataagtggcccttgcagcttccccgtttaacccactgtgctatagttgcgggtggaacagtcaacctttctagtagtttatgatattgccctctttgtattcccattttctacagttttttccgcagacttctttctgcaaattattcagcctccaaatgcaaatgaatgatataaaaataagtagggaacatggcagagagtggtgcttcccagcctcacaatgtgggaatttgacataggatgagagtcagagtataggtttaaaagataaaatctttagttaataattttgtatttatttattctagatgtatgtatctgaggaaagaaatctggtatttttgctttccaataaaggggatcaaagtaatggtttttctctcagttctctaagctggtctatgttatagctctagcagtatggaaatgtgctttaaaatatgcttaccttttgaatgatcatggctatatgttgttgagatatttgaaacttaccttgttttcacttgtgcactgtgaatgaactttgtattatttttttaaaaccttcacattacgtgtagatattattgcaacttatattttgcctgagcttgatcaaaggtcatttgtgtagatgagtaattaaaaaatatttaaatcacattataattctattattggagagcatcttttaaatttttttctgttttaacgagggaaagagaaacctgtatacctagggtcattatttgaccccatagtataaccagattcatggtctaacaagctctcagtgtggcttttctctgaatgcttgaatttcacatgccttgcatttcacagttgtactccatggtcaaccggtgctttttttcacatcgtggtacttgtcaaaacattttgttattttccttggtaaaatatataaaaaaggttttctaatttc

SEQ ID NO: 162647 - DNA, 6492 bp, Homo sapiens
  Payload ID: 12046
  Gene Symbol: OPA1
  Gene Name: optic atrophy 1 (autosomal dominant)
  ENST ID: ENST00000361510
  CDS Start-End: 235-3282
gtgctgcccgcctagaaagggtgaagtggttgtttccgtgacggactgagtacgggtgcctgtcaggctcttgcggaagtccatgcgccattgggagggcctcggccgcggctctgtgcccttgctgctgagggccacttcctgggtcattcctggaccgggagccgggctggggctcacacgggggctcccgcgtggccgtctcggcgcctgcgtgacctccccgccggcgggatgtggcgactacgtcgggccgctgtggcctgtgaggtctgccagtctttagtgaaacacagctctggaataaaaggaagtttaccactacaaaaactacatctggtttcacgaagcatttatcattcacatcatcctaccttaaagcttcaacgaccccaattaaggacatcctttcagcagttctcttctctgacaaaccttcctttacgtaaactgaaattctctccaattaaatatggctaccagcctcgcaggaatttttggccagcaagattagctacgagactcttaaaacttcgctatctcatactaggatcggctgttgggggtggctacacagccaaaaagacttttgatcagtggaaagatatgataccggaccttagtgaatataaatggattgtgcctgacattgtgtgggaaattgatgagtatatcgattttgagaaaattagaaaagcccttcctagttcagaagaccttgtaaagttagcaccagactttgacaagattgttgaaagccttagcttattgaaggacttttttacctcaggtcacaaattggttagtgaagtcataggagcttctgacctacttctcttgttaggttctccggaagaaacggcgtttagagcaacagatcgtggatctgaaagtgacaagcattttagaaagggtctgcttggtgagctcattctcttacaacaacaaattcaagagcatgaagaggaagcgcgcagagccgctggccaatatagcacgagctatgcccaacagaagcgcaaggtgtcagacaaagagaaaattgaccaacttcaggaagaacttctgcacactcagttgaagtatcagagaatcttggaacgattagaaaaggagaacaaagaattgagaaaattagtattgcagaaagatgacaaaggcattcatcatagaaagcttaagaaatctttgattgacatgtattctgaagttcttgatgttctctctgattatgatgccagttataatacgcaagatcatctgccacgggttgttgtggttggagatcagagtgctggaaagactagtgtgttggaaatgattgcccaagctcgaatattcccaagaggatctggggagatgatgacacgttctccagttaaggtgactctgagtgaaggtcctcaccatgtggccctatttaaagatagttctcgggagtttgatcttaccaaagaagaagatcttgcagcattaagacatgaaatagaacttcgaatgaggaaaaatgtgaaagaaggctgtaccgttagccctgagaccatatccttaaatgtaaaaggccctggactacagaggatggtgcttgttgacttaccaggtgtgattaatactgtgacatcaggcatggctcctgacacaaaggaaactattttcagtatcagcaaagcttacatgcagaatcctaatgccatcatactgtgtattcaagatggatctgtggatgctgaacgcagtattgttacagacttggtcagtcaaatggaccctcatggaaggagaaccatattcgttttgaccaaagtagacctggcagagaaaaatgtagccagtccaagcaggattcagcagataattgaaggaaagctcttcccaatgaaagctttaggttattttgctgttgtaacaggaaaagggaacagctctgaaagcattgaagctataagagaatatgaagaagagttttttcagaattcaaagctcctaaagacaagcatgctaaaggcacaccaagtgactacaagaaatttaagccttgcagtatcagactgcttttggaaaatggtacgagagtctgttgaacaacaggctgatagtttcaaagcaacacgttttaaccttgaaactgaatggaagaataactatcctcgcctgcgggaacttgaccggaatgaactatttgaaaaagctaaaaatgaaatccttgatgaagttatcagtctgagccaggttacaccaaaacattgggaggaaatccttcaacaatctttgtgggaaagagtatcaactcatgtgattgaaaacatctaccttccagctgcgcagaccatgaattcaggaacttttaacaccacagtggatatcaagcttaaacagtggactgataaacaacttcctaataaagcagtagaggttgcttgggagaccctacaagaagaattttcccgctttatgacagaaccgaaagggaaagagcatgatgacatatttgataaacttaaagaggctgttaaggaagaaagtattaaacgacacaagtggaatgactttgcggaggacagcttgagggttattcaacacaatgctttggaagaccgatccatatctgataaacagcaatgggatgcagctatttattttatggaagaggctctgcaggctcgtctcaaggatactgaaaatgcaattgaaaacatggtgggtccagactggaaaaagaggtggttatactggaagaatcggacccaagaacagtgtgttcacaatgaaaccaagaatgaattggagaagatgttgaaatgtaatgaggagcacccagcttatcttgcaagtgatgaaataaccacagtccggaagaaccttgaatcccgaggagtagaagtagatccaagcttgattaaggatacttggcatcaagtttatagaagacattttttaaaaacagctctaaaccattgtaacctttgtcgaagaggtttttattactaccaaaggcattttgtagattctgagttggaatgcaatgatgtggtcttgttttggcgtatacagcgcatgcttgctatcaccgcaaatactttaaggcaacaacttacaaatactgaagttaggcgattagagaaaaatgttaaagaggtattggaagattttgctgaagatggtgagaagaagattaaattgcttactggtaaacgcgttcaactggcggaagacctcaagaaagttagagaaattcaagaaaaacttgatgctttcattgaagctcttcatcaggagaaataaattaaaatcgtactcataatcagctctgcatacatctgaagaacaaaaacatcaacgtcttttgtccagcctctttttcttctgctgttccacctttctaaacatacaataaagtcatgggataaaaataatcgatgtatgttacgggcgctttaaccatcagctgcctctcgaatggaagaacagtggtaatggattaacatcctattttgttgtactaaagtgacaaatcggaataatataattggtatggccattaggttcagtccttgaagataagaaacttgttctctgtttgttgtcttatttgtggtggcactcgtttaatggattaactgaggttgctcaatgttcagtttcttttccagaaatacaatgctaggtgttttgaaataaaacttatatagcaattgtttaaagttatcaattgtatataaaatcacagtagcctgctaaatcattgtatgtgtctgtagtattctattcccagaaactatttgaccatgataattcagtttatattcaccacatgaaagaaaaatgggtaacagaagaacccttaaaacaggttaatttggattgtaacgttcagtgaaagaaatttcaacccttcatagccagcgaagaaatttgccttggaagccaagtcagtaccagcttacctatttgattcagttgctgttttctcactctctatatccatttgaaattgatttattttagatgttgtatacttacgttaggctttctgttaatagtggtttttctcctgttgacagagccaccggattatgacacaggatgaggaagattaaggataatcaattgactaatttcatttagaatattatcaaacatttcaactaggtatcagaaaaaggctttctttcataagactattttaaatagaaattatttcaacaattaaagtaatgttgaccatccccctctcagctgaataaagaaaaatttagttcaatttattgcaatttaattacaatactaccttcacaacattttcatgtgttttaaataaatattttttaattggctaaaggacattcaagcaaagaaatgctttctttacttaaaatgtctatctcatttgctgccttttcactaagcctttactttgttaataaaagtgtccattgtgtgatgtttttgattttacagtttgctaaatcttattttcttggagttgctttttggtaacagccccattgctactccccattttattgttttacatcaatgcatgcttcgttgtgatccctcaagatgtaacacttggtatgctcggttgaggatatgaaaaaatacttccgaaaccaggaattcaatgtatgtttgttttatactgtttgataagaaaagtaggtccagccttaagcagcacagatgcgctggtagatgcatagtcaggaactttttttatttcttttaggtctagggacaggagtgaatagaaagggaggagagctctattatgttctatacacagattaggagatgaccttactgggtacacccctctaaccagtgcttacaggttaatgcatgttaatgaatatttttgcagttgtaaagcataacaattacaactacacatctatttctaaagaataaaacaggaccatatttatttacttctgtcaactatagaaagaaagaccttcagctgtatttccacagatttctcccaaggaaaaggctaatattagtcactactgttatcacatccctttgtataagttttaaaaagagatggagggagatcttcatttctttgaggagatcagtattgtaacgtatgtgaatagatgataacaattaatattactaaaagtcccacatgagagtcctgacgccctctccatgccccacagtaatgtggcttctttcatgggtttttttttcttctttttagctgatctcatcctaagcatgctttatttttccttgaaagctaggtatttatcaactgcagatgttattgaaagaaaataaaattcagtctcaagagtaaaccctgtgtcttgtgtctgtagttcaaaagtcagaaatgattctaatttaaacaaaaagatactaaatatacagaagttaaattcgaactagccacagaatcatttgtttttatgtcagaatttgcaaagagtggagtggacaaagctctgtatggaagactgaacaactgtaaatagatgatatccaaacttaatttggctaggacttcaattttaaaaatcagtgtacctaggcagtgcacagcacgaaataagtggcccttgcagcttccccgtttaacccactgtgctatagttgcgggtggaacagtcaacctttctagtagtttatgatattgccctctttgtattcccattttctacagttttttccgcagacttctttctgcaaattattcagcctccaaatgcaaatgaatgatataaaaataagtagggaacatggcagagagtggtgcttcccagcctcacaatgtgggaatttgacataggatgagagtcagagtataggtttaaaagataaaatctttagttaataattttgtatttatttattctagatgtatgtatctgaggaaagaaatctggtatttttgctttccaataaaggggatcaaagtaatggtttttctctcagttctctaagctggtctatgttatagctctagcagtatggaaatgtgctttaaaatatgcttaccttttgaatgatcatggctatatgttgttgagatatttgaaacttaccttgttttcacttgtgcactgtgaatgaactttgtattatttttttaaaaccttcacattacgtgtagatattattgcaacttatattttgcctgagcttgatcaaaggtcatttgtgtagatgagtaattaaaaaatatttaaatcacattataattctattattggagagcatcttttaaatttttttctgttttaacgagggaaagagaaacctgtatacctagggtcattatttgaccccatagtataaccagattcatggtctaacaagctctcagtgtggcttttctctgaatgcttgaatttcacatgccttgcatttcacagttgtactccatggtcaaccggtgctttttttcacatcgtggtacttgtcaaaacattttgttattttccttggtaaaatatataaaaaaggttttctaatttc

SEQ ID NO: 162648 - DNA, 757 bp, Homo sapiens
  Payload ID: 12046
  Gene Symbol: OPA1
  Gene Name: optic atrophy 1 (autosomal dominant)
  ENST ID: ENST00000392436
  CDS Start-End: 27-757
gcctgcgtgacctccccgccggcgggatgtggcgactacgtcgggccgctgtggcctgtgaggtctgccagtctttagtgaaacacagctctggaataaaaggaagtttaccactacaaaaactacatctggtttcacgaagcatttatcattcacatcatcctaccttaaagcttcaacgaccccaattaaggacatcctttcagcagttctcttctctgacaaaccttcctttacgtaaactgaaattctctccaattaaatatggctaccagcctcgcaggaatttttggccagcaagattagctacgagactcttaaaacttcgctatctcatactaggatcggctgttgggggtggctacacagccaaaaagacttttgatcagtggaaagatatgataccggaccttagtgaatataaatggattgtgcctgacattgtgtgggaaattgatgagtatatcgattttgagaaaattagaaaagcccttcctagttcagaagaccttgtaaagttagcaccagactttgacaagattgttgaaagccttagcttattgaaggacttttttacctcaggtcacaaattggttagtgaagtcataggagcttctgacctacttctcttgttaggttctccggaagaaacggcgtttagagcaacagatcgtggatctgaaagtgacaagcattttagaaagggtctgcttggtgagctcattctcttacaacaacaaattcaagagcatgaaga

SEQ ID NO: 162649 - DNA, 631 bp, Homo sapiens
  Payload ID: 12046
  Gene Symbol: OPA1
  Gene Name: optic atrophy 1 (autosomal dominant)
  ENST ID: ENST00000392437
  CDS Start-End: 132-631
ggccgcggctctgtgcccttgctgctgagggccacttcctgggtcattcctggaccgggagccgggctggggctcacacgggggctcccgcgtggccgtctcggcgcctgcgtgacctccccgccggcgggatgtggcgactacgtcgggccgctgtggcctgtgaggtctgccagtctttagtgaaacacagctctggaataaaaggaagtttaccactacaaaaactacatctggtttcacgaagcatttatcattcacatcatcctaccttaaagcttcaacgaccccaattaaggacatcctttcagcagttctcttctctgacaaaccttcctttacgtaaactgaaattctctccaattaaatatggctaccagcctcgcaggaatttttggccagcaagattagctacgagactcttaaaacttcgctatctcatactaggatcggctgttgggggtggctacacagccaaaaagacttttgatcagtggaaagatatgataccggaccttagtgaatataaatggattgtgcctgacattgtgtgggaaattgatgagtatatcgattttggttctccggaagaaacggcgtttagagcaacagatcgtggatctgaaagtga

SEQ ID NO: 162650 - DNA, 6340 bp, Homo sapiens
  Payload ID: 12046
  Gene Symbol: OPA1
  Gene Name: optic atrophy 1 (autosomal dominant)
  Uniprot ID: O60313
  ENST ID: ENST00000392438
  CDS Start-End: 235-3117
gtgctgcccgcctagaaagggtgaagtggttgtttccgtgacggactgagtacgggtgcctgtcaggctcttgcggaagtccatgcgccattgggagggcctcggccgcggctctgtgcccttgctgctgagggccacttcctgggtcattcctggaccgggagccgggctggggctcacacgggggctcccgcgtggccgtctcggcgcctgcgtgacctccccgccggcgggatgtggcgactacgtcgggccgctgtggcctgtgaggtctgccagtctttagtgaaacacagctctggaataaaaggaagtttaccactacaaaaactacatctggtttcacgaagcatttatcattcacatcatcctaccttaaagcttcaacgaccccaattaaggacatcctttcagcagttctcttctctgacaaaccttcctttacgtaaactgaaattctctccaattaaatatggctaccagcctcgcaggaatttttggccagcaagattagctacgagactcttaaaacttcgctatctcatactaggatcggctgttgggggtggctacacagccaaaaagacttttgatcagtggaaagatatgataccggaccttagtgaatataaatggattgtgcctgacattgtgtgggaaattgatgagtatatcgattttgagaaaattagaaaagcccttcctagttcagaagaccttgtaaagttagcaccagactttgacaagattgttgaaagccttagcttattgaaggacttttttacctcaggttctccggaagaaacggcgtttagagcaacagatcgtggatctgaaagtgacaagcattttagaaaggtgtcagacaaagagaaaattgaccaacttcaggaagaacttctgcacactcagttgaagtatcagagaatcttggaacgattagaaaaggagaacaaagaattgagaaaattagtattgcagaaagatgacaaaggcattcatcatagaaagcttaagaaatctttgattgacatgtattctgaagttcttgatgttctctctgattatgatgccagttataatacgcaagatcatctgccacgggttgttgtggttggagatcagagtgctggaaagactagtgtgttggaaatgattgcccaagctcgaatattcccaagaggatctggggagatgatgacacgttctccagttaaggtgactctgagtgaaggtcctcaccatgtggccctatttaaagatagttctcgggagtttgatcttaccaaagaagaagatcttgcagcattaagacatgaaatagaacttcgaatgaggaaaaatgtgaaagaaggctgtaccgttagccctgagaccatatccttaaatgtaaaaggccctggactacagaggatggtgcttgttgacttaccaggtgtgattaatactgtgacatcaggcatggctcctgacacaaaggaaactattttcagtatcagcaaagcttacatgcagaatcctaatgccatcatactgtgtattcaagatggatctgtggatgctgaacgcagtattgttacagacttggtcagtcaaatggaccctcatggaaggagaaccatattcgttttgaccaaagtagacctggcagagaaaaatgtagccagtccaagcaggattcagcagataattgaaggaaagctcttcccaatgaaagctttaggttattttgctgttgtaacaggaaaagggaacagctctgaaagcattgaagctataagagaatatgaagaagagttttttcagaattcaaagctcctaaagacaagcatgctaaaggcacaccaagtgactacaagaaatttaagccttgcagtatcagactgcttttggaaaatggtacgagagtctgttgaacaacaggctgatagtttcaaagcaacacgttttaaccttgaaactgaatggaagaataactatcctcgcctgcgggaacttgaccggaatgaactatttgaaaaagctaaaaatgaaatccttgatgaagttatcagtctgagccaggttacaccaaaacattgggaggaaatccttcaacaatctttgtgggaaagagtatcaactcatgtgattgaaaacatctaccttccagctgcgcagaccatgaattcaggaacttttaacaccacagtggatatcaagcttaaacagtggactgataaacaacttcctaataaagcagtagaggttgcttgggagaccctacaagaagaattttcccgctttatgacagaaccgaaagggaaagagcatgatgacatatttgataaacttaaagaggctgttaaggaagaaagtattaaacgacacaagtggaatgactttgcggaggacagcttgagggttattcaacacaatgctttggaagaccgatccatatctgataaacagcaatgggatgcagctatttattttatggaagaggctctgcaggctcgtctcaaggatactgaaaatgcaattgaaaacatggtgggtccagactggaaaaagaggtggttatactggaagaatcggacccaagaacagtgtgttcacaatgaaaccaagaatgaattggagaagatgttgaaatgtaatgaggagcacccagcttatcttgcaagtgatgaaataaccacagtccggaagaaccttgaatcccgaggagtagaagtagatccaagcttgattaaggatacttggcatcaagtttatagaagacattttttaaaaacagctctaaaccattgtaacctttgtcgaagaggtttttattactaccaaaggcattttgtagattctgagttggaatgcaatgatgtggtcttgttttggcgtatacagcgcatgcttgctatcaccgcaaatactttaaggcaacaacttacaaatactgaagttaggcgattagagaaaaatgttaaagaggtattggaagattttgctgaagatggtgagaagaagattaaattgcttactggtaaacgcgttcaactggcggaagacctcaagaaagttagagaaattcaagaaaaacttgatgctttcattgaagctcttcatcaggagaaataaattaaaatcgtactcataatcagctctgcatacatctgaagaacaaaaacatcaacgtcttttgtccagcctctttttcttctgctgttccacctttctaaacatacaataaagtcatgggataaaaataatcgatgtatgttacgggcgctttaaccatcagctgcctctcgaatggaagaacagtggtaatggattaacatcctattttgttgtactaaagtgacaaatcggaataatataattggtatggccattaggttcagtccttgaagataagaaacttgttctctgtttgttgtcttatttgtggtggcactcgtttaatggattaactgaggttgctcaatgttcagtttcttttccagaaatacaatgctaggtgttttgaaataaaacttatatagcaattgtttaaagttatcaattgtatataaaatcacagtagcctgctaaatcattgtatgtgtctgtagtattctattcccagaaactatttgaccatgataattcagtttatattcaccacatgaaagaaaaatgggtaacagaagaacccttaaaacaggttaatttggattgtaacgttcagtgaaagaaatttcaacccttcatagccagcgaagaaatttgccttggaagccaagtcagtaccagcttacctatttgattcagttgctgttttctcactctctatatccatttgaaattgatttattttagatgttgtatacttacgttaggctttctgttaatagtggtttttctcctgttgacagagccaccggattatgacacaggatgaggaagattaaggataatcaattgactaatttcatttagaatattatcaaacatttcaactaggtatcagaaaaaggctttctttcataagactattttaaatagaaattatttcaacaattaaagtaatgttgaccatccccctctcagctgaataaagaaaaatttagttcaatttattgcaatttaattacaatactaccttcacaacattttcatgtgttttaaataaatattttttaattggctaaaggacattcaagcaaagaaatgctttctttacttaaaatgtctatctcatttgctgccttttcactaagcctttactttgttaataaaagtgtccattgtgtgatgtttttgattttacagtttgctaaatcttattttcttggagttgctttttggtaacagccccattgctactccccattttattgttttacatcaatgcatgcttcgttgtgatccctcaagatgtaacacttggtatgctcggttgaggatatgaaaaaatacttccgaaaccaggaattcaatgtatgtttgttttatactgtttgataagaaaagtaggtccagccttaagcagcacagatgcgctggtagatgcatagtcaggaactttttttatttcttttaggtctagggacaggagtgaatagaaagggaggagagctctattatgttctatacacagattaggagatgaccttactgggtacacccctctaaccagtgcttacaggttaatgcatgttaatgaatatttttgcagttgtaaagcataacaattacaactacacatctatttctaaagaataaaacaggaccatatttatttacttctgtcaactatagaaagaaagaccttcagctgtatttccacagatttctcccaaggaaaaggctaatattagtcactactgttatcacatccctttgtataagttttaaaaagagatggagggagatcttcatttctttgaggagatcagtattgtaacgtatgtgaatagatgataacaattaatattactaaaagtcccacatgagagtcctgacgccctctccatgccccacagtaatgtggcttctttcatgggtttttttttcttctttttagctgatctcatcctaagcatgctttatttttccttgaaagctaggtatttatcaactgcagatgttattgaaagaaaataaaattcagtctcaagagtaaaccctgtgtcttgtgtctgtagttcaaaagtcagaaatgattctaatttaaacaaaaagatactaaatatacagaagttaaattcgaactagccacagaatcatttgtttttatgtcagaatttgcaaagagtggagtggacaaagctctgtatggaagactgaacaactgtaaatagatgatatccaaacttaatttggctaggacttcaattttaaaaatcagtgtacctaggcagtgcacagcacgaaataagtggcccttgcagcttccccgtttaacccactgtgctatagttgcgggtggaacagtcaacctttctagtagtttatgatattgccctctttgtattcccattttctacagttttttccgcagacttctttctgcaaattattcagcctccaaatgcaaatgaatgatataaaaataagtagggaacatggcagagagtggtgcttcccagcctcacaatgtgggaatttgacataggatgagagtcagagtataggtttaaaagataaaatctttagttaataattttgtatttatttattctagatgtatgtatctgaggaaagaaatctggtatttttgctttccaataaaggggatcaaagtaatggtttttctctcagttctctaagctggtctatgttatagctctagcagtatggaaatgtgctttaaaatatgcttaccttttgaatgatcatggctatatgttgttgagatatttgaaacttaccttgttttcacttgtgcactgtgaatgaactttgtattatttttttaaaaccttcacattacgtgtagatattattgcaacttatattttgcctgagcttgatcaaaggtcatttgtgtagatgagtaattaaaaaatatttaaatcacattataattctattattggagagcatcttttaaatttttttctgttttaacgagggaaagagaaacctgtatacctagggtcattatttgaccccatagtataaccagattcatggtctaacaagctctcagtgtggcttttctctgaatgcttgaatttcacatgccttgcatttcacagttgtactccatggtcaaccggtgctttttttcacatcgtggtacttgtcaaaacattttgttattttccttggtaaaatatataaaaaaggttttctaatttcactttgctgccaa

SEQ ID NO: 162651 - DNA, 1096 bp, Homo sapiens
  Payload ID: 12046
  Gene Symbol: OPA1
  Gene Name: optic atrophy 1 (autosomal dominant)
  ENST ID: ENST00000445863
  CDS Start-End: 1-552
cttgcaagtgatgaaataaccacagtccggaagaaccttgaatcccgaggagtagaagtagatccaagcttgattaaggatacttggcatcaagtttatagaagacattttttaaaaacagctctaaaccattgtaacctttgtcgaagaggtttttattactaccaaaggcattttgtagattctgagttggaatgcaatgatgtggtcttgttttggcgtatacagcgcatgcttgctatcaccgcaaatactttaaggcaacaacttacaaatactgaagttaggcgattagagaaaaatgttaaagaggtattggaagattttgctgaagatggtgagaagaagattaaattgcttactggtaaacgcgttcaactggcggaagacctcaaaaagttacaaggaactgggctgagcacggtggctcacgcttgtaatcccagcactttgggaggccaagatgggtggaaaacaagaaatgttctttttccccagctcggactcaacactacacaccaggccaccacatggcgccgcacccagcattgacacttcttttaccttgtctgggctctgacatccgtgccaggttgctcttcgtcatggagtcccttttactgagctctgctctgacgctttgtgccaggtgcctctccatctcatccttcccacccgctagcctctgcccgaccccagacagattccttcctcacctgaagccagaccatgcctttgtggagataccctctttaccctgcctgtgcttcgccagcctgcaccaggccaccctcctgcacagatactctcctcagtactggaccaggctaccaacagccccatgtgaacccattgtaacccaggtcaggcattaacacctgcagtaggctaccatggcttccccttcccacccccctagcttggccctactaataatcactttgtcactgtttggggttgatatttggttgtttcttgtaggttcctagctttaagataggattgcatactaaaatttacttagatctttgagaactcaaggaaatcagtgaaacattattgttattaaataaaaataaaatacctgtagttggta

SEQ ID NO: 162652 - DNA, 780 bp, Homo sapiens
  Payload ID: 12046
  Gene Symbol: OPA1
  Gene Name: optic atrophy 1 (autosomal dominant)
  ENST ID: ENST00000419435
  CDS Start-End: 528-780
cttcctgggtcattcctggaccgggagccgggctggggctcacacgggggctcccgcgtggccgtctcggcgcctgcgtgacctccccgccggcgggatgtggcgactacgtcgggccgctgtggcctggatagcagaaaggagctcatctgtttggagtccatttttgatggggatcccactagagtgaggtctgccagtctttagtgaaacacagctctggaataaaaggaagtttaccactacaaaaactacatctggtttcacgaagcatttatcattcacatcatcctaccttaaagcttcaacgaccccaattaaggacatcctttcagcagttctcttctctgacaaaccttcctttacgtaaactgaaattctctccaattaaatatggctaccagcctcgcaggaatttttggccagcaagattagctacgagactcttaaaacttcgctatctcatactaggatcggctgttgggggtggctacacagccaaaaagacttttgatcagtggaaagatatgataccggaccttagtgaatataaatggattgtgcctgacattgtgtgggaaattgatgagtatatcgattttgagaaaattagaaaagcccttcctagttcagaagaccttgtaaagttagcaccagactttgacaagattgttgaaagccttagcttattgaaggacttttttacctcaggttctccggaagaaacggcgtttagagcaacagatcgtggatctgaaagtgacaagcattttagaaagg

SEQ ID NO: 162653 - DNA, 554 bp, Homo sapiens
  Payload ID: 12046
  Gene Symbol: OPA1
  Gene Name: optic atrophy 1 (autosomal dominant)
  ENST ID: ENST00000434811
  CDS Start-End: 1-554
gctatctcatactaggatcggctgttgggggtggctacacagccaaaaagacttttgatcagtggaaagatatgataccggaccttagtgaatataaatggattgtgcctgacattgtgtgggaaattgatgagtatatcgattttgagaaaattagaaaagcccttcctagttcagaagaccttgtaaagttagcaccagactttgacaagattgttgaaagccttagcttattgaaggacttttttacctcaggtcacaaattggttagtgaagtcataggagcttctgacctacttctcttgttaggttctccggaagaaacggcgtttagagcaacagatcgtggatctgaaagtgacaagcattttagaaaggtgtcagacaaagagaaaattgaccaacttcaggaagaacttctgcacactcagttgaagtatcagagaatcttggaacgattagaaaaggagaacaaagaattgagaaaattagtattgcagaaagatgacaaaggcattcatcatagaaagcttaagaaatctttgattgacatg

SEQ ID NO: 162654 - DNA, 393 bp, Homo sapiens
  Payload ID: 12046
  Gene Symbol: OPA1
  Gene Name: optic atrophy 1 (autosomal dominant)
  ENST ID: ENST00000429164
  CDS Start-End: 1-393
gattagagaaaaatgttaaagaggtattggaagattttgctgaagatggtgagaagaagattaaattgcttactggtaaacgcgttcaactggcggaagacctcactcggactcaacactacacaccaggccaccacatggcgccgcacccagcattgacacttcttttaccttgtctgggctctgacatccgtgccaggttgctcttcgtcatggagtcccttttactgagctctgctctgacgctttgtgccaggtgcctctccatctcatccttcccacccgctagcctctgcccgaccccagacagattccttcctcacctgaagccagaccatgcctttgtggagataccctctttaccctgcctgtgcttcgccagcctgcaccagg

SEQ ID NO: 162655 - DNA, 7828 bp, Homo sapiens
  Payload ID: 12047
  Gene Symbol: OPA3
  Gene Name: optic atrophy 3 (autosomal recessive, with chorea and spastic paraplegia)
  Uniprot ID: Q9H6K4
  ENST ID: ENST00000263275
  CDS Start-End: 56-595
gttgaggcgccccgcccagtcagcaaggttgcgcgtgccctgtgagaccgccaagatggtggtgggcgcgttccctatggcgaagctgctatacttgggcatccggcaggtcagcaagccgcttgccaaccgtattaaggaggccgcccgccgaagcgagttcttcaagacctatatctgcctcccgccggctcaactgtatcactgggtggagatgcggaccaagatgcgcatcatgggcttccggggcacggtcatcaagccgctgaacgaggaggcggcagctgagctgggcgcagagctgctgggcgaagccaccatcttcatcgtgggcggcggctgcctagtgctggagtactggcgccaccaggcgcagcagcgccacaaggaggaggagcagcgtgctgcctggaacgcgctgcgggacgaggtgggccacctggcgctggcgctggaagcgctgcaggcgcaggtgcaggcggcgccgccacagggcgccctggaggaactgcgcacagagctgcaagaggtgcgcgcccagctctgcaatcccggccggtccgcttcccacgcagtgcctgcgtccaagaaataggagcttgctggatggaacctgaatttggacatggcctatgtacctaacgtggccttcttcccgcaccacccttgcctgcgctggcccagtggaaaccaccaggatcttgatgcaacttggcatttggttacccctgctgataagagcagccgttacctgccactgggaccagcaggtgaagcgttgcaacatagccccctccatcatccttcacctcctatcccccactccaaaccaggacgacctgcaaggtcccagccagcaggacaccgtgggcactctggcaaatgaaaaaatggaacctggtcttgagctgaatcaatgtgttattgttacccccacccccggtttacctgatcagtgttaacctttactgggacactcatctgttacactggaacaccttcttctttttgtcaatcggcacagaccactgtaaggaaatgcagtgtgttgcagtggccttttctccccctcaccttctaaggtcagctctagctgagcatcagtgctctcttaaggaggaaaaaaacggtgcggctgggagcggtggctcacgcctgtaatcctagcaccttgggaggccgaggcgggcggatcacttgaggtcaggagttccagaccagcctggccaacatggtgaaactccgtctctactaaaaatacaaaaattagccgggtgtggtggggtgcgcttgtaatcccagctactcgggaggctgaggcaggagaattgcttgaacccatgaggtggaggttgcggtgagccaagatggcaccattgcaccctagcctgggcaacagagcaagacaccgtcttaaaaccaaaagttaaccgggcgtggtggtgggtgcctgtaatcctagctacttgggaggctgaggcaggagaattgcttgaacttgggaggtggaggccaagattgtaccactgtattccagcccgggtgacagagcaagactgtgtctcaaaaaaaaaaaaaaaatcctggctgggcacggtggctcacacctgcaatcccagcactttggaaggtcgaggtgggcgggtcatttgaagtcgggaggtcgggagatcgggagctcgagaccagcctgaccaatatgatgaaaccccgtctctactaaaaatacataaattagctgggcatggtggcatgcacctgtaatcccagctacttgggaggctgagacaggagaattgcttgaacccgggaggcagaggttgcagtgagccgagattgcgcaattgcatgccagcctgggtaacgagcaaaactccatcttaaaaaaacccacaaaaggtcctggcctgcagtcaatccctggaatcattgtaccttcccttgagacccgaagtggactattccaacagaaccccctcatccttgagtctatggcacaacccactggaatggcactacaggatcttttctgtgaatgtcctccaacccccctttccgtggtgggaaatttgatcctaactagggctaatccagcctgtccttcagcctcagccccctattttcctgtcctcagagtccctggagcttgtactgtgtggcatgtcctttcttgccttccccaccttgctcagtagcatttctcagggacccagtcgaatccaagcccatggattcaattgtcacatccttcatcttccatccgtgtctcctaatctgtgtgctcttgctttctttcctcggagctctggactgacccgacagcctgtcttcatgtagcagtaccctcctgcctccatagcccccggtcccacccccatcctaccaattaggccagcagttggccttaactgcttgattaatttccttggactgccataacagatcaccattgggtggtgaacttgatggcttaagtccaacaggaatttaattcacacagttctggagtccagaagtctgaaaccaaggtgctgacagggacacgctccctcttccagctcctggtgattccaggccttccttggctctgcctgcagcttcacatggccttttccctcttctattttgtctcttacaagaacacctgtcattgcatttagggcccatcttaagttcaggatgatcccacctcaagacccttaattacatctgaaaaaacactttttccaaataaactgtcataagcacaggtcctgggggttagtatgtggacttgtctgttgggggcacaccattcaagccattcagcccactattcctcctcaccccaagagtacgctggcgtccaggtgcagtggctcacacctgtaatcccagcactttgggagaccagggcaggagggatctctttgagcccaggagctgaagaccagcctgggcaacatagtgagaccccatctctacaaaagtaaaataaaaaattagccaggtgcggtgatgcatgcctgtagtcccagctacttgggaggctgaggcaggaggatcacctgagccctggaggtcgaggctgcagcgagccgtgatcgcgccactacactccagcctggatgacagagtgagaccctttctcagaaaaaaagtaccctgggactcctgccaaccccgcgggccatttggccttcctgctagctgagaggaacagtctaggaaccacccttttctactgggtttctcttccaggatctgccactgaagcgggagggggtgggtcccagtagcctgcagtctgtccttccgactgtagctctctcattagaggagctgcaaggtgatgaaggcatcctgaggctgtacctgaaccaccatgtggatctccacaatgggtacagagcttattaaaatcaggagggaaactgggagggttctgatggggagaggcccaagagtcaccctatgagctggggaaactaaggccaggggtaagcaaagggacttgccagagatgccacagccagtgaggggctgactgcccagggtggtgaagtagtaggggcagagtgagaggcttggattaccccagctgcagagtgaggagggagaggcgatggctgagcagaggctgggagggtgacgatctctacacagaggcccagaccatcccagaggtggcgttgatagtgggagaccctctctatcccctctcagagcagccccagatcacaccagagatcatagcattgtgtaaactgggtgaccattccacctgggcccgcttttgggaagctgcaggtgaaagtgggagggccgggctttccccgacttccatcctcacctcccttctctaaagaggtaaaactggcctggaccaagatctgcccagatagaaagccaagaaacaggttctgaaacttttcttttcttcttttctcttcttttttcttttcttttctttcggagacagtctagctccgtcaccctgacggagtgcagtggtgcaatctcggctcactgcaacttctacctcccaggctcaaccaatgatcctgcctcagcttccgaagtagctgggattacatgtgcccaccacccacgcctggctaatttttgtattttagtggagacggggtttctccaagttgcccaggctgatcttgaactcctgacctcaggtaatccgcccgcctcggcctcccaaagtgctgggattacaggcgtgagccaccgcgcctggcctgaaacagcatttcagttccttctggaagagggggagaagctggagcagagggaactgaccgagtgggtcctgagtgggctgtgtttaaaactgggagtgacccaggccagctcacgcctgtcatcccagcactttgagaggccaaggtggactgatcacatgatgttaggagatcgagaccagcctggccaacatggcaaaaccccgtctctactaaaaatacaaaaattagccgggcatgttggcacattcctgaatcccagctactcgggaggctgaggcacgagaattgcttgaacccaggaggtggaggttgcagtgagctgagatcgcgccactgcactccagcctgggtgacagagtgagactcaactcaaaaaaaaaaaacagaggtgggagtgtgaacacaggcaggagctccaattcctgaccccagcgctgtcctgacccagatggagtgctgctctcacatctcagagacttcgcactcagccctgccctgccctgccctgacaggcagccagtcatcgtgggcagcagggccatctacttcccccactgcggcgtcaggggtggccagagtgtgtggaagtggaaagaacgtcctctcaaaatgcaagaggccagaggatggttcactgctcgtgtgttctgctagctagaattctgtgtaccttgtaatttggggagaggggttagaataaatttgtaaatgaagctgattatcttcaagttgatgcattcttttttcatatttaaaaagtccttgggactgggcgcagtggctcacacctgtaatcctagcactttgggaggccagggtgggtggatcacctgaggtcaggagttcaagaccaacctgatcaacatggtgaaacctcgtctctactaaaaatacaaaaattagctgggcatggtggttgtgcacctgtaatcccacctactcgggaggctgaggcaggagaatctcttggacccgggaggcggaggttgcagtgagccgagatcatgccattatactccagcctgggtgacagagcgagacttcatctctaaataaataaataaataaataaataaataaggtccatgtcaaccttaggaaaaatatcctttatttattctttcactcaaaaaactcactgaggtggtcccgcaccgggacatggacccagtgtccttggtagggcgtctcccgcaaaaaaaaaaaaaataaaaaaaataaaacacaaaactcactgagttacccactctctgccccaccctatgctggggtcacagtggtgacagagacagccccagccctgccgtcaccgggtcttacagatgctcacacgtacatttcttttccagtgttccctgccccaccccatagttgtttaggaagcaggggctgggctgaatccggaatcctccctctggagtgactcaggactataaacccattcatcccagctcacaaaaccctgggaggtgccctgagggctgtgcccctcccatctcctggcaggccctgctgtccctcttgttggtttctctgtagggcaggccattgcctggagggaggcaaaatggctgagagccaccccaggagaaaatgggctttacataagccccaacctgatctattggctcacggagctactcctgggctggtcgctgtgttgctgagtggcaggcttgggtcccccagtggcaatggcttgtagctggagtcggtgtggacagagagaggagaagcatggcaactctgagtgtactgaggatcaactgcaccaggctccattctagtagctgggagccagttgggagcaagcagaggccctcactggagctgacattctagtgccagagaccggcaataaagaaggaaagagtggccaggcgtggtggctcacacctgtaatctcagcactttgggaggccgaggcgggccaatcccctgaggtcgggagttcgagaccagcctgaccgacatggagaaaccccatctctactaaaaatacaaaattagcagggcatggtggtgcatgcctgtaatcccagccactcaggaggctgtggcaggagaatcgcttgaacccgggaggcggaggttgcggtgagccaatattgcaccattgcactccagcctgggcaacaagaacgagactccatctcaaaaaaaaaaggaaaaagctaatccagcatagggtgatgaggactgagaggaatggaggcagggtaggagttccggacttacgggcaccgctgatctagacaggtgggcagggaggaggcagcgcttcagatggagggagataggaagagggctgtgagtatctgtgaaagtcctaggacagatgtggccttggcctgttcctggaacagcaagagtttctggctgtcagaatagagcagaggctcgctgaccaaggcctttgggccaaatcaaggggacccttgcttcctgtctttgtaaataaagacttattggaacccaggcgctcattcgtttgcatattttccacagttgcttttgcagtacagtgacagagctgagtatttgcacagagatcctagggctctcgtactctctggccctttacagaaaaagtttaccatcccctggaatagagtaagcgaggggagaagttaggtgagggggccaggcaagcaaaggctgccccttgccttgattggcacaactgtggaggtcatcccagctctggagccccaacaggatcactcaggcctctgcttccaccacatctggcttcagcttccccctctgtggagtcctccctccctccctccttccccataggaaatgaccccagtgctcagcagtaacccccactgcgcgcagatctcagaacctccacctcaatctacagccacgtgccacaataagaagcagagttttaggccaggcgcggtggctcacgcctgtaatctcagtactttggaagaccaaggtgggaggatcacttgaagtcaggagttcgagaccagcctgcccaacatggtgaagccccgtctctaataaaaagaatacaaaaattagccgggtgtggtggtgcacatctgtaatcccagctacatgagaggctgacataggagaattgcttgagcccaggaggtggacgttgcagtgagccaagattgcactactgcattccagcctaggtgccagagtgagacttggtctcaaaacaaaacaaaacaaaaaattagccaggcatggtggcacacacctgtagtcccagctacttggggggctgaggcaggaggatcgcttgaacccgggtgtttaaggctgcagtgaactgagatcaggccacagcacctcaacctgggagacaaagtgagaccctgtctcaaaaaaaaaaaaaagcagagtttatgtaatccatcgtgtgcatatttatacaataatttacaattctatgtattttaaaagtgtataattcatatattatgtgacacaatatataatggaatataaaatatatattttatgtcatgtgtaacataacatcatctattatatgtagtgtatgtgcttatgtacatatcattggaatgaaagtttcattaaataattacccttaa

SEQ ID NO: 162656 - DNA, 2250 bp, Homo sapiens
  Payload ID: 12047
  Gene Symbol: OPA3
  Gene Name: optic atrophy 3 (autosomal recessive, with chorea and spastic paraplegia)
  Uniprot ID: Q9H6K4
  ENST ID: ENST00000323060
  CDS Start-End: 79-621
gagggcgggggaggagtgaagaggttgaggcgccccgcccagtcagcaaggttgcgcgtgccctgtgagaccgccaagatggtggtgggcgcgttccctatggcgaagctgctatacttgggcatccggcaggtcagcaagccgcttgccaaccgtattaaggaggccgcccgccgaagcgagttcttcaagacctatatctgcctcccgccggctcaactgtaccactggctggagatgcggaccaaaatgcgcatcatgggtttcaatgccgctgccatcaagccgctgaacgagggtgcagccgccgagctgggcgcggagctgctgggcgagggcatcatcttcatcaccgcctgcagctgcctgatgctggagtattggcgccaccagttgcagcagcgccgcaaggaaaaggagcgacgtgttgccagggaggcgctgcggggcgaggtgggccacttggggctggcgctcgaggagttgcaggcgcaggtgcaggcgacgtcgacgcagctcgccctggaggagctgcgcgctcagctgcaggaggtgcgagcccacctctgcctccgagacccgccgcctgcacccccagttgcgccggcgtccgagaaataggaggtctcggggccctggtcttggaggtgactgctgtctggactgcgaagtctctgtcttggcctattctccgcactgtcccatcctggaccggcccagctgacaccacccagtccttcgggggcgccggagagatcctgggctggagctgatcgaacctccctactaacctgcccagtggtaccttccactgggactctccgcctcctgcaggtggaacgttccaagaaggaccccgccctatcccaccccgcccctgccagcgcatttgttgagcactttggaaagacagcgtcttttatcagaccccacctccctaccgctaggtaggccagcaggacgtccacctcttttggcaaaacaaaattctgcacccggatttagccacctctcattctgtcacccgcaccctcactcacctgagtggacccttcccctaggacgctcatcctttgcaccgaacaccacctacctcctcctcattggtacagaccattgtaaagatgcacaaagttcctacggacttcccgacccgcccccttccatctacctcagtcttagggggaaaggtgggggtgaatcctggactgcgttagctccaatgagtcaccaccctgcggctcctgaccttaatccatcttagtacctgtcattgacatcctcccctccctgagtggatcgatccaacataacccccctcttcttccacctatggcgcaccccactggcatggctatgctgggtcttccagggaaacgcctcccagcccggcattctgtggtctgttccagcaggacgtggccttttgggaggaaaaaccggtcttgaccagggctagtccattctggctttcaggctcagtcacttggtcaccagtccccagtcctggacctactgctactgtccttttatccggtcctccctcgctgtcctcttcagttgcctttgctagggaccggcctgtccctttactacctaagtcatcgtcagttcgcccaacttccctccaaatctgcccctcacggtacgcagggatcgcccttccttcctgcctttggactggtccaggtcctcctccgccctccttcacgcaaaggcctcctccagggggactacctgtccctcagcccagaggtccccctgtccaagcggggtattccaccaggccatatgacctacccacccgacaactgaagggggcgtggatgagctctgtgactctgaatgctactttataaatcgactgtcagcgttttctaattaaaggagctctggggtaaagatcttaagaacgtgtctgagaaccataatgtgcgtctgcaaaatgtcattgaaattaggaaagaaggccggacacagtggctcacgcctgtaattccagcactttaagaggccaaagcaggaggactgctggaggccaggagttagagaccaacctaggcaacacagcaagaccgcatctctacgaaaaatgaaaatattagctaggcgtcataccaaacgcctgtagttccagctacttgggaggctgaggcaggaggatcccttgagcccaggagttcaaggctgcagtgagctgtgatcctgccactacactccagactgggtgaaagagcaagactccaactc

SEQ ID NO: 162657 - DNA, 1146 bp, Homo sapiens
  Payload ID: 12047
  Gene Symbol: OPA3
  Gene Name: optic atrophy 3 (autosomal recessive, with chorea and spastic paraplegia)
  ENST ID: ENST00000544371
  CDS Start-End: 136-516
agccgctgttctgccccgcgggggcatccgctgggtccccgcgccgttgtcaagaccggggacctggacgcagcggagagaggtgccgccgcccgccccgtccagtcgccgcgcgcagtgtatcactgggtggagatgcggaccaagatgcgcatcatgggcttccggggcacggtcatcaagccgctgaacgaggaggcggcagctgagctgggcgcagagctgctgggcgaagccaccatcttcatcgtgggcggcggctgcctagtgctggagtactggcgccaccaggcgcagcagcgccacaaggaggaggagcagcgtgctgcctggaacgcgctgcgggacgaggtgggccacctggcgctggcgctggaagcgctgcaggcgcaggtgcaggcggcgccgccacagggcgccctggaggaactgcgcacagagctgcaagaggtgcgcgcccagctctgcaatcccggccggtccgcttcccacgcagtgcctgcgtccaagaaataggagcttgctggatggaacctgaatttggacatggcctatgtacctaacgtggccttcttcccgcaccacccttgcctgcgctggcccagtggaaaccaccaggatcttgatgcaacttggcatttggttacccctgctgataagagcagccgttacctgccactgggaccagcaggtgaagcgttgcaacatagccccctccatcatccttcacctcctatcccccactccaaaccaggacgacctgcaaggtcccagccagcaggacaccgtgggcactctggcaaatgaaaaaatggaacctggtcttgagctgaatcaatgtgttattgttacccccacccccggtttacctgatcagtgttaacctttactgggacactcatctgttacactggaacaccttcttctttttgtcaatcggcacagaccactgtaaggaaatgcagtgtgttgcagtggccttttctccccctcaccttctaaggtcagctctagctgagcatcagtgctctcttaaggaggaaaaaaacggtgcggctgggagcggtggctcacgcctgtaatcctagcaccttgggaggccgaggcgggcggatcacttgaggtcaggagttccagaccagcctg

SEQ ID NO: 162658 - DNA, 1359 bp, Homo sapiens
  Payload ID: 12048
  Gene Symbol: OPTC
  Gene Name: opticin
  Uniprot ID: Q9UBM4
  ENST ID: ENST00000367222
  CDS Start-End: 117-1115
gacagcctccaccagagtccccacctttctggaagctgcagggctctccatccaggatccagaagcattgaaggggaccagccgctgaagggattctcagtcccatctgactccccatgaggctcctggctttcctgagtctgctggccttggtgctgcaggagacagggacagcttctctcccaaggaaggagaggaagaggagagaggagcagatgcccagggaaggcgattcctttgaagttctgcctctgcggaatgatgtcctgaacccagacaactatggtgaagtcattgacctgagcaactatgaggagctcacagattatggggaccaactccccgaggttaaggtgactagcctcgctcctgcaaccagcatcagtcccgccaagagcactacggctccagggacaccctcgtcaaaccccacgatgaccagacctactacagcagggctgctactgagttcccagcccaaccatggtctgcccacctgcctggtctgcgtgtgcctcggttcctctgtgtattgcgatgacattgacctagaggacattcctcctcttcctcggaggactgcctacctgtatgcacgcttcaaccgcatcagccgtatcagggccgaagacttcaaagggctgacaaagttgaagaggattgacctctccaacaacctcatttcctccatcgataatgatgccttccgcctgctacatgccctccaggacctcatcctcccagagaaccagttggaagctctgcccgtgctgcccagtggcattgagttcctggatgtccgcctaaatcggctccagagctcggggatacagcctgcagccttcagggcaatggagaagctgcagttcctttacctgtcagacaacctgctggattctatcccggggcctttgcccctgagcctgcgctctgtacacctgcagaataacctgatagagaccatgcagagagacgtcttctgtgaccccgaggagcacaaacacacccgcaggcagctggaagacatccgcctggatggcaaccccatcaacctcagcctcttccccagcgcctacttctgcctgcctcggctccccatcggccgcttcacgtagctcggagcccttccactcctcccaggtcatctcttggaccagcgggcatcacattctccagcagccgccatctcacacgcctccctcctgtggccgccggcagcatggacaaaggtctccatgcagggggaggaggcctgcttctttccccacagctctcacgtctcccttctccctgcgggtgacaaagaagcccaaggaccacctccttcctgcctcattgtaataaaattccccacactga

SEQ ID NO: 162659 - DNA, 560 bp, Homo sapiens
  Payload ID: 12048
  Gene Symbol: OPTC
  Gene Name: opticin
  ENST ID: ENST00000448911
  CDS Start-End: 37-560
gccgctgaagggattctcagtcccatctgactccccatgaggctcctggctttcctgagtctgctggccttggtgctgcaggagacagggacagcttctctcccaaggaaggagaggaagaggagagaggagcagatgcccagggaaggcgattcctttgaagttctgcctctgcggaatgatgtcctgaacccagacaactatggtgaagtcattgacctgagcaactatgaggagctcacagattatggggaccaactccccgaggttaaggtgactagcctcgctcctgcaaccagcatcagtcccgccaagagcactacggctccagggacaccctcgtcaaaccccacgatgaccagacctactacagcagggctgctactgagttcccagcccaaccatgaggacattcctcctcttcctcggaggactgcctacctgtatgcacgcttcaaccgcatcagccgtatcagggccgaagacttcaaagggctgacaaagttgaagaggattgacctctccaacaacctcatttcctccatcgataatgatgcctt

SEQ ID NO: 162660 - DNA, 2464 bp, Homo sapiens
  Payload ID: 12049
  Gene Symbol: OPTN
  Gene Name: optineurin
  Uniprot ID: Q96CV9
  ENST ID: ENST00000263036
  CDS Start-End: 674-2407
atccctgcagcgctacccgggtactctggatgcacatagggcggctctcgctcctaccttgtcatcctgctgtctaatccgggggcagcttccctcctccacaccagcagaggctattcttcagcaacaagaatagccgagcctattcgtccgcaacaagagcccaagaagcatcctgcaggctttctgctttttgagtgtattttaaagcaaaaacgagtggaaagctatgtatgctcagttaactatgtctagatgttaaccttttttcaaaaaacacagatggaggcctccctccgaggatgcctggcattctcctctttctgtgggcggcagcgaccccctgcggctccagcctccactacgggatctgcgggaagacacggggaagacgaactccgcacactgcatttgattaatgatttattttgattaacgccgtcacagtgacgccttagagcagtccctgttcacccgggtcccagcctcgaccccgcacggacagcgagggtgtggctttgatagctggtggtgccacttcctggccttggatgagccgtacgcctctgtaaacccaacttcctcacctttgaaacagctgcctggttcagcattaatgaagattagtcagtgacaggcctggtgtgctgagtccgcacatagaacttctgcaatgtcccatcaacctctcagctgcctcactgaaaaggaggacagccccagtgaaagcacaggaaatggacccccccacctggcccacccaaacctggacacgtttaccccggaggagctgctgcagcagatgaaagagctcctgaccgagaaccaccagctgaaagaagccatgaagctaaataatcaagccatgaaagggagatttgaggagctttcggcctggacagagaaacagaaggaagaacgccagttttttgagatacagagcaaagaagcaaaagagcgtctaatggccttgagtcatgagaatgagaaattgaaggaagagcttggaaaactaaaagggaaatcagaaaggtcatctgaggaccccactgatgactccaggcttcccagggccgaagcggagcaggaaaaggaccagctcaggacccaggtggtgaggctacaagcagagaaggcagacctgttgggcatcgtgtctgaactgcagctcaagctgaactccagcggctcctcagaagattcctttgttgaaattaggatggctgaaggagaagcagaagggtcagtaaaagaaatcaagcatagtcctgggcccacgagaacagtctccactggcacggcattgtctaaatataggagcagatctgcagatggggccaagaattacttcgaacatgaggagttaactgtgagccagctcctgctgtgcctaagggaagggaatcagaaggtggagagacttgaagttgcactcaaggaggccaaagaaagagtttcagattttgaaaagaaaacaagtaatcgttctgagattgaaacccagacagaggggagcacagagaaagagaatgatgaagagaaaggcccggagactgttggaagcgaagtggaagcactgaacctccaggtgacatctctgtttaaggagcttcaagaggctcatacaaaactcagcgaagctgagctaatgaagaagagacttcaagaaaagtgtcaggcccttgaaaggaaaaattctgcaattccatcagagttgaatgaaaagcaagagcttgtttatactaacaaaaagttagagctacaagtggaaagcatgctatcagaaatcaaaatggaacaggctaaaacagaggatgaaaagtccaaattaactgtgctacagatgacacacaacaagcttcttcaagaacataataatgcattgaaaacaattgaggaactaacaagaaaagagtcagaaaaagtggacagggcagtgctgaaggaactgagtgaaaaactggaactggcagagaaggctctggcttccaaacagctgcaaatggatgaaatgaagcaaaccattgccaagcaggaagaggacctggaaaccatgaccatcctcagggctcagatggaagtttactgttctgattttcatgctgaaagagcagcgagagagaaaattcatgaggaaaaggagcaactggcattgcagctggcagttctgctgaaagagaatgatgctttcgaagacggaggcaggcagtccttgatggagatgcagagtcgtcatggggcgagaacaagtgactctgaccagcaggcttaccttgttcaaagaggagctgaggacagggactggcggcaacagcggaatattccgattcattcctgccccaagtgtggagaggttctgcctgacatagacacgttacagattcacgtgatggattgcatcatttaagtgttgatgtatcacctccccaaaactgttggtaaatgtcagattttttcctccaag

SEQ ID NO: 162661 - DNA, 3400 bp, Homo sapiens
  Payload ID: 12049
  Gene Symbol: OPTN
  Gene Name: optineurin
  Uniprot ID: Q96CV9
  ENST ID: ENST00000378747
  CDS Start-End: 242-1975
atcccggtcgggagttctctccaggcggcacgatgccgaggaaacagtgaccctgagcgaagccaagccgggcggcaggtgtggctttgatagctggtggtgccacttcctggccttggatgagccgtacgcctctgtaaacccaacttcctcacctttgaaacagctgcctggttcagcattaatgaagattagtcagtgacaggcctggtgtgctgagtccgcacatagaacttctgcaatgtcccatcaacctctcagctgcctcactgaaaaggaggacagccccagtgaaagcacaggaaatggacccccccacctggcccacccaaacctggacacgtttaccccggaggagctgctgcagcagatgaaagagctcctgaccgagaaccaccagctgaaagaagccatgaagctaaataatcaagccatgaaagggagatttgaggagctttcggcctggacagagaaacagaaggaagaacgccagttttttgagatacagagcaaagaagcaaaagagcgtctaatggccttgagtcatgagaatgagaaattgaaggaagagcttggaaaactaaaagggaaatcagaaaggtcatctgaggaccccactgatgactccaggcttcccagggccgaagcggagcaggaaaaggaccagctcaggacccaggtggtgaggctacaagcagagaaggcagacctgttgggcatcgtgtctgaactgcagctcaagctgaactccagcggctcctcagaagattcctttgttgaaattaggatggctgaaggagaagcagaagggtcagtaaaagaaatcaagcatagtcctgggcccacgagaacagtctccactggcacggcattgtctaaatataggagcagatctgcagatggggccaagaattacttcgaacatgaggagttaactgtgagccagctcctgctgtgcctaagggaagggaatcagaaggtggagagacttgaagttgcactcaaggaggccaaagaaagagtttcagattttgaaaagaaaacaagtaatcgttctgagattgaaacccagacagaggggagcacagagaaagagaatgatgaagagaaaggcccggagactgttggaagcgaagtggaagcactgaacctccaggtgacatctctgtttaaggagcttcaagaggctcatacaaaactcagcgaagctgagctaatgaagaagagacttcaagaaaagtgtcaggcccttgaaaggaaaaattctgcaattccatcagagttgaatgaaaagcaagagcttgtttatactaacaaaaagttagagctacaagtggaaagcatgctatcagaaatcaaaatggaacaggctaaaacagaggatgaaaagtccaaattaactgtgctacagatgacacacaacaagcttcttcaagaacataataatgcattgaaaacaattgaggaactaacaagaaaagagtcagaaaaagtggacagggcagtgctgaaggaactgagtgaaaaactggaactggcagagaaggctctggcttccaaacagctgcaaatggatgaaatgaagcaaaccattgccaagcaggaagaggacctggaaaccatgaccatcctcagggctcagatggaagtttactgttctgattttcatgctgaaagagcagcgagagagaaaattcatgaggaaaaggagcaactggcattgcagctggcagttctgctgaaagagaatgatgctttcgaagacggaggcaggcagtccttgatggagatgcagagtcgtcatggggcgagaacaagtgactctgaccagcaggcttaccttgttcaaagaggagctgaggacagggactggcggcaacagcggaatattccgattcattcctgccccaagtgtggagaggttctgcctgacatagacacgttacagattcacgtgatggattgcatcatttaagtgttgatgtatcacctccccaaaactgttggtaaatgtcagattttttcctccaagagttgtgcttttgtgttatttgttttcactcaaatattttgcctcattattcttgttttaaaagaaagaaaacaggccgggcacagtggctcatgcctgtaatcccagcactttgggaggtcgaggtgggtggatcacttggggtcagggtttgagaccagcctggccaacatggcggaaccctgtctctaccaaaattacaaaaattagccgagcatggtggcgcatgcctgtagtcgcagctactcgcgaggttgaggcaggagaattgcttgaacccaggaagtggcagttgcagtgagccgagacgacaccactgcactccagcctgggtgacagagggagactctgtctcgaaagaaagaaagaaaaaaaggaaggaaggagaaggaaggaaggagaagaaaaggtacctgttctacgtagaacacctttggtggagttccatcaactcgcaaagtagaatccttacctactactcttctgataataattttaatattttttatgtttggttgatgcgagcagctgcactgctcatgcagttagctagcatgtgacatcatgtgacaaagttcatgtaattagatggaagaaacctcactgattaattttaagaaccttttagggatgcaggaacaatgaagtggccacagtatgtgctgtttttgaagcatttttaaaaacgaattgtagttgtttttcttcatttaaaatggatctgttggaggttatgtgtgtatgttgtagttttattgcagccacaataattttaccaaagttttcacataggcagttagcctttacttaatatcaagacaagtgaaaaaatattggcatcgatgaaaccgataacattggcctcattggatttctttacccattcacagtgtaaagaagttaccttcatgctttcattgtacctgcaggcctgtgggcttgtacagtagataattaatttctaaaaagaacagctgcctattttcttcctaggttaggttatatcttcataatcacaagaattagtgatggcaaaataaaattttgcttatgaatcttttacattgtttatatatgattaatatcatcatatatattttctgtattaagctcatttggcttcatttaagctgtatacttagtcatatatctttcattagttctatggatatgagcagatccctttactggagcccagtatgtgctgtgtgagttagaagtcattcttgctgagaaggtgaataggtagggatttgccttgttttgtaagtctacaatttgccaagagtaaataacactggaccagctgtaaaagtaaacagtgtgtttatgcattgagatactaaagcatttaagaaaaaattaaaa

SEQ ID NO: 162662 - DNA, 3521 bp, Homo sapiens
  Payload ID: 12049
  Gene Symbol: OPTN
  Gene Name: optineurin
  Uniprot ID: Q96CV9
  ENST ID: ENST00000378748
  CDS Start-End: 363-2096
gccccctccgccaccgccgccgcccgccggcaggttccctggtcagcgtcccatcccggtcgggagttctctccaggcggcacgatgccgaggaaacagtgaccctgagcgaagccaagccgggcggcaggtgtggctttgatagctggtggtgccacttcctggccttggatgagccgtacgcctctgtaaacccaacttcctcacctttgaaacagctgcctggttcagcattaatgaagattagtcagtgacaggcctggtgtgctgagtccgcacatagaagaatcaaaaatgtccaaaatgtaactggagagaaagtgggcaacttttggagtgacttttccacaggaacttctgcaatgtcccatcaacctctcagctgcctcactgaaaaggaggacagccccagtgaaagcacaggaaatggacccccccacctggcccacccaaacctggacacgtttaccccggaggagctgctgcagcagatgaaagagctcctgaccgagaaccaccagctgaaagaagccatgaagctaaataatcaagccatgaaagggagatttgaggagctttcggcctggacagagaaacagaaggaagaacgccagttttttgagatacagagcaaagaagcaaaagagcgtctaatggccttgagtcatgagaatgagaaattgaaggaagagcttggaaaactaaaagggaaatcagaaaggtcatctgaggaccccactgatgactccaggcttcccagggccgaagcggagcaggaaaaggaccagctcaggacccaggtggtgaggctacaagcagagaaggcagacctgttgggcatcgtgtctgaactgcagctcaagctgaactccagcggctcctcagaagattcctttgttgaaattaggatggctgaaggagaagcagaagggtcagtaaaagaaatcaagcatagtcctgggcccacgagaacagtctccactggcacggcattgtctaaatataggagcagatctgcagatggggccaagaattacttcgaacatgaggagttaactgtgagccagctcctgctgtgcctaagggaagggaatcagaaggtggagagacttgaagttgcactcaaggaggccaaagaaagagtttcagattttgaaaagaaaacaagtaatcgttctgagattgaaacccagacagaggggagcacagagaaagagaatgatgaagagaaaggcccggagactgttggaagcgaagtggaagcactgaacctccaggtgacatctctgtttaaggagcttcaagaggctcatacaaaactcagcgaagctgagctaatgaagaagagacttcaagaaaagtgtcaggcccttgaaaggaaaaattctgcaattccatcagagttgaatgaaaagcaagagcttgtttatactaacaaaaagttagagctacaagtggaaagcatgctatcagaaatcaaaatggaacaggctaaaacagaggatgaaaagtccaaattaactgtgctacagatgacacacaacaagcttcttcaagaacataataatgcattgaaaacaattgaggaactaacaagaaaagagtcagaaaaagtggacagggcagtgctgaaggaactgagtgaaaaactggaactggcagagaaggctctggcttccaaacagctgcaaatggatgaaatgaagcaaaccattgccaagcaggaagaggacctggaaaccatgaccatcctcagggctcagatggaagtttactgttctgattttcatgctgaaagagcagcgagagagaaaattcatgaggaaaaggagcaactggcattgcagctggcagttctgctgaaagagaatgatgctttcgaagacggaggcaggcagtccttgatggagatgcagagtcgtcatggggcgagaacaagtgactctgaccagcaggcttaccttgttcaaagaggagctgaggacagggactggcggcaacagcggaatattccgattcattcctgccccaagtgtggagaggttctgcctgacatagacacgttacagattcacgtgatggattgcatcatttaagtgttgatgtatcacctccccaaaactgttggtaaatgtcagattttttcctccaagagttgtgcttttgtgttatttgttttcactcaaatattttgcctcattattcttgttttaaaagaaagaaaacaggccgggcacagtggctcatgcctgtaatcccagcactttgggaggtcgaggtgggtggatcacttggggtcagggtttgagaccagcctggccaacatggcggaaccctgtctctaccaaaattacaaaaattagccgagcatggtggcgcatgcctgtagtcgcagctactcgcgaggttgaggcaggagaattgcttgaacccaggaagtggcagttgcagtgagccgagacgacaccactgcactccagcctgggtgacagagggagactctgtctcgaaagaaagaaagaaaaaaaggaaggaaggagaaggaaggaaggagaagaaaaggtacctgttctacgtagaacacctttggtggagttccatcaactcgcaaagtagaatccttacctactactcttctgataataattttaatattttttatgtttggttgatgcgagcagctgcactgctcatgcagttagctagcatgtgacatcatgtgacaaagttcatgtaattagatggaagaaacctcactgattaattttaagaaccttttagggatgcaggaacaatgaagtggccacagtatgtgctgtttttgaagcatttttaaaaacgaattgtagttgtttttcttcatttaaaatggatctgttggaggttatgtgtgtatgttgtagttttattgcagccacaataattttaccaaagttttcacataggcagttagcctttacttaatatcaagacaagtgaaaaaatattggcatcgatgaaaccgataacattggcctcattggatttctttacccattcacagtgtaaagaagttaccttcatgctttcattgtacctgcaggcctgtgggcttgtacagtagataattaatttctaaaaagaacagctgcctattttcttcctaggttaggttatatcttcataatcacaagaattagtgatggcaaaataaaattttgcttatgaatcttttacattgtttatatatgattaatatcatcatatatattttctgtattaagctcatttggcttcatttaagctgtatacttagtcatatatctttcattagttctatggatatgagcagatccctttactggagcccagtatgtgctgtgtgagttagaagtcattcttgctgagaaggtgaataggtagggatttgccttgttttgtaagtctacaatttgccaagagtaaataacactggaccagctgtaaaagtaaacagtgtgtttatgcattgagatactaaagcatttaagaaaaaattaaaa

SEQ ID NO: 162663 - DNA, 3488 bp, Homo sapiens
  Payload ID: 12049
  Gene Symbol: OPTN
  Gene Name: optineurin
  Uniprot ID: Q96CV9
  ENST ID: ENST00000378752
  CDS Start-End: 348-2063
gccccctccgccaccgccgccgcccgccggcaggttccctggtcagcgtcccatcccggtcgggagttctctccaggcggcacgatgccgaggaaacagtgaccctgagcgaagccaagccgggcggcaggtgtggctttgatagctggtggtgccacttcctggccttggatgagccgtacgcctctgtaaacccaacttcctcacctttgaaacagctgcctggttcagcattaatgaagattagtcagtgacaggcctggtgtgctgagtccgcacatagaagaatcaaaaatgtccaaaatgtaactggagagaaagtgggcaacttttggagaacttctgcaatgtcccatcaacctctcagctgcctcactgaaaaggaggacagccccagtgaaagcacaggaaatggacccccccacctggcccacccaaacctggacacgtttaccccggaggagctgctgcagcagatgaaagagctcctgaccgagaaccaccagctgaaagaagccatgaagctaaataatcaagccatgaaagggagatttgaggagctttcggcctggacagagaaacagaaggaagaacgccagttttttgagatacagagcaaagaagcaaaagagcgtctaatggccttgagtcatgagaatgagaaattgaaggaagagcttggaaaactaaaagggaaatcagaaaggtcatctgaggaccccactgatgactccaggcttcccagggccgaagcggagcaggaaaaggaccagctcaggacccaggtggtgaggctacaagcagagaaggcagacctgttgggcatcgtgtctgaactgcagctcaagctgaactccagcggctcctcagaagattcctttgttgaaattaggatggctgaaggagaagcagaagggtcagtaaaagaaatcaagcatagtcctgggcccacgagaacagtctccactggcacgagcagatctgcagatggggccaagaattacttcgaacatgaggagttaactgtgagccagctcctgctgtgcctaagggaagggaatcagaaggtggagagacttgaagttgcactcaaggaggccaaagaaagagtttcagattttgaaaagaaaacaagtaatcgttctgagattgaaacccagacagaggggagcacagagaaagagaatgatgaagagaaaggcccggagactgttggaagcgaagtggaagcactgaacctccaggtgacatctctgtttaaggagcttcaagaggctcatacaaaactcagcgaagctgagctaatgaagaagagacttcaagaaaagtgtcaggcccttgaaaggaaaaattctgcaattccatcagagttgaatgaaaagcaagagcttgtttatactaacaaaaagttagagctacaagtggaaagcatgctatcagaaatcaaaatggaacaggctaaaacagaggatgaaaagtccaaattaactgtgctacagatgacacacaacaagcttcttcaagaacataataatgcattgaaaacaattgaggaactaacaagaaaagagtcagaaaaagtggacagggcagtgctgaaggaactgagtgaaaaactggaactggcagagaaggctctggcttccaaacagctgcaaatggatgaaatgaagcaaaccattgccaagcaggaagaggacctggaaaccatgaccatcctcagggctcagatggaagtttactgttctgattttcatgctgaaagagcagcgagagagaaaattcatgaggaaaaggagcaactggcattgcagctggcagttctgctgaaagagaatgatgctttcgaagacggaggcaggcagtccttgatggagatgcagagtcgtcatggggcgagaacaagtgactctgaccagcaggcttaccttgttcaaagaggagctgaggacagggactggcggcaacagcggaatattccgattcattcctgccccaagtgtggagaggttctgcctgacatagacacgttacagattcacgtgatggattgcatcatttaagtgttgatgtatcacctccccaaaactgttggtaaatgtcagattttttcctccaagagttgtgcttttgtgttatttgttttcactcaaatattttgcctcattattcttgttttaaaagaaagaaaacaggccgggcacagtggctcatgcctgtaatcccagcactttgggaggtcgaggtgggtggatcacttggggtcagggtttgagaccagcctggccaacatggcggaaccctgtctctaccaaaattacaaaaattagccgagcatggtggcgcatgcctgtagtcgcagctactcgcgaggttgaggcaggagaattgcttgaacccaggaagtggcagttgcagtgagccgagacgacaccactgcactccagcctgggtgacagagggagactctgtctcgaaagaaagaaagaaaaaaaggaaggaaggagaaggaaggaaggagaagaaaaggtacctgttctacgtagaacacctttggtggagttccatcaactcgcaaagtagaatccttacctactactcttctgataataattttaatattttttatgtttggttgatgcgagcagctgcactgctcatgcagttagctagcatgtgacatcatgtgacaaagttcatgtaattagatggaagaaacctcactgattaattttaagaaccttttagggatgcaggaacaatgaagtggccacagtatgtgctgtttttgaagcatttttaaaaacgaattgtagttgtttttcttcatttaaaatggatctgttggaggttatgtgtgtatgttgtagttttattgcagccacaataattttaccaaagttttcacataggcagttagcctttacttaatatcaagacaagtgaaaaaatattggcatcgatgaaaccgataacattggcctcattggatttctttacccattcacagtgtaaagaagttaccttcatgctttcattgtacctgcaggcctgtgggcttgtacagtagataattaatttctaaaaagaacagctgcctattttcttcctaggttaggttatatcttcataatcacaagaattagtgatggcaaaataaaattttgcttatgaatcttttacattgtttatatatgattaatatcatcatatatattttctgtattaagctcatttggcttcatttaagctgtatacttagtcatatatctttcattagttctatggatatgagcagatccctttactggagcccagtatgtgctgtgtgagttagaagtcattcttgctgagaaggtgaataggtagggatttgccttgttttgtaagtctacaatttgccaagagtaaataacactggaccagctgtaaaagtaaacagtgtgtttatgcattgagatactaaagcatttaagaaaaaattaaaa

SEQ ID NO: 162664 - DNA, 3321 bp, Homo sapiens
  Payload ID: 12049
  Gene Symbol: OPTN
  Gene Name: optineurin
  Uniprot ID: Q96CV9
  ENST ID: ENST00000378757
  CDS Start-End: 146-1879
ggctgccccctccgccaccgccgccgcccgccggcaggttccctggtcagcgtcccatcccggtcgggagttctctccaggcggcacgatgccgaggaaacagtgaccctgagcgaagccaagccgggcggcaggaacttctgcaatgtcccatcaacctctcagctgcctcactgaaaaggaggacagccccagtgaaagcacaggaaatggacccccccacctggcccacccaaacctggacacgtttaccccggaggagctgctgcagcagatgaaagagctcctgaccgagaaccaccagctgaaagaagccatgaagctaaataatcaagccatgaaagggagatttgaggagctttcggcctggacagagaaacagaaggaagaacgccagttttttgagatacagagcaaagaagcaaaagagcgtctaatggccttgagtcatgagaatgagaaattgaaggaagagcttggaaaactaaaagggaaatcagaaaggtcatctgaggaccccactgatgactccaggcttcccagggccgaagcggagcaggaaaaggaccagctcaggacccaggtggtgaggctacaagcagagaaggcagacctgttgggcatcgtgtctgaactgcagctcaagctgaactccagcggctcctcagaagattcctttgttgaaattaggatggctgaaggagaagcagaagggtcagtaaaagaaatcaagcatagtcctgggcccacgagaacagtctccactggcacggcattgtctaaatataggagcagatctgcagatggggccaagaattacttcgaacatgaggagttaactgtgagccagctcctgctgtgcctaagggaagggaatcagaaggtggagagacttgaagttgcactcaaggaggccaaagaaagagtttcagattttgaaaagaaaacaagtaatcgttctgagattgaaacccagacagaggggagcacagagaaagagaatgatgaagagaaaggcccggagactgttggaagcgaagtggaagcactgaacctccaggtgacatctctgtttaaggagcttcaagaggctcatacaaaactcagcgaagctgagctaatgaagaagagacttcaagaaaagtgtcaggcccttgaaaggaaaaattctgcaattccatcagagttgaatgaaaagcaagagcttgtttatactaacaaaaagttagagctacaagtggaaagcatgctatcagaaatcaaaatggaacaggctaaaacagaggatgaaaagtccaaattaactgtgctacagatgacacacaacaagcttcttcaagaacataataatgcattgaaaacaattgaggaactaacaagaaaagagtcagaaaaagtggacagggcagtgctgaaggaactgagtgaaaaactggaactggcagagaaggctctggcttccaaacagctgcaaatggatgaaatgaagcaaaccattgccaagcaggaagaggacctggaaaccatgaccatcctcagggctcagatggaagtttactgttctgattttcatgctgaaagagcagcgagagagaaaattcatgaggaaaaggagcaactggcattgcagctggcagttctgctgaaagagaatgatgctttcgaagacggaggcaggcagtccttgatggagatgcagagtcgtcatggggcgagaacaagtgactctgaccagcaggcttaccttgttcaaagaggagctgaggacagggactggcggcaacagcggaatattccgattcattcctgccccaagtgtggagaggttctgcctgacatagacacgttacagattcacgtgatggattgcatcatttaagtgttgatgtatcacctccccaaaactgttggtaaatgtcagattttttcctccaagagttgtgcttttgtgttatttgttttcactcaaatattttgcctcattattcttgttttaaaagaaagaaaacaggccgggcacagtggctcatgcctgtaatcccagcactttgggaggtcgaggtgggtggatcacttggggtcagggtttgagaccagcctggccaacatggcggaaccctgtctctaccaaaattacaaaaattagccgagcatggtggcgcatgcctgtagtcgcagctactcgcgaggttgaggcaggagaattgcttgaacccaggaagtggcagttgcagtgagccgagacgacaccactgcactccagcctgggtgacagagggagactctgtctcgaaagaaagaaagaaaaaaaggaaggaaggagaaggaaggaaggagaagaaaaggtacctgttctacgtagaacacctttggtggagttccatcaactcgcaaagtagaatccttacctactactcttctgataataattttaatattttttatgtttggttgatgcgagcagctgcactgctcatgcagttagctagcatgtgacatcatgtgacaaagttcatgtaattagatggaagaaacctcactgattaattttaagaaccttttagggatgcaggaacaatgaagtggccacagtatgtgctgtttttgaagcatttttaaaaacgaattgtagttgtttttcttcatttaaaatggatctgttggaggttatgtgtgtatgttgtagttttattgcagccacaataattttaccaaagttttcacataggcagttagcctttacttaatatcaagacaagtgaaaaaatattggcatcgatgaaaccgataacattggcctcattggatttctttacccattcacagtgtaaagaagttaccttcatgctttcattgtacctgcaggcctgtgggcttgtacagtagataattaatttctaaaaagaacagctgcctattttcttcctaggttaggttatatcttcataatcacaagaattagtgatggcaaaataaaattttgcttatgaatcttttacattgtttatatatgattaatatcatcatatatattttctgtattaagctcatttggcttcatttaagctgtatacttagtcatatatctttcattagttctatggatatgagcagatccctttactggagcccagtatgtgctgtgtgagttagaagtcattcttgctgagaaggtgaataggtagggatttgccttgttttgtaagtctacaatttgccaagagtaaataacactggaccagctgtaaaagtaaacagtgtgtttatgcattgagatactaaagcatttaagaaaaaattaaaagatctcttttgtttaaa

SEQ ID NO: 162665 - DNA, 2498 bp, Homo sapiens
  Payload ID: 12049
  Gene Symbol: OPTN
  Gene Name: optineurin
  Uniprot ID: Q96CV9
  ENST ID: ENST00000378764
  CDS Start-End: 520-2235
aacaagagcccaagaagcatcctgcaggctttctgctttttgagtgtattttaaagcaaaaacgagtggaaagctatgtatgctcagttaactatgtctagatgttaaccttttttcaaaaaacacagatggaggcctccctccgaggatgcctggcattctcctctttctgtgggcggcagcgaccccctgcggctccagcctccactacgggatctgcgggaagacacggggaagacgaactccgcacactgcatttgattaatgatttattttgattaacgccgtcacagtgacgccttagagcagtccctgttcacccgggtcccagcctcgaccccgcacggacagcgagggtgtggctttgatagctggtggtgccacttcctggccttggatgagccgtacgcctctgtaaacccaacttcctcacctttgaaacagctgcctggttcagcattaatgaagattagtcagtgacaggcctggtgtgctgagtccgcacatagaacttctgcaatgtcccatcaacctctcagctgcctcactgaaaaggaggacagccccagtgaaagcacaggaaatggacccccccacctggcccacccaaacctggacacgtttaccccggaggagctgctgcagcagatgaaagagctcctgaccgagaaccaccagctgaaagaagccatgaagctaaataatcaagccatgaaagggagatttgaggagctttcggcctggacagagaaacagaaggaagaacgccagttttttgagatacagagcaaagaagcaaaagagcgtctaatggccttgagtcatgagaatgagaaattgaaggaagagcttggaaaactaaaagggaaatcagaaaggtcatctgaggaccccactgatgactccaggcttcccagggccgaagcggagcaggaaaaggaccagctcaggacccaggtggtgaggctacaagcagagaaggcagacctgttgggcatcgtgtctgaactgcagctcaagctgaactccagcggctcctcagaagattcctttgttgaaattaggatggctgaaggagaagcagaagggtcagtaaaagaaatcaagcatagtcctgggcccacgagaacagtctccactggcacgagcagatctgcagatggggccaagaattacttcgaacatgaggagttaactgtgagccagctcctgctgtgcctaagggaagggaatcagaaggtggagagacttgaagttgcactcaaggaggccaaagaaagagtttcagattttgaaaagaaaacaagtaatcgttctgagattgaaacccagacagaggggagcacagagaaagagaatgatgaagagaaaggcccggagactgttggaagcgaagtggaagcactgaacctccaggtgacatctctgtttaaggagcttcaagaggctcatacaaaactcagcgaagctgagctaatgaagaagagacttcaagaaaagtgtcaggcccttgaaaggaaaaattctgcaattccatcagagttgaatgaaaagcaagagcttgtttatactaacaaaaagttagagctacaagtggaaagcatgctatcagaaatcaaaatggaacaggctaaaacagaggatgaaaagtccaaattaactgtgctacagatgacacacaacaagcttcttcaagaacataataatgcattgaaaacaattgaggaactaacaagaaaagagtcagaaaaagtggacagggcagtgctgaaggaactgagtgaaaaactggaactggcagagaaggctctggcttccaaacagctgcaaatggatgaaatgaagcaaaccattgccaagcaggaagaggacctggaaaccatgaccatcctcagggctcagatggaagtttactgttctgattttcatgctgaaagagcagcgagagagaaaattcatgaggaaaaggagcaactggcattgcagctggcagttctgctgaaagagaatgatgctttcgaagacggaggcaggcagtccttgatggagatgcagagtcgtcatggggcgagaacaagtgactctgaccagcaggcttaccttgttcaaagaggagctgaggacagggactggcggcaacagcggaatattccgattcattcctgccccaagtgtggagaggttctgcctgacatagacacgttacagattcacgtgatggattgcatcatttaagtgttgatgtatcacctccccaaaactgttggtaaatgtcagattttttcctccaagagttgtgcttttgtgttatttgttttcactcaaatattttgcctcattattcttgttttaaaagaaagaaaacaggccgggcacagtggctcatgcctgtaatcccagcactttgggaggtcgaggtgggtggatcacttggggtcagggtttgagaccagcctggccaacatggcggaaccctgtctctaccaaaattacaaaaa

SEQ ID NO: 162666 - DNA, 664 bp, Homo sapiens
  Payload ID: 12049
  Gene Symbol: OPTN
  Gene Name: optineurin
  ENST ID: ENST00000424614
  CDS Start-End: 1-380
aaggagaagcagaagggtcagtaaaagaaatcaagcatagtcctgggcccacgagaacagtctccactggcacggcattgtctaaatataggagcagatctgcagatggggccaagaattacttcgaacatgaggagttaactgtgagccagctcctgctgtgcctaagggaagggaatcagaaggtggagagacttgaagttgcactcaaggaggccaaagaaagagtttcagattttgaaaagaaaacaagtaatcgttctgagattgaaacccagacagaggggagcacagagaaagagaatgatgaagagaaaggcccggagactacagggtttcaccatgttggccaggatggtcttgatctcttgacctcgtgatcctcccacctcggcctcccagagtgctgggattacagatatgagccactgcgcccagctgcaagatgtatttctatcagtattctacaaaacgatttcctatgtctcttcttgactgatttcttctcctcggtccttcaatgaacaagcctactgtaggaaaaggaatgttgtccactttataatgagatcatttgaggatatgacttagaaacttgagggagaattgaaagatttgggttctatcccattactggtttgaataaagtagtttgaaaggaaaa

SEQ ID NO: 162667 - DNA, 848 bp, Homo sapiens
  Payload ID: 12049
  Gene Symbol: OPTN
  Gene Name: optineurin
  ENST ID: ENST00000430081
  CDS Start-End: 142-330
gccccctccgccaccgccgccgcccgccggcaggttccctggtcagcgtcccatcccggtcgggagttctctccaggcggcacgatgccgaggaaacagtgaccctgagcgaagccaagccgggcggcaggaacttctgcaatgtcccatcaacctctcagctgcctcactgaaaaggaggacagccccagtgaaagcacaggaaatggacccccccacctggcccacccaaacctggacacgtttaccccggaggagctgctgcagcagatgaaagagctcctgaccgagaaccaccagctgaaagagccatgtggtcaagtggactagagggagatttggttcatcagatcaagtccactttcctggtgtgtgactccatcactctgaacctcctgcagaagccatgaagctaaataatcaagccatgaaagggagatttgaggagctttcggcctggacagagaaacagaaggaagaacgccagttttttgagatacagagcaaagaagcaaaagagcgtctaatggccttgagtcatgagaatgagaaattgaaggaagagcttggaaaactaaaagggaaatcagaaaggtcatctgaggaccccactgatgactccaggcttcccagggccgaagcggagcaggaaaaggaccagctcaggacccaggtggtgaggctacaagcagagaaggcagacctgttgggcatcgtgtctgaactgcagctcaagctgaactccagcggctcctcagaagattcctttgttgaaattaggatggctgaaggagaagcagaagggtcagtaaaagaaatcaagcatagtcctgggcccacgagaacag

SEQ ID NO: 162668 - DNA, 423 bp, Homo sapiens
  Payload ID: 12049
  Gene Symbol: OPTN
  Gene Name: optineurin
  ENST ID: ENST00000486862
  CDS Start-End: 1-323
aagcggagcaggaaaaggaccagctcaggacccaggtggtgaggctacaagcagagaaggcagacctgttgggcatcgtgtctgaactgcagctcaagctgaactccagcggctcctcagaagattcctttgttgaaattaggatggctgaaggagaagcagaagggtcagtaaaagaaatcaagcatagtcctgggcccacgagaacagtctccactggcacgtatgtgaaggaagactcgggctgtcaggcagacaggctgggcaggctcgtcactgggtgcttgtcaccggaggtcaaatgttgtgacctgaggaagtaacttctttatgatttataccaggatctttccagaatatttggtttgaatgctatttaatgttgcagctcaaactggcaaagattaaaaactgtttggttcc

SEQ ID NO: 162669 - DNA, 667 bp, Homo sapiens
  Payload ID: 12049
  Gene Symbol: OPTN
  Gene Name: optineurin
  ENST ID: ENST00000482140
  CDS Start-End: 152-328
agtcccggctgccccctccgccaccgccgccgcccgccggcaggttccctggtcagcgtcccatcccggtcgggagttctctccaggcggcacgatgccgaggaaacagtgaccctgagcgaagccaagccgggcggcaggaacttctgcaatgtcccatcaacctctcagctgcctcactgaaaaggaggacagccccagtgaaagcacaggaaatggacccccccacctggcccacccaaacctggacacgtttaccccggaggagctgctgcagcagatgaaagagctcctgaccgagaaccaccagctgaaaggaccccactgatgactccaggcttcccagggccgaagcggagcaggaaaaggaccagctcaggacccaggtggtgaggctacaagcagagaaggcagacctgttgggcatcgtgtctgaactgcagctcaagctgaactccagcggctcctcagaagattcctttgttgaaattaggatggctgaaggagaagcagaagggtcagtaaaagaaatcaagcatagtcctgggcccacgagaacagtctccactggcacggcattgtctaaatataggagcagatctgcagatggggccaagaattacttcgaacatgaggagttaactgtgagccagctcctgctgtgcct

SEQ ID NO: 162670 - DNA, 957 bp, Homo sapiens; identical to SEQ ID NO: 161903
  Payload ID: 12050
  Gene Symbol:
  Gene Name: OR1B1
  ENST ID: ENST00000624439
  CDS Start-End: 1-957

SEQ ID NO: 162671 - DNA, 995 bp, Homo sapiens
  Payload ID: 12050
  Gene Symbol:
  Gene Name: OR1B1
  ENST ID: ENST00000623530
  CDS Start-End: 39-995
tgacttaaactgtctttcaggcaggctgactgtcactcatgatgagctttgcccctaatgcttcacactctccggtttttttgctccttgggttctcgagagctaacatctcctacactctcctcttcttcctgttcctggctatttacctgaccaccatactggggaatgtgacactggtgctgctcatctcctgggactccagactgcactcacccatgtattatctgcttcgtggcctctctgtgatagacatggggctatccacagttacactgccccagttgctggcccatttggtctctcattacccaaccattcctgctgcccgctgcttggctcagttctttttcttctatgcatttggggttacagatacacttgtcattgctgtcatggctctggatcgctatgtggccatctgtgaccccctgcactatgctttggtaatgaatcaccaacggtgtgcctgcttactagccttgagctgggtggtgtccatactgcacaccatgttgcgtgtgggactcgtcctgcctctttgctggactggggatgctgggggcaacgttaaccttcctcacttcttttgtgaccaccggccacttctgcgagcctcttgttctgacatacattctaatgagctggccatattctttgagggtggcttccttatgctgggcccctgtgccctcattgtactctcttatgtccgaattggggccgctattctacgtttgccttcagctgctggtcgccgccgagcagtctccacctgtggatcccacctcaccatggttggtttcctctacggcaccatcatttgtgtctacttccagcctcccttccagaactctcagtatcaggacatggtggcttcagtaatgtatactgccattacacctttggccaacccatttgtgtatagcctccacaataaggatgtcaagggtgcactctgcaggctgcttgaatgggtgaaggtagacccctga

SEQ ID NO: 162672 - DNA, 939 bp, Homo sapiens; identical to SEQ ID NO: 162177
  Payload ID: 12051
  Gene Symbol:
  Gene Name: OR2L8
  ENST ID: ENST00000623922
  CDS Start-End: 1-939

SEQ ID NO: 162673 - DNA, 1107 bp, Homo sapiens
  Payload ID: 12052
  Gene Symbol:
  Gene Name: OR51G1
  ENST ID: ENST00000624469
  CDS Start-End: 69-1034
ttcagccttgtcactttccaggaatctcattctatattccaggtttctgagtccaagattgtaaagctatgacaattcttcttaatagcagcctccaaagagccactttcttcctgacgggcttccaaggtctagaaggtctccatggctggatctctattcccttctgcttcatctacctgacagttatcttggggaacctcaccattctccacgtcatttgtactgatgccactctccatggacccatgtactatttcttgggcatgctagctgtcacagacttaggcctttgcctttccacactgcccactgtgctgggcattttctggtttgataccagagagattggcatccctgcctgtttcactcagctcttcttcatccacaccttgtcttcaatggagtcatcagttctgttatccatgtccattgaccgctacgtggccgtctgcaacccactgcatgactccaccgtcctgacacctgcatgtattgtcaagatggggctaagctcagtgcttagaagtgctctcctcatcctccccttgccattcctcctgaagcgcttccaatactgccactcccatgtgctggctcatgcttattgtcttcacctggagatcatgaagctggcctgctctagcatcattgtcaatcacatctatgggctctttgttgtggcctgcaccgtgggtgtggactccctgctcatctttctctcatacgccctcatccttcgcaccgtgctcagcattgcctcccaccaggagcgactccgagccctcaacacctgtgtctctcatatctgtgctgtactgctcttctacatccccatgattggcttgtctcttgtgcatcgctttggtgaacatctgccccgcgttgtacacctcttcatgtcctatgtgtatctgctggtaccaccccttatgaaccccatcatctacagcatcaagaccaagcaaattcgccagcgcatcattaagaagtttcagtttataaagtcacttaggtgtttttggaaggattaagttagagtaaagagaggaagttttggacataaagcccacaggtttctgtttgttttcagctgtgctgtggcaa

SEQ ID NO: 162674 - DNA, 966 bp, Homo sapiens; identical to SEQ ID NO: 162382
  Payload ID: 12052
  Gene Symbol:
  Gene Name: OR51G1
  ENST ID: ENST00000623849
  CDS Start-End: 1-966

SEQ ID NO: 162675 - DNA, 926 bp, Homo sapiens
  Payload ID: 12053
  Gene Symbol:
  Gene Name: OR52E1
  ENST ID: ENST00000445557
  CDS Start-End: 1-926
atgaataccactctatttcatccttactctttccttcttctgggaattcctgggctggaaagtatgcatctctgggttggttttcctttctttgctgtgttcctgacagctgtccttgggaatatcaccatcctttttgtgattcagactgacagtagtctccatcatcccatgttctacttcctggccattctgtcatctattgacccgggcctgtctacatccaccatccctaaaatgcttggcaccttctggtttaccctgagagaaatctcctttgaaggatgccttacccagatgttcttcatccacctgtgcactggcatggaatcagctgtgcttgtggccatggcctatgattgctatgtggccatctgtgaccctctttgctacacgttggtgctgacaaacaaggtggtgtcagttatggcactggccatctttctgagacccttagtctttgtcataccctttgttctatttatcctaaggcttccattttgtggacaccaaattattcctcatacttacggtgagcacatgggcattgcccgcctgtcttgtgccagcatcagggttaacatcatctatggcttatgtgccatctctatcctggtctttgacatcatagcaattgtcatttcctatgtacagatcctttgtgctgtatttctactctcttcacatgatgcacgactcaaggcattcagcacctgtggctctcatgtgtgtgtcatgttgactttctatatgcctgcatttttctcattcatgaccataggtttggtcggaatatacctcactttatccacattcttctggctaatttctatgtagtcattccacctgctctcaactctgtaatttatggtgtcagaaccaaacagattagagcacaagtgctgaaaatgtttttcaataaataa

SEQ ID NO: 162676 - DNA, 985 bp, Homo sapiens
  Payload ID: 12054
  Gene Symbol:
  Gene Name: OR5AL1
  ENST ID: ENST00000440231
  CDS Start-End: 1-985
atgtgtgctctaaagggttttctggaagaaaacttttatacctactcagtggccaaaggcaatcattcaacagtgtatgaatttatcctcttggggctcacagataatgcagagcttcaagtcactctctttggtatattccttgtagtatacttagctagctttatgggtaatttcggtttgattatgctaattcaaatcagtcctcagcttcatacacccatgtattttttcctcagccatctggcttttgttgatttttcttttacttcatctgttgccccaaataccttggtaaattttctgtgtgaagttaaaagtataacattttatgcatgtgccattcaggtatgctgcttcatcacatttgtagtttgtgaattatatttgctctcaatcatggcatatgatcggtatgttgccatctgtaaccctttactttatgtcattctcattcctagaaaactgtattaaactgattgctagcacgtatgtgtatggattcactgtgggacttgtacagacagtggcgacatcctacttgtctttttgtgattccaacgtgatcaaccacttctaccatgatgatgttccattagtggctctggcctgttctgacactcatgtcaaagagctgatgttgttaatcattgctgggttcaatactctctgctctctagtaattgtgctgatttcttatggtttcattttctttgccatcctgaggatacattctgctgaagggagacagaaagcattttctaccagtgcttcccatctgacctccatcacaatattttatggaacaatcatttttatgtacccgcagcccaagtcaagccattccctgaatatggataaagttgcttctgtgtttaatgtggtagtgattcctacattaaacccactgatctatagtttaagaaatcaggaggtaaaaaatgcactaaagagaattatagaaaagttatgtttggctgtcaaa

SEQ ID NO: 162677 - DNA, 945 bp, Homo sapiens; identical to SEQ ID NO: 162309
  Payload ID: 12055
  Gene Symbol:
  Gene Name: OR5D13
  ENST ID: ENST00000623618
  CDS Start-End: 1-945

SEQ ID NO: 162678 - DNA, 945 bp, Homo sapiens; identical to SEQ ID NO: 162309
  Payload ID: 12055
  Gene Symbol:
  Gene Name: OR5D13
  ENST ID: ENST00000623930
  CDS Start-End: 1-945

SEQ ID NO: 162679 - DNA, 852 bp, Homo sapiens
  Payload ID: 12056
  Gene Symbol: ORAI1
  Gene Name: ORAI calcium release-activated calcium modulator 1
  ENST ID: ENST00000611718
  CDS Start-End: 122-391
gcggcagccgccggagccgccgccgcagcggggacggggagcccccgggggccccgccccgccaccgccgccgtccgccgtcacctacccggactggatcggccagagttactccgaggtgatgagcctcaacgagcactccatgcaggcgctgtcctggcgcaagctctacttgagccgcgccaagcttaaagcctccagccggacctcggctctgctctccggcttcgccatggtgagctccggccgccctgccctgccccctctactgtcccggctgctcccgcccgcagccccgacggggctctctgggcgggccgggcgggccagagtgaggggaagagctgggagaaaccgtggtggcaatggtggaggtgcagctggacgctgaccacgactacccaccggggctgctcatcgccttcagtgcctgcaccacagtgctggtggctgtgcacctgtttgcgctcatgatcagcacctgcatcctgcccaacatcgaggcggtgagcaacgtgcacaatctcaactcggtcaaggagtccccccatgagcgcatgcaccgccacatcgagctggcctgggccttctccaccgtcatcggcacgctgctcttcctagctgaggtggtgctgctctgctgggtcaagttcttgcccctcaagaagcagccaggccagccaaggcccaccagcaagccccccgccagtggcgcagcagccaacgtcagcaccagcggcatcaccccgggccaggcagctgccatcgcctcgaccaccatcatggtgcccttcggcctgatctttatcgtcttcgccgtccacttctaccgctcactggttagccataaga

SEQ ID NO: 162680 - DNA, 1496 bp, Homo sapiens
  Payload ID: 12056
  Gene Symbol: ORAI1
  Gene Name: ORAI calcium release-activated calcium modulator 1
  Uniprot ID: Q96D31
  ENST ID: ENST00000616379
  CDS Start-End: 194-1099
gccgcccgggggcttttgccagcggcgccgcgggcctgcgtgctggggcagcgggcacttcttcgacctcgtcctcctcgtcctgtgcggccggccgggtgaggccgggcccgcgtagggggcagtcggcggctgcctccggcggaggtgcctcgcggcgcccgggccggcccgcgcctcggcggcgtgctccatgcatccggagcccgccccgcccccgagccgcagcagtcccgagcttcccccaagcggcggcagcaccaccagcggcagccgccggagccgccgccgcagcggggacggggagcccccgggggccccgccaccgccgccgtccgccgtcacctacccggactggatcggccagagttactccgaggtgatgagcctcaacgagcactccatgcaggcgctgtcctggcgcaagctctacttgagccgcgccaagcttaaagcctccagccggacctcggctctgctctccggcttcgccatggtggcaatggtggaggtgcagctggacgctgaccacgactacccaccggggctgctcatcgccttcagtgcctgcaccacagtgctggtggctgtgcacctgtttgcgctcatgatcagcacctgcatcctgcccaacatcgaggcggtgagcaacgtgcacaatctcaactcggtcaaggagtccccccatgagcgcatgcaccgccacatcgagctggcctgggccttctccaccgtcatcggcacgctgctcttcctagctgaggtggtgctgctctgctgggtcaagttcttgcccctcaagaagcagccaggccagccaaggcccaccagcaagccccccgccagtggcgcagcagccaacgtcagcaccagcggcatcaccccgggccaggcagctgccatcgcctcgaccaccatcatggtgcccttcggcctgatctttatcgtcttcgccgtccacttctaccgctcactggttagccataagactgaccgacagttccaggagctcaacgagctggcggagtttgcccgcttacaggaccagctggaccacagaggggaccaccccctgacgcccggcagccactatgcctaggcccatgtggtctgggcccttccagtgctttggccttacgcccttccccttgaccttgtcctgccccagcctcacggacagcctgcgcagggggctgggcttcagcaaggggcagagcatggagggaagaggatttttataagagaaatttctgcactttgaaactgtcctctaagagaataagcatttcctgttcttccagctccaggtccacctcctgttgggaggcggtggggggccaaagtggggccacacactcgctgtgtcccctctcctcccctgtgccagtgccacctgggtgcctcctcctgtcctgtccgtctcaacctccctcccgtccagcattgagtgtgtacatgtgtgtgtgacacataaatatactcataaggacacctcc

SEQ ID NO: 162681 - DNA, 2138 bp, Homo sapiens
  Payload ID: 12056
  Gene Symbol: ORAI1
  Gene Name: ORAI calcium release-activated calcium modulator 1
  ENST ID: ENST00000617316
  CDS Start-End: 388-1104
gccgcccgggggcttttgccagcggcgccgcgggcctgcgtgctggggcagcgggcacttcttcgacctcgtcctcctcgtcctgtgcggccggccgggtgaggccgggcccgcgtagggggcagtcggcggctgcctccggcggaggtgcctcgcggcgcccgggccggcccgcgcctcggcggcgtgctccatgcatccggagcccgccccgcccccgagccgcagcagtcccgagcttcccccaagcggcggcagcaccaccagcggcagccgccggagccgccgccgcagcggggacggggagcccccgggggccccgccccgccaccgccgccgtccgccgtcacctacccggactggatcggccagagttactccgaggtgatgagcctcaacgagcactccatgcaggcgctgtcctggcgcaagctctacttgagccgcgccaagcttaaagcctccagccggacctcggctctgctctccggcttcgccatggtggcaatggtggaggtgcagctggacgctgaccacgactacccaccggggctgctcatcgccttcagtgcctgcaccacagtgctggtggctgtgcacctgtttgcgctcatgatcagcacctgcatcctgcccaacatcgaggcggtgagcaacgtgcacaatctcaactcggtcaaggagtccccccatgagcgcatgcaccgccacatcgagctggcctgggccttctccaccgtcatcggcacgctgctcttcctagctgaggtggtgctgctctgctgggtcaagttcttgcccctcaagaagcagccaggccagccaaggcccaccagcaagccccccgccagtggcgcagcagccaacgtcagcaccagcggcatcaccccgggccaggcagctgccatcgcctcgaccaccatcatggtgcccttcggcctgatctttatcgtcttcgccgtccacttctaccgctcactggttagccataagactgaccgacagttccaggagctcaacgagctggcggagtttgcccgcttacaggaccagctggaccacagaggggaccaccccctgacgcccggcagccactatgcctaggcccatgtggtctgggcccttccagtgctttggccttacgcccttccccttgaccttgtcctgccccagcctcacggacagcctgcgcagggggctgggcttcagcaaggggcagagcatggagggaagaggatttttataagagaaatttctgcactttgaaactgtcctctaagagaataagcatttcctgttcttccagctccaggtccacctcctgttgggaggcggtggggggccaaagtggggccacacactcgctgtgtcccctctcctcccctgtgccagtgccacctgggtgcctcctcctgtcctgtccgtctcaacctccctcccgtccagcattgagtgtgtacatgtgtgtgtgacacataaatatactcataaggacacctccttcccgtgtcttgtatttgttgggcctgggctactgctcaccctggttaggtgagcctctaggaaaacttaaaacaaattttaagccaggtatggtggcacatacctgtggtctcagctattcaggaggccaaggcaggaggatctcttgagcccaggagtttgagaccccatctcaaacaaaaaatacaaaaattagccagccacggcgcctgcacttccagctcctttgagagactgaggcaggaagattgcctaagcccaggaggccaagtctgcagtgagctatggtaacaccactgcactccaacctgggcaacagagggagactctgtctctaaaaaaatagaaaaatttgccctgcatggtggctcacgcctgtaatcctagccctttggaaggccaaggcgggcagatcacttgaggtcgggagttcgagaccagcctgaccaacatggagaaaccccatctgtactaaaaatacaaaattagctgggtttggtggcgcatgcttgtaatcccagctactcgggaggctgaggcaggagaatcgcttgaacccaggaggcggaggttgcagtgagctgagatcgcgccattgcactccagcctgggcaacaacagtgaaactccgtctc

SEQ ID NO: 162682 - DNA, 10811 bp, Homo sapiens
  Payload ID: 12057
  Gene Symbol: ORAI2
  Gene Name: ORAI calcium release-activated calcium modulator 2
  Uniprot ID: Q96SN7
  ENST ID: ENST00000356387
  CDS Start-End: 278-1042
gggggaccccgcgcgaccggcggaaggagggagggggccgcgctcggcgccccggccgggccactgggccacaggccacgcggccacgcagtccgagcgggagccgagccgggcggggcgagggcagctccgcgtttctctgaattctccccaagggaaggaacgtcccagggatggaagtgcttggatgcggtgctgctggctgcggatgtgcgcaaggagatgggatggagagcctgagttggcattcgtataaatgacctgcctggctcccaccatgagtgctgagcttaacgtgcctatcgacccctctgctcctgcctgccctgagcccggccataagggcatggattaccgggactgggtccgccgcagctacctggaactggtcacctctaaccaccactcggtacaggccctgtcgtggcggaagctctacctgagcagggccaagctgaaggcctccagcaggacctccgccctcctctccggctttgccatggtggccatggtggaggtgcagctggagacgcagtaccagtacccgcggccgctgctgattgccttcagcgcctgcaccacggtgctggtggccgtgcacctgttcgccctcctcatcagcacctgcatcctgcccaatgtggaggccgtgagcaacatccacaacctgaactccatcagcgagtccccgcatgagcgcatgcacccctacatcgagctggcctggggcttctccaccgtgcttggcatcctactcttcctggccgaggtggtgctgctctgctggatcaagttcctccccgtggatgcccggcgccagcctggccccccacctggccctgggagtcacacgggctggcaggccgccctggtgtccaccatcatcatggtgcccgtgggcctcatcttcgtggtcttcaccatccacttctaccgctccctggtgcgccacaaaacggagcgccacaaccgcgagatcgaggagctccacaagctcaaggtccagctggacgggcatgagcgcagcctgcaggtcttgtgaggggccgagggccggggctgggagcggccctgtgcccgggagtccgcagaggcggggatttgtcagatgcagacattttgcaaggctgccgggtagttcaagaccaaagttttcctcttgtcttaataccataaggactggatgacttctcctgagatagaaccgtttggttcaatgagggactgtgttgctaagagcgttgggggcaaagccaggctggttccttggcctcggggtttcctgggtcggggacacggtgaagaggctccagcgggacctgcccatcagtcctgggccaggaggggctccaagcagcacccagcggtccgggggagtctcagacccggcatgcgtggctggcagacctgggagagccagggcagggttttgcgttcagagaaggattgccccagagacccgtggtggacttcatgggtgctgagtggcccgtgtgacagtgatgacacgaaggcttcggcgtttgagtgggtgcaggtgcacgccagggcttggtgcttccctgcctggccctggagggagctgggtggcctggcttcaggggaagacaggagccaggacacacgtcagcccagcaggtgtggggggtgctgcagccctcggcagtggggtcaggccctgggggatgtttccaatggtgggcagcctggccaggccggagaagacatgttcacgggcatctatcagatgcccccttgaggaggctgagttatttgagggctgctgcaaagtacgctaggctcaaattctcttttcccagccagagccctggccacacggactcagaggggccaccggggtggggaaaggacccctcccccaccccccgcagccactggcctccagctctcggccacagaatggcctctaaggctgactcagccactcccttgggctgtggcagcaggaggcgggggctctggctcaggccccggagcctgtgcagcttgcccatggccctaggcagcgaggggacagcctgggggacttcctgcctaggcaaggtcattggccgggcctggcctgtggatagtggggccaggggccggcccaggccaaatgagtgccctccttgttatgacaccaagtgactacaagggaggcaagacccctccaggcctctcagccgacactgggtcccaccacacacagtgactgtgccgtgcagtgcaggttctggccttttccttgaaggcatctggtagacccgaagccacgctctcgggccgcacatgcacgccgcagcaccagctgccctgagctgcttgtacaaccaaacacctttcccctcttctccagctgtaacctggagagtcagccatgccttgtcttttgttctcataaatagtcactggggccgggcgcagtgactcacgcctgtaatcccagcactttgggaggcctaggtgggcggatcacttgaggtcaggagttcgagaccagcctggccaacatggtgaaaccctgtctctactaaaaaaatacagaaaattagctgggcgtggtggcgggcgcctgtagccccagctacttgggaggctgaggcgggagaatggcaatggcgtgaacccgggaggcagagcttgcagtgagctgagatggcgccactgcactccagcctgggcgacagagccagactccatctcaaaaaaaaaaaaaaaattagccgggcgtgatggcgggcacctgtagtcccagctactcaggaggctgaggcaagagaatcacttgaacccaggaggcagaggttgcagtgagctgagatcacgccattgcactacagcctgggcaacaagagcgaaactttgtctaaaaaaaaaaaaaaatcactgggcttcttcatgctctgatcacatctctcgtaaaagcttaagctctctccggggtccgggttggccgtgccgtggaattctgggtggcctggctggggtctctggaaatgtggctgcagcagagaacagagaccctgacatgcagttttccgtgctgaggggccctaggggagtcacaccaagggtccccacgagaaagttgtggcatccccgggggccggagaagagccccgtgtcttctgaggggttcgtcctttgtgtcccctgcagacatttgtctgcgacctttgccctccagcatgtatgtactttcctgcagcctgtagaaacgcctcttacggtttaatatgtgttcgctttgctaaagaatatcaacatcggccaggcgaggtggggcacgcctgtcatcccagcactttgggaggctgaggtgggaggatcacttgggcccaggggtgcaagaccagcctgggcaacatagcgagaccccatgtctaaaaaaattattttaaattagccaggccgggtgcaatggctcgcgcccgtaatcttagcactctgggaggccgaggcaggcagatcacttgagatcaggactttaagaccagcctcggcaacaacatggtgaaaccatctctagcaaaaatacaaaaaattagccgggtatggtggcgggtacctgtaatcccagctactcaggaggctgaggcaagagaatcgcttgaacgcaggaggcagaggttgcagtgagctgagatcgtgccactgcactccagcctggacaacagagcaaaactctgtctcaaaaaataataaataaaaataaattagctgggcgtggtggtgcatgcctgtagttccagctacttgggaggctgaggtgggaggattgcttgagcctgggaagtagaggctgcagtgaactataactgtgctagtggccgggcgcagtggctcacgcctataatcccagcactttgggaggccaaagcaggtggatcacttgaggtcaggagttcgagaccagcctggccaacatggtgaaactctgtgtctactaaaaatacaaaaaattagctgggtgtggtggcgctcgcctgtagtcccagctacttgggaggctgaggcaggagaatcacttgaacccagaaggcagaggtagcagtgagccaagatggtgccactgcactccagcctgggcgacagagggtgactcctcaaaaaaaagaaaaatagctaaaatatgattgtaccactgcactccagcctgggtgacagagtgagaccctgtctctaaaaaaaaaaaaaagaaaataaagaaaaaagaatgtcagcatgtcagcgttcctccaaggagtggctttgggtcaagaagacaggctggctctcctaaacaaacggctccccacggctgggagaggcagcaggcccttactctggcctgagtcttttgggaggggccctgctgggccttctcctgccacctaccttcctggaccatctgtgcccctgcccacgcagtaccacactccccagactgtggaacgcatctccagtgccatctgggggccagttactgtacctggtccccaggcagagctcttggcctggcagcatccaggcaggtattaagtgcccagtgatggtggcacatgggtggggacggagccacatccaagtctagccctctgattaggaggatgacagtcttggaatttcttgttctctttctcctagggttctcgttctcccagctccagcctttctagtttcgaggcatgaggcaaaccattgctgtgggaatagcagtgaccattggtagggccatggtggccgggagaggaaacctcagggtcaccccagagcctgtggggagacggagggtgagctgttgttggagctgcagaaacgccttgaagggcagcatgggcgatgaggaatgccattgcagcctagaaattcggtttctggaggtttagcctgattttgaagagtatttaagaacagagggctccagaccaggtgtggtggctcacatctgtaatcccagcactttgggaggcagaggtgggcggatcgcctgagatcaggagttcgagaccagcctggcccacatggtgaaaccctgtctctactaaaaatacaaaaattagccgggcgtagtgacacacgcctgtaatcccagctgctcgggaggcagaggcaggagaatggcgtgaacccgggaggcggaggttgcagtgagccgagatcacgccactgcactccagcctgggtaacagagcaagactctgtctcaaaaaaaaaaaaaaaagaacaggggcctctgcctcagtttgcccgggagccagccagggcccatcctaatttggagcacagtcttcctggtgcctagacatgccaaggcccctcccacgtggtacaccctctccgtttagtacctgaccacctgtttcaaaacgcaggtgtttctggtttagaaacttggaaggcggaatgtgttttcgtgtcttctaggaagggtctgctgaggaccagaccacgtaagcctgagtggatcctgactcagctgcagcccttacctgcctcgtgctgatgatctatgcatggcgttatgtagatcacgtgcggcagagacagccactgtcctgtgtgcgggtttttaaaacagctgccctggatgaaacggaataaaccagtgatgctattcaaagtctttctgttcttgggggatgctgtgggcagaggggataaattgcagcccctggccctcccgtggcatctgctgactgggggacccacatcgtggcctgaaaaactcctggagcgccctctggcctcctgtcgctggtcactggccagtgtcctcccaggctgccccggcaagggggcgtggacatctctagaatggaggcagggtactcatgtccagacacgccgccatggggctccgccccgagagcgcagggtgcctctgcctggcgcttcccctcccagacagggccctctctttccagaaacaaaagaaggggcagccccagagggtggctgagcgacaacagagcccacctggacagggtcagcttggcgttccccccagtcccttgaggagaggagctaccagagcactggtcacctcaggacattctccagccccaagtccctgtggggcagcaggaacaggtgggtccctcctgcgggctggtggcactgctaaggaagcaccagacagccttttttttttttttgagacagagtcgctctgtcacccaagctggaatgcggtggcatgatcttggctcactgcaacctcctcctcccaggttcaagcgatcttgtgcctcagcctcccaagtagctgggattacaggcacgcaccaccatgcttggctaatttttgtatttttagtagagacgggggtttcaccatgttggccaggctggtctccaactcatgacctcgtgatctgcccacctcggcctcccaaagtgctgggattacaggtgtgagccagcttgcccagcttatgtttatagatttattttagagacagggttgggctctattgcccaggccagagctggagtgcagtggtgcaatcatagctctctgcaggctccagcttctgggcgcaagcaatcctcccacctcagtctcccaagtagctacacttgggagactacgggcgcacactaccatgcccagctaatgttttttttgtagagatgggatcttgctatgttgcccagtctggtcttgaacttctggcctcaagcgaccctcctgccttggcctcccaaagtgctgggattacaggtgcgagccaccatgcctggcccattctgttttttgtcggccactgaggtagaggccctcttctaggaaagaatttctgtttgttttgttttgttttgttttgtttttttgaaacagtctctctctgtctcccaggctggagtgcagtggcgtgatctcagctcgctgcaacctccacttcccaggttcaagcaattcttctgccaagctgggactacaggcatgcaccaccaccatgccctgctaatttttgttgttgtcgttggtttttgagatagagtttcgctcttgttgcccaggctggagtgcagtggcacgatctcagctcaccgcaacctccgcctcccaggttcaagcaattatcttgcctcagcctcccaagtagctgggattacaggcatgcgccaccacacctggcttatttttgtatttttagtagagatggggtttctccatgttagccaagctggtctcgaactcccgacctcagatgatccgcctgcctcagcctcccaaagtgctggggttacaggtgtgagccaccacacccagcctttctttttgcatttttaatagagactgagtttcatcacactggccaggctggtttcgaactcctggcctcaagtgatccgctggcctcagcctcctaaagtgctggattacaggcatgagccaccgtgccaggccttgttaatatttttaactctggcacttcaccctagaggctgctaggaatcaggtgtgccaagcaactggcaccactccatggaaagcgtctagggcagtgccttggttctgccaatcctgagaagccaggctgccccttgggctgggcagtggcctcagtaccgagccccaggccagcaagcccacaagcctcgagaaagactgcacttccggtggaggctgcagtttccttaaagggaaaatctgccccacccctgtcaagggcaggacacaagtcactggcattgaaggacccactccacacccagcagatcatcgacgcagactttttttttcccagatagagtctcactctgtcgtccaggctggactgcaatggtgtgatcttggctcactgtaacctccgcctcccgggctcaagtgattctcctgcctcagcctcctgagtagctaggattacaggcgcccaccatcacgcctggctaatttttgtatttttagtagagacggggttttgccatgttggccaggctggtcttgaactcctgacctcaagtgatcctcctgcctcagcctcccaaagtgctgggattataggcgtgagccacctcgtccggcccaagactttttgcctcagatgctgcagagccctggtggggcccaggagggcaaggcccacacaggagccgaaacccatgtagaacctgccaacctgtagctcacacctataatcccagcactttgggaggctgaggtgggcggatcgcttgagccaaggagttcgagaccagcctgggcaacattacgagaccctgtctctacaaaaatacaaaaattacccgggcttggtggctcgtgcctatagtcccagctactggggaggctgaggtgggagaatcatctgagcccagggaggttgagactgcagtgagccaagattgtgccactgcactccagcctgggtaaaatgagtgagaccacgtctcaacccctttcacagcccgtctgcggcccacccacccatgggtactgtgggatgggggacaggctggcttaacacaaatcgaggcaggaataaccccagagaatgggctttgcatggagcttggctcctgtccctgcctgtgagggaggaccagactcggcctcaccacctgccactctgagcaaacaggcaacggtgtttcctgaacatctttctgaagcggctgagggatgtcagctgagcccccgctgggcctgctctggagcgggatgtctccagaagccgcccttggagcgggcacttccctatttgggcgtgtcccagtcccatgcctcaccatccccttgcttgaagctccaagagcatgagagtgggcagcctggtctgctgaggaaagtgtctgatggatgcggaaatggccaccccaaacaccggtaagcagatgttaccctgcaggcggtggctcctggggcccagccctgcagaaacacatggggcaggctgggcagaggggctcacacccgttattcccagcgctttgggaggctgaggcgggaggatcgcttgagcccaggagtttgagaccagcctgggcaacatagcaagactctatctccactaaaaatcaaaacaaaacaattagctgggtatggtggcacacgcctgtagttccagctactggggaggctgagggggaggatcacttgagcccaggagttcaaggctgcagtgagccatgattgcgccactgcactccagcctgggcaacagagcaagaccctgccccgccgcctgaaagaaagaaaaaagaaagagaaaggaagagaaagaaaggaaaagaaaaaggaaacatacgaggctatggggccgtgtacgggggccaggctgtggcagaagcatcctggcgtggccttctccagccccatcctggttgggtaaggtgtcgccgtgggtcttcgtgtcacagcttcaaggacagacccaactctggtatcacaaacttaacaggtaatggagtttcctaaagtgtgctctgcaggagtgctggaagggccagcatggaaggaccccagggagggagatttctttgctccacagcatccccaagcctcacgaggcctctcccctccaagtctctatgtgcatcgttctccagatgttggagcatcctgcaggggccagcccagcctgtcaggggcagagaccctgcactggccccctcgagagtggacccctgggctggcttatctgctccagtgcagtgaggatcagctggagctccgacctgactcacatctggatgcgcagtgaggggcccgttggggccgtgatactgggaggaagccgggctctgtgctcttgctccaagtgagttgaccagggagccgaagttaaggtggcctgggagccacgtcctcccacctagcggctgggctctcacagccactagaaacccatcagcctttcccctgggtctatgcggggctcttcagccctcctgggagctcagtggctgggatgctgctttacagacagtgcacggctctgccatctgacagctcccagagggttctgggggtgactgtaaagagtggtgctggccccgaacctttcctgttcccctggatttagttcccagcaggtggtgaggaactgaacattttgtcccatagtggtgggagagagggctggccacatgggtccaggccaccccctcagcctccacagcctgccccgcacccagccacaggaacagcagagcagctcccccatccaggtaagcgcccccaccacagccccatcacaaaggaatagcctcctggtgtagtgggaggtgaggagctttttttgttttccttttatttattttagggacagggtcttgctctgttgccaagttaagtgcagtggtatgatcatgagctcactgcagccttgacatggtggtaaagccatcctcccgcctcagcctttcgagtagctgggactacaggtgtgtgccaccatgcccagacgcccagctaatgtttgtattttttgtagagatgggggtctcactatgttgcccaggctggcctcaagcaatcctcccacctgagccccgcaaagtactcggattacaggtgtgagtcaccgcgcctggccgggagctttaatttttcctacttgttaacagcgttatggggctggaaggaggctctcagatttccctgccctcctcacatcccccaaccctccctgggcgtgggggtgtcaagcatgagtcaggctgagcctgactctgaagctgttcccagctctttagtctaaacttcaaatcttcaaccctgttccctaatccaacacattccccaaatgaagggactggacagtgagatatcgggaaaccccatgaaaatagatgcataataaaggtgaaaatcattt

SEQ ID NO: 162683 - DNA, 2528 bp, Homo sapiens
  Payload ID: 12057
  Gene Symbol: ORAI2
  Gene Name: ORAI calcium release-activated calcium modulator 2
  Uniprot ID: Q96SN7
  ENST ID: ENST00000403646
  CDS Start-End: 100-864
gcgccccggccgggccactgggccacaggccacgcggccacgcagtccgagcgggagccgagccgggcggggcgagggcagctccgcctggctcccaccatgagtgctgagcttaacgtgcctatcgacccctctgctcctgcctgccctgagcccggccataagggcatggattaccgggactgggtccgccgcagctacctggaactggtcacctctaaccaccactcggtacaggccctgtcgtggcggaagctctacctgagcagggccaagctgaaggcctccagcaggacctccgccctcctctccggctttgccatggtggccatggtggaggtgcagctggagacgcagtaccagtacccgcggccgctgctgattgccttcagcgcctgcaccacggtgctggtggccgtgcacctgttcgccctcctcatcagcacctgcatcctgcccaatgtggaggccgtgagcaacatccacaacctgaactccatcagcgagtccccgcatgagcgcatgcacccctacatcgagctggcctggggcttctccaccgtgcttggcatcctactcttcctggccgaggtggtgctgctctgctggatcaagttcctccccgtggatgcccggcgccagcctggccccccacctggccctgggagtcacacgggctggcaggccgccctggtgtccaccatcatcatggtgcccgtgggcctcatcttcgtggtcttcaccatccacttctaccgctccctggtgcgccacaaaacggagcgccacaaccgcgagatcgaggagctccacaagctcaaggtccagctggacgggcatgagcgcagcctgcaggtcttgtgaggggccgagggccggggctgggagcggccctgtgcccgggagtccgcagaggcggggatttgtcagatgcagacattttgcaaggctgccgggtagttcaagaccaaagttttcctcttgtcttaataccataaggactggatgacttctcctgagatagaaccgtttggttcaatgagggactgtgttgctaagagcgttgggggcaaagccaggctggttccttggcctcggggtttcctgggtcggggacacggtgaagaggctccagcgggacctgcccatcagtcctgggccaggaggggctccaagcagcacccagcggtccgggggagtctcagacccggcatgcgtggctggcagacctgggagagccagggcagggttttgcgttcagagaaggattgccccagagacccgtggtggacttcatgggtgctgagtggcccgtgtgacagtgatgacacgaaggcttcggcgtttgagtgggtgcaggtgcacgccagggcttggtgcttccctgcctggccctggagggagctgggtggcctggcttcaggggaagacaggagccaggacacacgtcagcccagcaggtgtggggggtgctgcagccctcggcagtggggtcaggccctgggggatgtttccaatggtgggcagcctggccaggccggagaagacatgttcacgggcatctatcagatgcccccttgaggaggctgagttatttgagggctgctgcaaagtacgctaggctcaaattctcttttcccagccagagccctggccacacggactcagaggggccaccggggtggggaaaggacccctcccccaccccccgcagccactggcctccagctctcggccacagaatggcctctaaggctgactcagccactcccttgggctgtggcagcaggaggcgggggctctggctcaggccccggagcctgtgcagcttgcccatggccctaggcagcgaggggacagcctgggggacttcctgcctaggcaaggtcattggccgggcctggcctgtggatagtggggccaggggccggcccaggccaaatgagtgccctccttgttatgacaccaagtgactacaagggaggcaagacccctccaggcctctcagccgacactgggtcccaccacacacagtgactgtgccgtgcagtgcaggttctggccttttccttgaaggcatctggtagacccgaagccacgctctcgggccgcacatgcacgccgcagcaccagctgccctgagctgcttgtacaaccaaacacctttcccctcttctccagctgtaacctggagagtcagccatgccttgtcttttgttctcataaatagtcactggggccgggcgcagtgactcacgcctgtaatcccagcactttgggaggcctaggtgggcggatcacttgaggtcaggagttcgagaccagcctggccaacatggtgaaaccctgtctctactaaaaaaatacagaaaattagctgggcgtggtggcgggcgcctgtagccccagctacttgggaggctgaggcgggagaatggcaatggcgtgaacccgggaggcagagcttgcagtgagctgagatggcgccactgcactccagcctgggcgacagagccagactccatctc

SEQ ID NO: 162684 - DNA, 736 bp, Homo sapiens
  Payload ID: 12057
  Gene Symbol: ORAI2
  Gene Name: ORAI calcium release-activated calcium modulator 2
  ENST ID: ENST00000468241
  CDS Start-End: 100-736
gcgccccggccgggccactgggccacaggccacgcggccacgcagtccgagcgggagccgagccgggcggggcgagggcagctccgcctggctcccaccatgagtgctgagcttaacgtgcctatcgacccctctgctcctgcctgccctgagcccggccataagggcatggattaccgggactgggtccgccgcagctacctggaactggtcacctctaaccaccactcggtacaggccctgtcgtggcggaagctctacctgagcagggccaagctgaaggcctccagcaggacctccgccctcctctccggctttgccatggtggccatggtggaggtgcagctggagacgcagtaccagtacccgcggccgctgctgattgccttcagcgcctgcaccacggtgctggtggccgtgcacctgttcgccctcctcatcagcacctgcatcctgcccaatgtggaggccgtgagcaacatccacaacctgaactccatcagcgagtccccgcatgagcgcatgcacccctacatcgagctggcctggggcttctccaccgtgcttggcatcctactcttcctggccgaggtggtgctgctctgctggatcaagttcctccccgtggatgcccggcgccagcctggccccccacctggccctgggagtcacacgggctggcaggccgccctggtgtccaccatcatcatggtgcccgtgggcctcatcttcgtgg

SEQ ID NO: 162685 - DNA, 2493 bp, Homo sapiens
  Payload ID: 12057
  Gene Symbol: ORAI2
  Gene Name: ORAI calcium release-activated calcium modulator 2
  Uniprot ID: Q96SN7
  ENST ID: ENST00000473939
  CDS Start-End: 49-813
ggagagcctgagttggcattcgtataaatgacctgcctggctcccaccatgagtgctgagcttaacgtgcctatcgacccctctgctcctgcctgccctgagcccggccataagggcatggattaccgggactgggtccgccgcagctacctggaactggtcacctctaaccaccactcggtacaggccctgtcgtggcggaagctctacctgagcagggccaagctgaaggcctccagcaggacctccgccctcctctccggctttgccatggtggccatggtggaggtgcagctggagacgcagtaccagtacccgcggccgctgctgattgccttcagcgcctgcaccacggtgctggtggccgtgcacctgttcgccctcctcatcagcacctgcatcctgcccaatgtggaggccgtgagcaacatccacaacctgaactccatcagcgagtccccgcatgagcgcatgcacccctacatcgagctggcctggggcttctccaccgtgcttggcatcctactcttcctggccgaggtggtgctgctctgctggatcaagttcctccccgtggatgcccggcgccagcctggccccccacctggccctgggagtcacacgggctggcaggccgccctggtgtccaccatcatcatggtgcccgtgggcctcatcttcgtggtcttcaccatccacttctaccgctccctggtgcgccacaaaacggagcgccacaaccgcgagatcgaggagctccacaagctcaaggtccagctggacgggcatgagcgcagcctgcaggtcttgtgaggggccgagggccggggctgggagcggccctgtgcccgggagtccgcagaggcggggatttgtcagatgcagacattttgcaaggctgccgggtagttcaagaccaaagttttcctcttgtcttaataccataaggactggatgacttctcctgagatagaaccgtttggttcaatgagggactgtgttgctaagagcgttgggggcaaagccaggctggttccttggcctcggggtttcctgggtcggggacacggtgaagaggctccagcgggacctgcccatcagtcctgggccaggaggggctccaagcagcacccagcggtccgggggagtctcagacccggcatgcgtggctggcagacctgggagagccagggcagggttttgcgttcagagaaggattgccccagagacccgtggtggacttcatgggtgctgagtggcccgtgtgacagtgatgacacgaaggcttcggcgtttgagtgggtgcaggtgcacgccagggcttggtgcttccctgcctggccctggagggagctgggtggcctggcttcaggggaagacaggagccaggacacacgtcagcccagcaggtgtggggggtgctgcagccctcggcagtggggtcaggccctgggggatgtttccaatggtgggcagcctggccaggccggagaagacatgttcacgggcatctatcagatgcccccttgaggaggctgagttatttgagggctgctgcaaagtacgctaggctcaaattctcttttcccagccagagccctggccacacggactcagaggggccaccggggtggggaaaggacccctcccccaccccccgcagccactggcctccagctctcggccacagaatggcctctaaggctgactcagccactcccttgggctgtggcagcaggaggcgggggctctggctcaggccccggagcctgtgcagcttgcccatggccctaggcagcgaggggacagcctgggggacttcctgcctaggcaaggtcattggccgggcctggcctgtggatagtggggccaggggccggcccaggccaaatgagtgccctccttgttatgacaccaagtgactacaagggaggcaagacccctccaggcctctcagccgacactgggtcccaccacacacagtgactgtgccgtgcagtgcaggttctggccttttccttgaaggcatctggtagacccgaagccacgctctcgggccgcacatgcacgccgcagcaccagctgccctgagctgcttgtacaaccaaacacctttcccctcttctccagctgtaacctggagagtcagccatgccttgtcttttgttctcataaatagtcactggggccgggcgcagtgactcacgcctgtaatcccagcactttgggaggcctaggtgggcggatcacttgaggtcaggagttcgagaccagcctggccaacatggtgaaaccctgtctctactaaaaaaatacagaaaattagctgggcgtggtggcgggcgcctgtagccccagctacttgggaggctgaggcgggagaatggcaatggcgtgaacccgggaggcagagcttgcagtgagctgagatggcgccactgcactccagcctgggcgacagagccagactccatctcaaaaaaaaaaaaaaaa

SEQ ID NO: 162686 - DNA, 5531 bp, Homo sapiens
  Payload ID: 12057
  Gene Symbol: ORAI2
  Gene Name: ORAI calcium release-activated calcium modulator 2
  Uniprot ID: Q96SN7
  ENST ID: ENST00000478730
  CDS Start-End: 210-974
cgctcggcgccccggccgggccactgggccacaggccacgcggccacgcagtccgagcgggagccgagccgggcggggcgagggcagctccggaacgtcccagggatggaagtgcttggatgcggtgctgctggctgcggatgtgcgcaaggagatgggatggagagcctgagttggcattcgtataaatgacctgcctggctcccaccatgagtgctgagcttaacgtgcctatcgacccctctgctcctgcctgccctgagcccggccataagggcatggattaccgggactgggtccgccgcagctacctggaactggtcacctctaaccaccactcggtacaggccctgtcgtggcggaagctctacctgagcagggccaagctgaaggcctccagcaggacctccgccctcctctccggctttgccatggtggccatggtggaggtgcagctggagacgcagtaccagtacccgcggccgctgctgattgccttcagcgcctgcaccacggtgctggtggccgtgcacctgttcgccctcctcatcagcacctgcatcctgcccaatgtggaggccgtgagcaacatccacaacctgaactccatcagcgagtccccgcatgagcgcatgcacccctacatcgagctggcctggggcttctccaccgtgcttggcatcctactcttcctggccgaggtggtgctgctctgctggatcaagttcctccccgtggatgcccggcgccagcctggccccccacctggccctgggagtcacacgggctggcaggccgccctggtgtccaccatcatcatggtgcccgtgggcctcatcttcgtggtcttcaccatccacttctaccgctccctggtgcgccacaaaacggagcgccacaaccgcgagatcgaggagctccacaagctcaaggtccagctggacgggcatgagcgcagcctgcaggtcttgtgaggggccgagggccggggctgggagcggccctgtgcccgggagtccgcagaggcggggatttgtcagatgcagacattttgcaaggctgccgggtagttcaagaccaaagttttcctcttgtcttaataccataaggactggatgacttctcctgagatagaaccgtttggttcaatgagggactgtgttgctaagagcgttgggggcaaagccaggctggttccttggcctcggggtttcctgggtcggggacacggtgaagaggctccagcgggacctgcccatcagtcctgggccaggaggggctccaagcagcacccagcggtccgggggagtctcagacccggcatgcgtggctggcagacctgggagagccagggcagggttttgcgttcagagaaggattgccccagagacccgtggtggacttcatgggtgctgagtggcccgtgtgacagtgatgacacgaaggcttcggcgtttgagtgggtgcaggtgcacgccagggcttggtgcttccctgcctggccctggagggagctgggtggcctggcttcaggggaagacaggagccaggacacacgtcagcccagcaggtgtggggggtgctgcagccctcggcagtggggtcaggccctgggggatgtttccaatggtgggcagcctggccaggccggagaagacatgttcacgggcatctatcagatgcccccttgaggaggctgagttatttgagggctgctgcaaagtacgctaggctcaaattctcttttcccagccagagccctggccacacggactcagaggggccaccggggtggggaaaggacccctcccccaccccccgcagccactggcctccagctctcggccacagaatggcctctaaggctgactcagccactcccttgggctgtggcagcaggaggcgggggctctggctcaggccccggagcctgtgcagcttgcccatggccctaggcagcgaggggacagcctgggggacttcctgcctaggcaaggtcattggccgggcctggcctgtggatagtggggccaggggccggcccaggccaaatgagtgccctccttgttatgacaccaagtgactacaagggaggcaagacccctccaggcctctcagccgacactgggtcccaccacacacagtgactgtgccgtgcagtgcaggttctggccttttccttgaaggcatctggtagacccgaagccacgctctcgggccgcacatgcacgccgcagcaccagctgccctgagctgcttgtacaaccaaacacctttcccctcttctccagctgtaacctggagagtcagccatgccttgtcttttgttctcataaatagtcactggggccgggcgcagtgactcacgcctgtaatcccagcactttgggaggcctaggtgggcggatcacttgaggtcaggagttcgagaccagcctggccaacatggtgaaaccctgtctctactaaaaaaatacagaaaattagctgggcgtggtggcgggcgcctgtagccccagctacttgggaggctgaggcgggagaatggcaatggcgtgaacccgggaggcagagcttgcagtgagctgagatggcgccactgcactccagcctgggcgacagagccagactccatctcaaaaaaaaaaaaaaaattagccgggcgtgatggcgggcacctgtagtcccagctactcaggaggctgaggcaagagaatcacttgaacccaggaggcagaggttgcagtgagctgagatcacgccattgcactacagcctgggcaacaagagcgaaactttgtctaaaaaaaaaaaaaaatcactgggcttcttcatgctctgatcacatctctcgtaaaagcttaagctctctccggggtccgggttggccgtgccgtggaattctgggtggcctggctggggtctctggaaatgtggctgcagcagagaacagagaccctgacatgcagttttccgtgctgaggggccctaggggagtcacaccaagggtccccacgagaaagttgtggcatccccgggggccggagaagagccccgtgtcttctgaggggttcgtcctttgtgtcccctgcagacatttgtctgcgacctttgccctccagcatgtatgtactttcctgcagcctgtagaaacgcctcttacggtttaatatgtgttcgctttgctaaagaatatcaacatcggccaggcgaggtggggcacgcctgtcatcccagcactttgggaggctgaggtgggaggatcacttgggcccaggggtgcaagaccagcctgggcaacatagcgagaccccatgtctaaaaaaattattttaaattagccaggccgggtgcaatggctcgcgcccgtaatcttagcactctgggaggccgaggcaggcagatcacttgagatcaggactttaagaccagcctcggcaacaacatggtgaaaccatctctagcaaaaatacaaaaaattagccgggtatggtggcgggtacctgtaatcccagctactcaggaggctgaggcaagagaatcgcttgaacgcaggaggcagaggttgcagtgagctgagatcgtgccactgcactccagcctggacaacagagcaaaactctgtctcaaaaaataataaataaaaataaattagctgggcgtggtggtgcatgcctgtagttccagctacttgggaggctgaggtgggaggattgcttgagcctgggaagtagaggctgcagtgaactataactgtgctagtggccgggcgcagtggctcacgcctataatcccagcactttgggaggccaaagcaggtggatcacttgaggtcaggagttcgagaccagcctggccaacatggtgaaactctgtgtctactaaaaatacaaaaaattagctgggtgtggtggcgctcgcctgtagtcccagctacttgggaggctgaggcaggagaatcacttgaacccagaaggcagaggtagcagtgagccaagatggtgccactgcactccagcctgggcgacagagggtgactcctcaaaaaaaagaaaaatagctaaaatatgattgtaccactgcactccagcctgggtgacagagtgagaccctgtctctaaaaaaaaaaaaaagaaaataaagaaaaaagaatgtcagcatgtcagcgttcctccaaggagtggctttgggtcaagaagacaggctggctctcctaaacaaacggctccccacggctgggagaggcagcaggcccttactctggcctgagtcttttgggaggggccctgctgggccttctcctgccacctaccttcctggaccatctgtgcccctgcccacgcagtaccacactccccagactgtggaacgcatctccagtgccatctgggggccagttactgtacctggtccccaggcagagctcttggcctggcagcatccaggcaggtattaagtgcccagtgatggtggcacatgggtggggacggagccacatccaagtctagccctctgattaggaggatgacagtcttggaatttcttgttctctttctcctagggttctcgttctcccagctccagcctttctagtttcgaggcatgaggcaaaccattgctgtgggaatagcagtgaccattggtagggccatggtggccgggagaggaaacctcagggtcaccccagagcctgtggggagacggagggtgagctgttgttggagctgcagaaacgccttgaagggcagcatgggcgatgaggaatgccattgcagcctagaaattcggtttctggaggtttagcctgattttgaagagtatttaagaacagagggctccagaccaggtgtggtggctcacatctgtaatcccagcactttgggaggcagaggtgggcggatcgcctgagatcaggagttcgagaccagcctggcccacatggtgaaaccctgtctctactaaaaatacaaaaattagccgggcgtagtgacacacgcctgtaatcccagctgctcgggaggcagaggcaggagaatggcgtgaacccgggaggcggaggttgcagtgagccgagatcacgccactgcactccagcctgggtaacagagcaagactctgtctcaaaaaaaaaaaaaaaagaacaggggcctctgcctcagtttgcccgggagccagccagggcccatcctaatttggagcacagtcttcctggtgcctagacatgccaaggcccctcccacgtggtacaccctctccgtttagtacctgaccacctgtttcaaaacgcaggtgtttctggtttagaaacttggaaggcggaatgtgttttcgtgtcttctaggaagggtctgctgaggaccagaccacgtaagcctgagtggatcctgactcagctgcagcccttacctgcctcgtgctgatgatctatgcatggcgttatgtagatcacgtgcggcagagacagccactgtcctgtgtgcgggtttttaaaacagctgccctggatgaaacggaataaaccagtgatgcta

SEQ ID NO: 162687 - DNA, 479 bp, Homo sapiens
  Payload ID: 12057
  Gene Symbol: ORAI2
  Gene Name: ORAI calcium release-activated calcium modulator 2
  ENST ID: ENST00000498661
  CDS Start-End: 188-479
tacagcattttctattatgtggagctaacctacggattgcagcgtttctctgaattctccccaagggaaggaacgtcccagggatggaagtgcttggatgcggtgctgctggctgcggatgtgcgcaaggagatgggatggagagcctgagttggcattcgtataaatgacctgcctggctcccaccatgagtgctgagcttaacgtgcctatcgacccctctgctcctgcctgccctgagcccggccataagggcatggattaccgggactgggtccgccgcagctacctggaactggtcacctctaaccaccactcggtacaggccctgtcgtggcggaagctctacctgagcagggccaagctgaaggcctccagcaggacctccgccctcctctccggctttgccatggtggccatggtggaggtgcagctggagacgcagtaccagtacccgcggccgctgctgattgccttca

SEQ ID NO: 162688 - DNA, 463 bp, Homo sapiens
  Payload ID: 12057
  Gene Symbol: ORAI2
  Gene Name: ORAI calcium release-activated calcium modulator 2
  ENST ID: ENST00000482237
  CDS Start-End: 373-463
aatgctgggcaccccccgaggctcaccctgccaagcctggggctccccttttgcgcccggacccaggggcagggaaagcccagctcgtggtctgtgggtagccggacccccgatggggcggtggggggcctcgccttgactcccagagctggggccggggacaggagctggggcaggagggatgcgcgcgggtcggggtcttcccacctcccctgctcctctccctcgcgcgatcccggggtggttccagggaaggaacgtcccagggatggaagtgcttggatgcggtgctgctggctgcggatgtgcgcaaggagatgggatggagagcctgagttggcattcgtataaatgacctgcctggctcccaccatgagtgctgagcttaacgtgcctatcgacccctctgctcctgcctgccctgagcccggccataagggcatggattaccgggactgggtcc

SEQ ID NO: 162689 - DNA, 937 bp, Homo sapiens
  Payload ID: 12057
  Gene Symbol: ORAI2
  Gene Name: ORAI calcium release-activated calcium modulator 2
  ENST ID: ENST00000495936
  CDS Start-End: 250-937
accccgcgcgaccggcggaaggagggagggggccgcgctcggcgccccggccgggccactgggccacaggccacgcggccacgcagtccgagcgggagccgagccgggcggggcgagggcagctccgggaaggaacgtcccagggatggaagtgcttggatgcggtgctgctggctgcggatgtgcgcaaggagatgggatggagagcctgagttggcattcgtataaatgacctgcctggctcccaccatgagtgctgagcttaacgtgcctatcgacccctctgctcctgcctgccctgagcccggccataagggcatggattaccgggactgggtccgccgcagctacctggaactggtcacctctaaccaccactcggtacaggccctgtcgtggcggaagctctacctgagcagggccaagctgaaggcctccagcaggacctccgccctcctctccggctttgccatggtggccatggtggaggtgcagctggagacgcagtaccagtacccgcggccgctgctgattgccttcagcgcctgcaccacggtgctggtggccgtgcacctgttcgccctcctcatcagcacctgcatcctgcccaatgtggaggccgtgagcaacatccacaacctgaactccatcagcgagtccccgcatgagcgcatgcacccctacatcgagctggcctggggcttctccaccgtgcttggcatcctactcttcctggccgaggtggtgctgctctgctggatcaagttcctccccgtggatgcccggcgccagcctggccccccacctggccctgggagtcacacgggctggcaggccgccctggtgtccaccatcatcatggtgcccgtgggcctcatcttcgtggtcttcaccatccacttctaccgctccctggtgcgccacaaaacggagcgcc

SEQ ID NO: 162690 - DNA, 10679 bp, Homo sapiens
  Payload ID: 12057
  Gene Symbol: ORAI2
  Gene Name: ORAI calcium release-activated calcium modulator 2
  Uniprot ID: Q96SN7
  ENST ID: ENST00000611770
  CDS Start-End: 146-910
gggggaccccgcgcgaccggcggaaggagggagggggccgcgctcggcgccccggccgggccactgggccacaggccacgcggccacgcagtccgagcgggagccgagccgggcggggcgagggcagctccgcctggctcccaccatgagtgctgagcttaacgtgcctatcgacccctctgctcctgcctgccctgagcccggccataagggcatggattaccgggactgggtccgccgcagctacctggaactggtcacctctaaccaccactcggtacaggccctgtcgtggcggaagctctacctgagcagggccaagctgaaggcctccagcaggacctccgccctcctctccggctttgccatggtggccatggtggaggtgcagctggagacgcagtaccagtacccgcggccgctgctgattgccttcagcgcctgcaccacggtgctggtggccgtgcacctgttcgccctcctcatcagcacctgcatcctgcccaatgtggaggccgtgagcaacatccacaacctgaactccatcagcgagtccccgcatgagcgcatgcacccctacatcgagctggcctggggcttctccaccgtgcttggcatcctactcttcctggccgaggtggtgctgctctgctggatcaagttcctccccgtggatgcccggcgccagcctggccccccacctggccctgggagtcacacgggctggcaggccgccctggtgtccaccatcatcatggtgcccgtgggcctcatcttcgtggtcttcaccatccacttctaccgctccctggtgcgccacaaaacggagcgccacaaccgcgagatcgaggagctccacaagctcaaggtccagctggacgggcatgagcgcagcctgcaggtcttgtgaggggccgagggccggggctgggagcggccctgtgcccgggagtccgcagaggcggggatttgtcagatgcagacattttgcaaggctgccgggtagttcaagaccaaagttttcctcttgtcttaataccataaggactggatgacttctcctgagatagaaccgtttggttcaatgagggactgtgttgctaagagcgttgggggcaaagccaggctggttccttggcctcggggtttcctgggtcggggacacggtgaagaggctccagcgggacctgcccatcagtcctgggccaggaggggctccaagcagcacccagcggtccgggggagtctcagacccggcatgcgtggctggcagacctgggagagccagggcagggttttgcgttcagagaaggattgccccagagacccgtggtggacttcatgggtgctgagtggcccgtgtgacagtgatgacacgaaggcttcggcgtttgagtgggtgcaggtgcacgccagggcttggtgcttccctgcctggccctggagggagctgggtggcctggcttcaggggaagacaggagccaggacacacgtcagcccagcaggtgtggggggtgctgcagccctcggcagtggggtcaggccctgggggatgtttccaatggtgggcagcctggccaggccggagaagacatgttcacgggcatctatcagatgcccccttgaggaggctgagttatttgagggctgctgcaaagtacgctaggctcaaattctcttttcccagccagagccctggccacacggactcagaggggccaccggggtggggaaaggacccctcccccaccccccgcagccactggcctccagctctcggccacagaatggcctctaaggctgactcagccactcccttgggctgtggcagcaggaggcgggggctctggctcaggccccggagcctgtgcagcttgcccatggccctaggcagcgaggggacagcctgggggacttcctgcctaggcaaggtcattggccgggcctggcctgtggatagtggggccaggggccggcccaggccaaatgagtgccctccttgttatgacaccaagtgactacaagggaggcaagacccctccaggcctctcagccgacactgggtcccaccacacacagtgactgtgccgtgcagtgcaggttctggccttttccttgaaggcatctggtagacccgaagccacgctctcgggccgcacatgcacgccgcagcaccagctgccctgagctgcttgtacaaccaaacacctttcccctcttctccagctgtaacctggagagtcagccatgccttgtcttttgttctcataaatagtcactggggccgggcgcagtgactcacgcctgtaatcccagcactttgggaggcctaggtgggcggatcacttgaggtcaggagttcgagaccagcctggccaacatggtgaaaccctgtctctactaaaaaaatacagaaaattagctgggcgtggtggcgggcgcctgtagccccagctacttgggaggctgaggcgggagaatggcaatggcgtgaacccgggaggcagagcttgcagtgagctgagatggcgccactgcactccagcctgggcgacagagccagactccatctcaaaaaaaaaaaaaaaattagccgggcgtgatggcgggcacctgtagtcccagctactcaggaggctgaggcaagagaatcacttgaacccaggaggcagaggttgcagtgagctgagatcacgccattgcactacagcctgggcaacaagagcgaaactttgtctaaaaaaaaaaaaaaatcactgggcttcttcatgctctgatcacatctctcgtaaaagcttaagctctctccggggtccgggttggccgtgccgtggaattctgggtggcctggctggggtctctggaaatgtggctgcagcagagaacagagaccctgacatgcagttttccgtgctgaggggccctaggggagtcacaccaagggtccccacgagaaagttgtggcatccccgggggccggagaagagccccgtgtcttctgaggggttcgtcctttgtgtcccctgcagacatttgtctgcgacctttgccctccagcatgtatgtactttcctgcagcctgtagaaacgcctcttacggtttaatatgtgttcgctttgctaaagaatatcaacatcggccaggcgaggtggggcacgcctgtcatcccagcactttgggaggctgaggtgggaggatcacttgggcccaggggtgcaagaccagcctgggcaacatagcgagaccccatgtctaaaaaaattattttaaattagccaggccgggtgcaatggctcgcgcccgtaatcttagcactctgggaggccgaggcaggcagatcacttgagatcaggactttaagaccagcctcggcaacaacatggtgaaaccatctctagcaaaaatacaaaaaattagccgggtatggtggcgggtacctgtaatcccagctactcaggaggctgaggcaagagaatcgcttgaacgcaggaggcagaggttgcagtgagctgagatcgtgccactgcactccagcctggacaacagagcaaaactctgtctcaaaaaataataaataaaaataaattagctgggcgtggtggtgcatgcctgtagttccagctacttgggaggctgaggtgggaggattgcttgagcctgggaagtagaggctgcagtgaactataactgtgctagtggccgggcgcagtggctcacgcctataatcccagcactttgggaggccaaagcaggtggatcacttgaggtcaggagttcgagaccagcctggccaacatggtgaaactctgtgtctactaaaaatacaaaaaattagctgggtgtggtggcgctcgcctgtagtcccagctacttgggaggctgaggcaggagaatcacttgaacccagaaggcagaggtagcagtgagccaagatggtgccactgcactccagcctgggcgacagagggtgactcctcaaaaaaaagaaaaatagctaaaatatgattgtaccactgcactccagcctgggtgacagagtgagaccctgtctctaaaaaaaaaaaaaagaaaataaagaaaaaagaatgtcagcatgtcagcgttcctccaaggagtggctttgggtcaagaagacaggctggctctcctaaacaaacggctccccacggctgggagaggcagcaggcccttactctggcctgagtcttttgggaggggccctgctgggccttctcctgccacctaccttcctggaccatctgtgcccctgcccacgcagtaccacactccccagactgtggaacgcatctccagtgccatctgggggccagttactgtacctggtccccaggcagagctcttggcctggcagcatccaggcaggtattaagtgcccagtgatggtggcacatgggtggggacggagccacatccaagtctagccctctgattaggaggatgacagtcttggaatttcttgttctctttctcctagggttctcgttctcccagctccagcctttctagtttcgaggcatgaggcaaaccattgctgtgggaatagcagtgaccattggtagggccatggtggccgggagaggaaacctcagggtcaccccagagcctgtggggagacggagggtgagctgttgttggagctgcagaaacgccttgaagggcagcatgggcgatgaggaatgccattgcagcctagaaattcggtttctggaggtttagcctgattttgaagagtatttaagaacagagggctccagaccaggtgtggtggctcacatctgtaatcccagcactttgggaggcagaggtgggcggatcgcctgagatcaggagttcgagaccagcctggcccacatggtgaaaccctgtctctactaaaaatacaaaaattagccgggcgtagtgacacacgcctgtaatcccagctgctcgggaggcagaggcaggagaatggcgtgaacccgggaggcggaggttgcagtgagccgagatcacgccactgcactccagcctgggtaacagagcaagactctgtctcaaaaaaaaaaaaaaaagaacaggggcctctgcctcagtttgcccgggagccagccagggcccatcctaatttggagcacagtcttcctggtgcctagacatgccaaggcccctcccacgtggtacaccctctccgtttagtacctgaccacctgtttcaaaacgcaggtgtttctggtttagaaacttggaaggcggaatgtgttttcgtgtcttctaggaagggtctgctgaggaccagaccacgtaagcctgagtggatcctgactcagctgcagcccttacctgcctcgtgctgatgatctatgcatggcgttatgtagatcacgtgcggcagagacagccactgtcctgtgtgcgggtttttaaaacagctgccctggatgaaacggaataaaccagtgatgctattcaaagtctttctgttcttgggggatgctgtgggcagaggggataaattgcagcccctggccctcccgtggcatctgctgactgggggacccacatcgtggcctgaaaaactcctggagcgccctctggcctcctgtcgctggtcactggccagtgtcctcccaggctgccccggcaagggggcgtggacatctctagaatggaggcagggtactcatgtccagacacgccgccatggggctccgccccgagagcgcagggtgcctctgcctggcgcttcccctcccagacagggccctctctttccagaaacaaaagaaggggcagccccagagggtggctgagcgacaacagagcccacctggacagggtcagcttggcgttccccccagtcccttgaggagaggagctaccagagcactggtcacctcaggacattctccagccccaagtccctgtggggcagcaggaacaggtgggtccctcctgcgggctggtggcactgctaaggaagcaccagacagccttttttttttttttgagacagagtcgctctgtcacccaagctggaatgcggtggcatgatcttggctcactgcaacctcctcctcccaggttcaagcgatcttgtgcctcagcctcccaagtagctgggattacaggcacgcaccaccatgcttggctaatttttgtatttttagtagagacgggggtttcaccatgttggccaggctggtctccaactcatgacctcgtgatctgcccacctcggcctcccaaagtgctgggattacaggtgtgagccagcttgcccagcttatgtttatagatttattttagagacagggttgggctctattgcccaggccagagctggagtgcagtggtgcaatcatagctctctgcaggctccagcttctgggcgcaagcaatcctcccacctcagtctcccaagtagctacacttgggagactacgggcgcacactaccatgcccagctaatgttttttttgtagagatgggatcttgctatgttgcccagtctggtcttgaacttctggcctcaagcgaccctcctgccttggcctcccaaagtgctgggattacaggtgcgagccaccatgcctggcccattctgttttttgtcggccactgaggtagaggccctcttctaggaaagaatttctgtttgttttgttttgttttgttttgtttttttgaaacagtctctctctgtctcccaggctggagtgcagtggcgtgatctcagctcgctgcaacctccacttcccaggttcaagcaattcttctgccaagctgggactacaggcatgcaccaccaccatgccctgctaatttttgttgttgtcgttggtttttgagatagagtttcgctcttgttgcccaggctggagtgcagtggcacgatctcagctcaccgcaacctccgcctcccaggttcaagcaattatcttgcctcagcctcccaagtagctgggattacaggcatgcgccaccacacctggcttatttttgtatttttagtagagatggggtttctccatgttagccaagctggtctcgaactcccgacctcagatgatccgcctgcctcagcctcccaaagtgctggggttacaggtgtgagccaccacacccagcctttctttttgcatttttaatagagactgagtttcatcacactggccaggctggtttcgaactcctggcctcaagtgatccgctggcctcagcctcctaaagtgctggattacaggcatgagccaccgtgccaggccttgttaatatttttaactctggcacttcaccctagaggctgctaggaatcaggtgtgccaagcaactggcaccactccatggaaagcgtctagggcagtgccttggttctgccaatcctgagaagccaggctgccccttgggctgggcagtggcctcagtaccgagccccaggccagcaagcccacaagcctcgagaaagactgcacttccggtggaggctgcagtttccttaaagggaaaatctgccccacccctgtcaagggcaggacacaagtcactggcattgaaggacccactccacacccagcagatcatcgacgcagactttttttttcccagatagagtctcactctgtcgtccaggctggactgcaatggtgtgatcttggctcactgtaacctccgcctcccgggctcaagtgattctcctgcctcagcctcctgagtagctaggattacaggcgcccaccatcacgcctggctaatttttgtatttttagtagagacggggttttgccatgttggccaggctggtcttgaactcctgacctcaagtgatcctcctgcctcagcctcccaaagtgctgggattataggcgtgagccacctcgtccggcccaagactttttgcctcagatgctgcagagccctggtggggcccaggagggcaaggcccacacaggagccgaaacccatgtagaacctgccaacctgtagctcacacctataatcccagcactttgggaggctgaggtgggcggatcgcttgagccaaggagttcgagaccagcctgggcaacattacgagaccctgtctctacaaaaatacaaaaattacccgggcttggtggctcgtgcctatagtcccagctactggggaggctgaggtgggagaatcatctgagcccagggaggttgagactgcagtgagccaagattgtgccactgcactccagcctgggtaaaatgagtgagaccacgtctcaacccctttcacagcccgtctgcggcccacccacccatgggtactgtgggatgggggacaggctggcttaacacaaatcgaggcaggaataaccccagagaatgggctttgcatggagcttggctcctgtccctgcctgtgagggaggaccagactcggcctcaccacctgccactctgagcaaacaggcaacggtgtttcctgaacatctttctgaagcggctgagggatgtcagctgagcccccgctgggcctgctctggagcgggatgtctccagaagccgcccttggagcgggcacttccctatttgggcgtgtcccagtcccatgcctcaccatccccttgcttgaagctccaagagcatgagagtgggcagcctggtctgctgaggaaagtgtctgatggatgcggaaatggccaccccaaacaccggtaagcagatgttaccctgcaggcggtggctcctggggcccagccctgcagaaacacatggggcaggctgggcagaggggctcacacccgttattcccagcgctttgggaggctgaggcgggaggatcgcttgagcccaggagtttgagaccagcctgggcaacatagcaagactctatctccactaaaaatcaaaacaaaacaattagctgggtatggtggcacacgcctgtagttccagctactggggaggctgagggggaggatcacttgagcccaggagttcaaggctgcagtgagccatgattgcgccactgcactccagcctgggcaacagagcaagaccctgccccgccgcctgaaagaaagaaaaaagaaagagaaaggaagagaaagaaaggaaaagaaaaaggaaacatacgaggctatggggccgtgtacgggggccaggctgtggcagaagcatcctggcgtggccttctccagccccatcctggttgggtaaggtgtcgccgtgggtcttcgtgtcacagcttcaaggacagacccaactctggtatcacaaacttaacaggtaatggagtttcctaaagtgtgctctgcaggagtgctggaagggccagcatggaaggaccccagggagggagatttctttgctccacagcatccccaagcctcacgaggcctctcccctccaagtctctatgtgcatcgttctccagatgttggagcatcctgcaggggccagcccagcctgtcaggggcagagaccctgcactggccccctcgagagtggacccctgggctggcttatctgctccagtgcagtgaggatcagctggagctccgacctgactcacatctggatgcgcagtgaggggcccgttggggccgtgatactgggaggaagccgggctctgtgctcttgctccaagtgagttgaccagggagccgaagttaaggtggcctgggagccacgtcctcccacctagcggctgggctctcacagccactagaaacccatcagcctttcccctgggtctatgcggggctcttcagccctcctgggagctcagtggctgggatgctgctttacagacagtgcacggctctgccatctgacagctcccagagggttctgggggtgactgtaaagagtggtgctggccccgaacctttcctgttcccctggatttagttcccagcaggtggtgaggaactgaacattttgtcccatagtggtgggagagagggctggccacatgggtccaggccaccccctcagcctccacagcctgccccgcacccagccacaggaacagcagagcagctcccccatccaggtaagcgcccccaccacagccccatcacaaaggaatagcctcctggtgtagtgggaggtgaggagctttttttgttttccttttatttattttagggacagggtcttgctctgttgccaagttaagtgcagtggtatgatcatgagctcactgcagccttgacatggtggtaaagccatcctcccgcctcagcctttcgagtagctgggactacaggtgtgtgccaccatgcccagacgcccagctaatgtttgtattttttgtagagatgggggtctcactatgttgcccaggctggcctcaagcaatcctcccacctgagccccgcaaagtactcggattacaggtgtgagtcaccgcgcctggccgggagctttaatttttcctacttgttaacagcgttatggggctggaaggaggctctcagatttccctgccctcctcacatcccccaaccctccctgggcgtgggggtgtcaagcatgagtcaggctgagcctgactctgaagctgttcccagctctttagtctaaacttcaaatcttcaaccctgttccctaatccaacacattccccaaatgaagggactggacagtgagatatcgggaaaccccatgaaaatagatgcataataaaggtgaaaatcattt

SEQ ID NO: 162691 - DNA, 2206 bp, Homo sapiens
  Payload ID: 12058
  Gene Symbol: ORAI3
  Gene Name: ORAI calcium release-activated calcium modulator 3
  Uniprot ID: Q9BRQ5
  ENST ID: ENST00000318663
  CDS Start-End: 225-1112
ccagttcctgttttggcctccgctgtcccgctccggctcctggggctccccgcagacgctgcttttcttgctccactgggggtgcctcttcctgggcgcccgccgcctgcatcctgctcgtcctgtctgggaatggggccgcccccgggcttgggccggcccggctggggcccccgaggcgcttccgccccgtagtgaccgcctggtgccgccccccccccaggatgaagggcggcgagggggacgcgggcgagcaggccccgctgaaccctgagggcgagagccctgcaggctcggccacgtaccgggagttcgtgcaccgcggctacctggacctcatgggggccagtcagcactcgctgcgggcgctcagctggcgccgcctctacctcagccgggccaagctcaaagcttccagccgcacgtctgccttgctctcgggcttcgccatggtggccatggtggaggtgcagctggagagtgaccacgagtacccaccaggcctgctggtggccttcagtgcctgcaccaccgtgctggtggctgtgcacctctttgcactcatggtctccacgtgtctgctgccccacattgaagctgtgagcaacatccacaacctcaactctgtccaccagtcgccacaccagagactgcaccgctacgtggagctggcctggggcttctccactgccctgggcacctttctcttccttgctgaagttgtcctggttggttgggtcaagtttgtgcccattggggctcccttggacacaccgacccccatggtgcccacatcccgggtgcccgggactctggcaccagtggctacctcccttagtccagcttccaatctcccacggtcctctgcgtctgcagcaccgtcccaagctgagccagcctgcccaccccggcaagcctgtggtggtggtggggcccatgggccaggctggcaagcagccatggcctccacagccatcatggtacccgtggggctcgtgtttgtggcctttgccctgcatttctaccgctccttggtggcacacaagacagaccgctacaagcaggaactagaggaactgaatcgcctgcagggggagctgcaggctgtgtgagactggtgttagccaccgctcactgcaagcactgcctccctccggggtctgtaagaggccgcaggggcctacagacctcatccccccatcccctggctggagccacttccagtggccactctcaggcagagttcagattcctgcccgcagggtcctctgggctgggccttggggcagctcccacattcccagggattttccccatcagtctgtcccttgggttttgcaagctactctgcacctgggctggcctcagttgaaggatcatgcagtagatagaggggaggcagggagagcttgtgggaccttcagtgctgactttagccaccatttccattcctatacaggatgtgaaggtcagaaggcagccaattgttggtttaatttttttttttttttgagacagtctgtttcccaggctggagtgtagtgatacagtcacagctcactgtagcctcgaccttccaggctcaaaagatgctcccaccacagcctcccaggtagtgagtagctggtactacaggtgtgtgctgccacacccgactaatttttttgtagagacggggtttcgctgttcccaggctggtctcaaactcctgggctcaagtgaacctcccgcctcggcctcccaaagtgctgggattcctttctttatttctgtagaatctattttatggttggcattttgggggaagatttcgatgggttccacattcttgctttagttgttgtagagggatttgggtgtttctacccaaggcattggtctagcttttcctacaatgaacctatctttggaggttcaagctccccaccttcccccactgtggtgacctgtggccacttgcagaagggatggtgcctgacccactgccctagccccacgctatgcaccaaacttgttctccccgtcctggtccagggctggggtctttagagactgacagcctctgccccaggcctgagtccttagcaagggttgggtaaggaggttttaagggagaaggtccagtccttagcccttgaaatacaaagctcttctgacactgaatttggatgcaccttgttttatataataaatcgtgtttcacaga

SEQ ID NO: 162692 - DNA, 628 bp, Homo sapiens
  Payload ID: 12058
  Gene Symbol: ORAI3
  Gene Name: ORAI calcium release-activated calcium modulator 3
  ENST ID: ENST00000562699
  CDS Start-End: 139-372
tcttcctgggcgcccgccgcctgcatcctgctcgtcctgtctgggaatggggccgcccccgggcttgggccggcccggctggggcccccgaggcgcttccgccccgtagtgaccgcctggtgccgccccccccccaggatgaagggcggcgagggggacgcgggcgagcaggccccgctgaaccctgagggcgagagccctgcaggctcggccacgtaccgggagttcgtgcaccgcggctacctggacctcatgggggccagtcagcactcgctgcgggcgctcagctggcgccgcctctacctcagccgggccaagctcaaagcttccagccgcacgtctgccttgctctcgggcttcgccatgagataaggaaacaggcccaagaaggctgaagatcttgcccaaaaccacacagctagtccatgaaactgaacttggactatctacccctcacacgggaatctctctttgatttgagaaaaggaaccagtgcctttcaactggaacagaaaggaatctgatctcaacacctatgcctccacgtaaattatttttttcagccttatttccctcaaaattgtagagtcctaatcttcttctatcttgtggtgtgagaccttggata

SEQ ID NO: 162693 - DNA, 976 bp, Homo sapiens
  Payload ID: 12058
  Gene Symbol: ORAI3
  Gene Name: ORAI calcium release-activated calcium modulator 3
  ENST ID: ENST00000563161
  CDS Start-End: 210-506
gcctccgctgtcccgctccggctcctggggctccccgcagacgctgcttttcttgctccactgggggtgcctcttcctgggcgcccgccgcctgcatcctgctcgtcctgtctgggaatggggccgcccccgggcttgggccggcccggctggggcccccgaggcgcttccgccccgtagtgaccgcctggtgccgccccccccccaggatgaagggcggcgagggggacgcgggcgagcaggccccgctgaaccctgagggcgagagccctgcaggctcggccacgtaccgggagttcgtgcaccgcggctacctggacctcatgggggccagtcagcactcgctgcgggcgctcagctggcgccgcctctacctcagccgggccaagctcaaagcttccagccgcacgtctgccttgctctcgggcttcgccatggggaccccaggagacggggccaccggaggacacgaaagtcctaaaggtgtcgtagtgggagtggggtgaacaaatcgctggtggggttgactgcaacagtgaggcagagtggtccagatggagcctgtacctggcagaagtggttcctaagtcccagtgccagcttcaaaggcaggtggccatggtggaggtgcagctggagagtgaccacgagtacccaccaggcctgctggtggccttcagtgcctgcaccaccgtgctggtggctgtgcacctctttgcactcatggtctccacgtgtctgctgccccacattgaagctgtgagcaacatccacaacctcaactctgtccaccagtcgccacaccagagactgcaccgctacgtggagctggcctggggcttctccactgccctgggcacctttctcttccttgctgaagttgtcctggttggttgggtcaagtttgtgcccattggggctcccttggacacaccgacccccatggtgcccacatcccgggtgcccgggactctgg

SEQ ID NO: 162694 - DNA, 1393 bp, Homo sapiens
  Payload ID: 12058
  Gene Symbol: ORAI3
  Gene Name: ORAI calcium release-activated calcium modulator 3
  ENST ID: ENST00000566237
  CDS Start-End: 168-1010
gctgcttttcttgctccactgggggtgcctcttcctgggcgcccgccgcctgcatcctgctcgtcctgtctgggaatggggccgcccccgggcttgggccggcccggctggggcccccgaggcgcttccgccccgtagtgaccgcctggtgccgccccccccccaggatgaagggcggcgagggggacgcgggcgagcaggccccgctgaaccctgagggcgagagccctgcaggctcggccacgtaccgggagttcgtgcaccgcggctacctggacctcatgggggccagtcagcactcgctgcgggcgctcagctggcgccgcctctacctcagccgggccaagctcaaagcttccagccgcacgtctgccttgctctcgggcttcgccatggtggccatggtggaggtgcagctggagagtgaccacgagtacccaccaggcctgctggtggccttcagtgcctgcaccaccgtgctggtggctgtgcacctctttgcactcatggtctccacgtgtctgctgccccacattgaagctgtgagcaacatccacaacctcaactctgtccaccagtcgccacaccagagactgcaccgctacgtggagctggcctggggcttctccactgccctgggcacctttctcttccttgctgaagttgtcctggttggttgggtcaagtttgtgcccattggggctcccttggacacaccgacccccatggtgcccacatcccgggtgcccgggactctggcaccagtggctacctcccttagtccagcttccaatctcccacggtcctctgcgtctgcagcaccgtcccaagctgagccagcctgcccaccccggcaagcctgtggtggtggtggggcccatgggccaggctggcaagcagccatggcctccacagccatcatgggattttccccatcagtctgtcccttgggttttgcaagctactctgcacctgggctggcctcagttgaaggatcatgcagtagatagaggggaggcagggagagcttgtgggaccttcagtgctgactttagccaccatttccattcctatacaggatgtgaaggtcagaaggcagccaattgttggtttaatttttttttttttttgagacagtctgtttcccaggctggagtgtagtgatacagtcacagctcactgtagcctcgaccttccaggctcaaaagatgctcccaccacagcctcccaggtagtgagtagctggtactacaggtgtgtgctgccacacccgactaatttttttgtagagacggggtttcgctgttcccaggctggtctcaaactcctgggctcaagtgaacctcccgcctcggcctcccaaagtgctgggattcctttctttatttctgta

SEQ ID NO: 162695 - DNA, 2478 bp, Homo sapiens
  Payload ID: 12059
  Gene Symbol: ORAOV1
  Gene Name: oral cancer overexpressed 1
  Uniprot ID: Q8WV07
  ENST ID: ENST00000279147
  CDS Start-End: 109-522
gggtctcgtctcctcccaagcggagcatttgtgcctgaagctgccgggtctgctacggcaccgcggggctgcagaaacccgggggccaagggcgggctgcttgccgctatggctggcagtcaggacatattcgatgccatcgtgatggcggatgagaggtttcatggggaagggtatcgggaaggctatgaagaaggcagtagtttgggtgtgatggagggaaggcagcatggcacgctgcatggagccaaaatcgggtctgagatcgggtgctaccaaggttttgcttttgcatggaaatgtctactgcacagttgcaccactgagaaggacagcagaaagatgaaggtcttagaatcattgattggaatgatccagaaattcccttatgatgaccctacttacgataaactccatgaagacttagacaagatcagaggaaaatttaaacagttttgttcgttactcaatgttcagccagactttaaaattagtgcagaaggttccggactttcattttgaggaggatggatgaacagagaccgaacgtcgaggaacagatgtgtgtgtgacgtgtttagaaatgcggtgaagggccagacggtgctgggaaggcagttgttcattgggagggtgagggttccggttcggccgtgggagggcttccttccctggggttttctgcctgtgtcaccttggtgcccgtcttggggcctcgccacacatgccctttgttgggctgaagccgtccctggcagagccctcgtgcattgacttgacagcctctccggcagcacaggcctagctggttctgggttggagttggctctggatagggtcagtcaccaggcctggactgaaggcagttatttttattattattattatttgcaatgagagagatggttggccccgaatgaggctcatgggaggtttggacgggtgctgtgccgcatgtcgaggccgattgtgtgccaggcggtgcgggacgtgcctcccgtgtgttatttaatcccttcaggagcccacaagatgggtgttattctcattttacagaggagggaggggagacgcgaagggattgcctggtctaagggcacccagcagcagagctaggacttccgccctaaggctgtgcctcactgccaccaggcacagccgcctccggaatgcacaggcgagtccctgccctccctcccaggccgcacaggtcctgccaagcctcacggagcacgggggagtctgtggtggccagtttacctgggcatctggctgagaggaagaaaggccaacctgatcctgaggggacccagacatatcctttgcactgtccctagaggggcgatgagctttgcagcattaaaaaatggtgaaggggggaaatattttgaaccaaagaccaaatgttaggccgccgttatatttgcagaagctttgagaaccatgcgtatagcctcctgcattctcccctctcctaggagctcttttgtctctgtccttacgaggcgtcatacagaggcagtggggtgggcacagatgagcagagtggatggttcggtgggtccccacgaggcgagtggtggtcatatgtgatggcacgtgttcacacaccctcctgtgtacccccccagggtcaccgaagtccccacacgctggctctccacacccctcctgttccagaaagcatgtccgaaagcagtccaggagattattaaggggtcgccatgaatccactttggttttaaaaccattcccgaatgtcctagtggattgtgttgtgctgcctaagctgccggctgcaggagccagagaagtgacccccgcgggagcagcggcaggtggatctccacggtggctcgctttgtttttgttttgttttttcttttaagacggagtctcactctgtcgccgagtttggagtgtattggcgcgatctcggctcactgtaacctccgcctcctgaattcaagtgattctcctgcctcagcctccctagtagctgggattataggcgccccccaccacgcccaagtaacttttgtatttttagtagagatggggttttgccttgttggccaggctggtcttgaactcccagcctgaaatgatccacccacgtccacctaccaaagtgctggaattgcaggcatgagccaccactcccggcctgctttttgtttttgaagacaggacttaggtctcctcctcccgaactctaaacctgcgtgtgtggctgtgcaccgctcgtttgtagcgtcacctcaggtctggggaagtctgtgctggcatctcctcattgtgccttcatcagagctggtgccttcgggccagaaagactctcgttctttctagatggtgggatcaggggcctttgctgtgtttcccttggtggatttttgtgttttgtaagttgtctattttgataatgtattatttttataactgtaaaaaaagtaaatagcatattttaaagtgaaa

SEQ ID NO: 162696 - DNA, 359 bp, Homo sapiens
  Payload ID: 12059
  Gene Symbol: ORAOV1
  Gene Name: oral cancer overexpressed 1
  ENST ID: ENST00000441922
  CDS Start-End: 9-221
ttgccgctatggctggcagtcaggacatattcgatgccatcgtgatggcggatgagaggtttcatggggaagggtatcgggaaggctatgaagaaggcagtagtttgggtgtgatggagggaaggcagcatggcacgctgcatggagccaaaatcgggtctgagcagaaagatgaaggtcttagaatcattgattggaatgatccagaaattcccttatgatgaccctacttacgataaactccatgaagacttagacaagatcagaggaaaatttaaacagttttgttcgttactcaatgttcagccagactttaaaattagtgcagaaggttccggactttcattttgaggaggatg

SEQ ID NO: 162697 - DNA, 775 bp, Homo sapiens
  Payload ID: 12059
  Gene Symbol: ORAOV1
  Gene Name: oral cancer overexpressed 1
  ENST ID: ENST00000542341
  CDS Start-End: 178-408
acaggctgctttgggccctcccgcgtgccgttcttacccggcctgccccgcgccgccgcttccggaagtgggtctcgtctcctcccaagcggagcatttgtgcctgaagctgccgggtctgctacggcaccgcggggctgcagaaacccgggggccaagggcgggctgcttgccgctatggctggcagtcaggacatattcgatgccatcgtgatggcggatgagaggtttcatggggaagggtatcgggaaggctatgaagaaggcagtagtttgggtgtgatggagggaaggcagcatggcacgctgcatggagccaaaatcgggtctgagatcgggtgctaccaaggttttgcttttgcatggaaatgtctactgcacagttgcaccactgagaaggacaggtaaaggtggagatgtctttctttctcagcgtaggaaccaggagttctagttccatgggttaccagcatgcccttgagtaatcaatctgtctgttcctcatctgtaaaatggagaaaattatcagtgtcaagcttgagtgttgttaggagatttaacggaaatactaaatagaaagtgccaggcacattttaggtgtttggtgaacactggctgttgttgcttctcaagagttctatgctcctgccttttacctggagtcattagtgcaccatgtggcttttagataccctaccaataaaataatgttgacattgattgtattttctcattcacctttcccctgagcttctaataaacaaattataacagt

SEQ ID NO: 162698 - DNA, 2274 bp, Homo sapiens
  Payload ID: 12059
  Gene Symbol: ORAOV1
  Gene Name: oral cancer overexpressed 1
  ENST ID: ENST00000536870
  CDS Start-End: 85-321
gcatttgtgcctgaagctgccgggtctgctacggcaccgcggggctgcagaaacccgggggccaagggcgggctgcttgccgctatggctggcagtcaggacatattcgatgccatcgtgatggcggatgagagcagaaagatgaaggtcttagaatcattgattggaatgatccagaaattcccttatgatgaccctacttacgataaactccatgaagacttagacaagatcagaggaaaatttaaacagttttgttcgttactcaatgttcagccagactttaaaattagtgcagaaggttccggactttcattttgaggaggatggatgaacagagaccgaacgtcgaggaacagatgtgtgtgtgacgtgtttagaaatgcggtgaagggccagacggtgctgggaaggcagttgttcattgggagggtgagggttccggttcggccgtgggagggcttccttccctggggttttctgcctgtgtcaccttggtgcccgtcttggggcctcgccacacatgccctttgttgggctgaagccgtccctggcagagccctcgtgcattgacttgacagcctctccggcagcacaggcctagctggttctgggttggagttggctctggatagggtcagtcaccaggcctggactgaaggcagttatttttattattattattatttgcaatgagagagatggttggccccgaatgaggctcatgggaggtttggacgggtgctgtgccgcatgtcgaggccgattgtgtgccaggcggtgcgggacgtgcctcccgtgtgttatttaatcccttcaggagcccacaagatgggtgttattctcattttacagaggagggaggggagacgcgaagggattgcctggtctaagggcacccagcagcagagctaggacttccgccctaaggctgtgcctcactgccaccaggcacagccgcctccggaatgcacaggcgagtccctgccctccctcccaggccgcacaggtcctgccaagcctcacggagcacgggggagtctgtggtggccagtttacctgggcatctggctgagaggaagaaaggccaacctgatcctgaggggacccagacatatcctttgcactgtccctagaggggcgatgagctttgcagcattaaaaaatggtgaaggggggaaatattttgaaccaaagaccaaatgttaggccgccgttatatttgcagaagctttgagaaccatgcgtatagcctcctgcattctcccctctcctaggagctcttttgtctctgtccttacgaggcgtcatacagaggcagtggggtgggcacagatgagcagagtggatggttcggtgggtccccacgaggcgagtggtggtcatatgtgatggcacgtgttcacacaccctcctgtgtacccccccagggtcaccgaagtccccacacgctggctctccacacccctcctgttccagaaagcatgtccgaaagcagtccaggagattattaaggggtcgccatgaatccactttggttttaaaaccattcccgaatgtcctagtggattgtgttgtgctgcctaagctgccggctgcaggagccagagaagtgacccccgcgggagcagcggcaggtggatctccacggtggctcgctttgtttttgttttgttttttcttttaagacggagtctcactctgtcgccgagtttggagtgtattggcgcgatctcggctcactgtaacctccgcctcctgaattcaagtgattctcctgcctcagcctccctagtagctgggattataggcgccccccaccacgcccaagtaacttttgtatttttagtagagatggggttttgccttgttggccaggctggtcttgaactcccagcctgaaatgatccacccacgtccacctaccaaagtgctggaattgcaggcatgagccaccactcccggcctgctttttgtttttgaagacaggacttaggtctcctcctcccgaactctaaacctgcgtgtgtggctgtgcaccgctcgtttgtagcgtcacctcaggtctggggaagtctgtgctggcatctcctcattgtgccttcatcagagctggtgccttcgggccagaaagactctcgttctttctagatggtgggatcaggggcctttgctgtgtttcccttggtggatttttgtgttttgtaagttgtctattttgataatgtattatttttataactgtaaaaaaagtaaatagcatattttaaagtg

SEQ ID NO: 162699 - DNA, 951 bp, Homo sapiens
  Payload ID: 12059
  Gene Symbol: ORAOV1
  Gene Name: oral cancer overexpressed 1
  ENST ID: ENST00000535542
  CDS Start-End: 67-177
gccgggtctgctacggcaccgcggggctgcagaaacccgggggccaagggcgggctgcttgccgctatggctggcagtcaggacatattcgatgccatcgtgatggcggatgagagagcccctggggagcccctcgtgctgcgacagtgggggagctgtgagttgcctcctggctgacttccagtgcccggcccagaggacgcgtccatagatgttagttaagaaagcggccgaacatttagcagtcaggcgctgacgtttatttagctcgcgctgtgagtcagacactgagctaaacgttccaccctggttatctacttcagccctacttagtttcatggggaagggtatcgggaaggctatgaagaaggcagtagtttgggtgtgatggagggaaggcagcatggcacgctgcatggagccaaaatcgggtctgagatcgggtgctaccaaggttttgcttttgcatggaaatgtctactgcacagttgcaccactgagaaggacagcagaaagatgaaggtcttagaatcattgattggaatgatccagaaattcccttatgatgaccctacttacgataaactccatgaagacttagacaagatcagaggaaaatttaaacagttttgttcgttactcaatgttcagccagactttaaaattagtgcagaaggttccggactttcattttgaggaggatggatgaacagagaccgaacgtcgaggaacagatgtgtgtgtgacgtgtttagaaatgcggtgaagggccagacggtgctgggaaggcagttgttcattgggagggtgagggttccggttcggccgtgggagggcttccttccctggggttttctgcctgtgtcaccttggtgcccgtcttggggcctcgccacacatgccctttgttgggctgaagccgtccctggcagagccctcgtgcattgactt

SEQ ID NO: 162700 - DNA, 444 bp, Homo sapiens
  Payload ID: 12059
  Gene Symbol: ORAOV1
  Gene Name: oral cancer overexpressed 1
  ENST ID: ENST00000543562
  CDS Start-End: 112-243
agtgggtctcgtctcctcccaagcggagcatttgtgcctgaagctgccgggtctgctacggcaccgcggggctgcagaaacccgggggccaagggcgggctgcttgccgctatggctggcagtcaggacatattcgatgccatcgtgatggcggatgagagatcgggtgctaccaaggttttgcttttgcatggaaatgtctactgcacagttgcaccactgagaaggacagcagaaagatgaaggtcttagaatcattgattggaatgatccagaaattcccttatgatgaccctacttacgataaactccatgaagacttagacaagatcagaggaaaatttaaacagttttgttcgttactcaatgttcagccagactttaaaattagtgcagaaggttccggactttcattttgaggaggatggatgaacagagaccgaa

SEQ ID NO: 162701 - DNA, 817 bp, Homo sapiens
  Payload ID: 12059
  Gene Symbol: ORAOV1
  Gene Name: oral cancer overexpressed 1
  ENST ID: ENST00000539414
  CDS Start-End: 84-458
catttgtgcctgaagctgccgggtctgctacggcaccgcggggctgcagaaacccgggggccaagggcgggctgcttgccgctatggctggcagtcaggacatattcgatgccatcgtgatggcggatgagaggtttcatggggaagggtatcgggaaggctatgaagaaggcagtagtttgggtgtgatggagggaaggcagcatggcacgctgcatggagccaaaatcgggtctgagatcgggtgctaccaaggttttgcttttgcatggaaatgtctactgcacagttgcaccactgagaaggacagcagaaagatgaaggtcttagaatcattgattggaatgatccagaaattcccttatgatgaccctacttacgataaactccatgaagacttagacaagatcagaggaaaatttaaacaggtgcgtgcactgtgtgtttcctcctgctaggagcacctgattgcgcctttcccaggcggggcagcgcactcccggggccgctgcggcaatggcctggggctgcgtgcgccgcggaactgtccgtagaggcgcctcatccttgagtcgcagtgcaggaaaactgaagacagtccagagaaaaggagttagaactcatttatgggctggccacatagacaggaaaagctatagctagagatagagttatcttctcatttttcagtaaaaatgcacaagattaaaaataccatctcttttgtgttttcagttttgttcgttactcaatgttcagccagactttaaaattagtgcagaaggttccggactttcattttgaggaggatggatga

SEQ ID NO: 162702 - DNA, 709 bp, Homo sapiens
  Payload ID: 12059
  Gene Symbol: ORAOV1
  Gene Name: oral cancer overexpressed 1
  Uniprot ID: Q8WV07
  ENST ID: ENST00000535657
  CDS Start-End: 83-496
atttgtgcctgaagctgccgggtctgctacggcaccgcggggctgcagaaacccgggggccaagggcgggctgcttgccgctatggctggcagtcaggacatattcgatgccatcgtgatggcggatgagaggtttcatggggaagggtatcgggaaggctatgaagaaggcagtagtttgggtgtgatggagggaaggcagcatggcacgctgcatggagccaaaatcgggtctgagatcgggtgctaccaaggttttgcttttgcatggaaatgtctactgcacagttgcaccactgagaaggacagcagaaagatgaaggtcttagaatcattgattggaatgatccagaaattcccttatgatgaccctacttacgataaactccatgaagacttagacaagatcagaggaaaatttaaacagttttgttcgttactcaatgttcagccagactttaaaattagtgcagaaggttccggactttcattttgaggaggatggatgaacagagaccgaacgtcgaggaacagatgccgcacaggtcctgccaagcctcacggagcacgggggagtctgtggtggccagtttacctgggcatctggctgagaggaagaaaggccaacctgatcctgaggggacccagacatatcctttgcactgtccctagaggggcgatgagctttgcagcattaaaaaatggtgaa

SEQ ID NO: 162703 - DNA, 1000 bp, Homo sapiens
  Payload ID: 12059
  Gene Symbol: ORAOV1
  Gene Name: oral cancer overexpressed 1
  ENST ID: ENST00000538554
  CDS Start-End: 106-771
tctcgtctcctcccaagcggagcatttgtgcctgaagctgccgggtctgctacggcaccgcggggctgcagaaacccgggggccaagggcgggctgcttgccgctatggctggcagtcaggacatattcgatgccatcgtgatggcggatgagaggtttcatggggaagggtatcgggaaggctatgaagaaggcagtagtttgggtgtgatggagggaaggcagcatggcacgctgcatggagccaaaatcgggtctgagatcgggtgctaccaaggttttgcttttgcatggaaatgtctactgcacagttgcaccactgagaaggacagcagaaagatgaaggtcttagaatcattgattggaatgatccagaaattcccttatgatgaccctacttacgataaactccatgaagacttagacaagatcagaggaaaatttaaacagacgggcctttcgccttccgccgtgatggtgaggcctcccagctacgtagaactgccggttacatgttggtgctgggaagcgccgcggtgcaaccagaaatgcacagacccagccgcccgccgcccagaccctcagacttgcgcgtcacaggacagactccgctgtgccccgtgcacttgccaccagcctttggcctctcgatacacacaacatccaggacttgtgcccttgccccatcacgacagacaaagcgtccctcaaggcccccgcgtggttcagacagacgccgcagccaggatggttgagcagcaaacaatgtgaaagagatacacagaagcgatgtgaatatttccaaaccgtgcctggaagtcaacggtagcagcgcaataagaaaatggagctgcggcctgtccccggtgtgggcaccgccccttcccctcgggagcctcctcctcacacctcctcccgcctgtcctccctcacacgtcagcctccacactcttgccacctcccttcaacacttcctaaataaaaattacaagaattacat

SEQ ID NO: 162704 - DNA, 988 bp, Homo sapiens
  Payload ID: 12059
  Gene Symbol: ORAOV1
  Gene Name: oral cancer overexpressed 1
  ENST ID: ENST00000537272
  CDS Start-End: 1-187
cagaaagatgaaggtcttagaatcattgattggaatgatccagaaattcccttatgatgaccctacttacgataaactccatgaagacttagacaagatcagaggaaaatttaaacagttttgttcgttactcaatgttcagccagactttaaaattagtgcagaaggttccggactttcattttgaggaggatggatgaacagagaccgaacgtcgaggaacagatggtcaccgaagtccccacacgctggctctccacacccctcctgttccagaaagcatgtccgaaagcagtccaggagattattaaggggtcgccatgaatccactttggttttaaaaccattcccgaatgtcctagtggattgtgttgtgctgcctaagctgccggctgcaggagccagagaagtgacccccgcgggagcagcggcaggtggatctccacggtggctcgctttgtttttgttttgttttttcttttaagacggagtctcactctgtcgccgagtttggagtgtattggcgcgatctcggctcactgtaacctccgcctcctgaattcaagtgattctcctgcctcagcctccctagtagctgggattataggcgccccccaccacgcccaagtaacttttgtatttttagtagagatggggttttgccttgttggccaggctggtcttgaactcccagcctgaaatgatccacccacgtccacctaccaaagtgctggaattgcaggcatgagccaccactcccggcctgctttttgtttttgaagacaggacttaggtctcctcctcccgaactctaaacctgcgtgtgtggctgtgcaccgctcgtttgtagcgtcacctcaggtctggggaagtctgtgctggcatctcctcattgtgccttcatcagagctggtgccttcgggccagaaagactctcgttctttctagatggtgggatcaggggcctttgctgtgtttcccttggtgg

SEQ ID NO: 162705 - DNA, 3611 bp, Homo sapiens
  Payload ID: 12060
  Gene Symbol: OFD1
  Gene Name: oral-facial-digital syndrome 1
  Uniprot ID: O75665
  ENST ID: ENST00000340096
  CDS Start-End: 328-3366
cggactggctgtgaggcggtcctgcctcgctgccttcagtccctagtgtctgggtccccgccctccagccgcctttgagtcgtgcctgggtcctcgcccttgcctcagaaccgcgaagaaaggaagctcgcgtgtttgctagaaaacctagttgggagtgcgaggcagagaacgttcagcacctttgttcctcccgaaccctcgggacagaggcagggttctgagggcagggattccccctcgtcttggccccaccgcccgggctgggcactaaactcgggccgcggcggggcgagcgaggcgggctccggagggagctgacgcctgatgatggcgcagtccaacatgtttaccgtggctgatgtgttgagtcaagatgaactgcgcaaaaagctataccagacgtttaaggatcggggtatactggatacactcaagacacaacttcgaaaccagctaattcatgagttgatgcaccctgtattgagtggagaactgcagcctcggtccatttcagtagaagggagctccctcttaataggcgcctctaactctttagtggcagatcacttacaaagatgtggctatgaatattcactttctgttttctttccagaaagtggtttggcaaaagaaaaggtatttactatgcaggatctattacaactcattaaaatcaaccctacttccagtctctacaaatcactggtttcaggatctgataaagaaaatcaaaaaggttttcttatgcattttttaaaagaattggcagaatatcatcaagctaaagagagttgtaatatggaaactcagacaagttcgacatttaacagagattctctggctgagaagcttcagcttattgatgatcagtttgcagatgcttaccctcagcgtatcaagttcgaatctttagaaataaagctaaatgagtataagagagaaatagaagagcaacttcgggcagaaatgtgtcaaaagttgaagttttttaaagataccgagatagcaaaaattaaaatggaagcaaaaaaaaagtatgaaaaggagttaaccatgttccagaatgattttgaaaaagcttgtcaagcaaaatctgaagctctcgttcttcgggaaaagagtacccttgaaagaattcacaagcaccaagagattgaaacaaaagaaatttatgctcaaaggcaacttttactaaaagatatggatttgctaagaggaagagaagcagagctgaagcaaagagttgaagcttttgaattgaaccagaagctccaggaagaaaaacataaaagcataactgaggcacttaggagacaggagcagaatataaagagttttgaggagacctatgaccgaaagctcaagaatgaacttctaaagtatcaacttgaactgaaggatgactacatcattagaactaatcgactgattgaagatgaaaggaagaataaagaaaaagctgttcatttgcaagaggagctcatagctattaattcaaaaaaggaggaactcaatcaatctgtaaatcgtgtgaaagaacttgagcttgaattagagtctgtcaaagcccagtctttggcaataacaaaacaaaaccatatgctgaatgaaaaggttaaagagatgagtgattattcactactaaaagaagagaaactggagcttctggcacaaaataaattacttaaacaacaactggaagagagtagaaatgaaaacctgcgtctcctaaaccgcctagctcagccggctcctgaacttgcagtctttcagaaagaactacggaaagccgaaaaggctatagtggttgagcatgaggagttcgaaagctgcaggcaagctctgcacaaacaactgcaagacgaaattgagcattctgcacagctgaaggcccagattctaggttacaaagcttctgtaaagagtttaactactcaggttgccgatttaaaattgcaactgaagcaaactcagacagccctagagaatgaagtgtactgcaatccaaagcagtctgtgatcgatcgttctgtcaatggattaataaatggcaatgtggtgccttgcaatggtgagataagtggggatttcttgaacaatccttttaaacaggaaaacgttctagcacgtatggttgcatcaaggatcacaaattatccaactgcatgggtggagggtagttcccctgattctgaccttgagtttgtagccaatactaaggcaagggtcaaagagcttcagcaagaggccgaacgcttggaaaaggctttcagaagttaccatcggagagtcattaaaaactctgccaaaagcccactagcagcaaagagcccaccatctctgcacttgctggaagccttcaaaaacattacttccagttccccggaaagacatatttttggagaggacagagttgtctctgagcagcctcaagtgggcacacttgaagaaaggaatgacgtcgtggaagcactgacaggcagtgcagcctcgaggctccgcgggggcacttcctccagacgcctctcttccacaccccttccaaaagcaaaaagaagcctcgaaagtgaaatgtatctggaaggtctgggcagatcacacattgcttcccccagtccttgtcctgacagaatgcccctaccatcacccactgagtctaggcacagcctctccatccctcctgtctccagccctccggagcagaaagtgggtctttatcgaagacaaactgaacttcaagacaaaagtgaattttcagatgtggacaagctagcttttaaggataatgaggagtttgaatcatcttttgaatctgcagggaacatgccaaggcagttggaaatgggcgggctttctcctgccggggatatgtctcatgtggacgctgctgcagctgctgtgcccctctcatatcagcacccaagtgtagatcagaaacaaattgaagaacaaaaggaagaagaaaaaatacgggaacagcaagtgaaagaacgaaggcagagagaagaaagaaggcagagtaacctacaagaagttttagaaagggaacgaagagaactagaaaaactgtatcaggaaaggaagatgattgaagaatcactgaagattaaaataaaaaaggaattagaaatggaaaatgaattagaaatgagtaatcaagaaataaaagacaaatctgctcacagtgaaaatcctttagagaaatacatgaaaatcatccagcaggagcaagaccaggagtcggcagataagagctcaaaaaagatggtccaagaaggctccctagtggacacgctgcaatctagtgacaaagtcgaaagtttaacaggcttttctcatgaagaactagacgactcttggtaaccatgtttgctgcccagcttctaacttacataccgtgagaagttacgtaacatttactcctttgtaaatgtttccctatcatcagacaaaactcaataaaaatgtgtgtaatccaatgtgggtttttttttccataattaattttgataccatagtgtgtgaaccaagaataatctagtcacgtgaaacctcttctccagtcatagtatttctcattcattataataaaagtaactggcttttaa

SEQ ID NO: 162706 - DNA, 3296 bp, Homo sapiens
  Payload ID: 12060
  Gene Symbol: OFD1
  Gene Name: oral-facial-digital syndrome 1
  Uniprot ID: O75665
  ENST ID: ENST00000380550
  CDS Start-End: 175-3093
gggagtgcgaggcagagaacgttcagcacctttgttcctcccgaaccctcgggacagaggcagggttctgagggcagggattccccctcgtcttggccccaccgcccgggctgggcactaaactcgggccgcggcggggcgagcgaggcgggctccggagggagctgacgcctgatgatggcgcagtccaacatgtttaccgtggctgatgtgttgagtcaagatgaactgcgcaaaaagctataccagacgtttaaggatcggggtatactggatacactcaagacacaacttcgaaaccagctaattcatgagttgatgcaccctgtattgagtggagaactgcagcctcggtccatttcagtagaagggagctccctcttaataggcgcctctaactctttagtggcagatcacttacaaagatgtggctatgaatattcactttctgttttctttccagaaagtggtttggcaaaagaaaaggtatttactatgcaggatctattacaactcattaaaatcaaccctacttccagtctctacaaatcactggtttcaggatctgataaagaaaatcaaaaaggttttcttatgcattttttaaaagaattggcagaatatcatcaagctaaagagagttgtaatatggaaactcagacaagttcgacatttaacagagattctctggctgagaagcttcagcttattgatgatcagtttgcagatgcttaccctcagcgtatcaagttcgaatctttagaaataaagctaaatgagtataagagagaaatagaagagcaacttcgggcagaaatgtgtcaaaagttgaagttttttaaagataccgagatagcaaaaattaaaatggaagcaaaaaaaaagtatgaaaaggagttaaccatgttccagaatgattttgaaaaagcttgtcaagcaaaatctgaagctctcgttcttcgggaaaagagtacccttgaaagaattcacaagcaccaagagattgaaacaaaagaaatttatgctcaaaggcaacttttactaaaagatatggatttgctaagaggaagagaagcagagctgaagcaaagagttgaagcttttgaattgtatcaacttgaactgaaggatgactacatcattagaactaatcgactgattgaagatgaaaggaagaataaagaaaaagctgttcatttgcaagaggagctcatagctattaattcaaaaaaggaggaactcaatcaatctgtaaatcgtgtgaaagaacttgagcttgaattagagtctgtcaaagcccagtctttggcaataacaaaacaaaaccatatgctgaatgaaaaggttaaagagatgagtgattattcactactaaaagaagagaaactggagcttctggcacaaaataaattacttaaacaacaactggaagagagtagaaatgaaaacctgcgtctcctaaaccgcctagctcagccggctcctgaacttgcagtctttcagaaagaactacggaaagccgaaaaggctatagtggttgagcatgaggagttcgaaagctgcaggcaagctctgcacaaacaactgcaagacgaaattgagcattctgcacagctgaaggcccagattctaggttacaaagcttctgtaaagagtttaactactcaggttgccgatttaaaattgcaactgaagcaaactcagacagccctagagaatgaagtgtactgcaatccaaagcagtctgtgatcgatcgttctgtcaatggattaataaatggcaatgtggtgccttgcaatggtgagataagtggggatttcttgaacaatccttttaaacaggaaaacgttctagcacgtatggttgcatcaaggatcacaaattatccaactgcatgggtggagggtagttcccctgattctgaccttgagtttgtagccaatactaaggcaagggtcaaagagcttcagcaagaggccgaacgcttggaaaaggctttcagaagttaccatcggagagtcattaaaaactctgccaaaagcccactagcagcaaagagcccaccatctctgcacttgctggaagccttcaaaaacattacttccagttccccggaaagacatatttttggagaggacagagttgtctctgagcagcctcaagtgggcacacttgaagaaaggaatgacgtcgtggaagcactgacaggcagtgcagcctcgaggctccgcgggggcacttcctccagacgcctctcttccacaccccttccaaaagcaaaaagaagcctcgaaagtgaaatgtatctggaaggtctgggcagatcacacattgcttcccccagtccttgtcctgacagaatgcccctaccatcacccactgagtctaggcacagcctctccatccctcctgtctccagccctccggagcagaaagtgggtctttatcgaagacaaactgaacttcaagacaaaagtgaattttcagatgtggacaagctagcttttaaggataatgaggagtttgaatcatcttttgaatctgcagggaacatgccaaggcagttggaaatgggcgggctttctcctgccggggatatgtctcatgtggacgctgctgcagctgctgtgcccctctcatatcagcacccaagtgtagatcagaaacaaattgaagaacaaaaggaagaagaaaaaatacgggaacagcaagtgaaagaacgaaggcagagagaagaaagaaggcagagtaacctacaagaagttttagaaagggaacgaagagaactagaaaaactgtatcaggaaaggaagatgattgaagaatcactgaagattaaaataaaaaaggaattagaaatggaaaatgaattagaaatgagtaatcaagaaataaaagacaaatctgctcacagtgaaaatcctttagagaaatacatgaaaatcatccagcaggagcaagaccaggagtcggcagataagagctcaaaaaagatggtccaagaaggctccctagtggacacgctgcaatctagtgacaaagtcgaaagtttaacaggcttttctcatgaagaactagacgactcttggtaaccatgtttgctgcccagcttctaacttacataccgtgagaagttacgtaacatttactcctttgtaaatgtttccctatcatcagacaaaactcaataaaaatgtgtgtaatccaatgtgggtttttttttccataattaattttgataccatagtgtgtgaaccaagaataatctagtcacgtgaaacctcttctccagtca

SEQ ID NO: 162707 - DNA, 3736 bp, Homo sapiens
  Payload ID: 12060
  Gene Symbol: OFD1
  Gene Name: oral-facial-digital syndrome 1
  ENST ID: ENST00000380567
  CDS Start-End: 873-3491
cggactggctgtgaggcggtcctgcctcgctgccttcagtccctagtgtctgggtccccgccctccagccgcctttgagtcgtgcctgggtcctcgcccttgcctcagaaccgcgaagaaaggaagctcgcgtgtttgctagaaaacctagttgggagtgcgaggcagagaacgttcagcacctttgttcctcccgaaccctcgggacagaggcagggttctgagggcagggattccccctcgtcttggccccaccgcccgggctgggcactaaactcgggccgcggcggggcgagcgaggcgggctccggagggagctgacgcctgatgatggcgcagtccaacatgtttaccgtggctgatgtgttgagtcaagatgaactgcgcaaaaagctataccagacgtttaaggatcggggtatactggatacactcaagacacaacttcgaaaccagctaattcatgagttgatgcaccctgtattgagtggagaactgcagcctcggtccatttcagtagaagggagctccctcttaataggcgcctctaactctttagtggcagatcacttacaaagatgtggctatgaatattcactttctgttttctttccagaaagtggtttggcaaaagaaaaggtatttactatgcaggatctattacaactcattaaaatcaaccctacttccagtctctacaaatcactggtttcaggatctgataaagaaaatcaaaaagccattaagtctgtgacttaatcgccaagtctcttggtagtaatgttagcagaatataaataaattggagcacaagatattctggactgcccgcaaactagaccatctctactgaagttcagtatggttttcttatgcattttttaaaagaattggcagaatatcatcaagctaaagagagttgtaatatggaaactcagacaagttcgacatttaacagagattctctggctgagaagcttcagcttattgatgatcagtttgcagatgcttaccctcagcgtatcaagttcgaatctttagaaataaagctaaatgagtataagagagaaatagaagagcaacttcgggcagaaatgtgtcaaaagttgaagttttttaaagataccgagatagcaaaaattaaaatggaagcaaaaaaaaagtatgaaaaggagttaaccatgttccagaatgattttgaaaaagcttgtcaagcaaaatctgaagctctcgttcttcgggaaaagagtacccttgaaagaattcacaagcaccaagagattgaaacaaaagaaatttatgctcaaaggcaacttttactaaaagatatggatttgctaagaggaagagaagcagagctgaagcaaagagttgaagcttttgaattgaaccagaagctccaggaagaaaaacataaaagcataactgaggcacttaggagacaggagcagaatataaagagttttgaggagacctatgaccgaaagctcaagaatgaacttctaaagtatcaacttgaactgaaggatgactacatcattagaactaatcgactgattgaagatgaaaggaagaataaagaaaaagctgttcatttgcaagaggagctcatagctattaattcaaaaaaggaggaactcaatcaatctgtaaatcgtgtgaaagaacttgagcttgaattagagtctgtcaaagcccagtctttggcaataacaaaacaaaaccatatgctgaatgaaaaggttaaagagatgagtgattattcactactaaaagaagagaaactggagcttctggcacaaaataaattacttaaacaacaactggaagagagtagaaatgaaaacctgcgtctcctaaaccgcctagctcagccggctcctgaacttgcagtctttcagaaagaactacggaaagccgaaaaggctatagtggttgagcatgaggagttcgaaagctgcaggcaagctctgcacaaacaactgcaagacgaaattgagcattctgcacagctgaaggcccagattctaggttacaaagcttctgtaaagagtttaactactcaggttgccgatttaaaattgcaactgaagcaaactcagacagccctagagaatgaagtgtactgcaatccaaagcagtctgtgatcgatcgttctgtcaatggattaataaatggcaatgtggtgccttgcaatggtgagataagtggggatttcttgaacaatccttttaaacaggaaaacgttctagcacgtatggttgcatcaaggatcacaaattatccaactgcatgggtggagggtagttcccctgattctgaccttgagtttgtagccaatactaaggcaagggtcaaagagcttcagcaagaggccgaacgcttggaaaaggctttcagaagttaccatcggagagtcattaaaaactctgccaaaagcccactagcagcaaagagcccaccatctctgcacttgctggaagccttcaaaaacattacttccagttccccggaaagacatatttttggagaggacagagttgtctctgagcagcctcaagtgggcacacttgaagaaaggaatgacgtcgtggaagcactgacaggcagtgcagcctcgaggctccgcgggggcacttcctccagacgcctctcttccacaccccttccaaaagcaaaaagaagcctcgaaagtgaaatgtatctggaaggtctgggcagatcacacattgcttcccccagtccttgtcctgacagaatgcccctaccatcacccactgagtctaggcacagcctctccatccctcctgtctccagccctccggagcagaaagtgggtctttatcgaagacaaactgaacttcaagacaaaagtgaattttcagatgtggacaagctagcttttaaggataatgaggagtttgaatcatcttttgaatctgcagggaacatgccaaggcagttggaaatgggcgggctttctcctgccggggatatgtctcatgtggacgctgctgcagctgctgtgcccctctcatatcagcacccaagtgtagatcagaaacaaattgaagaacaaaaggaagaagaaaaaatacgggaacagcaagtgaaagaacgaaggcagagagaagaaagaaggcagagtaacctacaagaagttttagaaagggaacgaagagaactagaaaaactgtatcaggaaaggaagatgattgaagaatcactgaagattaaaataaaaaaggaattagaaatggaaaatgaattagaaatgagtaatcaagaaataaaagacaaatctgctcacagtgaaaatcctttagagaaatacatgaaaatcatccagcaggagcaagaccaggagtcggcagataagagctcaaaaaagatggtccaagaaggctccctagtggacacgctgcaatctagtgacaaagtcgaaagtttaacaggcttttctcatgaagaactagacgactcttggtaaccatgtttgctgcccagcttctaacttacataccgtgagaagttacgtaacatttactcctttgtaaatgtttccctatcatcagacaaaactcaataaaaatgtgtgtaatccaatgtgggtttttttttccataattaattttgataccatagtgtgtgaaccaagaataatctagtcacgtgaaacctcttctccagtcatagtatttctcattcattataataaaagtaactggcttttaa

SEQ ID NO: 162708 - DNA, 3307 bp, Homo sapiens
  Payload ID: 12060
  Gene Symbol: OFD1
  Gene Name: oral-facial-digital syndrome 1
  ENST ID: ENST00000398395
  CDS Start-End: 709-1725
gggagtgcgaggcagagaacgttcagcacctttgttcctcccgaaccctcgggacagaggcagggttctgagggcagggattccccctcgtcttggccccaccgcccgggctgggcactaaactcgggccgcggcggggcgagcgaggcgggctccggagggagctgacgcctgatgatggcgcagtccaacatgtttaccgtggctgatgtgttgagtcaagatgaactgcgcaaaaagctataccagacgtttaaggatcggggtatactggatacactcaagacacaacttcgaaaccagctaattcatgagttgatgcaccctgtattgagtggagaactgcagcctcggtccatttcagtagaagggagctccctcttaataggcgcctctaactctttagtggcagatcacttacaaagatgtggctatgaatattcactttctgttttctttccagaaagtggtttggcaaaagaaaaggtatttactatgcaggatctattacaactcattaaaatcaaccctacttccagtctctacaaatcactggtttcaggatctgataaagaaaatcaaaaagccattaagtctgtgacttaatcgccaagtctcttggtagtaatgttagcagaatataaataaattggagcacaagatattctggactgcccgcaaactagaccatctctactgaagttcagtatggttttcttatgcatttttaaagaattggcagaatatcatcaagctaaagagagttgtaatatggaaactcagacaagttcgacatttaacagagattctctggctgagaagcttcagcttattgatgatcagtttgcagatgcttaccctcagcgtatcaagttcgaatctttagaaataaagctaaatgagtataagagagaaatagaagagcaacttcgggcagaaatgtgtcaaaagttgaagttttttaaagataccgagatagcaaaaattaaaatggaagcaaaaaaaaagtatgaaaaggagttaaccatgttccagaatgattttgaaaaagcttgtcaagcaaaatctgaagctctcgttcttcgggaaaagagtacccttgaaagaattcacaagcaccaagagattgaaacaaaagaaatttatgctcaaaggcaacttttactaaaagatatggatttgctaagaggaagagaagcagagctgaagcaaagagttgaagcttttgaattgtatcaacttgaactgaaggatgactacatcattagaactaatcgactgattgaagatgaaaggaagaataaagaaaaagctgttcatttgcaagaggagctcatagctattaattcaaaaaaggaggaactcaatcaatctgtaaatcgtgtgaaagaacttgagcttgaattagagtctgtcaaagcccagtctttggcaataacaaaacaaaaccatatgctgaatgaaaaggttaaagagatgagtgattattcactactaaaagaagagaaactggagcttctggcacaaaataaattacttaaacaacaactggaagagagtagaaatgaaaacctgcgtctcctaaaccgcctagctcagccggctcctgaacttgcagtctttcagaaagaactacggaaagccgaaaaggctatagtggttgagcatgaggagttcgaaagctgcaggcaagctctgcacaaacaactgcaagacgaaccctagagaatgaagtgtactgcaatccaaagcagtctgtgatcgatcgttctgtcaatggattaataaatggcaatgtggtgccttgcaatggtgagataagtggggatttcttgaacaatccttttaaacaggaaaacgttctagcacgtatggttgcatcaaggatcacaaattatccaactgcatgggtggagggtagttcccctgattctgaccttgagtttgtagccaatactaaggcaagggtcaaagagcttcagcaagaggccgaacgcttggaaaaggctttcagaagttaccatcggagagtcattaaaaactctgccaaaagcccactagcagcaaagagcccaccatctctgcacttgctggaagccttcaaaaacattacttccagttccccggaaagacatatttttggagaggacagagttgtctctgagcagcctcaagtgggcacacttgaagaaaggaatgacgtcgtggaagcactgacaggcagtgcagcctcgaggctccgcgggggcacttcctccagacgcctctcttccacaccccttccaaaagcaaaaagaagcctcgaaagtgaaatgtatctggaaggtctgggcagatcacacattgcttcccccagtccttgtcctgacagaatgcccctaccatcacccactgagtctaggcacagcctctccatccctcctgtctccagccctccggagcagaaagtgggtctttatcgaagacaaactgaacttcaagacaaaagtgaattttcagatgtggacaagctagcttttaaggataatgaggagtttgaatcatcttttgaatctgcagggaacatgccaaggcagttggaaatgggcgggctttctcctgccggggatatgtctcatgtggacgctgctgcagctgctgtgcccctctcatatcagcacccaagtgtagatcagaaacaaattgaagaacaaaaggaagaagaaaaaatacgggaacagcaagtgaaagaacgaaggcagagagaagaaagaaggcagagtaacctacaagaagttttagaaagggaacgaagagaactagaaaaactgtatcaggaaaggaagatgattgaagaatcactgaagattaaaataaaaaaggaattagaaatggaaaatgaattagaaatgagtaatcaagaaataaaagacaaatctgctcacagtgaaaatcctttagagaaatacatgaaaatcatccagcaggagcaagaccaggagtcggcagataagagctcaaaaaagatggtccaagaaggctccctagtggacacgctgcaatctagtgacaaagtcgaaagtttaacaggcttttctcatgaagaactagacgactcttggtaaccatgtttgctgcccagcttctaacttacataccgtgagaagttacgtaacatttactcctttgtaaatgtttccctatcatcagacaaaactcaataaaaatgtgtgtaatccaatgtgggtttttttttccataattaattttgataccatagtgtgtgaaccaagaataatctagtcacgtgaaacctcttctccagtca

SEQ ID NO: 162709 - DNA, 1455 bp, Homo sapiens
  Payload ID: 12061
  Gene Symbol: OSCP1
  Gene Name: organic solute carrier partner 1
  Uniprot ID: Q8WVF1
  ENST ID: ENST00000235532
  CDS Start-End: 83-1222
attgggacgctgcggcctggccttcaggccactggctaccgaaccccggggctcttcaccagtccagctcgtttccagcaccatgtcggtgcggacgctaccgctgctcttcttgaacttgggcggggagatgctttacatcctcgaccaacggctgcgggcccagaacatcccgggagacaaggcccgcaaagttctgaatgacatcatctccaccatgttcaatagaaagtttatggaggaattattcaagcctcaagagctctactccaagaaggccctgaggactgtctatgagcgcctggctcatgcctccattatgaaactgaaccaggccagcatggataagctctatgacctgatgaccatggctttcaaatatcaagtattgctgtgtccccgacccaaggatgtgctgctggtcactttcaatcacttggataccatcaagggattcatccgagactccccaaccatcctgcagcaagtggacgagactttgcggcagctgacagaaatatatggtggtctctctgcaggggagttccagctgatccggcagacactcctcatcttcttccaagacctgcacatccgagtatccatgtttctaaaggacaaagttcagaataataacggtcgctttgtgttgccggtgtccgggcctgttccttggggaactgaagttccaggactcatcagaatgttcaacaacaaaggtgaagaagtgaagaggatagaattcaagcatggtggaaactatgtccctgcacccaaagaaggttcttttgaactttatggagaccgagtcctgaaactgggaactaacatgtacagcgtgaatcagcctgtggaaactcatgtgtctggatcatcaaagaacttagcctcatggacccaggaaagcattgctccaaaccctcttgctaaagaagagctgaatttcttggccaggctgatgggagggatggagattaagaaacccagtggccctgagcccggattccggttgaatctctttaccaccgatgaagaagaggaacaagcagcgctaaccaggccagaagagttatcctatgaagttatcaacatacaagccacccaggaccagcaacggagcgaggagctggctcgaatcatgggggagtttgagatcacggagcagccaaggctgagcaccagcaaaggggacgatttgctcgccatgatggatgagttatagctgttctgaccaggcgtcctctgcccccagggagaggctgctggatggtgacccctggggaatgccccatggcccagaatgatgctgctagttttctactgagtgaagccattacgtctatttcttatttatgttgtaaggaactgtgtgagtctcccttgaggagcactcactcttgaaggcacacacatacacatattttcagtgaaatatattctgacttttaaacttga

SEQ ID NO: 162710 - DNA, 767 bp, Homo sapiens
  Payload ID: 12061
  Gene Symbol: OSCP1
  Gene Name: organic solute carrier partner 1
  Uniprot ID: Q8WVF1
  ENST ID: ENST00000354267
  CDS Start-End: 75-746
gctgcggcctggccttcaggccactggctaccgaaccccggggctcttcaccagtccagctcgtttccagcaccatgtcggtgcggacgctaccgctgctcttcttgaacttgggcggggagatgctttacatcctcgaccaacggctgcgggcccagaacatcccgggagacaaggcccgcaaagttctgaatgacatcatctccaccatgttcaatagaaagtttatggaggaattattcaagcctcaagagctctactccaagaaggccctgaggactgtctatgagcgcctggctcatgcctccattatgaaactgaaccaggccagcatggataagctctatgacctgatgaccatggctttcaaatatcaagtattgctgtgtccccgacccaaggatgtgctgctggtcactttcaatcacttggataccatcaagggattcatccgagactccccaaccatcctgcagcaagtggacgagactttgcggcagctgacagaaatatatggtggtctctctgcaggggagttccagctgatccggcagacactcctcatcttcttccaagacctgcacatccgaagagagtgcttctggaagcatatgcaagaaactgttcacagtgcacagtgttgccttccaggagtggggaactatatggaggacaggagaaggagactgactttccattatgtatacccttttgagaactttgagttttgtacctgggcaaaataaaattttaaaaaggggaagaaa

SEQ ID NO: 162711 - DNA, 1463 bp, Homo sapiens
  Payload ID: 12061
  Gene Symbol: OSCP1
  Gene Name: organic solute carrier partner 1
  Uniprot ID: Q8WVF1
  ENST ID: ENST00000356637
  CDS Start-End: 65-1234
ggccttcaggccactggctaccgaaccccggggctcttcaccagtccagctcgtttccagcaccatgtcggtgcggacgctaccgctgctcttcttgaacttgggcggggagatgctttacatcctcgaccaacggctgcgggcccagaacatcccgggagacaaggcccgcaaagatgaatggacagaggtggacagaaaacgagttctgaatgacatcatctccaccatgttcaatagaaagtttatggaggaattattcaagcctcaagagctctactccaagaaggccctgaggactgtctatgagcgcctggctcatgcctccattatgaaactgaaccaggccagcatggataagctctatgacctgatgaccatggctttcaaatatcaagtattgctgtgtccccgacccaaggatgtgctgctggtcactttcaatcacttggataccatcaagggattcatccgagactccccaaccatcctgcagcaagtggacgagactttgcggcagctgacagaaatatatggtggtctctctgcaggggagttccagctgatccggcagacactcctcatcttcttccaagacctgcacatccgagtatccatgtttctaaaggacaaagttcagaataataacggtcgctttgtgttgccggtgtccgggcctgttccttggggaactgaagttccaggactcatcagaatgttcaacaacaaaggtgaagaagtgaagaggatagaattcaagcatggtggaaactatgtccctgcacccaaagaaggttcttttgaactttatggagaccgagtcctgaaactgggaactaacatgtacagcgtgaatcagcctgtggaaactcatgtgtctggatcatcaaagaacttagcctcatggacccaggaaagcattgctccaaaccctcttgctaaagaagagctgaatttcttggccaggctgatgggagggatggagattaagaaacccagtggccctgagcccggattccggttgaatctctttaccaccgatgaagaagaggaacaagcagcgctaaccaggccagaagagttatcctatgaagttatcaacatacaagccacccaggaccagcaacggagcgaggagctggctcgaatcatgggggagtttgagatcacggagcagccaaggctgagcaccagcaaaggggacgatttgctcgccatgatggatgagttatagctgttctgaccaggcgtcctctgcccccagggagaggctgctggatggtgacccctggggaatgccccatggcccagaatgatgctgctagttttctactgagtgaagccattacgtctatttcttatttatgttgtaaggaactgtgtgagtctcccttgaggagcactcactcttgaaggcacacacatacacatattttcagtgaaatatattctgacttttaaac

SEQ ID NO: 162712 - DNA, 1381 bp, Homo sapiens
  Payload ID: 12061
  Gene Symbol: OSCP1
  Gene Name: organic solute carrier partner 1
  ENST ID: ENST00000433045
  CDS Start-End: 181-1185
taagctatttccctagctcctaataagggctcaaagaccccagagaaatgactcagcacctaggtgaatagcagccctttgtaagcattaacctaaccagagttgatgtgatgcttcaacttgaattcttctttggcactcctcctccctggcttacttctgaatgacatcatctccaccatgttcaatagaaagtttatggaggaattattcaagcctcaagagctctactccaagaaggccctgaggactgtctatgagcgcctggctcatgcctccattatgaaactgaaccaggccagcatggataagctctatgacctgatgaccatggctttcaaatatcaagtattgctgtgtccccgacccaaggatgtgctgctggtcactttcaatcacttggataccatcaagggattcatccgagactccccaaccatcctgcagcaagtggacgagactttgcggcagctgacagaaatatatggtggtctctctgcaggggagttccagctgatccggcagacactcctcatcttcttccaagacctgcacatccgagtatccatgtttctaaaggacaaagttcagaataataacggtcgctttgtgttgccggtgtccgggcctgttccttggggaactgaagttccaggactcatcagaatgttcaacaacaaaggtgaagaagtgaagaggatagaattcaagcatggtggaaactatgtccctgcacccaaagaaggttcttttgaactttatggagaccgagtcctgaaactgggaactaacatgtacagcgtgaatcagcctgtggaaactcatgtgtctggatcatcaaagaacttagcctcatggacccaggaaagcattgctccaaaccctcttgctaaagaagagctgaatttcttggccaggctgatgggagggatggagattaagaaacccagtggccctgagcccggattccggttgaatctctttaccaccgatgaagaagaggaacaagcagcgctaaccaggccagaagagttatcctatgaagttatcaacatacaagccacccaggaccagcaacggagcgaggagctggctcgaatcatgggggagtttgagatcacggagcagccaaggctgagcaccagcaaaggggacgatttgctcgccatgatggatgagttatagctgttctgaccaggcgtcctctgcccccagggagaggctgctggatggtgacccctggggaatgccccatggcccagaatgatgctgctagttttctactgagtgaagccattacgtctatttcttatttatgttgtaaggaactgtgtgagtctcccttgaggagcactcactcttgaaggcacacacatacaca

SEQ ID NO: 162713 - DNA, 989 bp, Homo sapiens
  Payload ID: 12061
  Gene Symbol: OSCP1
  Gene Name: organic solute carrier partner 1
  ENST ID: ENST00000445843
  CDS Start-End: 1-768
ccgggagacaaggcccgcaaagttctgaatgacatcatctccaccatgttcaatagaaagtttatggaggaattattcaagcctcaagagctctactccaagaaggccctgaggactgtctatgagcgcctggctcatgcctccattatgaaactgaaccaggccagcatggataagctctatgacctgatgaccatggctttcaaatatcaagtattgctgtgtccccgacccaaggatgtgctgctggtcactttcaatcacttggataccatcaagggattcatccgagactccccaaccatcctgcagcaagtggacgagactttgcggcagctgacagaaatatatggtggtctctctgcaggggagttccagctgatccggcagacactcctcatcttcttccaagacctgcacatccgagtatccatgtttctaaaggacaaagttcagaataataacggtcgctttgtgttgccggtgtccgggcctgttccttggggaactgaagttccaggactcatcagaatgttcaacaacaaaggtgaagaagtgaagaggatagaattcaagcatggtggaaactatgtccctgcacccaaagaaggttcttttgaactttatggagaccgagtcctgaaactgggaactaacatgtacagcgtgaatcagcctgtggaaactcatgtgtctggatcatcaaagaacttagcctcatggacccagacaagcagcgctaaccaggccagaagagttatcctatgaagttatcaacatacaagccacccaggaccagcaacggagcgaggagctggctcgaatcatgggggagtttgagatcacggagcagccaaggctgagcaccagcaaaggggacgatttgctcgccatgatggatgagttatagctgttctgaccaggcgtcctctgcccccagggagaggctgctggatggtgacccctggggaatgccccatggcccagaa

SEQ ID NO: 162714 - DNA, 505 bp, Homo sapiens
  Payload ID: 12061
  Gene Symbol: OSCP1
  Gene Name: organic solute carrier partner 1
  ENST ID: ENST00000468441
  CDS Start-End: 1-284
gatcatcaaagaacttagcctcatggacccaggaaagcattgctccaaaccctcttgctaaagaagagctgaatttcttggccaggctgatgggagggatggagattaagaaacccagtggccctgagcccggattccggttgaatctctttaccaccgatgaagaagaggaacaagcagcgctaaccaggccagaagagttatcctatgaagttatcaacatacaagccacccagtctcttttcagcaatctggccaccattcaggggggcctgactgggtgacagatgaatgggaaggttctgacctgttttgagtccggctcccaccttgctgtcacatatcagaatgtcactgctctgagtgtgtcccagggccttggaggtgggccgtgaggtgccgagaagcagccgcagcctcctccctccacctatcccagagcgatgctggtgatttcaaacgtatctgtcctatcagtaaataaacaagatgcagatctctggta

SEQ ID NO: 162715 - DNA, 281 bp, Homo sapiens
  Payload ID: 12061
  Gene Symbol: OSCP1
  Gene Name: organic solute carrier partner 1
  ENST ID: ENST00000524789
  CDS Start-End: 1-41
agaacatcccgggagacaaggcccgcaaagattttgactgagtgtcaaacactatgtgagatactatatggagcctgatgcagcccttctggacattcactggagttctgaatgacatcatctccaccatgttcaatagaaagtttatggaggaattattcaagcctcaagagctctactccaagaaggccctgaggactgtctatgagcgcctggctcatgcctccattatgaaactgaaccaggccagcatggataagctctatgacctgatgaccatg

SEQ ID NO: 162716 - DNA, 3080 bp, Homo sapiens
  Payload ID: 12062
  Gene Symbol: ORC1
  Gene Name: origin recognition complex, subunit 1
  Uniprot ID: Q13415
  ENST ID: ENST00000371566
  CDS Start-End: 145-2730
ctttggtcctggctttcggcccgtagttgtagaaggagccctgctggtgcaggttagaggtgccgcatcccccggagctctcgaagtggaggcggtaggaaacggagggcttgcggctagccggaggaagctttggagccggccatggcacactaccccacaaggctgaagaccagaaaaacttattcatgggttggcaggcccttgttggatcgaaaactgcactaccaaacctatagagaaatgtgtgtgaaaacagaaggttgttccaccgagattcacatccagattggacagtttgtgttgattgaaggggatgatgatgaaaacccgtatgttgctaaattgcttgagttgttcgaagatgactctgatcctcctcctaagaaacgtgctcgagtacagtggtttgtccgattctgtgaagtccctgcctgtaaacggcatttgttgggccggaagcctggtgcacaggaaatattctggtatgattacccggcctgtgacagcaacattaatgcggagaccatcattggccttgttcgggtgatacctttagccccaaaggatgtggtaccgacgaatctgaaaaatgagaagacactctttgtgaaactatcctggaatgagaagaaattcaggccactttcctcagaactatttgcggagttgaataaaccacaagagagtgcagccaagtgccagaaacccgtgagagccaagagtaagagtgcagagagcccttcttggaccccagcagaacatgtggccaaaaggattgaatcaaggcactccgcctccaaatctcgccaaactcctacccatcctcttaccccaagagccagaaagaggctggagcttggcaacttaggtaaccctcagatgtcccagcagacttcatgtgcctccttggattctccaggaagaataaaacggaaagtggccttctcggagatcacctcaccttctaagagatctcagcctgataaacttcaaaccttgtctccagctctgaaagccccagagaaaaccagagagactggactctcttatactgaggatgacaagaaggcttcacctgaacatcgcataatcctgagaacccgaattgcagcttcgaaaaccatagacattagagaggagagaacacttacccctatcagtgggggacagagatcttcagtggtgccatccgtgattctgaaaccagaaaacatcaaaaagagggatgcaaaagaagcaaaagcccagaatgaagcgacctctactccccatcgtatccgcagaaagagttctgtcttgactatgaatcggattaggcagcagcttcggtttctaggtaatagtaaaagtgaccaagaagagaaagagattctgccagcagcagagatttcagactctagcagtgacgaagaagaggcttccacaccgccccttccaaggagagcacccagaactgtgtccaggaacctgcgatcttccttgaagtcatccttacataccctcacgaaggtgccaaagaagagtctcaagcctagaacgccacgttgtgccgctcctcagatccgtagtcgaagcctggctgcccaggagccagccagtgtgctggaggaagcccgactgaggctgcatgtttctgctgtacctgagtctcttccctgtcgggaacaggaattccaagacatctacaattttgtggaaagcaaactccttgaccataccggagggtgcatgtacatctccggtgtccctgggacagggaagactgccactgttcatgaagtgatacgctgcctgcagcaggcagcccaagccaatgatgttcctccctttcaatacattgaggtcaatggcatgaagctgacggagccccaccaagtctatgtgcaaatcttgcagaagctaacaggccaaaaagcaacagccaaccatgcggcagaactgctggcaaagcaattctgcacccgagggtcacctcaggaaaccaccgtcctgcttgtggatgagctcgaccttctgtggactcacaaacaagacataatgtacaatctctttgactggcccactcataaggaggcccggcttgtggtcctggcaattgccaacacaatggacctgccagagcgaatcatgatgaaccgggtgtccagccgactgggtcttaccaggatgtgcttccagccctatacatatagccagctgcagcagatcctaaggtcccggctcaagcatctaaaggcctttgaagatgatgccatccagctggtagccaggaaggtagcagcactgtctggagatgcacgacggtgcctggacatctgcaggcgtgccacagagatctgtgagttctcccagcagaagcctgactcccctggcctggtcaccatagcccactcaatggaagctgtggatgagatgttttcatcatcatacatcacggccatcaaaaattcctctgttctggaacagagcttcctgagagccatcctcgcagagttccgtcgatcaggactggaggaagccacgtttcaacagatatatagtcaacatgtggcactgtgcagaatggagggactgccgtaccccaccatgtcagagaccatggccgtgtgttctcacctgggctcctgtcgcctcctgcttgtggagcccagcaggaacgatctgctccttcgggtgcggctcaacgtcagccaggatgatgtgctgtatgcgctgaaagacgagtaaaggggcttcacaagttaaaagactggggtcttgctgggttttgttttttgagacagggtcttgctctgtcgcccaggctggagtgcagtggcacgatcatggctcactgcagccttgacttctcaggcttaggtgaccccccaacctcatcctcccaggtggctgaaactacaggcacatgccaccatgcccagctgattttttgtagagacagggcttcaccatgttgccaagctagtctacaaagcatctgattttggaagtacatggaattgttgtaacaaagtatattgaatggaaatggctctcatgtattttggaattttccattaaataatttgctttttcct

SEQ ID NO: 162717 - DNA, 3157 bp, Homo sapiens
  Payload ID: 12062
  Gene Symbol: ORC1
  Gene Name: origin recognition complex, subunit 1
  Uniprot ID: Q13415
  ENST ID: ENST00000371568
  CDS Start-End: 220-2805
cggggccacgccgattggcgcgaagttttcttttctccttccaccttcttttcatttctagtgagacacacgctttggtcctggctttcggcccgtagttgtagaaggagccctgctggtgcaggttagaggtgccgcatcccccggagctctcgaagtggaggcggtaggaaacggagggcttgcggctagccggaggaagctttggagccggaagccatggcacactaccccacaaggctgaagaccagaaaaacttattcatgggttggcaggcccttgttggatcgaaaactgcactaccaaacctatagagaaatgtgtgtgaaaacagaaggttgttccaccgagattcacatccagattggacagtttgtgttgattgaaggggatgatgatgaaaacccgtatgttgctaaattgcttgagttgttcgaagatgactctgatcctcctcctaagaaacgtgctcgagtacagtggtttgtccgattctgtgaagtccctgcctgtaaacggcatttgttgggccggaagcctggtgcacaggaaatattctggtatgattacccggcctgtgacagcaacattaatgcggagaccatcattggccttgttcgggtgatacctttagccccaaaggatgtggtaccgacgaatctgaaaaatgagaagacactctttgtgaaactatcctggaatgagaagaaattcaggccactttcctcagaactatttgcggagttgaataaaccacaagagagtgcagccaagtgccagaaacccgtgagagccaagagtaagagtgcagagagcccttcttggaccccagcagaacatgtggccaaaaggattgaatcaaggcactccgcctccaaatctcgccaaactcctacccatcctcttaccccaagagccagaaagaggctggagcttggcaacttaggtaaccctcagatgtcccagcagacttcatgtgcctccttggattctccaggaagaataaaacggaaagtggccttctcggagatcacctcaccttctaagagatctcagcctgataaacttcaaaccttgtctccagctctgaaagccccagagaaaaccagagagactggactctcttatactgaggatgacaagaaggcttcacctgaacatcgcataatcctgagaacccgaattgcagcttcgaaaaccatagacattagagaggagagaacacttacccctatcagtgggggacagagatcttcagtggtgccatccgtgattctgaaaccagaaaacatcaaaaagagggatgcaaaagaagcaaaagcccagaatgaagcgacctctactccccatcgtatccgcagaaagagttctgtcttgactatgaatcggattaggcagcagcttcggtttctaggtaatagtaaaagtgaccaagaagagaaagagattctgccagcagcagagatttcagactctagcagtgacgaagaagaggcttccacaccgccccttccaaggagagcacccagaactgtgtccaggaacctgcgatcttccttgaagtcatccttacataccctcacgaaggtgccaaagaagagtctcaagcctagaacgccacgttgtgccgctcctcagatccgtagtcgaagcctggctgcccaggagccagccagtgtgctggaggaagcccgactgaggctgcatgtttctgctgtacctgagtctcttccctgtcgggaacaggaattccaagacatctacaattttgtggaaagcaaactccttgaccataccggagggtgcatgtacatctccggtgtccctgggacagggaagactgccactgttcatgaagtgatacgctgcctgcagcaggcagcccaagccaatgatgttcctccctttcaatacattgaggtcaatggcatgaagctgacggagccccaccaagtctatgtgcaaatcttgcagaagctaacaggccaaaaagcaacagccaaccatgcggcagaactgctggcaaagcaattctgcacccgagggtcacctcaggaaaccaccgtcctgcttgtggatgagctcgaccttctgtggactcacaaacaagacataatgtacaatctctttgactggcccactcataaggaggcccggcttgtggtcctggcaattgccaacacaatggacctgccagagcgaatcatgatgaaccgggtgtccagccgactgggtcttaccaggatgtgcttccagccctatacatatagccagctgcagcagatcctaaggtcccggctcaagcatctaaaggcctttgaagatgatgccatccagctggtagccaggaaggtagcagcactgtctggagatgcacgacggtgcctggacatctgcaggcgtgccacagagatctgtgagttctcccagcagaagcctgactcccctggcctggtcaccatagcccactcaatggaagctgtggatgagatgttttcatcatcatacatcacggccatcaaaaattcctctgttctggaacagagcttcctgagagccatcctcgcagagttccgtcgatcaggactggaggaagccacgtttcaacagatatatagtcaacatgtggcactgtgcagaatggagggactgccgtaccccaccatgtcagagaccatggccgtgtgttctcacctgggctcctgtcgcctcctgcttgtggagcccagcaggaacgatctgctccttcgggtgcggctcaacgtcagccaggatgatgtgctgtatgcgctgaaagacgagtaaaggggcttcacaagttaaaagactggggtcttgctgggttttgttttttgagacagggtcttgctctgtcgcccaggctggagtgcagtggcacgatcatggctcactgcagccttgacttctcaggcttaggtgaccccccaacctcatcctcccaggtggctgaaactacaggcacatgccaccatgcccagctgattttttgtagagacagggcttcaccatgttgccaagctagtctacaaagcatctgattttggaagtacatggaattgttgtaacaaagtatattgaatggaaatggctctcatgtattttggaattttccattaaataatttgctttttcctga

SEQ ID NO: 162718 - DNA, 4312 bp, Homo sapiens
  Payload ID: 12063
  Gene Symbol: ORC2
  Gene Name: origin recognition complex, subunit 2
  Uniprot ID: Q13416
  ENST ID: ENST00000234296
  CDS Start-End: 251-1984
gtgccgcacgcaggcttcccatcccccagctggcctccggtgctccttacctccccggtggtcgggcgcgaattactggaaattggcttttcccgttggggccgaaggtaccttccctgcggcggcgactcagcggggtgtcgttcggccggcgtgacgcagccggatcggcgccagacggaaacctagcggtgactgtatctgaattttgcagctgcagaatgtgtagtaccttaaaaggttggcaacaatgagtaaaccagaattaaaggaagacaagatgctggaggttcactttgtgggagatgatgatgttcttaatcacattctagatagagaaggaggagctaaattgaagaaggagcgagcgcagcttttggtcaaccccaaaaaaataataaagaagccagaatatgatttggaggaagatgaccaggaggtcttaaaagatcagaactatgtggaaattatgggaagagatgttcaagaatcattgaaaaatggctctgctacaggtggtggaaataaagtttattcttttcagaatagaaaacactctgaaaagatggctaaattagcttcagaactagcaaaaacaccacaaaaaagtgtttcattcagtttgaagaatgatcctgagattacgataaacgttcctcaaagtagcaagggccattctgcttcagacaaggttcaaccgaagaacaatgacaaaagtgaatttctgtcaacagcacctcgtagtctaagaaaaagattaatagttccaaggtctcattctgacagtgaaagcgaatattctgcttccaactcagaggatgatgaaggggttgcacaggaacatgaagaggacactaatgcagtcatattcagccaaaagattcaagctcagaatagagtagtttcagctcctgttggcaaagaaacaccttctaagagaatgaaaagagataaaacaagtgacttagtagaagaatattttgaagctcacagcagttcaaaagttttaacctctgatagaacactgcagaagctaaagagagctaaactggatcagcaaactttgcgtaacttattgagcaaggtttccccttccttttctgccgaacttaaacaactaaatcaacagtatgaaaaattatttcataaatggatgctgcaattacaccttgggttcaacattgtgctttatggtttgggttctaagagagatttactagaaaggtttcgaaccactatgctgcaagattccattcacgttgtcatcaatggcttctttcctggaatcagtgtgaaatcagtcctgaattctataacagaagaagtcctcgatcatatgggtactttccgcagtatactggatcagctagactggatagtaaacaaatttaaagaagattcttctttagaactcttccttctcatccacaatttggatagccagatgttgagaggagagaagagccagcaaatcattggtcagttgtcatctttgcataacatttaccttatagcatccattgaccacctcaatgctcctctcatgtgggatcatgcaaagcagagtctttttaactggctctggtatgaaactactacatacagtccttatactgaagaaacctcctatgagaactctcttctggtaaagcagtctggatccctgccacttagctcccttactcatgtcttacgaagccttacccctaatgcaaggggaattttcaggctactaataaaataccagctggacaaccaggataacccttcttacattggcctttcttttcaagatttttaccagcagtgtcgggaggcattcctcgtcaatagtgatctgacactccgggcccagttaactgaatttagggaccacaagcttataagaacaaagaagggaactgatggagtagagtatttattaattcctgttgataatggaacattgactgatttcttggaaaaggaagaagaggaggcttgaagctttcctttattcttgaatctcccatggaagggttgtaccccagctgccactcctctagttgaaagtgttgtgtttacatctgacattaaattatttttccagcatacaagatttaaatttgggaagggggggatgtcctcaattagaactttttgatcagcctggctggtaccgtctagtactatgcagcggtcctcaagttggagaaaatgtgcctttcattcattacctctctggagacttcttgctggaatgaacagtgtgctcagggactatttggaactggatgtttttgaattattttatacttagagatattctgaattttttgagggccttttaacactccccgagctgattgtttgcaagtgtgtttgttccagagtgtggaagtataaagacatgggcatcacgtaaattggttttgtttgctattctgtgtgtcagaaccaacgagtgtaatggagagggcaggtcatctcttattgtttctaaaacaacttaaaaggtgtagattgggaagaggtgagtgatccagctttctccttttggattgaggctatgtacttggtgggggcaggggagggaatatattataatactattcagttgggataatgggaaaaacagagtatatagggtatctacccagcctagaaagcacaggaacaatacgtcatatatttggaacagttattgtctgtgccatgaccttcatgataccagtgagaagccaggctagagaaataaaatcctgaattacattttagtaattgttttcaagacaacaaaaaataaaacatttcattattcttgtatattgacatatttttcttttcttgaacaacatgcaggtgagtagcatattaatggctggctgtaaattaattttgattcctctgtcaagtagacctaaaactcactgtaagatatttcagttttttccttaaagtgatgatttcaaacctcctgaatatttgcgcgagacttttttcttaggaaagaaaaaaggctcaccttggctactgttgtcagcttacagtcatcacataccccctgaaatatttgacacttggaaatgaagttcttcctgaaaatatcactgcaataaaatacgtactacgtcagcatttctcactcatttcttatcttgtaaacctctttcatgaaaatatttccaaaaatccttggaatttttaaataatttttcttgtggcatataattaagtaattttggccaggcataatggcttatgcctgtaatcacaacactttgggaggccaaggcaggaggatctctggagcccaggagtttaagaacagcctgggcaacatagtgagaccttgtctctacaaaaaatttaaaaaatcatccgggcatggtggcccatgcctatagtcctagctgctgtggaggctgaggcaggaggatcgcttgagcccaggggttcaagattacagtgagctatgattgtgccactgcacttcagtctgggtgcagagcaagaccttgtctttttttttttttaaatcatttttttaaaaagtaattttatgttaagtccatgggcttagtctttttttttttttttttttttttagatggaattgcactgtcatccagtctagagtgcagtggcgtgatctaagcttacagcagcctccacctcctgggttcaagtgattcttgtgcctcagcctcctgagctgggactacaggcacacgccaccacgcctggctagtttttgaatttttagcagagatggggtttcaccatgttggccaggctggtctcgaattcctgacctcaagtgatcctgcctcggcctcccaaagtactgggatcaggggtgagccactatgcctggccaagggcttagtcttaaatataacctctagtcaaaatgtttaaacaaatttgtacataaatgtgatttaaaaaaatttttttaatagtaccaaaggatattcagtgaaagtgagtttcctgcccactccctgatccacccagttctttaggcaaccactgatagcattttcttaagtattcttccagatatcgtctatgcatatgtaaaagtatctgtctttctccttttaaaaacacaattggtaatatatcatacttgctggtttgcaccttgctttttttgcttaatatatctagtttataatgacctaatgtgcaaatttttgcatctgccctaaatatctactggtttatttttataatttttgtgtctatactatttgcaagcagtatgtgtcagtagactttattattaataaataaaaagccaatttggatagaatcactttataaa

SEQ ID NO: 162719 - DNA, 546 bp, Homo sapiens
  Payload ID: 12063
  Gene Symbol: ORC2
  Gene Name: origin recognition complex, subunit 2
  ENST ID: ENST00000410039
  CDS Start-End: 219-546
aagtcgcgcatctcaggactttccctcggcacttggggcatggtctttgcgcctcgctgccccccgcaggctgcccgggggctcgagaacccttactggtggagcgcagccaactggccagaggctggaggcgcaggccaaagtcctttaagacttgaggtgactgtatctgaattttgcagctgcagaatgtgtagtaccttaaaaggttggcaacaatgagtaaaccagaattaaaggaagacaagatgctggaggttcactttgtgggagatgatgatgttcttaatcacattctagatagagaaggaggagctaaattgaagaaggagcgagcgcagcttttggtcaaccccaaaaaaataataaagaagccagaatatgatttggaggaagatgaccaggaggtcttaaaagatcagaactatgtggaaattatgggaagagatgttcaagaatcattgaaaaatggctctgctacaggtggtggaaataaagtttattcttttcagaatagaaaacactctgaaaagatggctaaattag

SEQ ID NO: 162720 - DNA, 486 bp, Homo sapiens
  Payload ID: 12063
  Gene Symbol: ORC2
  Gene Name: origin recognition complex, subunit 2
  ENST ID: ENST00000457595
  CDS Start-End: 270-486
agaggctggaggcgcaggccaaagtcctttaagacttgaggtgagaggctcactctgggaggacctttcgttagtctgccccgcagttataggccttttgtgcaagggacgcctgatactaacctacctgattcccagcttacgaagccctctggttggaaaaggagaactgtgaagatgtgtaacgacagtggtaaagtgccctgtgaggtgactgtatctgaattttgcagctgcagaatgtgtagtaccttaaaaggttggcaacaatgagtaaaccagaattaaaggaagacaagatgctggaggttcactttgtgggagatgatgatgttcttaatcacattctagatagagaaggaggagctaaattgaagaaggagcgagcgcagcttttggtcaaccccaaaaaaataataaagaagccagaatatgatttggaggaagatgaccaggaggtcttaaaagatcagaactatgtggaaa

SEQ ID NO: 162721 - DNA, 2501 bp, Homo sapiens
  Payload ID: 12064
  Gene Symbol: ORC3
  Gene Name: origin recognition complex, subunit 3
  Uniprot ID: Q9UBD5
  ENST ID: ENST00000257789
  CDS Start-End: 35-2173
gagtgcatctggaatacgcagagtcagtaagaccatggctacgtcctcgatgtctaagggttgctttgtttttaagccaaactccaaaaagagaaagatctctctgccaatagaggactattttaacaaagggaaaaatgagcctgaggacagtaagcttcgattcgaaacttatcagttgatatggcagcagatgaaatctgaaaatgagcgactacaagaggaattaaataaaaacttgtttgacaatctgattgaatttctgcaaaaatcacattctggattccagaagaattcaagagacttgggcggtcaaataaaactcagagaaattccaactgctgctcttgttcttggtgtgaatgtcacagatcatgatttgacattcggaagtctaacagaggcccttcagaataatgtcacaccatatgtagtctcattgcaagctaaagattgtccagatatgaaacattttttgcaaaagttgatctcacagttgatggactgctgtgtagatataaaatccaaagaggaggaaagtgttcacgtcacccaaagaaagacacattattcaatggattcactttccagttggtatatgactgtcacacagaagacggacccaaaaatgctaagcaaaaaaaggactacttctagccaatggcagtctcctcctgttgtcgttatcttgaaggatatggaaagctttgccacaaaagtactacaagacttcataattatcagcagtcaacatctccatgaatttccactaatactcatttttggaatagccacatctcctattatcatccaccgattgcttcctcatgcagtatcatctctattgtgcatagaactgttccaatctttgtcttgtaaggagcacctgactacggtactcgataagctacttcttacaactcagtttccctttaaaataaatgaaaaagtattacaggttctgaccaacatctttttgtatcatgatttctcagttcaaaactttataaaaggacttcagctttctctattagagcatttctattcccagcccttaagtgtcctgtgctgtaatcttccagaagccaaaagaagaataaattttttatcaaataatcaatgtgaaaacatccgacgtctaccatcttttaggaggtacgtggaaaagcaagcttcagaaaagcaagttgcgctcttgaccaatgagagatatttgaaggaggaaacacaattattactagaaaacctgcatgtttatcatatgaattacttcctggttttgagatgtcttcataagttcacctcttctcttcccaagtatccactaggtcgacagatcagagagttgtactgtacatgtttagaaaagaacatatgggattcagaggagtatgcatcagtcttgcagctgctgaggatgttggcaaaggatgaactgatgaccatacttgagaaatgtttcaaggtttttaagtcttattgtgaaaaccaccttggcagcacagctaagagaatagaggagttcctggcccagtttcagagcctcgatgcagaaaccaaagaggaagaagatgcttctgggtcacagccaaaggggcttcagaagacagacctctatcatcttcagaagtccttattggaaatgaaggagttaagaagaagtaagaagcaaaccaaatttgaagtactcagagaaaatgttgtgaacttcattgactgtctagtgagagaataccttctgcctcctgagacacagcctctccatgaggtggtgtacttcagtgctgcccatgcccttcgtgagcatttaaatgctgctccgcgaattgccctccatactgcactcaacaatccttactattatctcaagaatgaagcactgaaaagcgaagaaggctgcattccgaatatcgccccagacatctgcatagcatacaaactgcacctagagtgtagcaggctcatcaacctcgtggactggtcagaggcttttgcaacagttgtgacagctgctgaaaaaatggatgcaaattctgcaacctcagaagaaatgaatgaaattatccatgctcggtttattagagctgtttctgaactagaacttttaggatttataaaacctaccaaacagaagactgaccatgtggcaagactaacatggggaggctgctagaaagcaaataagcaaagccagaactatcacatttagcttaagagaaaaaggtgaccagtcatatttacatatattagaggagcctgttttgttgagaagataaatgtgtaacccccattgatgtttaaccagaaaagtacattgctaaccccaaacaggcatgtatcaaaacacctgtggagtactttagactccaacaaataataatgtaactaaaactgctcacacattttactgtactttccaaagtcattactaaattgtgagtaaatcattcttgaacttagagtatgtaaatgtaataaattccgttatccaggagtataaa

SEQ ID NO: 162722 - DNA, 2512 bp, Homo sapiens
  Payload ID: 12064
  Gene Symbol: ORC3
  Gene Name: origin recognition complex, subunit 3
  Uniprot ID: Q9UBD5
  ENST ID: ENST00000392844
  CDS Start-End: 49-2184
gcgcgggaaatcccgagtgcatctggaatacgcagagtcagtaagaccatggctacgtcctcgatgtctaagggttgctttgtttttaagccaaactccaaaaagagaaagatctctctgccaatagaggactattttaacaaagggaaaaatgagcctgaggacagtaagcttcgattcgaaacttatcagttgatatggcagcagatgaaatctgaaaatgagcgactacaagaggaattaaataaaaacttgtttgacaatctgattgaatttctgcaaaaatcacattctggattccagaagaattcaagagacttgggcggtcaaataaaactcagagaaattccaactgctgctcttgttcttggtgtgaatgtcacagatcatgatttgacattcggaagtctaacagaggcccttcagaataatgtcacaccatatgtagtctcattgcaagctaaagattgtccagatatgaaacattttttgcaaaagttgatctcacagttgatggactgctgtgtagatataaaatccaaagaggaggaaagtgttcacgtcacccaaagaaagacacattattcaatggattcactttccagttggtatatgactgtcacacagaagacggacccaaaaatgctaagcaaaaaaaggactacttctagccaatggcagtctcctcctgttgtcgttatcttgaaggatatggaaagctttgccacaaaagtactacaagacttcataattatcagcagtcaacatctccatgaatttccactaatactcatttttggaatagccacatctcctattatcatccaccgattgcttcctcatgcagtatcatctctattgtgcatagaactgttccaatctttgtcttgtaaggagcacctgactacggtactcgataagctacttcttacaactcagtttccctttaaaataaatgaaaaagtattacaggttctgaccaacatctttttgtatcatgatttctcagttcaaaactttataaaaggacttcagctttctctattagagcatttctattcccagcccttaagtgtcctgtgctgtaatcttccagaagccaaaagaagaataaattttttatcaaataatcaatgtgaaaacatccgacgtctaccatcttttaggaggtacgtggaaaagcaagcttcagaaaagcaagttgcgctcttgaccaatgagagatatttgaaggaggaaacacaattattactagaaaacctgcatgtttatcatatgaattacttcctggttttgagatgtcttcataagttcacctcttctcttcccaagtatccactaggtcgacagatcagagagttgtactgtacatgtttagaaaagaacatatgggattcagaggagtatgcatcagtcttgcagctgctgaggatgttggcaaaggatgaactgatgaccatacttgagaaatgtttcaaggtttttaagtcttattgtgaaaaccaccttggcagcacagctaagagaatagaggagttcctggcccagtttcagagcctcgatgaaaccaaagaggaagaagatgcttctgggtcacagccaaaggggcttcagaagacagacctctatcatcttcagaagtccttattggaaatgaaggagttaagaagaagtaagaagcaaaccaaatttgaagtactcagagaaaatgttgtgaacttcattgactgtctagtgagagaataccttctgcctcctgagacacagcctctccatgaggtggtgtacttcagtgctgcccatgcccttcgtgagcatttaaatgctgctccgcgaattgccctccatactgcactcaacaatccttactattatctcaagaatgaagcactgaaaagcgaagaaggctgcattccgaatatcgccccagacatctgcatagcatacaaactgcacctagagtgtagcaggctcatcaacctcgtggactggtcagaggcttttgcaacagttgtgacagctgctgaaaaaatggatgcaaattctgcaacctcagaagaaatgaatgaaattatccatgctcggtttattagagctgtttctgaactagaacttttaggatttataaaacctaccaaacagaagactgaccatgtggcaagactaacatggggaggctgctagaaagcaaataagcaaagccagaactatcacatttagcttaagagaaaaaggtgaccagtcatatttacatatattagaggagcctgttttgttgagaagataaatgtgtaacccccattgatgtttaaccagaaaagtacattgctaaccccaaacaggcatgtatcaaaacacctgtggagtactttagactccaacaaataataatgtaactaaaactgctcacacattttactgtactttccaaagtcattactaaattgtgagtaaatcattcttgaacttagagtatgtaaatgtaataaattccgttatccaggagtataaa

SEQ ID NO: 162723 - DNA, 2470 bp, Homo sapiens
  Payload ID: 12064
  Gene Symbol: ORC3
  Gene Name: origin recognition complex, subunit 3
  Uniprot ID: Q9UBD5
  ENST ID: ENST00000546266
  CDS Start-End: 434-2140
caatcaaggagccgtgtggctcgccactaacctctgccctgcagccgcgagggcgcgcgggaaatcccgagtgcatctggaatacgcagagtcagtaagaccatggctacgtcctcgatgtctaagggttgctttgtttttaagccaaactccaaaaagagaaagatctctctgccaatagcgactacaagaggaattaaataaaaacttgtttgacaatctgattgaatttctgcaaaaatcacattctggattccagaagaattcaagagacttgggcggtcaaataaaactcagagaaattccaactgctgctcttgttcttggtgtgaatgtcacagatcatgatttgacattcggaagtctaacagaggcccttcagaataatgtcacaccatatgtagtctcattgcaagctaaagattgtccagatatgaaacattttttgcaaaagttgatctcacagttgatggactgctgtgtagatataaaatccaaagaggaggaaagtgttcacgtcacccaaagaaagacacattattcaatggattcactttccagttggtatatgactgtcacacagaagacggacccaaaaatgctaagcaaaaaaaggactacttctagccaatggcagtctcctcctgttgtcgttatcttgaaggatatggaaagctttgccacaaaagtactacaagacttcataattatcagcagtcaacatctccatgaatttccactaatactcatttttggaatagccacatctcctattatcatccaccgattgcttcctcatgcagtatcatctctattgtgcatagaactgttccaatctttgtcttgtaaggagcacctgactacggtactcgataagctacttcttacaactcagtttccctttaaaataaatgaaaaagtattacaggttctgaccaacatctttttgtatcatgatttctcagttcaaaactttataaaaggacttcagctttctctattagagcatttctattcccagcccttaagtgtcctgtgctgtaatcttccagaagccaaaagaagaataaattttttatcaaataatcaatgtgaaaacatccgacgtctaccatcttttaggaggtacgtggaaaagcaagcttcagaaaagcaagttgcgctcttgaccaatgagagatatttgaaggaggaaacacaattattactagaaaacctgcatgtttatcatatgaattacttcctggttttgagatgtcttcataagttcacctcttctcttcccaagtatccactaggtcgacagatcagagagttgtactgtacatgtttagaaaagaacatatgggattcagaggagtatgcatcagtcttgcagctgctgaggatgttggcaaaggatgaactgatgaccatacttgagaaatgtttcaaggtttttaagtcttattgtgaaaaccaccttggcagcacagctaagagaatagaggagttcctggcccagtttcagagcctcgatgaaaccaaagaggaagaagatgcttctgggtcacagccaaaggggcttcagaagacagacctctatcatcttcagaagtccttattggaaatgaaggagttaagaagaagtaagaagcaaaccaaatttgaagtactcagagaaaatgttgtgaacttcattgactgtctagtgagagaataccttctgcctcctgagacacagcctctccatgaggtggtgtacttcagtgctgcccatgcccttcgtgagcatttaaatgctgctccgcgaattgccctccatactgcactcaacaatccttactattatctcaagaatgaagcactgaaaagcgaagaaggctgcattccgaatatcgccccagacatctgcatagcatacaaactgcacctagagtgtagcaggctcatcaacctcgtggactggtcagaggcttttgcaacagttgtgacagctgctgaaaaaatggatgcaaattctgcaacctcagaagaaatgaatgaaattatccatgctcggtttattagagctgtttctgaactagaacttttaggatttataaaacctaccaaacagaagactgaccatgtggcaagactaacatggggaggctgctagaaagcaaataagcaaagccagaactatcacatttagcttaagagaaaaaggtgaccagtcatatttacatatattagaggagcctgttttgttgagaagataaatgtgtaacccccattgatgtttaaccagaaaagtacattgctaaccccaaacaggcatgtatcaaaacacctgtggagtactttagactccaacaaataataatgtaactaaaactgctcacacattttactgtactttccaaagtcattactaaattgtgagtaaatcattcttgaacttagagtatgtaaatgtaataaattccgttatccaggagtataaatt

SEQ ID NO: 162724 - DNA, 562 bp, Homo sapiens
  Payload ID: 12064
  Gene Symbol: ORC3
  Gene Name: origin recognition complex, subunit 3
  ENST ID: ENST00000508875
  CDS Start-End: 465-562
ctgggaggcagaggttgcggtgagccgagatcacgccattgcaccctagcctgagcaacaagagcaaaactgcgtctcaaagaaaaaacaaaaaaagaataagaggactaataactatttgaatccctggcagtttacatctgagtaccttctccaagtgacacattaagagttatgactaatgaagtttgcttccaaagttatatgaaataatgccctcttttttggtctcctggataataggctaggtttggccttccttgatattcagttatttggagctcaaagtggacaagagctgttgctgcccctatcctgggaagctaatccttcacatgctgctaacttgggttagatcttctgccagcagaacctcacccgtctttcccctccaagcaagtcagtgccggtgattccttggacaccagaaatgctaatcttgtctatttgaataggcctaaaggatgttggcaaaggatgaactgatgaccatacttgagaaatgtttcaaggtttttaagtcttattgtgaaaaccaccttggcagcacagctaagagaat

SEQ ID NO: 162725 - DNA, 6598 bp, Homo sapiens
  Payload ID: 12065
  Gene Symbol: ORC4
  Gene Name: origin recognition complex, subunit 4
  Uniprot ID: O43929
  ENST ID: ENST00000264169
  CDS Start-End: 175-1485
gaggaggaggcgaaggaggaggaggagagctggggaagtggctgctcctgggtgtagtgagatgtctccagccagggccaagcagcagcagtagcagcagcagcagtagcagcagcagcagcaacagcagcagcagcagcaacagcagcagcaaagggatttgaatttgttgaaatgagcagtcgtaaatcaaagagtaacagcttaattcacacagagtgcctttcacaggtacaaagaattttacgtgaaagattttgtcgtcagagtccacatagtaacctatttggagtgcaagtacaatacaaacacttaagtgagctgctgaaaagaactgctctccatggagagagtaactctgtccttattatcggaccccgaggatcaggaaaaactatgttaataaatcatgctttgaaagaactcatggaaatagaagaagtgagtgaaaatgtattacaagttcacttaaatggactgctgcagatcaatgacaaaatcgccctaaaggaaatcacaaggcagttaaatctggaaaatgtagttggagataaagtttttggaagctttgctgaaaacctttcatttcttctggaagctttaaaaaaaggtgaccgaactagcagttgcccagtgatcttcatattagatgaatttgatctttttgctcatcataaaaaccaaacacttctctataatctttttgacatttctcagtctgcacagaccccaatagcagttattggtcttacatgtagattggatattttggaactcttagaaaaaagagtgaagtcaagattttctcaccggcagatacacttaatgaattcatttggttttccacagtatgttaaaatatttaaagaacagttatctctacctgcagagtttccagacaaggtttttgctgagaagtggaatgaaaatgttcagtatctctcagaagatagaagtgtgcaagaagtactacagaagcatttcaatatcagcaaaaacctgcggtcattacacatgctattgatgcttgctttaaatcgagtaacagcatcgcacccatttatgactgccgtagatctaatggaagcaagccaactgtgtagcatggactcgaaagcaaatattgtacatggtctatcagtcttggaaatctgtcttataatagcaatgaaacatttaaatgacatctatgaggaagagccatttaattttcaaatggtctataatgagtttcagaagtttgttcaaaggaaagcacattccgtttataattttgaaaaacctgttgtcatgaaggcttttgaacacttgcagcaattagaattaataaagcccatggaaagaacttcaggaaattcacagagagagtaccagctgatgaaactgcttttggataatactcaaattatgaatgctctgcagaaatatcccaactgtcctacagatgtgaggcagtgggcaacatcctcactaagctggttatgaatataaccagtgacttcaactttggcatttcattcatacttctgtagagaacggaaaactattgtccattaacatgatatgctaaacattctataaacattcttgtatttatgtgagacttgcccatctactgtcttggctgtgtcttgccttttaatcatgaacagttacatgatttataatttcactgattgagattactttgtaagtagctgttcagaagaataaaatatgactgttttagggactagaccatgtgcttttttaacacttatatatataatggtctatttgaagagctcacttcaacctaacagctagatgtctttacaaaccttaaaccaaaggagtaaaaaaaacaatggtaagcactgaagtataataagtaacctttggtacagcaggtttgctgcagtgtttttttctgtccacatgcaaattttggattctatcccagacccaggttttctagttcagaagactaaccagcttagtcagaagatggttccatggaagaaaaaggccaaggagtttgaagatttttcttctagacatctcaaaatgtggtactcataccatccacatcagaatcccttgtaggattttctaaaattacagattgttgagcctaccataggtcaaaaggactggaattttccttcttaacaagtatagtcatggcaccacgtaacattttggtcaatgacattgtataaagggtggtctcataagattataccatatttttactgtaccttttctatgtctaaatatacaaatgttttaccattgtgttacagttgcctacagtatgattacagtaacattctgtacagtgctatagctgaagagtaataggctaggctatctgtatagcctaagtgtgtaacaggctatatacatatcatcagggtctgtgtaagtatactctgtgatgttcatacagtgatgaaatcacccaaagacacatttctcagaacgtagccccatcatgaagtgacgtgactaccagagatttctggaaaagcactcccaaaagtaatgagatgtgtatggcaatgttaactgaacctgtttgtattaaaaagtaaatccctatgaggaatgtggaaatgtccgtcaaagcattgtcttttaagtaagttccaagatccatgaattaacagaggcatatatttaaaatgaaatttaatgagcacttagtgacttcatttgttcaagaatatttgatttcctattgtgtgcatgggaggtttacaaaagacagactgtccctatgcttgtgcagcttacaatctatttaactattagaggccctgtgagatgtaggcagttatttacagatgagaaaactaacacagcagtggcaatgctgggaatggccaacaggcttggaattcaactcagtttagcaccaaagccagtgctattaagacctgaagttcaacagtggattccttaccaaatagtttttaaagtatgctctaaggaacaatgttttaatgaaatcttggatacaaagtggaataaaaggtttctgagcataaagtagctcttcagtagttacaacctattcttttgcatacatagcctttccttccctgcaaaaagttaagcctgctaagtattcagatccctgtcatttacttctcagcagtctcattcaagctaaggcttgcatactcaatctgtgccgtagtctacacatttttaggggatatttcaccaaaatacttgacatggtaacatcactattatatactagaagcaagaattttacacttatgctctaagtgatccttttaaaaattttctgaactatttgaggaaagtattatttgtcttaaagggtaacagcctcatgaaatgacttgaggattccaatttcttattagcttaagatgtcacttaaaagctgacagccctcatctgtctcattggctacataagagctgcagaagatccatcaataaccaagtataaagaaagattttaagactaagtaccaattgaggtaaacatgaaaccgttataaagcaaattaaaaaaaaatacattaggaaaagttacacaaatgaagtgtacgcctattatattcccaaggcatttttgtggggaggaacagtgctgcttgttggcctttccatattccctcatacaaaaatgctaaaatctattcgcaagagttttgagctaacttcgtctcttaaattgctttaattgtcatcaataaaaacaaatatgaaaaaccctagtttaaaaagcggttcaagaataatgtaaacttatacatatagcttattttcttcatttactagaggaggaaaaatagaaccaaaaaatgcatgaactcctgcttttcaatctgattacctcaaactgaaaagcaggtgaaaggaggaatatttcagtgtgtttttacatctgaatccaagggatccaagtggcccagcagaaacggaattcttgttaaaatgactgattctcgtgcatgtgaaaggctctggggaatgaatacctgtttggtccaaacttactgtatcataatgctgtatatgttgaaaacgtaatacctgttaatgtcctaatgaatcacgttttgcagaaaacaccgtaagaaacacttcagtctttctgtagtttccatgcatatttcaccatggttcgcactctgatcctcatctggtttagaaagcaattcagtttctttcaaaccaccataacctaagtgctgccccatccttcacctttaccctagaaaatctgagaatccattggtgtgtactgtgtgacacaatgccaacaagcctctggtttctaatactggcaggaccaacacacatactttagtgggaatataatctgtttagacgataatagagggaaatgccataattaacaaatctcccttcactcaccactatcctcattcttgcagttgtcaaggtgtaagcctcactgtaagttacaaagctaccactcccctctttaagaacacatagcttaggattgccttggcgatgtgggctcttttttggttccatatgaacttaagtagttttttccaattctgtgaagaaagtcattggtagcttgatggggatggcattgaatctgtaaattaccttgggcagtatggccattttcacaatattgattcttcctacccaagagcatggaatgttcttccatttgtttgtatcctcttttatttccttgagcagtagcttgtagttctccttgaagaggtccttcacatcccttgtaagttggattcctaggtattttattctctttgaagcaattgtgaatgggagttcactcatgatttggctctctgtttgtctgttgttggtgtataagaatgcttgtgatttttgtacattgattttgtatcctgagactttgctgaagttgcttatcagcttaaggagattttgggctgagacgatggggttttctagatatacaatcatgtcgtctgcaaacggacaatttgacttcctcttttcctaattgaataccctttatttccttctcctgcctaattgccctggccagaacttccaacactatgttgaatacgagtggtgagagagggcatccctgtcttgtgccagttttcaaagggaatgcttccagtttttgcccattcagtatgatattggctgtgggtttgtcatagatagctcttattattttgaaatacaccccatcaatccctaatttattgagagtttttagcatgaagggttgttgaattttgtcaaaggctttttctgcatctattgagataatcatgtgttttttgtctttggctctgtttatatgctggattacattcattgatttgcgtatattgaaccagccttgcatcccagggatgaagcccacttgatcatggtggataagctttttgatgtgctgctggattcgttttgccagtattttatccagttagaatggcaatcattaaaaagtcaggaaacaacaggtgctggagaggatgtggagaaataggaacactttcacactgttggtgggactgtaaactagttcaaccattgtggaagtcagtgtggcgattcctcagggatctagaactggaaacaccatttgacccagccatcccattactgggtatatacccaaaggactataaatcatgctgctataaagacacatgcacacgtatgtttattgtggcattattcacaatagcaaagacttggaaccaacccaaatgtccaacaatgatagactggattaagaaaacgtggcacatatacaccatggaatactatgcagccataaaaaatgatgagttcatgtcctttgtagggacatggatgaaattggaaatcatcattctcagtaaactatcacaagaacaaaaaaccaaacaccgcatattctcactcataggtgggaattgaacaatgagatcacatggacacaggaaggggaatatcacactctggggactgttgtggggtggggggatgggggagggatagcattaggagatatacctaatgctagatgacgagttagtgggtgcagcgcaccagcatggcacatgtatacctatgtaactaacctgcacaatgtgcacatgtaccctaaaacttaaagtataaaaaaaaaaaaaaacatagctaaagaaaaactgcatatgcaaatcataccgtattcatttttttatttaacttggggatggaatggggatagcatacattttatttgtacaatatttaacaatcacttatccaaggtggggttttatggggattttaagctttctgttaaatacttgcagaaaaaatagcaagtacgatttgacagtagtacaataacctgtgcccaaaacacaagaaatacagagtaaagcgaaaataactgcttaccaatattctgagaggtaacaaatgggatatgggttgagactgcataaaaaacgtactgctggttgaatatctgaggtaaatgatgttcaatcaagatgctacttgtatcattttgcccataaatggataaataattttatgcatatcataccaaatgttcctaaaaagtaatctttcaaaaaagtataaaagagaaactggaaagt

SEQ ID NO: 162726 - DNA, 6530 bp, Homo sapiens
  Payload ID: 12065
  Gene Symbol: ORC4
  Gene Name: origin recognition complex, subunit 4
  Uniprot ID: O43929
  ENST ID: ENST00000392857
  CDS Start-End: 109-1419
gtccgcagcggcaggtgaagtctagcagaggacgcggccaggcgattcggtgaagcgattcctgcaggcgttggttcccctctttgacctggatttgaatttgttgaaatgagcagtcgtaaatcaaagagtaacagcttaattcacacagagtgcctttcacaggtacaaagaattttacgtgaaagattttgtcgtcagagtccacatagtaacctatttggagtgcaagtacaatacaaacacttaagtgagctgctgaaaagaactgctctccatggagagagtaactctgtccttattatcggaccccgaggatcaggaaaaactatgttaataaatcatgctttgaaagaactcatggaaatagaagaagtgagtgaaaatgtattacaagttcacttaaatggactgctgcagatcaatgacaaaatcgccctaaaggaaatcacaaggcagttaaatctggaaaatgtagttggagataaagtttttggaagctttgctgaaaacctttcatttcttctggaagctttaaaaaaaggtgaccgaactagcagttgcccagtgatcttcatattagatgaatttgatctttttgctcatcataaaaaccaaacacttctctataatctttttgacatttctcagtctgcacagaccccaatagcagttattggtcttacatgtagattggatattttggaactcttagaaaaaagagtgaagtcaagattttctcaccggcagatacacttaatgaattcatttggttttccacagtatgttaaaatatttaaagaacagttatctctacctgcagagtttccagacaaggtttttgctgagaagtggaatgaaaatgttcagtatctctcagaagatagaagtgtgcaagaagtactacagaagcatttcaatatcagcaaaaacctgcggtcattacacatgctattgatgcttgctttaaatcgagtaacagcatcgcacccatttatgactgccgtagatctaatggaagcaagccaactgtgtagcatggactcgaaagcaaatattgtacatggtctatcagtcttggaaatctgtcttataatagcaatgaaacatttaaatgacatctatgaggaagagccatttaattttcaaatggtctataatgagtttcagaagtttgttcaaaggaaagcacattccgtttataattttgaaaaacctgttgtcatgaaggcttttgaacacttgcagcaattagaattaataaagcccatggaaagaacttcaggaaattcacagagagagtaccagctgatgaaactgcttttggataatactcaaattatgaatgctctgcagaaatatcccaactgtcctacagatgtgaggcagtgggcaacatcctcactaagctggttatgaatataaccagtgacttcaactttggcatttcattcatacttctgtagagaacggaaaactattgtccattaacatgatatgctaaacattctataaacattcttgtatttatgtgagacttgcccatctactgtcttggctgtgtcttgccttttaatcatgaacagttacatgatttataatttcactgattgagattactttgtaagtagctgttcagaagaataaaatatgactgttttagggactagaccatgtgcttttttaacacttatatatataatggtctatttgaagagctcacttcaacctaacagctagatgtctttacaaaccttaaaccaaaggagtaaaaaaaacaatggtaagcactgaagtataataagtaacctttggtacagcaggtttgctgcagtgtttttttctgtccacatgcaaattttggattctatcccagacccaggttttctagttcagaagactaaccagcttagtcagaagatggttccatggaagaaaaaggccaaggagtttgaagatttttcttctagacatctcaaaatgtggtactcataccatccacatcagaatcccttgtaggattttctaaaattacagattgttgagcctaccataggtcaaaaggactggaattttccttcttaacaagtatagtcatggcaccacgtaacattttggtcaatgacattgtataaagggtggtctcataagattataccatatttttactgtaccttttctatgtctaaatatacaaatgttttaccattgtgttacagttgcctacagtatgattacagtaacattctgtacagtgctatagctgaagagtaataggctaggctatctgtatagcctaagtgtgtaacaggctatatacatatcatcagggtctgtgtaagtatactctgtgatgttcatacagtgatgaaatcacccaaagacacatttctcagaacgtagccccatcatgaagtgacgtgactaccagagatttctggaaaagcactcccaaaagtaatgagatgtgtatggcaatgttaactgaacctgtttgtattaaaaagtaaatccctatgaggaatgtggaaatgtccgtcaaagcattgtcttttaagtaagttccaagatccatgaattaacagaggcatatatttaaaatgaaatttaatgagcacttagtgacttcatttgttcaagaatatttgatttcctattgtgtgcatgggaggtttacaaaagacagactgtccctatgcttgtgcagcttacaatctatttaactattagaggccctgtgagatgtaggcagttatttacagatgagaaaactaacacagcagtggcaatgctgggaatggccaacaggcttggaattcaactcagtttagcaccaaagccagtgctattaagacctgaagttcaacagtggattccttaccaaatagtttttaaagtatgctctaaggaacaatgttttaatgaaatcttggatacaaagtggaataaaaggtttctgagcataaagtagctcttcagtagttacaacctattcttttgcatacatagcctttccttccctgcaaaaagttaagcctgctaagtattcagatccctgtcatttacttctcagcagtctcattcaagctaaggcttgcatactcaatctgtgccgtagtctacacatttttaggggatatttcaccaaaatacttgacatggtaacatcactattatatactagaagcaagaattttacacttatgctctaagtgatccttttaaaaattttctgaactatttgaggaaagtattatttgtcttaaagggtaacagcctcatgaaatgacttgaggattccaatttcttattagcttaagatgtcacttaaaagctgacagccctcatctgtctcattggctacataagagctgcagaagatccatcaataaccaagtataaagaaagattttaagactaagtaccaattgaggtaaacatgaaaccgttataaagcaaattaaaaaaaaatacattaggaaaagttacacaaatgaagtgtacgcctattatattcccaaggcatttttgtggggaggaacagtgctgcttgttggcctttccatattccctcatacaaaaatgctaaaatctattcgcaagagttttgagctaacttcgtctcttaaattgctttaattgtcatcaataaaaacaaatatgaaaaaccctagtttaaaaagcggttcaagaataatgtaaacttatacatatagcttattttcttcatttactagaggaggaaaaatagaaccaaaaaatgcatgaactcctgcttttcaatctgattacctcaaactgaaaagcaggtgaaaggaggaatatttcagtgtgtttttacatctgaatccaagggatccaagtggcccagcagaaacggaattcttgttaaaatgactgattctcgtgcatgtgaaaggctctggggaatgaatacctgtttggtccaaacttactgtatcataatgctgtatatgttgaaaacgtaatacctgttaatgtcctaatgaatcacgttttgcagaaaacaccgtaagaaacacttcagtctttctgtagtttccatgcatatttcaccatggttcgcactctgatcctcatctggtttagaaagcaattcagtttctttcaaaccaccataacctaagtgctgccccatccttcacctttaccctagaaaatctgagaatccattggtgtgtactgtgtgacacaatgccaacaagcctctggtttctaatactggcaggaccaacacacatactttagtgggaatataatctgtttagacgataatagagggaaatgccataattaacaaatctcccttcactcaccactatcctcattcttgcagttgtcaaggtgtaagcctcactgtaagttacaaagctaccactcccctctttaagaacacatagcttaggattgccttggcgatgtgggctcttttttggttccatatgaacttaagtagttttttccaattctgtgaagaaagtcattggtagcttgatggggatggcattgaatctgtaaattaccttgggcagtatggccattttcacaatattgattcttcctacccaagagcatggaatgttcttccatttgtttgtatcctcttttatttccttgagcagtagcttgtagttctccttgaagaggtccttcacatcccttgtaagttggattcctaggtattttattctctttgaagcaattgtgaatgggagttcactcatgatttggctctctgtttgtctgttgttggtgtataagaatgcttgtgatttttgtacattgattttgtatcctgagactttgctgaagttgcttatcagcttaaggagattttgggctgagacgatggggttttctagatatacaatcatgtcgtctgcaaacggacaatttgacttcctcttttcctaattgaataccctttatttccttctcctgcctaattgccctggccagaacttccaacactatgttgaatacgagtggtgagagagggcatccctgtcttgtgccagttttcaaagggaatgcttccagtttttgcccattcagtatgatattggctgtgggtttgtcatagatagctcttattattttgaaatacaccccatcaatccctaatttattgagagtttttagcatgaagggttgttgaattttgtcaaaggctttttctgcatctattgagataatcatgtgttttttgtctttggctctgtttatatgctggattacattcattgatttgcgtatattgaaccagccttgcatcccagggatgaagcccacttgatcatggtggataagctttttgatgtgctgctggattcgttttgccagtattttatccagttagaatggcaatcattaaaaagtcaggaaacaacaggtgctggagaggatgtggagaaataggaacactttcacactgttggtgggactgtaaactagttcaaccattgtggaagtcagtgtggcgattcctcagggatctagaactggaaacaccatttgacccagccatcccattactgggtatatacccaaaggactataaatcatgctgctataaagacacatgcacacgtatgtttattgtggcattattcacaatagcaaagacttggaaccaacccaaatgtccaacaatgatagactggattaagaaaacgtggcacatatacaccatggaatactatgcagccataaaaaatgatgagttcatgtcctttgtagggacatggatgaaattggaaatcatcattctcagtaaactatcacaagaacaaaaaaccaaacaccgcatattctcactcataggtgggaattgaacaatgagatcacatggacacaggaaggggaatatcacactctggggactgttgtggggtggggggatgggggagggatagcattaggagatatacctaatgctagatgacgagttagtgggtgcagcgcaccagcatggcacatgtatacctatgtaactaacctgcacaatgtgcacatgtaccctaaaacttaaagtataaaaaaaaaaaaaaacatagctaaagaaaaactgcatatgcaaatcataccgtattcatttttttatttaacttggggatggaatggggatagcatacattttatttgtacaatatttaacaatcacttatccaaggtggggttttatggggattttaagctttctgttaaatacttgcagaaaaaatagcaagtacgatttgacagtagtacaataacctgtgcccaaaacacaagaaatacagagtaaagcgaaaataactgcttaccaatattctgagaggtaacaaatgggatatgggttgagactgcataaaaaacgtactgctggttgaatatctgaggtaaatgatgttcaatcaagatgctacttgtatcattttgcccataaatggataaataattttatgcatatcataccaaatgttcctaaaaagtaatctttcaaaaaagtataaaagagaaactggaaa

SEQ ID NO: 162727 - DNA, 647 bp, Homo sapiens
  Payload ID: 12065
  Gene Symbol: ORC4
  Gene Name: origin recognition complex, subunit 4
  ENST ID: ENST00000457954
  CDS Start-End: 264-647
ggtccgcagcggcaggtgaagtctagcagaggacgcggccaggcgattcggtgaagcgattcctgcaggcgttggttcccctctttgacctggaagcctggagccagaggacttttggtggctgaggccttagctacctggcttacacattaaggaggacacagatttgcttgctgtctgtctgtcaaggcctggctcagctaaggacctgttaacatttctagagaagaaaacagcattaccatggatttgaatttgttgaaatgagcagtcgtaaatcaaagagtaacagcttaattcacacagagtgcctttcacaggtacaaagaattttacgtgaaagattttgtcgtcagagtccacatagtaacctatttggagtgcaagtacaatacaaacacttaagtgagctgctgaaaagaactgctctccatggagagagtaactctgtccttattatcggaccccgaggatcaggaaaaactatgttaataaatcatgctttgaaagaactcatggaaatagaagaagtgagtgaaaatgtattacaagttcacttaaatggactgctgcagatcaatgacaaaatcgccctaaaggaaatcacaaggcagttaaatctggaaaatgtagttggagataaagtt

SEQ ID NO: 162728 - DNA, 552 bp, Homo sapiens
  Payload ID: 12065
  Gene Symbol: ORC4
  Gene Name: origin recognition complex, subunit 4
  ENST ID: ENST00000440042
  CDS Start-End: 171-552
gtgcgtgcgcggggcatgccgggagtggttgtgtacggtccgcagcggcaggtgaagtctagcagaggacgcggccaggcgattcggtgaagcgattcctgcaggcgttggttcccctctttgacctggtaaatgcaggcttttatgcgagaggatttgaatttgttgaaatgagcagtcgtaaatcaaagagtaacagcttaattcacacagagtgcctttcacaggtacaaagaattttacgtgaaagattttgtcgtcagagtccacatagtaacctatttggagtgcaagtacaatacaaacacttaagtgagctgctgaaaagaactgctctccatggagagagtaactctgtccttattatcggaccccgaggatcaggaaaaactatgttaataaatcatgctttgaaagaactcatggaaatagaagaagtgagtgaaaatgtattacaagttcacttaaatggactgctgcagatcaatgacaaaatcgccctaaaggaaatcacaaggcagttaaatctggaaaatgtagttggagataaag

SEQ ID NO: 162729 - DNA, 571 bp, Homo sapiens
  Payload ID: 12065
  Gene Symbol: ORC4
  Gene Name: origin recognition complex, subunit 4
  ENST ID: ENST00000416719
  CDS Start-End: 136-571
ggctgctcctgggtgtagtgagatgtctccagccagggccaagcagcagcagtagcagcagcagcagtagcagcagcagcagcaacagcagcagcagcagcaacagcagcagcaaagggatttgaatttgttgaaatgagcagtcgtaaatcaaagagtaacagcttaattcacacagagtgcctttcacaggtacaaagaattttacgtgaaagattttgtcgtcagagtccacatagtaacctatttggagtgcaagtacaatacaaacacttaagtgagctgctgaaaagaactgctctccatggagagagtaactctgtccttattatcggaccccgaggatcaggaaaaactatgttaataaatcatgctttgaaagaactcatggaaatagaagaagtgagtgaaaatgtattacaagttcacttaaatggactgctgcagatcaatgacaaaatcgccctaaaggaaatcacaaggcagttaaatctggaaaatgtagttggagataaagtttttggaagctttgctgaaaacctttcatttcttctggaagctttaaaaaaag

SEQ ID NO: 162730 - DNA, 6472 bp, Homo sapiens
  Payload ID: 12065
  Gene Symbol: ORC4
  Gene Name: origin recognition complex, subunit 4
  Uniprot ID: O43929
  ENST ID: ENST00000540442
  CDS Start-End: 271-1359
agtggttgtgtacggtccgcagcggcaggtgaagtctagcagaggacgcggccaggcgattcggtgaagcgattcctgcaggcgttggttcccctctttgacctggtacaaagaattttacgtgaaagattttgtcgtcagagtccacatagtaacctatttggagtgcaagtacaatacaaacacttaagtgagctgctgaaaagaactgctctccatggagagagtaactctgtccttattatcggaccccgaggatcaggaaaaactatgttaataaatcatgctttgaaagaactcatggaaatagaagaagtgagtgaaaatgtattacaagttcacttaaatggactgctgcagatcaatgacaaaatcgccctaaaggaaatcacaaggcagttaaatctggaaaatgtagttggagataaagtttttggaagctttgctgaaaacctttcatttcttctggaagctttaaaaaaaggtgaccgaactagcagttgcccagtgatcttcatattagatgaatttgatctttttgctcatcataaaaaccaaacacttctctataatctttttgacatttctcagtctgcacagaccccaatagcagttattggtcttacatgtagattggatattttggaactcttagaaaaaagagtgaagtcaagattttctcaccggcagatacacttaatgaattcatttggttttccacagtatgttaaaatatttaaagaacagttatctctacctgcagagtttccagacaaggtttttgctgagaagtggaatgaaaatgttcagtatctctcagaagatagaagtgtgcaagaagtactacagaagcatttcaatatcagcaaaaacctgcggtcattacacatgctattgatgcttgctttaaatcgagtaacagcatcgcacccatttatgactgccgtagatctaatggaagcaagccaactgtgtagcatggactcgaaagcaaatattgtacatggtctatcagtcttggaaatctgtcttataatagcaatgaaacatttaaatgacatctatgaggaagagccatttaattttcaaatggtctataatgagtttcagaagtttgttcaaaggaaagcacattccgtttataattttgaaaaacctgttgtcatgaaggcttttgaacacttgcagcaattagaattaataaagcccatggaaagaacttcaggaaattcacagagagagtaccagctgatgaaactgcttttggataatactcaaattatgaatgctctgcagaaatatcccaactgtcctacagatgtgaggcagtgggcaacatcctcactaagctggttatgaatataaccagtgacttcaactttggcatttcattcatacttctgtagagaacggaaaactattgtccattaacatgatatgctaaacattctataaacattcttgtatttatgtgagacttgcccatctactgtcttggctgtgtcttgccttttaatcatgaacagttacatgatttataatttcactgattgagattactttgtaagtagctgttcagaagaataaaatatgactgttttagggactagaccatgtgcttttttaacacttatatatataatggtctatttgaagagctcacttcaacctaacagctagatgtctttacaaaccttaaaccaaaggagtaaaaaaaacaatggtaagcactgaagtataataagtaacctttggtacagcaggtttgctgcagtgtttttttctgtccacatgcaaattttggattctatcccagacccaggttttctagttcagaagactaaccagcttagtcagaagatggttccatggaagaaaaaggccaaggagtttgaagatttttcttctagacatctcaaaatgtggtactcataccatccacatcagaatcccttgtaggattttctaaaattacagattgttgagcctaccataggtcaaaaggactggaattttccttcttaacaagtatagtcatggcaccacgtaacattttggtcaatgacattgtataaagggtggtctcataagattataccatatttttactgtaccttttctatgtctaaatatacaaatgttttaccattgtgttacagttgcctacagtatgattacagtaacattctgtacagtgctatagctgaagagtaataggctaggctatctgtatagcctaagtgtgtaacaggctatatacatatcatcagggtctgtgtaagtatactctgtgatgttcatacagtgatgaaatcacccaaagacacatttctcagaacgtagccccatcatgaagtgacgtgactaccagagatttctggaaaagcactcccaaaagtaatgagatgtgtatggcaatgttaactgaacctgtttgtattaaaaagtaaatccctatgaggaatgtggaaatgtccgtcaaagcattgtcttttaagtaagttccaagatccatgaattaacagaggcatatatttaaaatgaaatttaatgagcacttagtgacttcatttgttcaagaatatttgatttcctattgtgtgcatgggaggtttacaaaagacagactgtccctatgcttgtgcagcttacaatctatttaactattagaggccctgtgagatgtaggcagttatttacagatgagaaaactaacacagcagtggcaatgctgggaatggccaacaggcttggaattcaactcagtttagcaccaaagccagtgctattaagacctgaagttcaacagtggattccttaccaaatagtttttaaagtatgctctaaggaacaatgttttaatgaaatcttggatacaaagtggaataaaaggtttctgagcataaagtagctcttcagtagttacaacctattcttttgcatacatagcctttccttccctgcaaaaagttaagcctgctaagtattcagatccctgtcatttacttctcagcagtctcattcaagctaaggcttgcatactcaatctgtgccgtagtctacacatttttaggggatatttcaccaaaatacttgacatggtaacatcactattatatactagaagcaagaattttacacttatgctctaagtgatccttttaaaaattttctgaactatttgaggaaagtattatttgtcttaaagggtaacagcctcatgaaatgacttgaggattccaatttcttattagcttaagatgtcacttaaaagctgacagccctcatctgtctcattggctacataagagctgcagaagatccatcaataaccaagtataaagaaagattttaagactaagtaccaattgaggtaaacatgaaaccgttataaagcaaattaaaaaaaaatacattaggaaaagttacacaaatgaagtgtacgcctattatattcccaaggcatttttgtggggaggaacagtgctgcttgttggcctttccatattccctcatacaaaaatgctaaaatctattcgcaagagttttgagctaacttcgtctcttaaattgctttaattgtcatcaataaaaacaaatatgaaaaaccctagtttaaaaagcggttcaagaataatgtaaacttatacatatagcttattttcttcatttactagaggaggaaaaatagaaccaaaaaatgcatgaactcctgcttttcaatctgattacctcaaactgaaaagcaggtgaaaggaggaatatttcagtgtgtttttacatctgaatccaagggatccaagtggcccagcagaaacggaattcttgttaaaatgactgattctcgtgcatgtgaaaggctctggggaatgaatacctgtttggtccaaacttactgtatcataatgctgtatatgttgaaaacgtaatacctgttaatgtcctaatgaatcacgttttgcagaaaacaccgtaagaaacacttcagtctttctgtagtttccatgcatatttcaccatggttcgcactctgatcctcatctggtttagaaagcaattcagtttctttcaaaccaccataacctaagtgctgccccatccttcacctttaccctagaaaatctgagaatccattggtgtgtactgtgtgacacaatgccaacaagcctctggtttctaatactggcaggaccaacacacatactttagtgggaatataatctgtttagacgataatagagggaaatgccataattaacaaatctcccttcactcaccactatcctcattcttgcagttgtcaaggtgtaagcctcactgtaagttacaaagctaccactcccctctttaagaacacatagcttaggattgccttggcgatgtgggctcttttttggttccatatgaacttaagtagttttttccaattctgtgaagaaagtcattggtagcttgatggggatggcattgaatctgtaaattaccttgggcagtatggccattttcacaatattgattcttcctacccaagagcatggaatgttcttccatttgtttgtatcctcttttatttccttgagcagtagcttgtagttctccttgaagaggtccttcacatcccttgtaagttggattcctaggtattttattctctttgaagcaattgtgaatgggagttcactcatgatttggctctctgtttgtctgttgttggtgtataagaatgcttgtgatttttgtacattgattttgtatcctgagactttgctgaagttgcttatcagcttaaggagattttgggctgagacgatggggttttctagatatacaatcatgtcgtctgcaaacggacaatttgacttcctcttttcctaattgaataccctttatttccttctcctgcctaattgccctggccagaacttccaacactatgttgaatacgagtggtgagagagggcatccctgtcttgtgccagttttcaaagggaatgcttccagtttttgcccattcagtatgatattggctgtgggtttgtcatagatagctcttattattttgaaatacaccccatcaatccctaatttattgagagtttttagcatgaagggttgttgaattttgtcaaaggctttttctgcatctattgagataatcatgtgttttttgtctttggctctgtttatatgctggattacattcattgatttgcgtatattgaaccagccttgcatcccagggatgaagcccacttgatcatggtggataagctttttgatgtgctgctggattcgttttgccagtattttatccagttagaatggcaatcattaaaaagtcaggaaacaacaggtgctggagaggatgtggagaaataggaacactttcacactgttggtgggactgtaaactagttcaaccattgtggaagtcagtgtggcgattcctcagggatctagaactggaaacaccatttgacccagccatcccattactgggtatatacccaaaggactataaatcatgctgctataaagacacatgcacacgtatgtttattgtggcattattcacaatagcaaagacttggaaccaacccaaatgtccaacaatgatagactggattaagaaaacgtggcacatatacaccatggaatactatgcagccataaaaaatgatgagttcatgtcctttgtagggacatggatgaaattggaaatcatcattctcagtaaactatcacaagaacaaaaaaccaaacaccgcatattctcactcataggtgggaattgaacaatgagatcacatggacacaggaaggggaatatcacactctggggactgttgtggggtggggggatgggggagggatagcattaggagatatacctaatgctagatgacgagttagtgggtgcagcgcaccagcatggcacatgtatacctatgtaactaacctgcacaatgtgcacatgtaccctaaaacttaaagtataaaaaaaaaaaaaaacatagctaaagaaaaactgcatatgcaaatcataccgtattcatttttttatttaacttggggatggaatggggatagcatacattttatttgtacaatatttaacaatcacttatccaaggtggggttttatggggattttaagctttctgttaaatacttgcagaaaaaatagcaagtacgatttgacagtagtacaataacctgtgcccaaaacacaagaaatacagagtaaagcgaaaataactgcttaccaatattctgagaggtaacaaatgggatatgggttgagactgcataaaaaacgtactgctggttgaatatctgaggtaaatgatgttcaatcaagatgctacttgtatcattttgcccataaatggataaataattttatgcatatcataccaaatgttcctaaaaagtaatctttcaaaaaagtataaaagagaaactggaaagt

SEQ ID NO: 162731 - DNA, 6328 bp, Homo sapiens
  Payload ID: 12065
  Gene Symbol: ORC4
  Gene Name: origin recognition complex, subunit 4
  Uniprot ID: O43929
  ENST ID: ENST00000536575
  CDS Start-End: 157-1215
agtgcgtgcgcggggcatgccgggagtggttgtgtacggtccgcagcggcaggtgaagtctagcagaggacgcggccaggcgattcggtgaagcgattcctgcaggcgttggttcccctctttgacctgttaataaatcatgctttgaaagaactcatggaaatagaagaagtgagtgaaaatgtattacaagttcacttaaatggactgctgcagatcaatgacaaaatcgccctaaaggaaatcacaaggcagttaaatctggaaaatgtagttggagataaagtttttggaagctttgctgaaaacctttcatttcttctggaagctttaaaaaaaggtgaccgaactagcagttgcccagtgatcttcatattagatgaatttgatctttttgctcatcataaaaaccaaacacttctctataatctttttgacatttctcagtctgcacagaccccaatagcagttattggtcttacatgtagattggatattttggaactcttagaaaaaagagtgaagtcaagattttctcaccggcagatacacttaatgaattcatttggttttccacagtatgttaaaatatttaaagaacagttatctctacctgcagagtttccagacaaggtttttgctgagaagtggaatgaaaatgttcagtatctctcagaagatagaagtgtgcaagaagtactacagaagcatttcaatatcagcaaaaacctgcggtcattacacatgctattgatgcttgctttaaatcgagtaacagcatcgcacccatttatgactgccgtagatctaatggaagcaagccaactgtgtagcatggactcgaaagcaaatattgtacatggtctatcagtcttggaaatctgtcttataatagcaatgaaacatttaaatgacatctatgaggaagagccatttaattttcaaatggtctataatgagtttcagaagtttgttcaaaggaaagcacattccgtttataattttgaaaaacctgttgtcatgaaggcttttgaacacttgcagcaattagaattaataaagcccatggaaagaacttcaggaaattcacagagagagtaccagctgatgaaactgcttttggataatactcaaattatgaatgctctgcagaaatatcccaactgtcctacagatgtgaggcagtgggcaacatcctcactaagctggttatgaatataaccagtgacttcaactttggcatttcattcatacttctgtagagaacggaaaactattgtccattaacatgatatgctaaacattctataaacattcttgtatttatgtgagacttgcccatctactgtcttggctgtgtcttgccttttaatcatgaacagttacatgatttataatttcactgattgagattactttgtaagtagctgttcagaagaataaaatatgactgttttagggactagaccatgtgcttttttaacacttatatatataatggtctatttgaagagctcacttcaacctaacagctagatgtctttacaaaccttaaaccaaaggagtaaaaaaaacaatggtaagcactgaagtataataagtaacctttggtacagcaggtttgctgcagtgtttttttctgtccacatgcaaattttggattctatcccagacccaggttttctagttcagaagactaaccagcttagtcagaagatggttccatggaagaaaaaggccaaggagtttgaagatttttcttctagacatctcaaaatgtggtactcataccatccacatcagaatcccttgtaggattttctaaaattacagattgttgagcctaccataggtcaaaaggactggaattttccttcttaacaagtatagtcatggcaccacgtaacattttggtcaatgacattgtataaagggtggtctcataagattataccatatttttactgtaccttttctatgtctaaatatacaaatgttttaccattgtgttacagttgcctacagtatgattacagtaacattctgtacagtgctatagctgaagagtaataggctaggctatctgtatagcctaagtgtgtaacaggctatatacatatcatcagggtctgtgtaagtatactctgtgatgttcatacagtgatgaaatcacccaaagacacatttctcagaacgtagccccatcatgaagtgacgtgactaccagagatttctggaaaagcactcccaaaagtaatgagatgtgtatggcaatgttaactgaacctgtttgtattaaaaagtaaatccctatgaggaatgtggaaatgtccgtcaaagcattgtcttttaagtaagttccaagatccatgaattaacagaggcatatatttaaaatgaaatttaatgagcacttagtgacttcatttgttcaagaatatttgatttcctattgtgtgcatgggaggtttacaaaagacagactgtccctatgcttgtgcagcttacaatctatttaactattagaggccctgtgagatgtaggcagttatttacagatgagaaaactaacacagcagtggcaatgctgggaatggccaacaggcttggaattcaactcagtttagcaccaaagccagtgctattaagacctgaagttcaacagtggattccttaccaaatagtttttaaagtatgctctaaggaacaatgttttaatgaaatcttggatacaaagtggaataaaaggtttctgagcataaagtagctcttcagtagttacaacctattcttttgcatacatagcctttccttccctgcaaaaagttaagcctgctaagtattcagatccctgtcatttacttctcagcagtctcattcaagctaaggcttgcatactcaatctgtgccgtagtctacacatttttaggggatatttcaccaaaatacttgacatggtaacatcactattatatactagaagcaagaattttacacttatgctctaagtgatccttttaaaaattttctgaactatttgaggaaagtattatttgtcttaaagggtaacagcctcatgaaatgacttgaggattccaatttcttattagcttaagatgtcacttaaaagctgacagccctcatctgtctcattggctacataagagctgcagaagatccatcaataaccaagtataaagaaagattttaagactaagtaccaattgaggtaaacatgaaaccgttataaagcaaattaaaaaaaaatacattaggaaaagttacacaaatgaagtgtacgcctattatattcccaaggcatttttgtggggaggaacagtgctgcttgttggcctttccatattccctcatacaaaaatgctaaaatctattcgcaagagttttgagctaacttcgtctcttaaattgctttaattgtcatcaataaaaacaaatatgaaaaaccctagtttaaaaagcggttcaagaataatgtaaacttatacatatagcttattttcttcatttactagaggaggaaaaatagaaccaaaaaatgcatgaactcctgcttttcaatctgattacctcaaactgaaaagcaggtgaaaggaggaatatttcagtgtgtttttacatctgaatccaagggatccaagtggcccagcagaaacggaattcttgttaaaatgactgattctcgtgcatgtgaaaggctctggggaatgaatacctgtttggtccaaacttactgtatcataatgctgtatatgttgaaaacgtaatacctgttaatgtcctaatgaatcacgttttgcagaaaacaccgtaagaaacacttcagtctttctgtagtttccatgcatatttcaccatggttcgcactctgatcctcatctggtttagaaagcaattcagtttctttcaaaccaccataacctaagtgctgccccatccttcacctttaccctagaaaatctgagaatccattggtgtgtactgtgtgacacaatgccaacaagcctctggtttctaatactggcaggaccaacacacatactttagtgggaatataatctgtttagacgataatagagggaaatgccataattaacaaatctcccttcactcaccactatcctcattcttgcagttgtcaaggtgtaagcctcactgtaagttacaaagctaccactcccctctttaagaacacatagcttaggattgccttggcgatgtgggctcttttttggttccatatgaacttaagtagttttttccaattctgtgaagaaagtcattggtagcttgatggggatggcattgaatctgtaaattaccttgggcagtatggccattttcacaatattgattcttcctacccaagagcatggaatgttcttccatttgtttgtatcctcttttatttccttgagcagtagcttgtagttctccttgaagaggtccttcacatcccttgtaagttggattcctaggtattttattctctttgaagcaattgtgaatgggagttcactcatgatttggctctctgtttgtctgttgttggtgtataagaatgcttgtgatttttgtacattgattttgtatcctgagactttgctgaagttgcttatcagcttaaggagattttgggctgagacgatggggttttctagatatacaatcatgtcgtctgcaaacggacaatttgacttcctcttttcctaattgaataccctttatttccttctcctgcctaattgccctggccagaacttccaacactatgttgaatacgagtggtgagagagggcatccctgtcttgtgccagttttcaaagggaatgcttccagtttttgcccattcagtatgatattggctgtgggtttgtcatagatagctcttattattttgaaatacaccccatcaatccctaatttattgagagtttttagcatgaagggttgttgaattttgtcaaaggctttttctgcatctattgagataatcatgtgttttttgtctttggctctgtttatatgctggattacattcattgatttgcgtatattgaaccagccttgcatcccagggatgaagcccacttgatcatggtggataagctttttgatgtgctgctggattcgttttgccagtattttatccagttagaatggcaatcattaaaaagtcaggaaacaacaggtgctggagaggatgtggagaaataggaacactttcacactgttggtgggactgtaaactagttcaaccattgtggaagtcagtgtggcgattcctcagggatctagaactggaaacaccatttgacccagccatcccattactgggtatatacccaaaggactataaatcatgctgctataaagacacatgcacacgtatgtttattgtggcattattcacaatagcaaagacttggaaccaacccaaatgtccaacaatgatagactggattaagaaaacgtggcacatatacaccatggaatactatgcagccataaaaaatgatgagttcatgtcctttgtagggacatggatgaaattggaaatcatcattctcagtaaactatcacaagaacaaaaaaccaaacaccgcatattctcactcataggtgggaattgaacaatgagatcacatggacacaggaaggggaatatcacactctggggactgttgtggggtggggggatgggggagggatagcattaggagatatacctaatgctagatgacgagttagtgggtgcagcgcaccagcatggcacatgtatacctatgtaactaacctgcacaatgtgcacatgtaccctaaaacttaaagtataaaaaaaaaaaaaaacatagctaaagaaaaactgcatatgcaaatcataccgtattcatttttttatttaacttggggatggaatggggatagcatacattttatttgtacaatatttaacaatcacttatccaaggtggggttttatggggattttaagctttctgttaaatacttgcagaaaaaatagcaagtacgatttgacagtagtacaataacctgtgcccaaaacacaagaaatacagagtaaagcgaaaataactgcttaccaatattctgagaggtaacaaatgggatatgggttgagactgcataaaaaacgtactgctggttgaatatctgaggtaaatgatgttcaatcaagatgctacttgtatcattttgcccataaatggataaataattttatgcatatcataccaaatgttcctaaaaagtaatctttcaaaaaagtataaaagagaaactggaaagt

SEQ ID NO: 162732 - DNA, 6710 bp, Homo sapiens
  Payload ID: 12065
  Gene Symbol: ORC4
  Gene Name: origin recognition complex, subunit 4
  Uniprot ID: O43929
  ENST ID: ENST00000535373
  CDS Start-End: 287-1597
gcatgccgggagtggttgtgtacggtccgcagcggcaggtgaagtctagcagaggacgcggccaggcgattcggtgaagcgattcctgcaggcgttggttcccctctttgacctggaagcctggagccagaggacttttggtggctgaggccttagctacctggcttacacattaaggaggacacagatttgcttgctgtctgtctgtcaaggcctggctcagctaaggacctgttaacatttctagagaagaaaacagcattaccatggatttgaatttgttgaaatgagcagtcgtaaatcaaagagtaacagcttaattcacacagagtgcctttcacaggtacaaagaattttacgtgaaagattttgtcgtcagagtccacatagtaacctatttggagtgcaagtacaatacaaacacttaagtgagctgctgaaaagaactgctctccatggagagagtaactctgtccttattatcggaccccgaggatcaggaaaaactatgttaataaatcatgctttgaaagaactcatggaaatagaagaagtgagtgaaaatgtattacaagttcacttaaatggactgctgcagatcaatgacaaaatcgccctaaaggaaatcacaaggcagttaaatctggaaaatgtagttggagataaagtttttggaagctttgctgaaaacctttcatttcttctggaagctttaaaaaaaggtgaccgaactagcagttgcccagtgatcttcatattagatgaatttgatctttttgctcatcataaaaaccaaacacttctctataatctttttgacatttctcagtctgcacagaccccaatagcagttattggtcttacatgtagattggatattttggaactcttagaaaaaagagtgaagtcaagattttctcaccggcagatacacttaatgaattcatttggttttccacagtatgttaaaatatttaaagaacagttatctctacctgcagagtttccagacaaggtttttgctgagaagtggaatgaaaatgttcagtatctctcagaagatagaagtgtgcaagaagtactacagaagcatttcaatatcagcaaaaacctgcggtcattacacatgctattgatgcttgctttaaatcgagtaacagcatcgcacccatttatgactgccgtagatctaatggaagcaagccaactgtgtagcatggactcgaaagcaaatattgtacatggtctatcagtcttggaaatctgtcttataatagcaatgaaacatttaaatgacatctatgaggaagagccatttaattttcaaatggtctataatgagtttcagaagtttgttcaaaggaaagcacattccgtttataattttgaaaaacctgttgtcatgaaggcttttgaacacttgcagcaattagaattaataaagcccatggaaagaacttcaggaaattcacagagagagtaccagctgatgaaactgcttttggataatactcaaattatgaatgctctgcagaaatatcccaactgtcctacagatgtgaggcagtgggcaacatcctcactaagctggttatgaatataaccagtgacttcaactttggcatttcattcatacttctgtagagaacggaaaactattgtccattaacatgatatgctaaacattctataaacattcttgtatttatgtgagacttgcccatctactgtcttggctgtgtcttgccttttaatcatgaacagttacatgatttataatttcactgattgagattactttgtaagtagctgttcagaagaataaaatatgactgttttagggactagaccatgtgcttttttaacacttatatatataatggtctatttgaagagctcacttcaacctaacagctagatgtctttacaaaccttaaaccaaaggagtaaaaaaaacaatggtaagcactgaagtataataagtaacctttggtacagcaggtttgctgcagtgtttttttctgtccacatgcaaattttggattctatcccagacccaggttttctagttcagaagactaaccagcttagtcagaagatggttccatggaagaaaaaggccaaggagtttgaagatttttcttctagacatctcaaaatgtggtactcataccatccacatcagaatcccttgtaggattttctaaaattacagattgttgagcctaccataggtcaaaaggactggaattttccttcttaacaagtatagtcatggcaccacgtaacattttggtcaatgacattgtataaagggtggtctcataagattataccatatttttactgtaccttttctatgtctaaatatacaaatgttttaccattgtgttacagttgcctacagtatgattacagtaacattctgtacagtgctatagctgaagagtaataggctaggctatctgtatagcctaagtgtgtaacaggctatatacatatcatcagggtctgtgtaagtatactctgtgatgttcatacagtgatgaaatcacccaaagacacatttctcagaacgtagccccatcatgaagtgacgtgactaccagagatttctggaaaagcactcccaaaagtaatgagatgtgtatggcaatgttaactgaacctgtttgtattaaaaagtaaatccctatgaggaatgtggaaatgtccgtcaaagcattgtcttttaagtaagttccaagatccatgaattaacagaggcatatatttaaaatgaaatttaatgagcacttagtgacttcatttgttcaagaatatttgatttcctattgtgtgcatgggaggtttacaaaagacagactgtccctatgcttgtgcagcttacaatctatttaactattagaggccctgtgagatgtaggcagttatttacagatgagaaaactaacacagcagtggcaatgctgggaatggccaacaggcttggaattcaactcagtttagcaccaaagccagtgctattaagacctgaagttcaacagtggattccttaccaaatagtttttaaagtatgctctaaggaacaatgttttaatgaaatcttggatacaaagtggaataaaaggtttctgagcataaagtagctcttcagtagttacaacctattcttttgcatacatagcctttccttccctgcaaaaagttaagcctgctaagtattcagatccctgtcatttacttctcagcagtctcattcaagctaaggcttgcatactcaatctgtgccgtagtctacacatttttaggggatatttcaccaaaatacttgacatggtaacatcactattatatactagaagcaagaattttacacttatgctctaagtgatccttttaaaaattttctgaactatttgaggaaagtattatttgtcttaaagggtaacagcctcatgaaatgacttgaggattccaatttcttattagcttaagatgtcacttaaaagctgacagccctcatctgtctcattggctacataagagctgcagaagatccatcaataaccaagtataaagaaagattttaagactaagtaccaattgaggtaaacatgaaaccgttataaagcaaattaaaaaaaaatacattaggaaaagttacacaaatgaagtgtacgcctattatattcccaaggcatttttgtggggaggaacagtgctgcttgttggcctttccatattccctcatacaaaaatgctaaaatctattcgcaagagttttgagctaacttcgtctcttaaattgctttaattgtcatcaataaaaacaaatatgaaaaaccctagtttaaaaagcggttcaagaataatgtaaacttatacatatagcttattttcttcatttactagaggaggaaaaatagaaccaaaaaatgcatgaactcctgcttttcaatctgattacctcaaactgaaaagcaggtgaaaggaggaatatttcagtgtgtttttacatctgaatccaagggatccaagtggcccagcagaaacggaattcttgttaaaatgactgattctcgtgcatgtgaaaggctctggggaatgaatacctgtttggtccaaacttactgtatcataatgctgtatatgttgaaaacgtaatacctgttaatgtcctaatgaatcacgttttgcagaaaacaccgtaagaaacacttcagtctttctgtagtttccatgcatatttcaccatggttcgcactctgatcctcatctggtttagaaagcaattcagtttctttcaaaccaccataacctaagtgctgccccatccttcacctttaccctagaaaatctgagaatccattggtgtgtactgtgtgacacaatgccaacaagcctctggtttctaatactggcaggaccaacacacatactttagtgggaatataatctgtttagacgataatagagggaaatgccataattaacaaatctcccttcactcaccactatcctcattcttgcagttgtcaaggtgtaagcctcactgtaagttacaaagctaccactcccctctttaagaacacatagcttaggattgccttggcgatgtgggctcttttttggttccatatgaacttaagtagttttttccaattctgtgaagaaagtcattggtagcttgatggggatggcattgaatctgtaaattaccttgggcagtatggccattttcacaatattgattcttcctacccaagagcatggaatgttcttccatttgtttgtatcctcttttatttccttgagcagtagcttgtagttctccttgaagaggtccttcacatcccttgtaagttggattcctaggtattttattctctttgaagcaattgtgaatgggagttcactcatgatttggctctctgtttgtctgttgttggtgtataagaatgcttgtgatttttgtacattgattttgtatcctgagactttgctgaagttgcttatcagcttaaggagattttgggctgagacgatggggttttctagatatacaatcatgtcgtctgcaaacggacaatttgacttcctcttttcctaattgaataccctttatttccttctcctgcctaattgccctggccagaacttccaacactatgttgaatacgagtggtgagagagggcatccctgtcttgtgccagttttcaaagggaatgcttccagtttttgcccattcagtatgatattggctgtgggtttgtcatagatagctcttattattttgaaatacaccccatcaatccctaatttattgagagtttttagcatgaagggttgttgaattttgtcaaaggctttttctgcatctattgagataatcatgtgttttttgtctttggctctgtttatatgctggattacattcattgatttgcgtatattgaaccagccttgcatcccagggatgaagcccacttgatcatggtggataagctttttgatgtgctgctggattcgttttgccagtattttatccagttagaatggcaatcattaaaaagtcaggaaacaacaggtgctggagaggatgtggagaaataggaacactttcacactgttggtgggactgtaaactagttcaaccattgtggaagtcagtgtggcgattcctcagggatctagaactggaaacaccatttgacccagccatcccattactgggtatatacccaaaggactataaatcatgctgctataaagacacatgcacacgtatgtttattgtggcattattcacaatagcaaagacttggaaccaacccaaatgtccaacaatgatagactggattaagaaaacgtggcacatatacaccatggaatactatgcagccataaaaaatgatgagttcatgtcctttgtagggacatggatgaaattggaaatcatcattctcagtaaactatcacaagaacaaaaaaccaaacaccgcatattctcactcataggtgggaattgaacaatgagatcacatggacacaggaaggggaatatcacactctggggactgttgtggggtggggggatgggggagggatagcattaggagatatacctaatgctagatgacgagttagtgggtgcagcgcaccagcatggcacatgtatacctatgtaactaacctgcacaatgtgcacatgtaccctaaaacttaaagtataaaaaaaaaaaaaaacatagctaaagaaaaactgcatatgcaaatcataccgtattcatttttttatttaacttggggatggaatggggatagcatacattttatttgtacaatatttaacaatcacttatccaaggtggggttttatggggattttaagctttctgttaaatacttgcagaaaaaatagcaagtacgatttgacagtagtacaataacctgtgcccaaaacacaagaaatacagagtaaagcgaaaataactgcttaccaatattctgagaggtaacaaatgggatatgggttgagactgcataaaaaacgtactgctggttgaatatctgaggtaaatgatgttcaatcaagatgctacttgtatcattttgcccataaatggataaataattttatgcatatcataccaaatgttcctaaaaagtaatctttcaaaaaagtataaaagagaaactggaaagt

SEQ ID NO: 162733 - DNA, 1958 bp, Homo sapiens
  Payload ID: 12066
  Gene Symbol: ORC5
  Gene Name: origin recognition complex, subunit 5
  Uniprot ID: O43913
  ENST ID: ENST00000297431
  CDS Start-End: 144-1451
agcccggcagcgcaggctcctcccacgacgctgcgggtccggtttccggcgggagcgtgggccgccagactcgggagaggctccgtcttgtgcaagggtcctgtgggctggctgcactggcctctgcggtggtgcctgccagaatgccccacttggaaaacgtggtgctttgtcgcgagtctcaagtgtccatcttgcagtccttgtttggagagagacatcatttcagctttccatccatttttatttatggacatactgctagtggaaagacctatgtaacacaaacgttgttgaaaactttagagctcccacatgtgtttgtgaattgtgttgaatgctttacattgaggctgcttttggaacaaattttaaacaaattgaatcatcttagttcttcagaggatggatgttctactgaaataacctgtgaaacatttaatgactttgttcgcttgtttaaacaagtaaccacagctgaaaatcttaaagatcagactgtatatattgttctagataaagcagagtatctaagagatatggaagcaaatcttttgcctggatttcttagattacaagaattggctgacagaaatgtgactgttctctttctcagtgaaattgtttgggaaaagtttcgtccaaatactggatgctttgagccgtttgtcttatatttccctgattacagcataggcaaccttcaaaagatcctgtcccatgatcatcctccagagtattcagctgatttctatgctgcctacattaacattcttcttggagttttctacactgtttgtcgagatttgaaagagctcagacatctggcagtacttaattttcctaaatattgtgaacccgtggttaaaggagaagcaagtgaacgtgatactcgcaaactgtggagaaatattgaacctcatttgaagaaagctatgcagactgtttatctcagggaaatatcaagttcccagtgggaaaagctacagaaagatgacacagatccggggcaactgaaaggcctctcagcgcatactcatgtggaacttccatattactctaagttcattctaattgctgcataccttgcttcatacaatccagcaagaactgacaagaggttttttcttaagcatcatggaaaaatcaagaaaaccaactttctaaaaaaacacgaaaagacaagcaatcatctccttgggccaaaaccatttccactagacagattattagcaatattatatagtatcgtggacagcagagttgctccaacagcaaatattttttcccagattacctctctagtgacccttcagctgttaaccctggttggccatgacgatcagcttgatggaccaaaatacaaatgcacagtgtctctagacttcatcagagctattgcaaggacggtgaactttgacataataaaatacttgtatgatttcttgtgaaaacaagcttcaaagccatatggacactgtgacaatgactaagccaagctgtgttcatccagctacttagctggccaaggagaggagttctttggctctattggatttgtccaaacaggtgctggcccagcatggaatctgatgaaaatattctgattggtctgggtggatgtgagcagaagactatttaccagggaccctggagtatttggaagcaacgtgttaattataaacagcagggtttgagcacaatctgttctactcttaatgatgttatcttaacactgaaattgcctgaaacccatttacttaggactacattttgctctgtgaactatcccctgcgctttgaacgtgccagcagcccttgtttatatgcccattcttttcacttcctctccacaggagcctctgcagtcgcttgccaaagcagattttcctaaggccactgttttaaaagatcatagttgcaaaatataataaatacaagttctttttaaaatccaa

SEQ ID NO: 162734 - DNA, 567 bp, Homo sapiens
  Payload ID: 12066
  Gene Symbol: ORC5
  Gene Name: origin recognition complex, subunit 5
  ENST ID: ENST00000448563
  CDS Start-End: 97-297
ggcgggagcgtgggccgccagactcgggagaggctccgtcttgtgcaagggtcctgtgggctggctgcactggcctctgcggtggtgcctgccagaatgccccacttggaaaacgtggtgctttgtcgcgagtctcaagtgtccatcttgcagtccttgtttggagagagacatcatttcagctttccatccatttttatttatggacatactgctagtggaaagacctatgtaacacaaacgttgttgaaaactttagagggactcagacaggcacttagaatatgctgcctttaaaagtcatggatggtacaaatgccgtaagcaagacactattcataacagagatgttgtggacttttgttcttaaaggacagtaaaggagtgagagagaagtgagttagcaaatgctggtgaaactgtccccaactcccacatgtgtttgtgaattgtgttgaatgctttacattgaggctgcttttggaacaaattttaaacaaattgaatcatcttagttcttcagaggatggatgttctactgaaataacctgtgaaacatttaatgac

SEQ ID NO: 162735 - DNA, 2043 bp, Homo sapiens
  Payload ID: 12066
  Gene Symbol: ORC5
  Gene Name: origin recognition complex, subunit 5
  ENST ID: ENST00000422497
  CDS Start-End: 97-297
ggcgggagcgtgggccgccagactcgggagaggctccgtcttgtgcaagggtcctgtgggctggctgcactggcctctgcggtggtgcctgccagaatgccccacttggaaaacgtggtgctttgtcgcgagtctcaagtgtccatcttgcagtccttgtttggagagagacatcatttcagctttccatccatttttatttatggacatactgctagtggaaagacctatgtaacacaaacgttgttgaaaactttagagggactcagacaggcacttagaatatgctgcctttaaaagtcatggatggtacaaatgccgtaagcaagacactattcataacagagatgttgtggacttttgttcttaaaggacagtaaaggagtgagagagaactcccacatgtgtttgtgaattgtgttgaatgctttacattgaggctgcttttggaacaaattttaaacaaattgaatcatcttagttcttcagaggatggatgttctactgaaataacctgtgaaacatttaatgactttgttcgcttgtttaaacaagtaaccacagctgaaaatcttaaagatcagactgtatatattgttctagataaagcagagtatctaagagatatggaagcaaatcttttgcctggatttcttagattacaagaattggctgacagaaatgtgactgttctctttctcagtgaaattgtttgggaaaagtttcgtccaaatactggatgctttgagccgtttgtcttatatttccctgattacagcataggcaaccttcaaaagatcctgtcccatgatcatcctccagagtattcagctgatttctatgctgcctacattaacattcttcttggagttttctacactgtttgtcgagatttgaaagagctcagacatctggcagtacttaattttcctaaatattgtgaacccgtggttaaaggagaagcaagtgaacgtgatactcgcaaactgtggagaaatattgaacctcatttgaagaaagctatgcagactgtttatctcagggaaatatcaagttcccagtgggaaaagctacagaaagatgacacagatccggggcaactgaaaggcctctcagcgcatactcatgtggaacttccatattactctaagttcattctaattgctgcataccttgcttcatacaatccagcaagaactgacaagaggttttttcttaagcatcatggaaaaatcaagaaaaccaactttctaaaaaaacacgaaaagacaagcaatcatctccttgggccaaaaccatttccactagacagattattagcaatattatatagtatcgtggacagcagagttgctccaacagcaaatattttttcccagattacctctctagtgacccttcagctgttaaccctggttggccatgacgatcagcttgatggaccaaaatacaaatgcacagtgtctctagacttcatcagagctattgcaaggacggtgaactttgacataataaaatacttgtatgatttcttgtgaaaacaagcttcaaagccatatggacactgtgacaatgactaagccaagctgtgttcatccagctacttagctggccaaggagaggagttctttggctctattggatttgtccaaacaggtgctggcccagcatggaatctgatgaaaatattctgattggtctgggtggatgtgagcagaagactatttaccagggaccctggagtatttggaagcaacgtgttaattataaacagcagggtttgagcacaatctgttctactcttaatgatgttatcttaacactgaaattgcctgaaacccatttacttaggactacattttgctctgtgaactatcccctgcgctttgaacgtgccagcagcccttgtttatatgcccattcttttcacttcctctccacaggagcctctgcagtcgcttgccaaagcagattttcctaaggccactgttttaaaagatcatagttgcaaaatataataaatacaagttctttttaaaatcc

SEQ ID NO: 162736 - DNA, 1409 bp, Homo sapiens
  Payload ID: 12066
  Gene Symbol: ORC5
  Gene Name: origin recognition complex, subunit 5
  Uniprot ID: O43913
  ENST ID: ENST00000447452
  CDS Start-End: 54-1028
tgcaagggtcctgtgggctggctgcactggcctctgcggtggtgcctgccagaatgccccacttggaaaacgtggtgctttgtcgcgagtctcaagtgtccatcttgcagtccttgtttggagagagacatcatttcagctttccatccatttttatttatggacatactgctagtggaaagacctatgtaacacaaacgttgttgaaaactttagagctcccacatgtgtttgtgaattgtgttgaatgctttacattgaggctgcttttggaacaaattttaaacaaattgaatcatcttagttcttcagaggatggatgttctactgaaataacctgtgaaacatttaatgactttgttcgcttgtttaaacaagtaaccacagctgaaaatcttaaagatcagactgtatatattgttctagataaagcagagtatctaagagatatggaagcaaatcttttgcctggatttcttagattacaagaattggctgacagaaatgtgactgttctctttctcagtgaaattgtttgggaaaagtttcgtccaaatactggatgctttgagccgtttgtcttatatttccctgattacagcataggcaaccttcaaaagatcctgtcccatgatcatcctccagagtattcagctgatttctatgctgcctacattaacattcttcttggagttttctacactgtttgtcgagatttgaaagagctcagacatctggcagtacttaattttcctaaatattgtgaacccgtggttaaaggagaagcaagtgaacgtgatactcgcaaactgtggagaaatattgaacctcatttgaagaaagctatgcagactgtttatctcagggaaatatcaagttcccagtgggaaaagctacagaaagatgacacagatccggggcaactgaaaggtatcagaggaagtattgagacagttaccggagatacttcttcagctaattatcaagatactaaagttaatactaaagagcattcagtcaggaaatagtgttataaaagagaatttacttttcaagctataatgctattttgattaatgatttttctttaactgaagctctaatttaatgggaggaaataaaagtttgaataccagctttctattttctaaatattggattatatcatgaaaatcaagcagtttctatttctttaaatgcttttattaaagcaatctaattatgtgacagttttatctcattatgtttatatttcatgagttttatggaataaaatgtaattttatgttaatcggtttgggatatgcactttggtggttatgttttgaaaacattgtgcttttgtttaagaaaactactactttggattcatcccaaatattaaatagaactaattttacttaaaaaaa

SEQ ID NO: 162737 - DNA, 344 bp, Homo sapiens
  Payload ID: 12066
  Gene Symbol: ORC5
  Gene Name: origin recognition complex, subunit 5
  ENST ID: ENST00000626700
  CDS Start-End: 144-344
agcccggcagcgcaggctcctcccacgacgctgcgggtccggtttccggcgggagcgtgggccgccagactcgggagaggctccgtcttgtgcaagggtcctgtgggctggctgcactggcctctgcggtggtgcctgccagaatgccccacttggaaaacgtggtgctttgtcgcgagtctcaagtgtccatcttgcagtccttgtttggagagagacatcatttcagctttccatccatttttatttatggacatactgctagtggaaagacctatgtaacacaaacgttgttgaaaactttagagggactcagacaggcacttagaatatgctgcctttaa

SEQ ID NO: 162738 - DNA, 1628 bp, Homo sapiens
  Payload ID: 12067
  Gene Symbol: ORC6
  Gene Name: origin recognition complex, subunit 6
  Uniprot ID: Q9Y5N6
  ENST ID: ENST00000219097
  CDS Start-End: 61-819
gcgcgcgggtttcgttgacccgcggcgttcacgggaattgttcgctttagtgccggcgccatggggtcggagctgatcgggcgcctagccccgcgcctgggcctcgccgagcccgacatgctgaggaaagcagaggagtacttgcgcctgtcccgggtgaagtgtgtcggcctctccgcacgcaccacggagaccagcagtgcagtcatgtgcctggaccttgcagcttcctggatgaagtgccccttggacagggcttatttaattaaactttctggtttgaacaaggagacatatcagagctgtcttaaatcttttgagtgtttactgggcctgaattcaaatattggaataagagacctagctgtacagtttagctgtatagaagcagtgaacatggcttcaaagatactaaaaagctatgagtccagtcttccccagacacagcaagtggatcttgacttatccaggccacttttcacttctgctgcactgctttcagcatgcaagattctaaagctgaaagtggataaaaacaaaatggtagccacatccggtgtaaaaaaagctatatttgatcgactgtgtaaacaactagagaagattggacagcaggtcgacagagaacctggagatgtagctactccaccacggaagagaaagaagatagtggttgaagccccagcaaaggaaatggagaaggtagaggagatgccacataaaccacagaaagatgaagatctgacacaggattatgaagaatggaaaagaaaaattttggaaaatgctgccagtgctcaaaaggctacagcagagtgatttcagcttccaaactggtatacattccaaactgatagtacattgccatctccaggaagacttgacggctttgggattttgtttaaacttttataataaggatcctaagactgttgcctttaaatagcaaagcagcctacctggaggctaagtctgggcagtgggctggcccctggtgtgagcattagaccagccacagtgcctgattggtatagccttatgtgctttcctacaaaatggaattggaggccgggcgcagtggctcacgcctgtaatcccagcactttgggaggccaaggtgggtggatcacctgaggtcaggagctcgagaccagcctggccaacatggtgaaaccccatctctactaaaaatacaaaaattagccaggtgtgatggtgcatgcctgtaatcccagctcctcagtaggctgagacaggagcatcacttgaacgtgggaggcagaggttgcagtgagccgagattgcaccaccgcactccagcctgggtgacagagcgagacttatctcataaataaatagatagatactccagcctgggtgacagagcgagacttatagatagatagatagatagatggatagatagatagatagatagatagatagataaacggaattggagccattttgctttaagtgaatggcagtcccttgtcttattcagaatataaaattcagtctgaatggcatcttacagattttacttcaatttttgtgtacggtattttttatttgactaaatcaatatattgtacagcctaagttaataaatgttatttatatatgca

SEQ ID NO: 162739 - DNA, 681 bp, Homo sapiens
  Payload ID: 12067
  Gene Symbol: ORC6
  Gene Name: origin recognition complex, subunit 6
  ENST ID: ENST00000563599
  CDS Start-End: 64-174
tttgcgcgcgggtttcgttgacccgcggcgttcacgggaattgttcgctttagtgccggcgccatggggtcggagctgatcgggcgcctagccccgcgcctgggcctcgccgagcccgacatgctgagaccagcagtgcagtcatgtgcctggaccttgcagcttcctggatgaagtgccccttggacagggcttatttaattaaactttctggtttgaacaaggagacatatcagagctgtcttaaatcttttgagtgtttactgggcctgaattcaaatattggaataagagacctagctgtacagtttagctgtatagaagcagtgaacatggcttcaaagatactaaaaagctatgagtccagtcttccccagacacagcaagtggatcttgacttatccaggccacttttcacttctgctgcactgctttcagcatgcaagattctaaagctgaaagtggataaaaacaaaatggtagccacatccggtgtaaaaaaagctatatttgatcgactgtgtaaacaactagagaagattggacagcaggtcgacagagaacctggagatgtagctactccaccacggaagagaaagaagatagtggttgaagccccagcaaaggaaatggagaaggtagaggagatgccacataaaccacagaaagatgaagatctga

SEQ ID NO: 162740 - DNA, 1699 bp, Homo sapiens
  Payload ID: 12067
  Gene Symbol: ORC6
  Gene Name: origin recognition complex, subunit 6
  ENST ID: ENST00000566860
  CDS Start-End: 288-899
aagcatttgagcacagtgatgtttggagtcagtgctggttctgtcttcctctcaccagaggatatgaccttcattcccagccccagataaacgagccacaggagttaggcttagtgtgaagctaaccaggctgtattcattgtttaccaacgtgttgagcaaacttctgaataagttgtagcgaacacactgcccttttaaccaggaaagcagaggagtacttgcgcctgtcccgggtgaagtgtgtcggcctctccgcacgcaccacggagaccagcagtgcagtcatgtgcctggaccttgcagcttcctggatgaagtgccccttggacagggcttatttaattaaactttctggtttgaacaaggagacatatcagagctgtcttaaatcttttgagtgtttactgggcctgaattcaaatattggaataagagacctagctgtacagtttagctgtatagaagcagtgaacatggcttcaaagatactaaaaagctatgagtccagtcttccccagacacagcaagtggatcttgacttatccaggccacttttcacttctgctgcactgctttcagcatgcaagattctaaagctgaaagtggataaaaacaaaatggtagccacatccggtgtaaaaaaagctatatttgatcgactgtgtaaacaactagagaagattggacagcaggtcgacagagaacctggagatgtagctactccaccacggaagagaaagaagatagtggttgaagccccagcaaaggaaatggagaaggtagaggagatgccacataaaccacagaaagatgaagatctgacacaggattatgaagaatggaaaagaaaaattttggaaaatgctgccagtgctcaaaaggctacagcagagtgatttcagcttccaaactggtatacattccaaactgatagtacattgccatctccaggaagacttgacggctttgggattttgtttaaacttttataataaggatcctaagactgttgcctttaaatagcaaagcagcctacctggaggctaagtctgggcagtgggctggcccctggtgtgagcattagaccagccacagtgcctgattggtatagccttatgtgctttcctacaaaatggaattggaggccgggcgcagtggctcacgcctgtaatcccagcactttgggaggccaaggtgggtggatcacctgaggtcaggagctcgagaccagcctggccaacatggtgaaaccccatctctactaaaaatacaaaaattagccaggtgtgatggtgcatgcctgtaatcccagctcctcagtaggctgagacaggagcatcacttgaacgtgggaggcagaggttgcagtgagccgagattgcaccaccgcactccagcctgggtgacagagcgagacttatctcataaataaatagatagatactccagcctgggtgacagagcgagacttatagatagatagatagatagatggatagatagatagatagatagatagatagataaacggaattggagccattttgctttaagtgaatggcagtcccttgtcttattcagaatataaaattcagtctgaatggcatcttacagattttacttcaatttttgtgtacggtattttttatttgactaaatcaatatattgtacagcctaagttaataaatgttattt

SEQ ID NO: 162741 - DNA, 888 bp, Homo sapiens
  Payload ID: 12067
  Gene Symbol: ORC6
  Gene Name: origin recognition complex, subunit 6
  ENST ID: ENST00000568364
  CDS Start-End: 10-513
gccggcgccatggggtcggagctgatcgggcgcctagccccgcgcctgggcctcgccgagcccgacatgctgaggaaagcagaggagtacttgcgcctgtcccgggtgaagtgtgtcggcctctccgcacgcaccacggagaccagcagtgcagtcatgtgcctggaccttgcagcttcctggatgaagtgccccttggacagggcttatttaattaaactttctggtttgaacaaggagacatatcagagctgtcttaaatcttttgagtgtttactgggcctgaattcaaatattggaataagagacctagctgtacagtttagctgtatagaagcagtgaacatggcttcaaagatactaaaaagctatgagtccagtcttccccagacacagcaagtggatcttgacttatccaggccacttttcacttctgctgcactgctttcagcatgcaagagaacctggagatgtagctactccaccacggaagagaaagaagatagtggttgaagccccagcaaaggaaatggagaaggtagaggagatgccacataaaccacagaaagatgaagatctgacacaggattatgaagaatggaaaagaaaaattttggaaaatgctgccagtgctcaaaaggctacagcagagtgatttcagcttccaaactggtatacattccaaactgatagtacattgccatctccaggaagacttgacggctttgggattttgtttaaacttttataataaggatcctaagactgttgcctttaaatagcaaagcagcctacctggaggctaagtctgggcagtgggctggcccctggtgtgagcattagaccagccacagtgcctgattggtatagccttatgtgctttcctac

SEQ ID NO: 162742 - DNA, 2692 bp, Homo sapiens
  Payload ID: 12068
  Gene Symbol: ORMDL1
  Gene Name: ORMDL sphingolipid biosynthesis regulator 1
  Uniprot ID: Q9P0S3
  ENST ID: ENST00000325795
  CDS Start-End: 788-1249
attttaagcaattcttagtctcaagtaaacaccatcattaaaagaactgagaactattatcaattcttcctttggagtccatcttcaatggaaaggagaagggaaaaccttttttaaaaagaagaaagaaaactgaagtttttgatttgactagagaaatattcagaagactccttattttcacctagtttaatcacaaaattgagaaacaaacattatcccttgaccatgtaaattttacaccacattatgtcaacagcatgtaccttccacattgagtattcagaaagaagtgatctgaactctgaccattctttatggatacattaagtcaaatataagagtctgactacttgacacactggctcggtgagttctgctttttctttttaatataaatttattatgttggtaaatttagcttttggcttttcactttgctctcatgatataagaaaatgtaggttttctctttcagtttgaattttcctattcagtaaaacaacatgctagaaaacaaacttttggaaaggcattgtaactattttttcaaatagaaccataataacaagtcttgtcttaccctaaagtcaaatgctgaagattctttactgctgtcatcagcatctacaagtagcatattttggatggtgtttgtgtgctacttcaaagtaactaggaaaaaataatcctcgcaacacaggtaccttgtcatgtcagaattgggggtgttaggttgccagttgtatcagtgttgattcatttcattacttcctacagagcaaacatgaacgttggagttgcccacagtgaagtgaatccaaatacccgtgtcatgaacagccggggtatgtggctgacatatgcattgggagttggcttgcttcatattgtcttactcagcattcccttcttcagtgttcctgttgcttggactttaacaaatattatacataatctggggatgtacgtatttttgcatgcagtgaaaggaacacctttcgaaactcctgaccagggtaaagcaaggctcctaactcattgggaacaactggactatggagtacagtttacatcttcacggaagtttttcacaatttctccaataattctatattttctggcaagtttctatacgaagtatgatccaactcacttcatcctaaacacagcttctctcctgagtgtactaattcccaaaatgccacaactacatggtgttcggatctttggaattaataagtattgaaatgttttgaaactgaaaaaaaattttacagctactgaatttcttataaggaaggagtggttagtaaactgcactgtttctgtgataatgtgaaatgagaagtatttacattggagggccaatggctggtccttcaagtgctgttttgaagtgcagatttccattaaatgatgcctctgtttaatacacctggtacatttctgaagaggggctttataagcaggctgggcaggcccagcttataagttaaagggcatcacagtgagggtgtagtagataaattcaaggaaataagagatttgtaagaaactaggaccagcttaacttataatgaatgggcattgtgttaagaaaagaacatttccagtcattcagctgtggttatttaaagcagacttacatgtaaaccggaatcctctctatacaagtttattaaagattatttttattaccgtacatatttctcgttttatgtaagcggatgtatatcctcttgttttatacaagccagttcccacttatgagggtacttttttggttttgctggcttaatattgtgtattggtcaatgaggccatttttacatttattacgttacagagttcatggaggttcacctttgtgactgattggtgataaaagatagccaagtgtcttacaagcagcttctgagtcaagtgttctaattttggaacaaagcaggttttactgcttttccagacacaaggctgctaaaccaattaagaaaataattaatttctttcaagcaactaaaaaatatatggtaatttaaaggtgtctgcttatttggttgaacaatttaattgggaaagtttgtcatcatttgaaaaaggaaatataaaaggaacaaccatatagccaacctgtggtctggcagaaacaacgtctctagcaatagtaccaaagtaagtaatggagtcttttttttggcaggtctgcagtaaaagataacattttcttttcttagtcctcctgctctcaacccccatattttgcctttgaatacgtgggttttagtatatatagcccaaaatggtaactgtctccagaacagcaaccacattgaattcttgtgacttaggaaagcttcttatagttgctgacattaattgcaagaaataactatatactactttgagaagtaaacatgtcaaaaaaaacaaagttcagatatgggacaaaatttaaaaattcagtaacatttataaacagaattgaatgaaaagagttacagaccaacttaaacatcaattcgtgtcagtaaactgacttttgggggtaatgatcattgttttgtatctcaaaagtattgagtttagaaatcagttgtatgatactacctttgtatgtctgtcttttcccgtgtatttttaaataactggtgatctataatttaataaaatttttcgttggtgtaatatt

SEQ ID NO: 162743 - DNA, 1137 bp, Homo sapiens
  Payload ID: 12068
  Gene Symbol: ORMDL1
  Gene Name: ORMDL sphingolipid biosynthesis regulator 1
  Uniprot ID: Q9P0S3
  ENST ID: ENST00000392349
  CDS Start-End: 221-682
agcttccgcaagctgcgcagcgccgggcctgagggcgtgtatccgcggccgtagcagccgggctggtcctgctgcgagccggcggcccggagtggggcggcggcatgtaccttccacattgagtattcagaaagaagtgatctgaactctgaccattctttatggatacattaagtcaaatataagagtctgactacttgacacactggctcgagcaaacatgaacgttggagttgcccacagtgaagtgaatccaaatacccgtgtcatgaacagccggggtatgtggctgacatatgcattgggagttggcttgcttcatattgtcttactcagcattcccttcttcagtgttcctgttgcttggactttaacaaatattatacataatctggggatgtacgtatttttgcatgcagtgaaaggaacacctttcgaaactcctgaccagggtaaagcaaggctcctaactcattgggaacaactggactatggagtacagtttacatcttcacggaagtttttcacaatttctccaataattctatattttctggcaagtttctatacgaagtatgatccaactcacttcatcctaaacacagcttctctcctgagtgtactaattcccaaaatgccacaactacatggtgttcggatctttggaattaataagtattgaaatgttttgaaactgaaaaaaaattttacagctactgaatttcttataaggaaggagtggttagtaaactgcactgtttctgtgataatgtgaaatgagaagtatttacattggagggccaatggctggtccttcaagtgctgttttgaagtgcagatttccattaaatgatgcctctgtttaatacacctggtacatttctgaagaggggctttataagcaggctgggcaggcccagcttataagttaaagggcatcacagtgagggtgtagtagataaattcaaggaaataagagatttgtaagaaactaggaccagcttaacttataatgaatgggcattgtgttaagaaaagaacatttccagtcattcagctgtggttatttaaagcagacttacatgtaaaccggaatcctctctatacaagtttattaaagattatttttattaccgt

SEQ ID NO: 162744 - DNA, 2009 bp, Homo sapiens
  Payload ID: 12068
  Gene Symbol: ORMDL1
  Gene Name: ORMDL sphingolipid biosynthesis regulator 1
  Uniprot ID: Q9P0S3
  ENST ID: ENST00000392350
  CDS Start-End: 104-565
gcaagctgcgcagcgccgggcctgagggcgtgtatccgcggccgtagcagccgggctggtcctgctgcgagccggcggcccggagtggggcggcggagcaaacatgaacgttggagttgcccacagtgaagtgaatccaaatacccgtgtcatgaacagccggggtatgtggctgacatatgcattgggagttggcttgcttcatattgtcttactcagcattcccttcttcagtgttcctgttgcttggactttaacaaatattatacataatctggggatgtacgtatttttgcatgcagtgaaaggaacacctttcgaaactcctgaccagggtaaagcaaggctcctaactcattgggaacaactggactatggagtacagtttacatcttcacggaagtttttcacaatttctccaataattctatattttctggcaagtttctatacgaagtatgatccaactcacttcatcctaaacacagcttctctcctgagtgtactaattcccaaaatgccacaactacatggtgttcggatctttggaattaataagtattgaaatgttttgaaactgaaaaaaaattttacagctactgaatttcttataaggaaggagtggttagtaaactgcactgtttctgtgataatgtgaaatgagaagtatttacattggagggccaatggctggtccttcaagtgctgttttgaagtgcagatttccattaaatgatgcctctgtttaatacacctggtacatttctgaagaggggctttataagcaggctgggcaggcccagcttataagttaaagggcatcacagtgagggtgtagtagataaattcaaggaaataagagatttgtaagaaactaggaccagcttaacttataatgaatgggcattgtgttaagaaaagaacatttccagtcattcagctgtggttatttaaagcagacttacatgtaaaccggaatcctctctatacaagtttattaaagattatttttattaccgtacatatttctcgttttatgtaagcggatgtatatcctcttgttttatacaagccagttcccacttatgagggtacttttttggttttgctggcttaatattgtgtattggtcaatgaggccatttttacatttattacgttacagagttcatggaggttcacctttgtgactgattggtgataaaagatagccaagtgtcttacaagcagcttctgagtcaagtgttctaattttggaacaaagcaggttttactgcttttccagacacaaggctgctaaaccaattaagaaaataattaatttctttcaagcaactaaaaaatatatggtaatttaaaggtgtctgcttatttggttgaacaatttaattgggaaagtttgtcatcatttgaaaaaggaaatataaaaggaacaaccatatagccaacctgtggtctggcagaaacaacgtctctagcaatagtaccaaagtaagtaatggagtcttttttttggcaggtctgcagtaaaagataacattttcttttcttagtcctcctgctctcaacccccatattttgcctttgaatacgtgggttttagtatatatagcccaaaatggtaactgtctccagaacagcaaccacattgaattcttgtgacttaggaaagcttcttatagttgctgacattaattgcaagaaataactatatactactttgagaagtaaacatgtcaaaaaaaacaaagttcagatatgggacaaaatttaaaaattcagtaacatttataaacagaattgaatgaaaagagttacagaccaacttaaacatcaattcgtgtcagtaaactgacttttgggggtaatgatcattgttttgtatctcaaaagtattgagtttagaaatcagttgtatgatactacctttgtatgtctgtcttttcccgtgtatttttaaataactggtgatctataatttaataaaatttttcgttggtgtaatatta

SEQ ID NO: 162745 - DNA, 1223 bp, Homo sapiens
  Payload ID: 12068
  Gene Symbol: ORMDL1
  Gene Name: ORMDL sphingolipid biosynthesis regulator 1
  ENST ID: ENST00000409519
  CDS Start-End: 58-387
gcagccgggctggtcctgctgcgagccggcggcccggagtggggcggcggagcaaacatgaacgttggagttgcccacagtgaagtgaatccaaatacccgtgtcatgaacagccggggtatgtggctgacatatgcattgggagttggcttgcttcatattgtcttactcagcattcccttcttcagtgttcctgttgcttggactttaacaaatattatacataatctggggatgtacgtatttttgcatgcagtgaaaggaacacctttcgaaactcctgaccagggtaaagcaaggctcctaactcattgggaacaactggactatggagtacagtttacatcttcacggaagtttttcacaatttctccaataattctgtaagtggcagaaatttttaggtatgaggaggattggataagaggaagatatcttttcatcagattgaattggaattagaaacatattttgttgcaaacttctatcaataagtagcacctcggatagaacataaaatatagacaaaatttttaacaagttgataataaactaattttcacttcagtcagtacatatacggagacaatattacatgctaatcagtgcacctagacatttaggatatacaggtcaaatgtattccagctcccgtccttaggtttcatataaggacacaaaatacataatcatattctatattgcactgtcagattaatctccttaagcaatgatttagataatgagaagaatttcactggccacctatcctattaagatattcagactccttgggaaagagtatggtttcgaaaaaagtaggtcaggctttcattataggatagacctgggtggagtcctatatatatcactcagccagcttggtttgctcatatataaaattctagctagtgatacctaattcaatcctaatgctgtaagaaataaatgagataataatctacctggatagcatgtaacctgtatctggtatctaatttctttctcctatctgatgttctgggccttccagaaaatagttcttacctccttttcccttgatgtaaatattttatccccacccaactcctacctggccttctaagcagcatttcttgaatatttcatgtgtagtcctatttctgtctttgttcaaatcagttcaaatcatatctcctacctgaaatgcctcctccttttttccccagctttactgaggtata

SEQ ID NO: 162746 - DNA, 914 bp, Homo sapiens
  Payload ID: 12068
  Gene Symbol: ORMDL1
  Gene Name: ORMDL sphingolipid biosynthesis regulator 1
  ENST ID: ENST00000458355
  CDS Start-End: 589-914
cgcggccgtagcagccgggctggtcctgctgcgagccggcggcccggagtggggcggcggcatgtaccttccacattgagtattcagaaagaagtgatctgaactctgaccattctttatggatacattaagtcaaatataagagtctgactacttgacacactggctcggtgagttctgctttttctttttaatataaatttattatgttggtaaatttagcttttggcttttcactttgctctcatgatataagaaaatgtaggttttctctttcagtttgaattttcctattcagtaaaacaacatgctagaaaacaaacttttggaaaggcattgtaactattttttcaaatagaaccataataacaagtcttgtcttaccctaaagtcaaatgctgaagattctttactgctgtcatcagcatctacaagtagcatattttggatggtgtttgtgtgctacttcaaagtaactaggaaaaaataatcctcgcaacacaggtaccttgtcatgtcagaattgggggtgttaggttgccagttgtatcagtgttgattcatttcattacttcctacagagcaaacatgaacgttggagttgcccacagtgaagtgaatccaaatacccgtgtcatgaacagccggggtatgtggctgacatatgcattgggagttggcttgcttcatattgtcttactcagcattcccttcttcagtgttcctgttgcttggactttaacaaatattatacataatctggggatgtacgtatttttgcatgcagtgaaaggaacacctttcgaaactcctgaccagggtaaagcaaggctcctaactcattgggaacaactggactatggagtacagtttacatcttcacggaagtttttcacaatttctccaataattct

SEQ ID NO: 162747 - DNA, 893 bp, Homo sapiens
  Payload ID: 12068
  Gene Symbol: ORMDL1
  Gene Name: ORMDL sphingolipid biosynthesis regulator 1
  ENST ID: ENST00000442547
  CDS Start-End: 568-893
tatgggtctctagagcggaaggagcattatactccggaaacatttgctggaaggggttatgagaaattcctctctgtatgctaactccgtaatacaagcgtttgtgtattttaaaatcacagctgttccaaatataatctagcctcgttttccccctccgtcggatgataggtgttcttcaggacagttttattttaagcaattcttagtctcaagtaaacaccatcattaaaagaactgagaactattatcaattcttcctttggagtccatcttcaatggaaaggagaagggaaaaccttttttaaaaagaagaaagaaaactgaagtttttgatttgactagagaaatattcagaagactccttattttcacctagtttaatcacaaaattgagaaacaaacattatcccttgaccatgtaaattttacaccacattatgtcaacagcatgtaccttccacattgagtattcagaaagaagtgatctgaactctgaccattctttatggatacattaagtcaaatataagagtctgactacttgacacactggctcgagcaaacatgaacgttggagttgcccacagtgaagtgaatccaaatacccgtgtcatgaacagccggggtatgtggctgacatatgcattgggagttggcttgcttcatattgtcttactcagcattcccttcttcagtgttcctgttgcttggactttaacaaatattatacataatctggggatgtacgtatttttgcatgcagtgaaaggaacacctttcgaaactcctgaccagggtaaagcaaggctcctaactcattgggaacaactggactatggagtacagtttacatcttcacggaagtttttcacaatttctccaataattct

SEQ ID NO: 162748 - DNA, 2141 bp, Homo sapiens
  Payload ID: 12069
  Gene Symbol: ORMDL2
  Gene Name: ORMDL sphingolipid biosynthesis regulator 2
  Uniprot ID: Q53FV1
  ENST ID: ENST00000243045
  CDS Start-End: 196-657
actgtatcttgcgaacgacagaaatggcaaccaactgtgcttctgcattacagaccaccaaccaatgggtggtggcagcgctgattctgttcctccaataggaaaggggcagaaggagaggcgttacttcctggagacttcaggtgtggtagccggcgccgcgcccatagccggacggggatctgagctggcaggatgaatgtgggggtggcacacagcgaagtaaaccccaacacccgagtgatgaatagccgaggcatctggctggcctacatcatcttggtaggattgctgcatatggttctactcagcatccccttcttcagcattcctgttgtctggaccctgaccaacgtcatccataacctggctacgtatgtcttccttcatacggtgaaagggacaccctttgagactcctgaccaaggaaaggctcggctactgacacactgggagcaaatggactatgggctccagtttacctcttcccgcaagttcctcagcatctctcctattgtgctctatctcctggccagcttctataccaagtatgatgctgcgcacttcctcatcaacacagcctcattgctaagtgtactgctgccgaagttgccccagttccatggggttcgtgtctttggcatcaacaaatactgagggatgggttttgggacagctccatgggcatggggaaggcactgaaacagaggactataaaacatccttctcttattctccatactgtcttctacacctttaaagcctgagaactatacaacctttcccagactcccaagaagagaagagattggcaaatggggctcctgggcccagtcctgctagtggcaagtttctttgaatcaggaaggcaggtgaggtaagggccaaatcactctcctccatagcaggaagccatttgggcagcttctttggtgattacatctttccatatcttttacacttaccaccttccagctctgttttgctgtgtatttttcttacaataatttttttcagctatagctgcagtttaatcaggatgggtagagagctgtcctcataaggctgggggtgggaagatggaatactgacctaatgtataaaacttaaaacaattctccaatcccctctcctttggtccagtaggaggtgcccttcactctaagcttaacacttagtagggaagagattctcaaatgagaaaaagggctccggctatatgggcaacaaagagggaagatacaggttgccagttatacatttatagaaagataatcccctggctttaaatagtcatgtacatacaaatatgaacaaacttaaaaaaaaaatacaaacccttggatcacatgggggcttctgggaacccccgtattcttccccctcacccaagggcagtgggcatgaatctactttttaaaaatgattaattttggccatccttgcagaaaagagcctaaaattgggtgatttacccacaaagtgaaagtcgagggaaaattcagtttccagtctctgaactctatgcgataatctcctatcattagggctacatgctttcttgttctcttttaaatattatatcaggataaaggagagggctccctcctgaaatgggtcaagaaagaagatagacttgtagctttaaaagggtgggaaaaagtgtcatctgccctaaaagcaaatgacaagacaaaggcatacagaccccagggaaatacccagttcccacacctaaagggatacactgtccagcccaggtccaggccctaggttctttactctagctaccccctatttctttggtattgtcaaaagacaagattcaggccgggcacagtggcttatgcctgtaatccagcactttgggaggccaagacgggtggatcacctgagctcaggagttcgagaccagcctgggcaacatggtgaaaccccgtctctactaaaaatacaaaaaagaattagctgggccaggtgtggtggtgtgtgcctgtaatcccagctactcaggaggctgagatgggagaattgcttgaacccgggagacagaggttgcagtaagctgagatcacaccactgcactccagctgggcaacagagcaagactccatctcaaaaaataaaaagaaaaagattca

SEQ ID NO: 162749 - DNA, 760 bp, Homo sapiens
  Payload ID: 12069
  Gene Symbol: ORMDL2
  Gene Name: ORMDL sphingolipid biosynthesis regulator 2
  ENST ID: ENST00000552672
  CDS Start-End: 84-443
gttacttcctggagacttcaggtgtggtagccggcgccgcgcccatagccggacggggatctgagctggcaggattgctgcatatggttctactcagcatccccttcttcagcattcctgttgtctggaccctgaccaacgtcatccataacctggctacgtatgtcttccttcatacggtgaaagggacaccctttgagactcctgaccaaggaaaggctcggctactgacacactgggagcaaatggactatgggctccagtttacctcttcccgcaagttcctcagcatctctcctattgtgctctatctcctggccagcttctataccaagtatgatgctgcgcacttcctcatcaacacagcctcattgctaagtgtactgctgccgaagttgccccagttccatggggttcgtgtctttggcatcaacaaatactgagggatgggttttgggacagctccatgggcatggggaaggcactgaaacagaggactataaaacatccttctcttattctccatactgtcttctacacctttaaagcctgagaactatacaacctttcccagactcccaagaagagaagagattggcaaatggggctcctgggcccagtcctgctagtggcaagtttctttgaatcaggaaggcaggtgaggtaagggccaaatcactctcctccatagcaggaagccatttgggcagcttctttggtgattacatctttccatatcttttacacttaccaccttcca

SEQ ID NO: 162750 - DNA, 671 bp, Homo sapiens
  Payload ID: 12069
  Gene Symbol: ORMDL2
  Gene Name: ORMDL sphingolipid biosynthesis regulator 2
  Uniprot ID: Q53FV1
  ENST ID: ENST00000548974
  CDS Start-End: 92-553
atcagctttagagctaccacaattttaaagatccgagttcagataatcactgctgcccctggagtcagagccaaggctccacctttcgaggatgaatgtgggggtggcacacagcgaagtaaaccccaacacccgagtgatgaatagccgaggcatctggctggcctacatcatcttggtaggattgctgcatatggttctactcagcatccccttcttcagcattcctgttgtctggaccctgaccaacgtcatccataacctggctacgtatgtcttccttcatacggtgaaagggacaccctttgagactcctgaccaaggaaaggctcggctactgacacactgggagcaaatggactatgggctccagtttacctcttcccgcaagttcctcagcatctctcctattgtgctctatctcctggccagcttctataccaagtatgatgctgcgcacttcctcatcaacacagcctcattgctaagtgtactgctgccgaagttgccccagttccatggggttcgtgtctttggcatcaacaaatactgagggatgggttttgggacagctccatgggcatggggaaggcactgaaacagaggactataaaacatccttctcttattctccatactgtcttctacacctttaaagcctgagaactata

SEQ ID NO: 162751 - DNA, 438 bp, Homo sapiens
  Payload ID: 12069
  Gene Symbol: ORMDL2
  Gene Name: ORMDL sphingolipid biosynthesis regulator 2
  ENST ID: ENST00000550836
  CDS Start-End: 160-357
acttcctggagacttcaggtgtggtagccggcgccgcgcccatagccggacggggatctgagctggcaggctacgtatgtcttccttcatacggtgaaagggacaccctttgagactcctgaccaaggaaaggctcggctactgacacactgggagcaaatggactatgggctccagtttacctcttcccgcaagttcctcagcatctctcctattgtgctctatctcctggccagcttctataccaagtatgatgctgcgcacttcctcatcaacacagcctcattgctaagtgtactgctgccgaagttgccccagttccatggggttcgtgtctttggcatcaacaaatactgagggatgggttttgggacagctccatgggcatggggaaggcactgaaacagaggactataaaacatccttctcttattctcc

SEQ ID NO: 162752 - DNA, 2111 bp, Homo sapiens
  Payload ID: 12070
  Gene Symbol: ORMDL3
  Gene Name: ORMDL sphingolipid biosynthesis regulator 3
  Uniprot ID: Q8N138
  ENST ID: ENST00000304046
  CDS Start-End: 141-602
gattcggccggagctgccagcggggaggctgcagccgcgggttgttacagctgctggagcagcagcggcccccgctcccgggaaccgttcccgggccgttgatcttcggccccacacgaacagcagagaggggcagcaggatgaatgtgggcacagcgcacagcgaggtgaaccccaacacgcgggtgatgaacagccgtggcatctggctctcctacgtgctggccatcggtctcctccacatcgtgctgctgagcatcccgtttgtgagtgtccctgtcgtctggaccctcaccaacctcattcacaacatgggcatgtatatcttcctgcacacggtgaaggggacaccctttgagaccccggaccagggcaaggcgaggctgctaacccactgggagcagatggattatggggtccagttcacggcctctcggaagttcttgaccatcacacccatcgtgctgtacttcctcaccagcttctacactaagtacgaccagatccattttgtgctcaacaccgtgtccctgatgagcgtgcttatccccaagctgccccagctccacggagtccggatttttggaatcaataagtactgagagtgcagccccttcccctgcccagggtggcaggggaggggtagggtaaaaggcatgtgctgcaacactgaagacagaaagaagaagcctctggacactgccagagatgggggttgagcctctggcctaatttcccccctcgcttcccccagtagccaacttggagtagcttgtagtggggttggggtaggccccctgggctctgaccttttctgaattttttgatcttttccttttgctttttgaatagagactccatggagttggtcatggaatgggctgggctcctgggctgaacatggaccacgcagttgcgacaggaggccaggggaaaaacccctgctcacttgtttgccctcaggcagccaaagcactttaacccctgcatagggagcagagggcggtacggcttctggattgtttcactgtgattcctaggttttttcgatgccacgcagtgtgtgcttttgtgtatggaagcaagtgtgggatgggtctttgcctttctgggtagggagctgtctaatccaagtcccaggcttttggcagcttctctgcaacccaccgtgggtcctggttgggagtggggagggtcaggttggggaaagatggggtagagtgtagatggcttggttccagaggtgagggggccagggctgctgccatcctggcctggtggaggttggggagctgtaggagagctagtgagtcgagacttagaagaatggggccacatagcagcagaggactggtgtaagggagggaggggtagggacagaagctagacccaatctcctttgggatgtgggcagggagggaagcaggcttggagggttaatttacccacagaatgtgatagtaataggggagggaggctgctgtgggtttaactcctgggttggctgttgggtagacaggtggggaaaaggcccgtgagtcattgtaagcacaggtccaacttggccctgactcctgcgggggtatggggaagctgtgacagaaacgatgggtgctgtggtcctctgcaggccctcaccccttaacttcctcatacagactggcactgggcagggcctctcatgtggcagccacatgtggcgttgtgaggccaccccatgtggggtctgtggtgagagtcctgtaggatccctgctcaagcagcacagaggaaggggcaagacgtggcctgtaggcactgtctcagcctgcagagaagaaagtgaggccgggagcctgagcctgggctggagccttctcccctccccagttggactaggggcagtgttaattttgaaaaggtgtgggtccctgtgtcctcttccaggggtccaagggaacgggagaggtcactgggcctgttttctccctcctgaccctgcatctcccaccccgtgtatcatagggaactttcaccttaaaatctttctaagcaaagtgtgaataggatttttactccctttgtacagtattctgagaaacgcaaataaaagggcaacatgtttctgtttc

SEQ ID NO: 162753 - DNA, 2230 bp, Homo sapiens
  Payload ID: 12070
  Gene Symbol: ORMDL3
  Gene Name: ORMDL sphingolipid biosynthesis regulator 3
  Uniprot ID: Q8N138
  ENST ID: ENST00000394169
  CDS Start-End: 1496-1957
gtgctcctcttccagaagacaggaggtttgctgttgtgagggctgctctttcctgggggagggaatgggaagggctcacctggtggctgccctggtggtgctcagccttggcttgagtgtctggcatactggctgggcccggatatttgtatgtggagccaagagggtggggcgggaaggagggggaaagagctaccagcaaaaaagtggttaacacaacagagttgctgcaggctctggtttgaggcaggttatgaaaccacatcagggcccagcactaagcagccacctgccagctatggcagcagaagttttcggctcaactcctgtagacctagtcgacctctgccagcctcttctctctgtttctccccatctagggtaggggccagttggttgttttactaatggaagtgatatgtatccatagtcacacgaaagtctcaagagtgtttcctcattgccagtctttttgttagtttattgatctcttctttttcaggggtctctggtggtttcctgctctcagggcacctagtgtttaggcttcaggaagaagcttctgagggtgttggctaggacctaggtctaggcttttcctaggctcatcaagttttgttggctgccctgtgaaagccagaaaggcgtatggggtcctgtgatctgggattccccaaggcttttggcactcctggacaaatactaggaagggttagtggactttctataccagcacccctgtaggtgcgggttacagagaggtgatggggtggcagtttcaggtcagacttgggaagctctttccctctccttagtcagagttaagtccttcagagccctcacttgtcagccacatgccgccctcccctctcaggtggaggcttttgcgtagcagctgtcccaggggctgctagagtaactgaagccccaaggccctgggaagataaacaatctgagccagctctggctttctagatacttgaatttctgttaggctcaattatccagcctagtgggctgcgctgatgggtcccaggagcatctcttcaatcagaatgcgccccaggctggcgcacgggtgtttgcttgttgggatggcgtgttgtgggtcacattttctctgaggtctctaagcttggagctgtctgagaagaggaaacttgctcctgttatcctggaagtaaataactggcccctgaggactcagtctcctgtgcagggccctcagggatctggggacagccaaactctggataaggggcagatcattccaccccttccttctctacttccctctgctcactgtgggttgcggccacctcctggttcctcctgctgcaggactcctaccgttggtgctgggcaggggaaggcatggtgctaatatacacctggaaacaggtgctgagaggggagactgagtcctcctaagttggggtttggggagatccagaattgaaaaaatcagaggagaacagcagagaggggcagcaggatgaatgtgggcacagcgcacagcgaggtgaaccccaacacgcgggtgatgaacagccgtggcatctggctctcctacgtgctggccatcggtctcctccacatcgtgctgctgagcatcccgtttgtgagtgtccctgtcgtctggaccctcaccaacctcattcacaacatgggcatgtatatcttcctgcacacggtgaaggggacaccctttgagaccccggaccagggcaaggcgaggctgctaacccactgggagcagatggattatggggtccagttcacggcctctcggaagttcttgaccatcacacccatcgtgctgtacttcctcaccagcttctacactaagtacgaccagatccattttgtgctcaacaccgtgtccctgatgagcgtgcttatccccaagctgccccagctccacggagtccggatttttggaatcaataagtactgagagtgcagccccttcccctgcccagggtggcaggggaggggtagggtaaaaggcatgtgctgcaacactgaagacagaaagaagaagcctctggacactgccagagatgggggttgagcctctggcctaatttcccccctcgcttcccccagtagccaacttggagtagcttgtagtggggttggggtaggccccctgggctctgaccttttctgaattttttgatcttttccttttgctttttgaatagagactccatggagttggtcatgg

SEQ ID NO: 162754 - DNA, 561 bp, Homo sapiens
  Payload ID: 12070
  Gene Symbol: ORMDL3
  Gene Name: ORMDL sphingolipid biosynthesis regulator 3
  ENST ID: ENST00000581284
  CDS Start-End: 1-307
caacctcattcacaacatgggcatgtatatcttcctgcacacggtgaaggggacaccctttgagaccccggaccagggcaaggcgaggctgctaacccactgggagcagatggattatggggtccagttcacggcctctcggaagttcttgaccatcacacccatcgtgctgtacttcctcaccagcttctacactaagtacgaccagatccattttgtgctcaacaccgtgtccctgatgagcgtgcttatccccaagctgccccagctccacggagtccggatttttggaatcaataagtactgagagtgcagccccttcccctgcccagggtggcaggggaggggtagggtaaaagagactccatggagttggtcatggaatgggctgggctcctgggctgaacatggaccacgcagttgcgacaggaggccaggggaaaaacccctgctcacttgtttgccctcaggcagccaaagcactttaacccctgcatagggagcagagggcggtacggcttctggattgtttcactgtgattcctaggttttttcgatgcc

SEQ ID NO: 162755 - DNA, 572 bp, Homo sapiens
  Payload ID: 12070
  Gene Symbol: ORMDL3
  Gene Name: ORMDL sphingolipid biosynthesis regulator 3
  ENST ID: ENST00000584000
  CDS Start-End: 186-572
gataaacgtttggctgcctccagggctgggtgaacgcgtggagatggctgtggggtcccggaccggaccgggttccgagtgcgaagacccaggctggggaacagagcgggacccctccccccggccccgcacccgaggtctcactcagaaaaccccaacaacaaacagcagagaggggcagcaggatgaatgtgggcacagcgcacagcgaggtgaaccccaacacgcgggtgatgaacagccgtggcatctggctctcctacgtgctggccatcggtctcctccacatcgtgctgctgagcatcccgtttgtgagtgtccctgtcgtctggaccctcaccaacctcattcacaacatgggcatgtatatcttcctgcacacggtgaaggggacaccctttgagaccccggaccagggcaaggcgaggctgctaacccactgggagcagatggattatggggtccagttcacggcctctcggaagttcttgaccatcacacccatcgtgctgtacttcctcaccagcttctacactaagtacgaccagatccattttgtgctcaacaccgtg

SEQ ID NO: 162756 - DNA, 414 bp, Homo sapiens
  Payload ID: 12070
  Gene Symbol: ORMDL3
  Gene Name: ORMDL sphingolipid biosynthesis regulator 3
  Uniprot ID: Q8N138
  ENST ID: ENST00000584220
  CDS Start-End: 1-414
atgaatgtgggcacagcgcacagcgaggtgaaccccaacacgcgggtgatgaacagccgtggcatctggctctcctacgtgctggccatcggtctcctccacatcgtgctgctgagcatcccgtttggcatgtatatcttcctgcacacggtgaaggggacaccctttgagaccccggaccagggcaaggcgaggctgctaacccactgggagcagatggattatggggtccagttcacggcctctcggaagttcttgaccatcacacccatcgtgctgtacttcctcaccagcttctacactaagtacgaccagatccattttgtgctcaacaccgtgtccctgatgagcgtgcttatccccaagctgccccagctccacggagtccggatttttggaatcaataagtactga

SEQ ID NO: 162757 - DNA, 2106 bp, Homo sapiens
  Payload ID: 12070
  Gene Symbol: ORMDL3
  Gene Name: ORMDL sphingolipid biosynthesis regulator 3
  Uniprot ID: Q8N138
  ENST ID: ENST00000579695
  CDS Start-End: 136-597
gattcggccggagctgccagcggggaggctgcagccgcgggttgttacagctgctggagcagcagcggcccccgctcccgggaaccgttcccgggccgttgatcttcggccccacacgcagagaggggcagcaggatgaatgtgggcacagcgcacagcgaggtgaaccccaacacgcgggtgatgaacagccgtggcatctggctctcctacgtgctggccatcggtctcctccacatcgtgctgctgagcatcccgtttgtgagtgtccctgtcgtctggaccctcaccaacctcattcacaacatgggcatgtatatcttcctgcacacggtgaaggggacaccctttgagaccccggaccagggcaaggcgaggctgctaacccactgggagcagatggattatggggtccagttcacggcctctcggaagttcttgaccatcacacccatcgtgctgtacttcctcaccagcttctacactaagtacgaccagatccattttgtgctcaacaccgtgtccctgatgagcgtgcttatccccaagctgccccagctccacggagtccggatttttggaatcaataagtactgagagtgcagccccttcccctgcccagggtggcaggggaggggtagggtaaaaggcatgtgctgcaacactgaagacagaaagaagaagcctctggacactgccagagatgggggttgagcctctggcctaatttcccccctcgcttcccccagtagccaacttggagtagcttgtagtggggttggggtaggccccctgggctctgaccttttctgaattttttgatcttttccttttgctttttgaatagagactccatggagttggtcatggaatgggctgggctcctgggctgaacatggaccacgcagttgcgacaggaggccaggggaaaaacccctgctcacttgtttgccctcaggcagccaaagcactttaacccctgcatagggagcagagggcggtacggcttctggattgtttcactgtgattcctaggttttttcgatgccacgcagtgtgtgcttttgtgtatggaagcaagtgtgggatgggtctttgcctttctgggtagggagctgtctaatccaagtcccaggcttttggcagcttctctgcaacccaccgtgggtcctggttgggagtggggagggtcaggttggggaaagatggggtagagtgtagatggcttggttccagaggtgagggggccagggctgctgccatcctggcctggtggaggttggggagctgtaggagagctagtgagtcgagacttagaagaatggggccacatagcagcagaggactggtgtaagggagggaggggtagggacagaagctagacccaatctcctttgggatgtgggcagggagggaagcaggcttggagggttaatttacccacagaatgtgatagtaataggggagggaggctgctgtgggtttaactcctgggttggctgttgggtagacaggtggggaaaaggcccgtgagtcattgtaagcacaggtccaacttggccctgactcctgcgggggtatggggaagctgtgacagaaacgatgggtgctgtggtcctctgcaggccctcaccccttaacttcctcatacagactggcactgggcagggcctctcatgtggcagccacatgtggcgttgtgaggccaccccatgtggggtctgtggtgagagtcctgtaggatccctgctcaagcagcacagaggaaggggcaagacgtggcctgtaggcactgtctcagcctgcagagaagaaagtgaggccgggagcctgagcctgggctggagccttctcccctccccagttggactaggggcagtgttaattttgaaaaggtgtgggtccctgtgtcctcttccaggggtccaagggaacgggagaggtcactgggcctgttttctccctcctgaccctgcatctcccaccccgtgtatcatagggaactttcaccttaaaatctttctaagcaaagtgtgaataggatttttactccctttgtacagtattctgagaaacgcaaataaaagggcaacatgtttctgtttc

SEQ ID NO: 162758 - DNA, 2048 bp, Homo sapiens
  Payload ID: 12071
  Gene Symbol: OAT
  Gene Name: ornithine aminotransferase
  Uniprot ID: P04181
  ENST ID: ENST00000368845
  CDS Start-End: 94-1413
ctccggcgtcactgttgcgcttcatagacgccgcgtgtacccggttgtcctcaggcgctgtcagatctgtggtttttctacttgaaggacacaatgttttccaaactagcacatttgcagaggtttgctgtacttagtcgcggagttcattcttcagtggcttctgctacatctgttgcaactaaaaaaacagtccaaggccctccaacctctgatgacatttttgaaagggaatataagtatggtgcacacaactaccatcctttacctgtagccctggagagaggaaaaggtatttacttatgggatgtagaaggcagaaaatattttgacttcctgagttcttacagtgctgtcaaccaagggcattgtcaccccaagattgtgaatgctctgaagagtcaagtggacaaattgaccttaacatctagagctttctataataacgtacttggtgaatatgaggagtatattactaaacttttcaactaccacaaagttcttcctatgaatacaggagtggaggctggagagactgcctgtaaactagctcgtaagtggggctataccgtgaagggcattcagaaatacaaagcaaagattgtttttgcagctgggaacttctggggtaggacgttgtctgctatctccagttccacagacccaaccagttacgatggttttggaccatttatgccgggattcgacatcattccctataatgatctgcccgcactggagcgtgctcttcaggatccaaatgtggctgcgttcatggtagaaccaattcagggtgaagcaggcgttgttgttccggatccaggttacctaatgggagtgcgagagctctgcaccaggcaccaggttctctttattgctgatgaaatacagacaggattggccagaactggtagatggctggctgttgattatgaaaatgtcagacctgatatagtcctccttggaaaggccctttctgggggcttataccctgtgtctgcagtgctgtgtgatgatgacatcatgctgaccattaagccaggggagcatgggtccacatacggtggcaatccactaggctgccgagtggccatcgcagcccttgaggttttagaagaagaaaaccttgctgaaaatgcagacaaattgggcattatcttgagaaatgaactcatgaagctaccttctgatgttgtaactgccgtaagaggaaaaggattattaaacgctattgtcattaaagaaaccaaagattgggatgcttggaaggtgtgtctacgacttcgagataatggacttctggccaagccaacccatggcgacattatcaggtttgcgcctccgctggtgatcaaggaggatgagcttcgagagtccattgaaattattaacaagaccatcttgtctttctgagggtagccagctgttttcagtggtccctgggagccagctggagacaggtggtcctgtaaaagctttattcctaatgtgggcacattccactcccatgagtcttcaaaaactttttttttgaatatatttttttcagttgatacataatagaacaacgtttatgaacctgccgtttgctttgtaacgtaactaaataatgtaatggcatctatattcagttgaagtgttttgatgtgcatgtgtacttcctaaggtgaaatgcatctatatacagacagcctctaaatcaagtccttcagtataattgatatatgtttttataatttcctcactggtataagtgtttcatatttgaaaaagttatctctgggtattgcataaaaggcttcatcttataaagtgaaatcattgttattgaattttaggaaggattaatggttaagtgtatataaaatactaatattaagtaaacttcatattggccaacaccagggttgtattctatggatgtcattattttgaattaagaattagtgtttaacattcctaaattgttttgagtgcttgattataatttgtaaaaaatgtttattttcaatacttctttaaatttaaaataaagcttatatttcaaa

SEQ ID NO: 162759 - DNA, 1864 bp, Homo sapiens
  Payload ID: 12071
  Gene Symbol: OAT
  Gene Name: ornithine aminotransferase
  Uniprot ID: P04181
  ENST ID: ENST00000539214
  CDS Start-End: 320-1225
ttgggggcggggcagaatcagcctttaagttgcagtgactctccggcgtcactgttgcgcttcatagacgccgcgtgtacccggttgtcctcaggcgctgtcaggtatttacttatgggatgtagaaggcagaaaatattttgacttcctgagttcttacagtgctgtcaaccaagggcattgtcaccccaagattgtgaatgctctgaagagtcaagtggacaaattgaccttaacatctagagctttctataataacgtacttggtgaatatgaggagtatattactaaacttttcaactaccacaaagttcttcctatgaatacaggagtggaggctggagagactgcctgtaaactagctcgtaagtggggctataccgtgaagggcattcagaaatacaaagcaaagattgtttttgcagctgggaacttctggggtaggacgttgtctgctatctccagttccacagacccaaccagttacgatggttttggaccatttatgccgggattcgacatcattccctataatgatctgcccgcactggagcgtgctcttcaggatccaaatgtggctgcgttcatggtagaaccaattcagggtgaagcaggcgttgttgttccggatccaggttacctaatgggagtgcgagagctctgcaccaggcaccaggttctctttattgctgatgaaatacagacaggattggccagaactggtagatggctggctgttgattatgaaaatgtcagacctgatatagtcctccttggaaaggccctttctgggggcttataccctgtgtctgcagtgctgtgtgatgatgacatcatgctgaccattaagccaggggagcatgggtccacatacggtggcaatccactaggctgccgagtggccatcgcagcccttgaggttttagaagaagaaaaccttgctgaaaatgcagacaaattgggcattatcttgagaaatgaactcatgaagctaccttctgatgttgtaactgccgtaagaggaaaaggattattaaacgctattgtcattaaagaaaccaaagattgggatgcttggaaggtgtgtctacgacttcgagataatggacttctggccaagccaacccatggcgacattatcaggtttgcgcctccgctggtgatcaaggaggatgagcttcgagagtccattgaaattattaacaagaccatcttgtctttctgagggtagccagctgttttcagtggtccctgggagccagctggagacaggtggtcctgtaaaagctttattcctaatgtgggcacattccactcccatgagtcttcaaaaactttttttttgaatatatttttttcagttgatacataatagaacaacgtttatgaacctgccgtttgctttgtaacgtaactaaataatgtaatggcatctatattcagttgaagtgttttgatgtgcatgtgtacttcctaaggtgaaatgcatctatatacagacagcctctaaatcaagtccttcagtataattgatatatgtttttataatttcctcactggtataagtgtttcatatttgaaaaagttatctctgggtattgcataaaaggcttcatcttataaagtgaaatcattgttattgaattttaggaaggattaatggttaagtgtatataaaatactaatattaagtaaacttcatattggccaacaccagggttgtattctatggatgtcattattttgaattaagaattagtgtttaacattcctaaattgttttgagtgcttgattataatttgtaaaaaatgtttattttcaatacttctttaaatttaaaataaagcttatatttcaaatgtc

SEQ ID NO: 162760 - DNA, 1585 bp, Homo sapiens
  Payload ID: 12072
  Gene Symbol: OTC
  Gene Name: ornithine carbamoyltransferase
  Uniprot ID: P00480
  ENST ID: ENST00000039007
  CDS Start-End: 153-1217
aggggactttgataaggaagctgaagggtgatattacctttgctccctcactgcaactgaacacatttcttagtttttaggtggcccccgctggctaacttgctgtggagttttcaagggcatagaatcgtcctttacacaattaaaagaagatgctgtttaatctgaggatcctgttaaacaatgcagcttttagaaatggtcacaacttcatggttcgaaattttcggtgtggacaaccactacaaaataaagtgcagctgaagggccgtgaccttctcactctaaaaaactttaccggagaagaaattaaatatatgctatggctatcagcagatctgaaatttaggataaaacagaaaggagagtatttgcctttattgcaagggaagtccttaggcatgatttttgagaaaagaagtactcgaacaagattgtctacagaaacaggctttgcacttctgggaggacatccttgttttcttaccacacaagatattcatttgggtgtgaatgaaagtctcacggacacggcccgtgtattgtctagcatggcagatgcagtattggctcgagtgtataaacaatcagatttggacaccctggctaaagaagcatccatcccaattatcaatgggctgtcagatttgtaccatcctatccagatcctggctgattacctcacgctccaggaacactatagctctctgaaaggtcttaccctcagctggatcggggatgggaacaatatcctgcactccatcatgatgagcgcagcgaaattcggaatgcaccttcaggcagctactccaaagggttatgagccggatgctagtgtaaccaagttggcagagcagtatgccaaagagaatggtaccaagctgttgctgacaaatgatccattggaagcagcgcatggaggcaatgtattaattacagacacttggataagcatgggacaagaagaggagaagaaaaagcggctccaggctttccaaggttaccaggttacaatgaagactgctaaagttgctgcctctgactggacatttttacactgcttgcccagaaagccagaagaagtggatgatgaagtcttttattctcctcgatcactagtgttcccagaggcagaaaacagaaagtggacaatcatggctgtcatggtgtccctgctgacagattactcacctcagctccagaagcctaaattttgatgttgtgttacttgtcaagaaagaagcaatgttcttcagtaacagaatgagttggtttatggggaaaagagaagagaatctaaaaaataaacaaatccctaacacgtggtatgggtgaaccgtatgatatgctttgccattgtgaaactttccttaagcctttaatttaagtgctgatgcactgtaatacgtgcttaactttgcttaaactctctaattcccaatttctgagttacatttagatatcatattaattatcatatacatttacttcaacataaaatactgtgttcataatgtataatgtctaagccattaagtgtaatctatgcttattacctaaataaattatcacccatgctaattta

SEQ ID NO: 162761 - DNA, 2653 bp, Homo sapiens
  Payload ID: 12073
  Gene Symbol: ODC1
  Gene Name: ornithine decarboxylase 1
  Uniprot ID: P11926
  ENST ID: ENST00000234111
  CDS Start-End: 512-1897
gacgtcggcccgccggcgccccaccagctccgcgcgggcccgggttggccaccgccgggcccccgcccctcccccggcggtgtcccggccggaaccgatcgtggctggtttgagctggtgcgtctccatggcgacccgccggtgctataagtagggagcggcgtgccgtggggctttgtcagtccctcctgtagccgccgccgccgccgcccgccgcccctctgccagcagctccggcgccacctcgggccggcgtctccggcgggcgggagccaggcgctgacgggcgcggcgggggcggccgagcgctcctgcggctgcgactcaggctccggcgtctgcgcttccccatggggctggcctgcggcgcctgggcgctctgagattgtcactgctgttccaagggcacacgcagagggatttggaattcctggagagttgcctttgtgagaagctggaaatatttctttcaattccatctcttagttttccataggaacatcaagaaatcatgaacaactttggtaatgaagagtttgactgccacttcctcgatgaaggttttactgccaaggacattctggaccagaaaattaatgaagtttcttcttctgatgataaggatgccttctatgtggcagacctgggagacattctaaagaaacatctgaggtggttaaaagctctccctcgtgtcacccccttttatgcagtcaaatgtaatgatagcaaagccatcgtgaagacccttgctgctaccgggacaggatttgactgtgctagcaagactgaaatacagttggtgcagagtctgggggtgcctccagagaggattatctatgcaaatccttgtaaacaagtatctcaaattaagtatgctgctaataatggagtccagatgatgacttttgatagtgaagttgagttgatgaaagttgccagagcacatcccaaagcaaagttggttttgcggattgccactgatgattccaaagcagtctgtcgtctcagtgtgaaattcggtgccacgctcagaaccagcaggctccttttggaacgggcgaaagagctaaatatcgatgttgttggtgtcagcttccatgtaggaagcggctgtaccgatcctgagaccttcgtgcaggcaatctctgatgcccgctgtgtttttgacatgggggctgaggttggtttcagcatgtatctgcttgatattggcggtggctttcctggatctgaggatgtgaaacttaaatttgaagagatcaccggcgtaatcaacccagcgttggacaaatactttccgtcagactctggagtgagaatcatagctgagcccggcagatactatgttgcatcagctttcacgcttgcagttaatatcattgccaagaaaattgtattaaaggaacagacgggctctgatgacgaagatgagtcgagtgagcagacctttatgtattatgtgaatgatggcgtctatggatcatttaattgcatactctatgaccacgcacatgtaaagccccttctgcaaaagagacctaaaccagatgagaagtattattcatccagcatatggggaccaacatgtgatggcctcgatcggattgttgagcgctgtgacctgcctgaaatgcatgtgggtgattggatgctctttgaaaacatgggcgcttacactgttgctgctgcctctacgttcaatggcttccagaggccgacgatctactatgtgatgtcagggcctgcgtggcaactcatgcagcaattccagaaccccgacttcccacccgaagtagaggaacaggatgccagcaccctgcctgtgtcttgtgcctgggagagtgggatgaaacgccacagagcagcctgtgcttcggctagtattaatgtgtagatagcactctggtagctgttaactgcaagtttagcttgaattaagggatttggggggaccatgtaacttaattactgctagttttgaaatgtctttgtaagagtagggtcgccatgatgcagccatatggaagactaggatatgggtcacacttatctgtgttcctatggaaactatttgaatatttgttttatatggatttttattcactcttcagacacgctactcaagagtgcccctcagctgctgaacaagcatttgtagcttgtacaatggcagaatgggccaaaagcttagtgttgtgacctgtttttaaaataaagtatcttgaaataattaggcattgggacgtttttatggtgtgttcattccagacagttcacgaatcccgtatagctcgctctgattctcagagaacaatgagtgggtccacccacacacaggtaggaggacaggtgagacggaagccccatcctcccatgtggacggtgcacatctgctcagcccaccccacatgtccagagttggctgcaaactccttgtccagagcctctggtggtgggacctacttaagtctgacggacctgtcctgtccaggccagtgcccagggaaggtgtgggaggccctttgagcctggcctgcagagaccatccgtgtcccctcccaccttcatgcctgtgagaagttaggaatgtatacggtaccacatttggcagtcagcttattttaataaattcagcaacagcaagtcccta

SEQ ID NO: 162762 - DNA, 1943 bp, Homo sapiens
  Payload ID: 12073
  Gene Symbol: ODC1
  Gene Name: ornithine decarboxylase 1
  Uniprot ID: P11926
  ENST ID: ENST00000405333
  CDS Start-End: 435-1820
cctggcggccgcgcagcaggtgcaggggcgcagagcccgggctcgccttggtacagacgagcgggccccggccttggcgccttcagtttccttccagtttttattttcgctgtgtctacagagcagatgacaccaatttggaaacccgcgagagtgggtagagctaagatagtcttgctgtagtagctgtgatattagatgctcggccatgacttagaggtgtttatttaaggactgtgaatgactcggtgatttcggaaaagcttggcttagatgaacggacatacacaggggagacagccctaagattgtcactgctgttccaagggcacacgcagagggatttggaattcctggagagttgcctttgtgagaagctggaaatatttctttcaattccatctcttagttttccataggaacatcaagaaatcatgaacaactttggtaatgaagagtttgactgccacttcctcgatgaaggttttactgccaaggacattctggaccagaaaattaatgaagtttcttcttctgatgataaggatgccttctatgtggcagacctgggagacattctaaagaaacatctgaggtggttaaaagctctccctcgtgtcacccccttttatgcagtcaaatgtaatgatagcaaagccatcgtgaagacccttgctgctaccgggacaggatttgactgtgctagcaagactgaaatacagttggtgcagagtctgggggtgcctccagagaggattatctatgcaaatccttgtaaacaagtatctcaaattaagtatgctgctaataatggagtccagatgatgacttttgatagtgaagttgagttgatgaaagttgccagagcacatcccaaagcaaagttggttttgcggattgccactgatgattccaaagcagtctgtcgtctcagtgtgaaattcggtgccacgctcagaaccagcaggctccttttggaacgggcgaaagagctaaatatcgatgttgttggtgtcagcttccatgtaggaagcggctgtaccgatcctgagaccttcgtgcaggcaatctctgatgcccgctgtgtttttgacatgggggctgaggttggtttcagcatgtatctgcttgatattggcggtggctttcctggatctgaggatgtgaaacttaaatttgaagagatcaccggcgtaatcaacccagcgttggacaaatactttccgtcagactctggagtgagaatcatagctgagcccggcagatactatgttgcatcagctttcacgcttgcagttaatatcattgccaagaaaattgtattaaaggaacagacgggctctgatgacgaagatgagtcgagtgagcagacctttatgtattatgtgaatgatggcgtctatggatcatttaattgcatactctatgaccacgcacatgtaaagccccttctgcaaaagagacctaaaccagatgagaagtattattcatccagcatatggggaccaacatgtgatggcctcgatcggattgttgagcgctgtgacctgcctgaaatgcatgtgggtgattggatgctctttgaaaacatgggcgcttacactgttgctgctgcctctacgttcaatggcttccagaggccgacgatctactatgtgatgtcagggcctgcgtggcaactcatgcagcaattccagaaccccgacttcccacccgaagtagaggaacaggatgccagcaccctgcctgtgtcttgtgcctgggagagtgggatgaaacgccacagagcagcctgtgcttcggctagtattaatgtgtagatagcactctggtagctgttaactgcaagtttagcttgaattaagggatttggggggaccatgtaacttaattactgctagttttgaaatgtctttgtaagagtagggtcgccatgatgcagc

SEQ ID NO: 162763 - DNA, 494 bp, Homo sapiens
  Payload ID: 12073
  Gene Symbol: ODC1
  Gene Name: ornithine decarboxylase 1
  ENST ID: ENST00000443218
  CDS Start-End: 289-494
ggggaggccctggcggccgcgcagcaggtgcaggggcgcagagcccgggctcgccttggtacagacgagcgggccccggccttggcgccttcagtttccttccagtttttattttcgctgtgtctacagagcagatgacaccaatttggaaacccgcgagaattgtcactgctgttccaagggcacacgcagagggatttggaattcctggagagttgcctttgtgagaagctggaaatatttctttcaattccatctcttagttttccataggaacatcaagaaatcatgaacaactttggtaatgaagagtttgactgccacttcctcgatgaaggttttactgccaaggacattctggaccagaaaattaatgaagtttcttcttctgatgataaggatgccttctatgtggcagacctgggagacattctaaagaaacatctgaggtggttaaaagctctccctcgtgtcacccccttttatgcagtcaa

SEQ ID NO: 162764 - DNA, 969 bp, Homo sapiens
  Payload ID: 12074
  Gene Symbol: OAZ1
  Gene Name: ornithine decarboxylase antizyme 1
  ENST ID: ENST00000582888
  CDS Start-End: 66-746
gagcagcggcggcggcgcggagagacgcagcggaggttttcctggtttcggaccccagcggccggatggtgaaatcctccctgcagcggatcctcaatagccactgcttcgccagagagaaggaaggggataaacccagcgccaccatccacgccagccgcaccatgccgctcctaagcctgcacagccgcggcggcagcagcagtgagagggtctccctccactgctgtagtaacccgggtccggggcctcggtggtgctccgatgcccctcacccacccctgaagatcccaggtgggcgagggaatagtcagagggatcacaatctttcagctaacttattctactccgatgatcggctgaatgtaacagaggaactaacgtccaacgacaagacgaggattctcaacgtccagtccaggctcacagacgccaaacgcattaactggcgaacagtgctgagtggcggcagcctctacatcgagatcccgggcggcgcgctgcccgaggggagcaaggacagctttgcagttctcctggagttcgctgaggagcagctgcgagccgaccatgtcttcatttgcttccacaagaaccgcgaggacagagccgccttgctccgaaccttcagctttttgggctttgagattgtgagaccggggcatccccttgtccccaagagacccgacgcttgcttcatggcctacacgttcgagagagagtcttcgggagaggaggaggagtagggccgcctcggggctgggcatccggcccctggggccaccccttgtcagccgggtgggtaggaaccgtagactcgctcatctcgcctgggtttgtccgcatgttgtaatcgtgcaaataaacgctcactccgaattagcggtgtatttcttgaagtttaatattgtgtttgtgatactgaagtatttgctttaattctaaataaaaatttatattttacttttt

SEQ ID NO: 162765 - DNA, 1012 bp, Homo sapiens
  Payload ID: 12074
  Gene Symbol: OAZ1
  Gene Name: ornithine decarboxylase antizyme 1
  ENST ID: ENST00000590943
  CDS Start-End: 91-249
gcagaggcgccattttgcgaacggcgagcagcggcggcggcgcggagagacgcagcggaggttttcctggtttcggaccccagcggccggatggtgaaatcctccctgcagcggatcctcaatagccactgcttcgccagagagaaggaaggggataaacccagcgccaccatccacgccagccgcaccatgccgctcctaagcctgcacagccgcggcggcagcagcagtgagaggatgatcggctgaatgtaacagaggaactaacgtccaacgacaagacgaggattctcaacgtccagtccaggctcacagacgccaaacgcattaactggcgaacagtgctgagtggcggcagcctctacatcgagatcccgggcggcgcgctgcccgaggggagcaaggacagctttgcagttctcctggagttcgctgaggagcagctgcgagccgaccatgtcttcatttgcttccacaagaaccgcgaggacagagccgccttgctccgaaccttcagctttttgggctttgagattgtgagaccggggcatccccttgtccccaagagacccgacgcttgcttcatggcctacacgttcgagagagagtcttcgggagaggaggaggagtagggccgcctcggggctgggcatccggcccctggggccaccccttgtcagccgggtgggtaggaaccgtagactcgctcatctcgcctgggtttgtccgcatgttgtaatcgtgcaaataaacgctcactccgaattagcggtgtatttcttgaagtttaatattgtgtttgtgatactgaagtatttgctttaattctaaataaaaatttatattttacttttttattgctggtttaagatgattcagattatccttgtactttgaggagaagtttcttatttggagtcttttggaaacagtcttagtcttttaacttggaaagatgaggtattaatcccctccattgctctccaaaagccaataaagtgattacacccga

SEQ ID NO: 162766 - DNA, 780 bp, Homo sapiens
  Payload ID: 12074
  Gene Symbol: OAZ1
  Gene Name: ornithine decarboxylase antizyme 1
  ENST ID: ENST00000588673
  CDS Start-End: 155-780
gcacttttcggtcccggccgtcgagcgtgcgctgcgggagcggggagcgctttgcggtggacgagctcccgcgggtccctgttgcctcgatgtggcccctgcacgcgacggacctcgtgggccccgtttttcgcccctgagcgagtcggtctggatggcccgggacgcgccgggcgaggccgcgcacgtagacggcacccagggcttctccgcgggggccgccggggagctgggggtggcgcactccgacagcccggcagcgccctgggaagacccccgccgcttcccgggaagacgcgtcccgcttccgggggcgcgggtgccagctgcggttgtgggggagcccgcggggtctcggtcgagctttcccgactgcgtcccccgagttccagggtctccctccactgctgtagtaacccgggtccggggcctcggtggtgctcctgatgcccctcacccacccctgaagatcccaggtgggcgagggaatagtcagagggatcacaatctttcagctaacttattctactccgatgatcggctgaatgtaacagaggaactaacgtccaacgacaagacgaggattctcaacgtccagtccaggctcacagacgccaaacgcattaactggcgaacagtgctgagtggcggcagcctctacatcgagatcccgggcggcgcgctgcccgaggggagcaaggacagctttgcagttctcctggagttcgctgaggagcagctgcgagccgaccatgtcttcatttgcttccacaagaaccg

SEQ ID NO: 162767 - DNA, 1148 bp, Homo sapiens
  Payload ID: 12074
  Gene Symbol: OAZ1
  Gene Name: ornithine decarboxylase antizyme 1
  Uniprot ID: P54368
  ENST ID: ENST00000602676
  CDS Start-End: 80-766
attttgcgaacggcgagcagcggcggcggcgcggagagacgcagcggaggttttcctggtttcggaccccagcggccggatggtgaaatcctccctgcagcggatcctcaatagccactgcttcgccagagagaaggaaggggataaacccagcgccaccatccacgccagccgcaccatgccgctcctaagcctgcacagccgcggcggcagcagcagtgagagttccagggtctccctccactgctgtagtaacccgggtccggggcctcggtggtgctccgatgcccctcacccacccctgaagatcccaggtgggcgagggaatagtcagagggatcacaatctttcagctaacttattctactccgatgatcggctgaatgtaacagaggaactaacgtccaacgacaagacgaggattctcaacgtccagtccaggctcacagacgccaaacgcattaactggcgaacagtgctgagtggcggcagcctctacatcgagatcccgggcggcgcgctgcccgaggggagcaaggacagctttgcagttctcctggagttcgctgaggagcagctgcgagccgaccatgtcttcatttgcttccacaagaaccgcgaggacagagccgccttgctccgaaccttcagctttttgggctttgagattgtgagaccggggcatccccttgtccccaagagacccgacgcttgcttcatggcctacacgttcgagagagagtcttcgggagaggaggaggagtagggccgcctcggggctgggcatccggcccctggggccaccccttgtcagccgggtgggtaggaaccgtagactcgctcatctcgcctgggtttgtccgcatgttgtaatcgtgcaaataaacgctcactccgaattagcggtgtatttcttgaagtttaatattgtgtttgtgatactgaagtatttgctttaattctaaataaaaatttatattttacttttttattgctggtttaagatgattcagattatccttgtactttgaggagaagtttcttatttggagtcttttggaaacagtcttagtcttttaacttggaaagatgaggtattaatcccctccattgctctccaaaagccaataaagtgattacacccgatg

SEQ ID NO: 162768 - DNA, 576 bp, Homo sapiens
  Payload ID: 12075
  Gene Symbol: OAZ2
  Gene Name: ornithine decarboxylase antizyme 2
  ENST ID: ENST00000559912
  CDS Start-End: 168-576
agttggaggcaggcgctcgctgaggcaaaaggaggcgctcggcccgcggcctgacagggacttagcccgcagagatcgaccccgcgcgcgtgaccccacacccacccactcatccatctatccactccctgcgccgcctcctcccaccctgagcagagccgccgaggatgataaacacccaggacagtagtattttgcctttgagtaactgtccccagctccagtgctgcaggcacattgttccagggcctctgtggtgctccgatgcccctcacccactgtcgaagatccccggtgggcgagggggcggcagggatccttctctctcagctctaatatataagggaaggaaaagaacatggtgttgggggaaagcgtgggctttcgagtcagggagacctgggtttgaatctcatctctgccattcactgtctttggagccttgggacgagaagctcactgtgacccaggacctccctgtgaatgatggaaaacctcacatcgtccacttccagtatgaggtcaccgaggtgaaggtctcttcttgggatgcagtcctgtccagccagagcctgt

SEQ ID NO: 162769 - DNA, 1744 bp, Homo sapiens
  Payload ID: 12075
  Gene Symbol: OAZ2
  Gene Name: ornithine decarboxylase antizyme 2
  ENST ID: ENST00000560258
  CDS Start-End: 161-550
ggcaggcgctcgctgaggcaaaaggaggcgctcggcccgcggcctgacagggacttagcccgcagagatcgaccccgcgcgcgtgaccccacacccacccactcatccatctatccactccctgcgccgcctcctcccaccctgagcagagccgccgaggatgataaacacccaggacagtagtattttgcctttgagtaactgtccccagctccagtgctgcaggcacattgttccagggcctctgtggtgctccgatgcccctcacccactgtcgaagatccccggtgggcgagggggcggcagggatccttctctctcagctctaatatataaggacgagaagctcactgtgacccaggacctccctgtgaatgatggaaaacctcacatcgtccacttccagtatgaggtcaccgaggtgaaggtctcttcttgggatgcagtcctgtccagccagagcctgtttgtagaaatcccagatggattattagctgatgggagcaaagaaggctccactcctgaagaccttcagcttcttgggctttgagattgtacgtccaggccatccctgtgtcccctctcggccagatgtgatgttcatggtttatcccctggaccagaacttgtccgatgaggactaatagtcatagaggatgctttacccaagagccacagtgggggaagaggggaagttaggcagccctgggacagacgagagggctcctcgctgtctagggaaggacactgaggggctcagggtgagggttgcctattgtgttctcggagttgactcgttgaaattgttttccataaagaacagtataaacatattattcacatgtaatcaccaatagtaaatgaagatgtttatgaactggcattagaagctttctaaactgcgctgtgtgatgtgttctatctagcctaggggaggacattgcctagagggggagggactgtctgggttcaggggcatggcctggagggctggtgggcagcactgtcaggctcaggtttccctgctgttggctttctgttttggttattaagacttgtgtattttctttctttgcttcctgtcaccccaggggctcctgagtataggcttttcagtccctgggcagtgtccttgagttgttttttgacactcttacctgggcttctctgtgtgcatttgcgtctggcctggagtaagcaggtccgacccctccttctttacagcttagtgttattctggcatttggttaagctggcttaatctgtttaatgttatcagtacattttaaataggggcattgaaatttactcccaccaccagggcttttttgggggatgcctgggcctttaaaacactagccaaactctaattaattctcaaatcactgccaggagttcttgctcctggctgcaggcccaggccccaaggtctccttcttggggtcacaaacagcagtaaggaagaggaatatatagcaactcagggcctgggaattgtggggcaatccgttcttagggactggatacttctggctggctgagtatagtactagctgcctccccaccaggttccgagtagtgtctgagactctgctctgcagggcctagggtagcgctgggagtgtagaagtggcctgcccttaactgttttcactaaacagctttttctaaggggagagcaagggggagagatctagattgggtgagggggacggggatgtcagggaggcaagtgtgttgtgtt

SEQ ID NO: 162770 - DNA, 1934 bp, Homo sapiens
  Payload ID: 12075
  Gene Symbol: OAZ2
  Gene Name: ornithine decarboxylase antizyme 2
  Uniprot ID: O95190
  ENST ID: ENST00000326005
  CDS Start-End: 234-803
atgcagatgaggcactcgggggcggggcggcggcggcggcggcggcggtggcggccggggagggtcagttggaggcaggcgctcgctgaggcaaaaggaggcgctcggcccgcggcctgacagggacttagcccgcagagatcgaccccgcgcgcgtgaccccacacccacccactcatccatctatccactccctgcgccgcctcctcccaccctgagcagagccgccgaggatgataaacacccaggacagtagtattttgcctttgagtaactgtccccagctccagtgctgcaggcacattgttccagggcctctgtggtgctccgatgcccctcacccactgtcgaagatccccggtgggcgagggggcggcagggatccttctctctcagctctaatatataaggacgagaagctcactgtgacccaggacctccctgtgaatgatggaaaacctcacatcgtccacttccagtatgaggtcaccgaggtgaaggtctcttcttgggatgcagtcctgtccagccagagcctgtttgtagaaatcccagatggattattagctgatgggagcaaagaaggattgttagcactgctagagtttgctgaagagaagatgaaagtgaactatgtcttcatctgcttcaggaagggccgagaagacagagctccactcctgaagaccttcagcttcttgggctttgagattgtacgtccaggccatccctgtgtcccctctcggccagatgtgatgttcatggtttatcccctggaccagaacttgtccgatgaggactaatagtcatagaggatgctttacccaagagccacagtgggggaagaggggaagttaggcagccctgggacagacgagagggctcctcgctgtctagggaaggacactgaggggctcagggtgagggttgcctattgtgttctcggagttgactcgttgaaattgttttccataaagaacagtataaacatattattcacatgtaatcaccaatagtaaatgaagatgtttatgaactggcattagaagctttctaaactgcgctgtgtgatgtgttctatctagcctaggggaggacattgcctagagggggagggactgtctgggttcaggggcatggcctggagggctggtgggcagcactgtcaggctcaggtttccctgctgttggctttctgttttggttattaagacttgtgtattttctttctttgcttcctgtcaccccaggggctcctgagtataggcttttcagtccctgggcagtgtccttgagttgttttttgacactcttacctgggcttctctgtgtgcatttgcgtctggcctggagtaagcaggtccgacccctccttctttacagcttagtgttattctggcatttggttaagctggcttaatctgtttaatgttatcagtacattttaaataggggcattgaaatttactcccaccaccagggcttttttgggggatgcctgggcctttaaaacactagccaaactctaattaattctcaaatcactgccaggagttcttgctcctggctgcaggcccaggccccaaggtctccttcttggggtcacaaacagcagtaaggaagaggaatatatagcaactcagggcctgggaattgtggggcaatccgttcttagggactggatacttctggctggctgagtatagtactagctgcctccccaccaggttccgagtagtgtctgagactctgctctgcagggcctagggtagcgctgggagtgtagaagtggcctgcccttaactgttttcactaaacagctttttctaaggggagagcaagggggagagatctagattgggtgagggggacggggatgtcagggaggcaagtgtgttgtgttactgtgtcaataaactgatttaaagttgtgg

SEQ ID NO: 162771 - DNA, 785 bp, Homo sapiens
  Payload ID: 12075
  Gene Symbol: OAZ2
  Gene Name: ornithine decarboxylase antizyme 2
  ENST ID: ENST00000559753
  CDS Start-End: 384-566
gctcgctgaggcaaaaggaggcgctcggcccgcggcctgacagggacttagcccgcagagatcgaccccgcgcgcgtgaccccacacccacccactcatccatctatccactccctgcgccgcctcctcccaccctgagcagagccgccgaggatgataaacacccaggacaggacgagaagctcactgtgacccaggacctccctgtgaatgatggaaaacctcacatcgtccacttccagtatgaggtcaccgaggtgaaggtctcttcttgggatgcagtcctgtccagccagagcctgtttgtagaaatcccagatggattattagctgatgggagcaaagaaggattgttagcactgctagagtttgctgaagagaagatgaaagtgaactatgtcttcatctgcttcaggaagggccgagaagacagagctccactcctgaagaccttcagcttcttgggctttgagattgtacgtccaggccatccctgtgtcccctctcggccagatgtgatgttcatggtttatcccctggaccagaacttgtccgatgaggactaatagtcatagaggatgctttacccaagagccacagtgggggaagaggggaagttaggcagccctgggacagacgagagggctcctcgctgtctagggaaggacactgaggggctcagggtgagggttgcctattgtgttctcggagttgactcgttgaaattgttttccataaagaacagtataaacatattattcacatgtaatcaccaatagtaaatg

SEQ ID NO: 162772 - DNA, 851 bp, Homo sapiens
  Payload ID: 12076
  Gene Symbol: OAZ3
  Gene Name: ornithine decarboxylase antizyme 3
  ENST ID: ENST00000321531
  CDS Start-End: 168-740
gcgcctcggcccgggccttactctccaccgactgcgtcaggatgagctccaggttttctttgggccgatgcttcgtgtcctccaccagcttatagacgcgatgtcgccggtgcaggcgcggcttccggccctccccggccagcggtaccttccaccagcgctccacgatgaccgtgccctggcggccaggaaagcgacgcatcacttataaggaagaggaggacttgacactccagccccgttcctgcctccagtgctccgagtccctagtaggcctccaggagggcaaaagcaccgagcagggtaaccacgaccagcttaaagaactgtattcggctgggaacttgacggtgctggctactgaccccctgctccaccaggacccagtacagttagactttcacttccgccttacctcccagacctctgcccattggcacggccttctctgtgaccgtcgactcttcctggatatcccatatcaggccttggatcaaggcaaccgggaaagtttgactgcaaccctggagtacgtggaagagaagacaaatgtggactctgtgtttgtgaacttccagaatgatcggaacgacagaggtgccctgctgcgggccttcagctacatgggctttgaggtggtcagaccagatcaccctgccctccctcccttggacaatgtcatctttatggtgtatccccttgaaagggatgttggccacctgcccagtgagcctccttgaacatgcttattccaacgctttgaggggctggaagccttgacacatggaatcaggggcccgggatgtgattcaggacactttccatcctaggaataaagggtagtgcaatca

SEQ ID NO: 162773 - DNA, 890 bp, Homo sapiens
  Payload ID: 12076
  Gene Symbol: OAZ3
  Gene Name: ornithine decarboxylase antizyme 3
  ENST ID: ENST00000400999
  CDS Start-End: 68-775
gttgcctaaacctctgccacccacctgtgaacttcactttgccacagggaggcactgaactgaaaaactgccttgtaagaggtgtcgcccctctgtctactccctttcttatatcaagaggggaaaaacacgtaactacctctacccgatctggtcaccatacgcctattacctttactgttacaagtaccggatcactctccgggagaagatgctgcctcgttgttataaaagcatcacttataaggaagaggaggacttgacactccagccccgttcctgcctccagtgctccgagtccctagtaggcctccaggagggcaaaagcaccgagcagggtaaccacgaccagcttaaagaactgtattcggctgggaacttgacggtgctggctactgaccccctgctccaccaggacccagtacagttagactttcacttccgccttacctcccagacctctgcccattggcacggccttctctgtgaccgtcgactcttcctggatatcccatatcaggccttggatcaaggcaaccgggaaagtttgactgcaaccctggagtacgtggaagagaagacaaatgtggactctgtgtttgtgaacttccagaatgatcggaacgacagaggtgccctgctgcgggccttcagctacatgggctttgaggtggtcagaccagatcaccctgccctccctcccttggacaatgtcatctttatggtgtatccccttgaaagggatgttggccacctgcccagtgagcctccttgaacatgcttattccaacgctttgaggggctggaagccttgacacatggaatcaggggcccgggatgtgattcaggacactttccatcctaggaataaagggtagtgcaatcatcaa

SEQ ID NO: 162774 - DNA, 729 bp, Homo sapiens
  Payload ID: 12076
  Gene Symbol: OAZ3
  Gene Name: ornithine decarboxylase antizyme 3
  ENST ID: ENST00000453029
  CDS Start-End: 16-627
gttcacaggcacagaatgagacctgagggaggaccccggcgtcggcggcaggaaaggcccccgccagtgctgcctgcggcgcgccgcatcacttataaggaagaggaggacttgacactccagccccgttcctgcctccagtgctccgagtccctagtaggcctccaggagggcaaaagcaccgagcagggtaaccacgaccagcttaaagaactgtattcggctgggaacttgacggtgctggctactgaccccctgctccaccaggacccagtacagttagactttcacttccgccttacctcccagacctctgcccattggcacggccttctctgtgaccgtcgactcttcctggatatcccatatcaggccttggatcaaggcaaccgggaaagtttgactgcaaccctggagtacgtggaagagaagacaaatgtggactctgtgtttgtgaacttccagaatgatcggaacgacagaggtgccctgctgcgggccttcagctacatgggctttgaggtggtcagaccagatcaccctgccctccctcccttggacaatgtcatctttatggtgtatccccttgaaagggatgttggccacctgcccagtgagcctccttgaacatgcttattccaacgctttgaggggctggaagccttgacacatggaatcaggggcccgggatgtgattcaggacactttccatcctaggaataaagggta

SEQ ID NO: 162775 - DNA, 3789 bp, Homo sapiens
  Payload ID: 12076
  Gene Symbol: OAZ3
  Gene Name: ornithine decarboxylase antizyme 3
  ENST ID: ENST00000479764
  CDS Start-End: 3145-3519
gaaagtatggggagcgggccggggaacagatggcaccgcggcttgcctatttttgctttttggcagaggtgacggacgcctagaattactgactgataatggaatgagtgttaggtggactgacgccggaaaagacgctcttcctcttgaaagtgtgggctttgctgtagctccagttgctgggctaacttttaattctaacgttctgtgatgactggatactgaccggagaatgaatgatgctctcacttttccttacttcaaatctacctaaaagtggtaaaggatgggatcccttggaaaactctgccagctccaggaggagcctgacccttaatcattatactgcagtatttaagctaataaaggagaattctaaatcacaagctatgtaaaccgtagaaaaaaaagcaactatggtaaggccgcgacagttccctctggggagggtctcagtactggacagaagaccataaaaactggatgaaagaaggtccatttggcagagattatggaaagactggcccttaaacatactgaccagtcctccttcctcctaaatacactacttggcctcctggacaccggtcttcttcagtctcgtttgctgatttctccttttctccccgcttcttagaatgccctcgggactccgtttttgaacctttactcttctcagtatacactcactgttgatctcatccagtctcgtggcttacaataccatttataagccaatgactcccaaatttctagttccatcctagacatctcccaaactcgtctcaaatattcaactgtttattcgtcattttcctcttacgtatccaaaggacacctcaaagttaactgtcccaaactaatttatttattcccccctcgcccccaaaactgccccatctgcagcctttttcctctcagttgacagaaactccattctttccattctaactcttttctctcatactccatcaggaaatcctgtgggttctacctttaaattacagatagtccctgacttggatttacaatttttgagtttgtgatggtgtgaaagtgatgtgcactcagtaggacatcaataagttacatgaaatattcaacactttattataaaataggctttgtgttagatgattttacccaactgtcggataagttgtctgagcatgtttaagataggctaggctaagctatggtgtttggtaggtgtattatatgcattttcaacttatgatactttcaacatacgatgggtttatcaggacataaccctattttaagtcaaggagcacttgtatttccagaatccagccacttgtcaccacctccaatgctctaccttggaataagacactactttctcctggattactgcaatagtcccctaaaagatatcccttaattctctacagtttataattctatgtagcttatttatagcagccagaatgatctttttaaagcataagtcagatcatgtcattcttccacccaaaactttgtaatgacttcctcctttactcaaggtaaaagaaaaaggccatcagatggtctacaaggccatacatactctgaccccattagctcctctctaatttacactgctccacccacagtggcctccttgtttcttgaaaacaccaggcacgtttcctgctcagggcttttgcactggctgcttttgcgttggatgctcttatcctcagatgctggcttggttaacaacctcacatcctccaagtgtttaattaaatgtcagtttttttcagtgagagatcaccctatttcttactgtaaccctgacccatccccttcacattccttatcttcctttatcttgctctattccccccaccccatagcagttaccttctaacatactaaacaatttactatgtttattttctaggtttgtcctctcacttttagaagatacgttccatagggcagggatttgttttgttcactgatgtatcatctcaagcacctagaatagtgcctggctaatagtagaccctcaataaatatttgttgaatggataaatatgcagaggtctcaaagtggcagtcccagaaccaaattttgcttacaatgttgtttttttatcaacaattttttagtagttgatttttttttttttttgagttggagtctcgctatgttgcccaggctggagtgcagtggcacgatctcagctcactgcaagctccgcctcctgggttcacgccattctcctgcctcagcctcccgtgtagctgggaatacaggcgcctgccaccacgcccggctaattttttgtatttttagtacagacagagtttcatcgtgttagccaggatggtctcgatctcctgacctcgtgatccgcccgcctcggcctcccaaagcgctgggattacagacgtgagccaccgtgcccggcccagtagtcgatattttttaaaattggtgagatttactacaaaactgtctttccagtttctgttcaaaaatcatacgatacagcaccatcaagtctgcattcttgcatggaactggatggaattgagttgtgtggacttcctttagataacgtgtgagctttcctattttgctacagccctaccctgccactccactaatttccataagctgtctaggcccctgaaggggcctagacaattagtttgcaattcctaccctacaaggatcctgggttattaagggtagggatgataataaaaatactcaactggtatgaactgggaaccaactaatcaggtcaccactggatcagagccttggaagagtcagataccaactctttacttgctggattttgggggaaggggagtgtccacagaggagcagggtgggtgggcacaagtgctcaggcagggcttttggccaaccagtacagaagtcttcaagttctattttttaatcattcatacagccataacatgcatactagtcgaatatgagccttggataagggattagggtagataagcagcagagtggagtcctgaggtgacataagggctgaccccttatccatgtcatagtgcccactgggtcacaatgccaccaggttgcctaaacctctgccacccacctgtgaacttcactttgccacagggaggcactgaactgaaaaactgccttgtaagaggtgtcgcccctctgtctactccctttcttatatcaagaggggaaaaacacgtaactacctctacccgatctggtcaccatacgcctattacctttactgttacaagtaccggatcactctccgggagaagatgctgcctcgttgttataaaagcatcacttataaggaagaggaggacttgacactccagccccgttcctgcctccagtgctccgagtccctagtaggcctccaggagggcaaaagcaccgagcagggtaaccacgaccagcttaaagaactgtattcgtttgactgcaaccctggagtacgtggaagagaagacaaatgtggactctgtgtttgtgaacttccagaatgatcggaacgacagaggtgccctgctgcgggccttcagctacatgggctttgaggtggtcagaccagatcaccctgccctccctcccttggacaatgtcatctttatggtgtatccccttgaaagggatgttggccacctgcccagtgagcctccttgaacatgcttattccaacgctttgaggggctggaagccttgacacatggaatcaggggcccgggatgtgattcaggacactttccatcctaggaataaagggtagtgcaatcatc

SEQ ID NO: 162776 - DNA, 481 bp, Homo sapiens
  Payload ID: 12076
  Gene Symbol: OAZ3
  Gene Name: ornithine decarboxylase antizyme 3
  ENST ID: ENST00000582415
  CDS Start-End: 1-370
gggcaaaagcaccgagcagggtaaccacgaccagcttaaagaactgtattcgacctctgcccattggcacggccttctctgtgaccgtcgactcttcctggatatcccatatcaggccttggatcaaggcaaccgggaaagtttgactgcaaccctggagtacgtggaagagaagacaaatgtggactctgtgtttgtgaacttccagaatgatcggaacgacagaggtgccctgctgcgggccttcagctacatgggctttgaggtggtcagaccagatcaccctgccctccctcccttggacaatgtcatctttatggtgtatccccttgaaagggatgttggccacctgcccagtgagcctccttgaacatgcttattccaacgctttgaggggctggaagccttgacacatggaatcaggggcccgggatgtgattcaggacactttccatcctaggaataaagggtagtgcaatca

SEQ ID NO: 162777 - DNA, 850 bp, Homo sapiens
  Payload ID: 12076
  Gene Symbol: OAZ3
  Gene Name: ornithine decarboxylase antizyme 3
  Uniprot ID: Q9UMX2
  ENST ID: ENST00000627780
  CDS Start-End: 168-740
gcgcctcggcccgggccttactctccaccgactgcgtcaggatgagctccaggttttctttgggccgatgcttcgtgtcctccaccagcttatagacgcgatgtcgccggtgcaggcgcggcttccggccctccccggccagcggtaccttccaccagcgctccacgatgaccgtgccctggcggccaggaaagcgacgcatcacttataaggaagaggaggacttgacactccagccccgtcctgcctccagtgctcctgagtccctagtaggcctccaggagggcaaaagcaccgagcagggtaaccacgaccagcttaaagaactgtattcggctgggaacttgacggtgctggctactgaccccctgctccaccaggacccagtacagttagactttcacttccgccttacctcccagacctctgcccattggcacggccttctctgtgaccgtcgactcttcctggatatcccatatcaggccttggatcaaggcaaccgggaaagtttgactgcaaccctggagtacgtggaagagaagacaaatgtggactctgtgtttgtgaacttccagaatgatcggaacgacagaggtgccctgctgcgggccttcagctacatgggctttgaggtggtcagaccagatcaccctgccctccctcccttggacaatgtcatctttatggtgtatccccttgaaagggatgttggccacctgcccagtgagcctccttgaacatgcttattccaacgctttgaggggctggaagccttgacacatggaatcaggggcccgggatgtgattcaggacactttccatcctaggaataaagggtagtgcaatc

SEQ ID NO: 162778 - DNA, 745 bp, Homo sapiens
  Payload ID: 12076
  Gene Symbol: OAZ3
  Gene Name: ornithine decarboxylase antizyme 3
  ENST ID: ENST00000635322
  CDS Start-End: 238-477
aagcaaggcaaatagttgagggggacgggctagaaaaagctgatgccaaaccggaccagcctgagaggaagcgcctcggcccgggccttactctccaccgactgcgtcaggatgagctccaggttttctttgggccgatgcttcgtgtcctccaccagcttatagacgcgatgtcgccggtgcaggcgcggcttccggccctccccggccagcggtaccttccaccagcgctccacgatgaccgtgccctggcggccaggaaagcgacgcatcacttataaggaagaggaggacttgacactccagccccgttcctgcctccagtgctccgagtccctagtaggcctccaggagggcaaaagcaccgagcagggtaaccacgaccagcttaaagaactgtattcgtttgactgcaaccctggagtacgtggaagagaagacaaatgtggactctgtgtttgtgaacttccagaatgatcggaacgacagaggtgccctgctgcgggccttcagctacatgggctttgaggtggtcagaccagatcaccctgccctccctcccttggacaatgtcatctttatggtgtatccccttgaaagggatgttggccacctgcccagtgagcctccttgaacatgcttattccaacgctttgaggggctggaagccttgacacatggaatcaggggcccgggatgtgattcaggacactttccatcctaggaataaagggtagtgcaatca

SEQ ID NO: 162779 - DNA, 539 bp, Homo sapiens
  Payload ID: 12076
  Gene Symbol: OAZ3
  Gene Name: ornithine decarboxylase antizyme 3
  ENST ID: ENST00000635374
  CDS Start-End: 1-318
ctccagccccgttcctgcctccagtgctccgagtccctagtaggcctccaggagggcaaaagcaccgagcagggtaaccacgaccagcttaaagaactgtattcggctgggaacttgacggtgctggctactgaccccctgctccaccaggacccagtacagttagactttcacttccgccttacctcccagacctctgcccattggcacggccttctctgtgaccgtcgactcttcctggatatcccatatcaggccttggatcaaggcaaccgggaaaggtgccctgctgcgggccttcagctacatgggctttgaggtggtcagaccagatcaccctgccctccctcccttggacaatgtcatctttatggtgtatccccttgaaagggatgttggccacctgcccagtgagcctccttgaacatgcttattccaacgctttgaggggctggaagccttgacacatggaatcaggggcccgggatgtgattcaggacactttccatcctaggaataaagggtagtgcaatcatcaa

SEQ ID NO: 162780 - DNA, 863 bp, Homo sapiens
  Payload ID: 12077
  Gene Symbol: OFCC1
  Gene Name: orofacial cleft 1 candidate 1
  ENST ID: ENST00000316020
  CDS Start-End: 1-696
tttaggagagataagtttcagcagaaggctctgaagcaaactaagcagaagaaatccaagtcggctgaatttctgatggttaaagaagatagagaagctacagaaggcactggaaatccagcttttaacatgagcagtccagatctctcagcatgtcagactgcagaaaagaaagttattagacacgacatgccggatcgcacccttgcagctcaccaacaaaaattcaggctgccagcctctgcagaaccaaaaggaaatgaatacggcagaaattactttgacccactgatggatgaggaaataaacccaaggcagtgtgcgacggaggtcagcagagaagatgacgatagaattttctataatcgattaacgaagctttttgatgagagcagacaaggagaaccccaagatgagagtggccgggaggagactctgaattctgaagcacctgggagttccaataagagtcacgaaatccacaaagaagccagcgaagccaccactgctcaccttgaggagttccaaagatctcagaaaactataattctgcttggaagttctccattagaacaggaaattagatctacttcattgcattgtatggaggatgagatgagtcatccatggatactcttgctcaaagtaactgctgtaatcagaagcaggaggtactatagagagcaaagattctaaaacccattctcaggtcagtgctcgcaatgttcttatgttcactgtgtcgggaagttccatgaacacacaaggcaacatcataagtaggaaaaaccttcagatttggtgttagaactcagagctgtcatccttgattcagatatttatgtgaacttaaacctctttgt

SEQ ID NO: 162781 - DNA, 1222 bp, Homo sapiens
  Payload ID: 12077
  Gene Symbol: OFCC1
  Gene Name: orofacial cleft 1 candidate 1
  Uniprot ID: Q8IZS5
  ENST ID: ENST00000487015
  CDS Start-End: 1-369
actaagcagaagaaatccaagtcggctgaatttctgatggttaaagaagatagagaagctacagaaggcactggaaatccagcttttaacatgagcagtccagatctctcagcatgtcagactgcagaaaagaaagttattagacacgacatgccggatcgcacccttgcagctcaccaacaaaaattcaggctgccagcctctgcagaaccaaaaggaaatgaatacggcagaaattactttgacccactgatggatgaggaaataaacccaaggcagtgtgcgacggaggtcagcagagaaggatttgaaattcgaaggggaaggcctcaacgaatacattcctatgtcacttttaaagactggtaaaacatttgagaaaactccaagtcaaccattcattgcagacctaaatatttgtaaaaaggacagtgcagcccagcttggtaccctcacagaagtaactaatgactcaaagggagcagcaggaccccgctggaagttcctgcgtaattcaagaaccccaccttttgtggaaaatgagcagtctcaaccacctcagcctctgcaaatccagatcagatgcctgaggggccttaaagacaaggctcctccaggctcttatgtcctcaaagtgtccaagtgtccctgcttggtcgactgggaggctgtgtcttgcagtggtggcaaacggagcaactaaagaccagaaaacactccgtcaggcacaatggaaacttttatgatgtgggggtgtatttccacgaaaacctttatgtgggagcattcctaaaaaaatcggtccctgttctatggactatgatcccaatctcttagaagaagacgatgaactacactctcagggagatagcctgacggatcattctgtgaaaggaaaatcaactgtttggagaattggagaagctgaagattattcacaggacatatcttacttggaggaactggaggaacaccgattttctgtttgctgttcttcagttgctgatagtagatatggagacttcttcaagcatctccattttgtgctggtatcagcgtcttcagaacttcagttatctcaatggcaaagccagggcttctggtacattatactgctgatgttttttctctggttcctgaggctctacctgcattacttgggccagtggcttttcctccaggccatttcaactcctgttacaaaattccatttttctcttca

SEQ ID NO: 162782 - DNA, 464 bp, Homo sapiens
  Payload ID: 12077
  Gene Symbol: OFCC1
  Gene Name: orofacial cleft 1 candidate 1
  ENST ID: ENST00000485268
  CDS Start-End: 453-464
cagacacagatgggagtgtgtcaagcaggaaactgaagggagctgatcatcttcgtctcacccagaatcccatttggtctgtgtcctcttccctactctgtttatcgtggccttggctgtagcagggggaagagacaagtctggaaagaaccctgcccttggtttccatctctctgctgaaattccacatctagtcaggaatgtggtaatgtgtccggaattggtgggttcttgatctcactgacttcaagaatgaagccacagaacctcacggtgggtgttccagttcttaaacacagtgtctggcgtttgttccttctgatgttcggatgtgttaggaatttctttcttctggtgagttcgtgatctcgctggctcagcagtgaagctgcagaccttcgtgagagactggattgaaatctgtgcattgccaagggcaagaagctgagaacatggagagagag

SEQ ID NO: 162783 - DNA, 559 bp, Homo sapiens
  Payload ID: 12077
  Gene Symbol: OFCC1
  Gene Name: orofacial cleft 1 candidate 1
  ENST ID: ENST00000492169
  CDS Start-End: 1-559
atccaagtcggctgaatttctgatggttaaagaagatagagaagctacagaaggcactggaaatccagcttttaacatgagcagtccagatctctcagcatgtcagactgcagaaaagaaagttattagacacgacatgccggatcgcacccttgcagctcaccaacaaaaattcaggctgccagcctctgcagaaccaaaaggaaatgaatacggcagaaattactttgacccactgatggatgaggaaataaacccaaggcagtgtgcgacggaggtcagcagagaaggtgctccctcaaaggaaaaatggagcattcctaaaaaaatcggtccctgttctatggactatgatcccaatctcttagaagaagacgatgaactacactctcagggagatagcctgacggatcattctgtgaaaggaaaatcaactgtttggagaattggagaagctgaagattattcacaggacatatcttacttggaggaactggaggaacaccgattttctgtttgctgttcttcagttgctgatagtagatatggagacttcttc

SEQ ID NO: 162784 - DNA, 655 bp, Homo sapiens
  Payload ID: 12077
  Gene Symbol: OFCC1
  Gene Name: orofacial cleft 1 candidate 1
  Uniprot ID: Q8IZS5
  ENST ID: ENST00000491508
  CDS Start-End: 32-655
atgtttacttctgtgtgagcttatattaattatgtggatcaccagtctcatcaccatgaaggatgaagatatatttgatttggcaggggatccccaagacagcctcattcctgggccttctcccacccccaagcaaaacccagtttgtaatgaggctttctttggacaccagactttctccttaagagagactggattgaaatctgtgcattgccaagggcaagaagctgagaacatggagagagagaagtttcagcagaaggctctgaagcaaactaagcagaagaaatccaagtcggctgaatttctgatggttaaagaagatagagaagctacagaaggcactggaaatccagcttttaacatgagcagtccagatctctcagcatgtcagactgcagaaaagaaagttattagacacgacatgccggatcgcacccttgcagctcaccaacaaaaattcaggctgccagcctctgcagaaccaaaaggaaatgaatacggcagaaattactttgacccactgatggatgaggaaataaacccaaggcagtgtgcgacggaggtcagcagagaagatgagagtggccgggaggagactctgaattctgaagcacctgggagttccaataagagtcacgaaatccacaaagaa

SEQ ID NO: 162785 - DNA, 398 bp, Homo sapiens
  Payload ID: 12077
  Gene Symbol: OFCC1
  Gene Name: orofacial cleft 1 candidate 1
  ENST ID: ENST00000481704
  CDS Start-End: 333-398
tgtggcatgtgatgtttacatgatcctaggaagaaaatggatgagccgatgttgacaagagcttaagtaagtctccatgtacatcaagtactttggagacgccaaaggtgtaactttaaagggcaaagacctcaggacaaagcaacttgaagaagccaggaactaaagacgggacatttggttcaaaacttgaagtggctccccgccccccgccccgagatttcatgacagaaaaacaacaacagaatcaatatgactactgagaatacatttttaaaaattaacgtgacatcttggatcttataagagtcaagcccttcaggaaataaaccatgagagagactggattgaaatctgtgcattgccaagggcaagaagctgagaacatggagagagag

SEQ ID NO: 162786 - DNA, 973 bp, Homo sapiens
  Payload ID: 12077
  Gene Symbol: OFCC1
  Gene Name: orofacial cleft 1 candidate 1
  ENST ID: ENST00000486246
  CDS Start-End: 1-320
tgaagcaaactaagcagaagaaatccaagtcggctgaatttctgatggttaaagaagatagagaagctacagaaggcactggaaatccagcttttaacatgagcagtccagatctctcagcatgtcagactgcagaaaagaaagttattagacacgacatgccggatcgcacccttgcagctcaccaacaaaaattcaggctgccagcctctgcagaaccaaaaggaaatgaatacggcagaaattactttgacccactgatggatgaggaaataaacccaaggcagtgtgcgacggaggtcagcagagaagctttttgatgagagcagacaaggagaaccccaagatgagagtggccgggaggagactctgaattctgaagcacctgggagttccaataagagtcacgaaatccacaaagaagccagcgaagccaccactgctcaccttgaggagttccaaagatctcagaaaactataattctgcttggaagttctccattagaacaggccagactccaaacatctaggaatgaaaaatgcccatgggcataagtgtcctgaacattcttatggatttgggatttgaaattcgaaggggaaggcctcaacgaatacattcctatgtcacttttaaagactggtaaaacatttgagaaaactccaagtcaaccattcattgcagacctaaatatttgtaaaaaggacagtgcagcccagcttggtaccctcacagaagtaactaatgactcaaagggagcagcaggaccccgctggaagttcctgcgtaattcaagaaccccaccttttgtggaaaatgagcagtctcaaccacctcagcctctgcaaatccagatcagatgcctgaggggccttaaagacaaggctcctccaggctcttatgtcctcaaagtgtccaagtgtccctgcttggtcgactgggaggctgtgtcttgcagtggtggcaaacgga

SEQ ID NO: 162787 - DNA, 919 bp, Homo sapiens
  Payload ID: 12077
  Gene Symbol: OFCC1
  Gene Name: orofacial cleft 1 candidate 1
  ENST ID: ENST00000460363
  CDS Start-End: 20-919
agggcaagaagctgagaacatggagagagagaagtttcagcagaaggctctgaagcaaactaagcagaagaaatccaagtcggctgaatttctgatggttaaagaagatagagaagctacagaaggcactggaaatccagcttttaacatgagcagtccagatctctcagcatgtcagactgcagaaaagaaagttattagacacgacatgccggatcgcacccttgcagctcaccaacaaaaattcaggctgccagcctctgcagaaccaaaaggaaatgaatacggcagaaattactttgacccactgatggatgaggaaataaacccaaggcagtgtgcgacggaggtcagcagagaagtttgtctaatggctaaaggagagaaagcagaatcaggagtggataatacagctggcctttcagagaaggaaacacagaagaatcctcgtgcaccaatggatgaggcagacgttaaatccgcagcacactcttctcaggggagcattcctaaaaaaatcggtccctgttctatggactatgatcccaatctcttagaagaagacgatgaactacactctcagggagatagcctgacggatcattctgtgaaaggaaaatcaactgtttggagaattggagaagctgaagattattcacaggacatatcttacttggaggaactggaggaacaccgattttctgtttgctgttcttcagttgctgatagtagatatggagacttcttcaagcatctccattttgtgctggtatcagcgtcttcagaacttcagttatctcaatggcaaagccagggcttctggtacattatactgctgatgttttttctctggttcctgaggctctacctgcattacttgggccagtggcttttcctccaggccatttcaactcctgtt

SEQ ID NO: 162788 - DNA, 1527 bp, Homo sapiens
  Payload ID: 12077
  Gene Symbol: OFCC1
  Gene Name: orofacial cleft 1 candidate 1
  ENST ID: ENST00000469426
  CDS Start-End: 1-657
actaagcagaagaaatccaagtcggctgaatttctgatggttaaagaagatagagaagctacagaaggcactggaaatccagcttttaacatgagcagtccagatctctcagcatgtcagactgcagaaaagaaagttattagacacgacatgccggatcgcacccttgcagctcaccaacaaaaattcaggctgccagcctctgcagaaccaaaaggaaatgaatacggcagaaattactttgacccactgatggatgaggaaataaacccaaggcagtgtgcgacggaggtcagcagagaagatgacgatagaattttctataatcgattaacgaagctttttgatgagagcagacaaggagaaccccaagatgagagtggccgggaggagactctgaattctgaagcacctgggagttccaataagagtcacgaaatccacaaagaagccagcgaagccaccactgctcaccttgaggagttccaaagatctcagaaaactataattctgcttggaagttctccattagaacaggaaattagatctacttcattgcattgtatggaggatgagatgagtcatccatggatactcttgctcaaagtaactgctgtaatcagaagcaggaggtactatagagagcaaagattctaaaacccattctcaggccagactccaaacatctaggaatgaaaaatgcccatgggcataagtgtcctgaacattcttatggatttgggatttgaaattcgaaggggaaggcctcaacgaatacattcctatgtcacttttaaagactggtaaaacatttgagaaaactccaagtcaaccattcattgcagacctaaatatttgtaaaaaggacagtgcagcccagcttggtaccctcacagaagtaactaatgactcaaagggagcagcaggaccccgctggaagttcctgcgtaattcaagaaccccaccttttgtggaaaatgagcagtctcaaccacctcagcctctgcaaatccagatcagatgcctgaggggccttaaagacaaggctcctccaggctcttatgtcctcaaagtgtccaagtgtccctgcttggtcgactgggaggctgtgtcttgcagtggtggcaaacggagcaactaaagaccagaaaacactccgtcaggcacaatggaaacttttatgatgtgggggtgtatttccacgaaaacctttatgtggtgctccctcaaaggaaaaatgtgagccctggcatggtttcttgtttgaactctttcttcttcgtggaacatacacttgcctggaccgggctgtgggctgagcagtgttccctttgtgtaataacaactttgatacagtggagggaaaatttaagtgtccccttctatgaggacattatgaccagaaactcagtaactttaggaaaattgaagatttgatttgcctggacttggaccactggctgtgcaatctctattttcaggtcattaaacttcctttgcattttgatggtcaaaaaaatcatgaaa

SEQ ID NO: 162789 - DNA, 1200 bp, Homo sapiens
  Payload ID: 12077
  Gene Symbol: OFCC1
  Gene Name: orofacial cleft 1 candidate 1
  ENST ID: ENST00000469656
  CDS Start-End: 1-356
aagatgacgatagaattttctataatcgattaacgaagctttttgatgagagcagacaaggagaaccccaagatgagagtggccgggaggagactctgaattctgaagcacctgggagttccaataagagtcacgaaatccacaaagaagccagcgaagccaccactgctcaccttgaggagttccaaagatctcagaaaactataattctgcttggaagttctccattagaacaggaaattagatctacttcattgcattgtatggaggatgagatgagtcatccatggatactcttgctcaaagtaactgctgtaatcagaagcaggaggtactatagagagcaaagattctaaaacccattctcaggatttgaaattcgaaggggaaggcctcaacgaatacattcctatgtcacttttaaagactggtaaaacatttgagaaaactccaagtcaaccattcattgcagacctaaatatttgtaaaaaggacagtgcagcccagcttggtaccctcacagaagtaactaatgactcaaagggagcagcaggaccccgctggaagagagataaagattttttatggcttgctgacttgaaacaaccacgagaaccagtgaagagatggctaagcggccatgcatagtaattccactgttcctgcgtaattcaagaaccccaccttttgtggaaaatgagcagtctcaaccacctcagcctctgcaaatccagatcagatgcctgaggggccttaaagacaaggctcctccaggctcttatgtcctcaaagtgtccaagtgtccctgcttggtcgactgggaggctgtgtcttgcagtggtggcaaacggagcaactaaagaccagaaaacactccgtcaggcacaatggaaacttttatgatgtgggggtgtatttccacgaaaacctttatgtggtgctccctcaaaggaaaaatgtgagccctggcatggtttcttgtttgaactctttcttcttcgtggaacatacacttgcctggaccgggctgtgggctgagcagtgttccctttgtgtaataacaactttgatacagtggagggaaaatttaagtgtccccttctatgaggacattatgaccagaaactcagtaactttaggaaaattgaagatttgatttgcctggacttggaccactggctgtgcaatctctattttcag

SEQ ID NO: 162790 - DNA, 2877 bp, Homo sapiens
  Payload ID: 12077
  Gene Symbol: OFCC1
  Gene Name: orofacial cleft 1 candidate 1
  ENST ID: ENST00000492094
  CDS Start-End: 1-934
gcattgccaagggcaagaagctgagaacatggagagagagaagtttcagcagaaggctctgaagcaaactaagcagaagaaatccaagtcggctgaatttctgatggttaaagaagatagagaagctacagaaggcactggaaatccagcttttaacatgagcagtccagatctctcagcatgtcagactgcagaaaagaaagttattagacacgacatgccggatcgcacccttgcagctcaccaacaaaaattcaggctgccagcctctgcagaaccaaaaggaaatgaatacggcagaaattactttgacccactgatggatgaggaaataaacccaaggcagtgtgcgacggaggtcagcagagaagatgagagtggccgggaggagactctgaattctgaagcacctgggagttccaataagagtcacgaaatccacaaagaagccagcgaagccaccactgctcaccttgaggagttccaaagatctcagaaaactataattctgcttggaagttctccattagaacaggatttgaaattcgaaggggaaggcctcaacgaatacattcctatgtcacttttaaagactggtaaaacatttgagaaaactccaagtcaaccattcattgcagacctaaatatttgtaaaaaggacagtgcagcccagcttggtaccctcacagaagtaactaatgactcaaagggagcagcaggaccccgctggaagttcctgcgtaattcaagaaccccaccttttgtggaaaatgagcagtctcaaccacctcagcctctgcaaatccagatcagatgcctgaggggccttaaagacaaggctcctccaggctcttatgtcctcaaagtgtccaagtgtccctgcttggtcgactgggaggctgtgtcttgcagtggtggcaaacggagcaactaaagaccagaaaacactccgtcaggcacaatggaaacttttatgatgtgggggtgtatttccacgaaaacctttatgtggtgctccctcaaaggaaaaatgtgagccctggcatggtttcttgtttgaactctttcttcttcgtggaacatacacttgcctggaccgggctgtgggctgagcagtgttccctttgtgtaataacaactttgatacagtggagggaaaatttaagtgtccccttctatgaggacattatgaccagaaactcagtaactttaggaaaattgaagatttgatttgcctggacttggaccactggctgtgcaatctctattttcaggtcattaaacttcctttgcattttgatggtcaaaaaaatcatgaaagctatactcgactttcccctgaatttccagtttgtctaatggctaaaggagagaaagcagaatcaggagtggataatacagctggcctttcagagaaggaaacacagaagaatcctcgtgcaccaatggatgaggcagacgttaaatccgcagcacactcttctcaggggagcattcctaaaaaaatcggtccctgttctatggactatgatcccaatctcttagaagaagacgatgaactacactctcagggagatagcctgacggatcattctgtgaaaggaaaatcaactgtttggagaattggagaagctgaagattattcacaggacatatcttacttggaggaactggaggaacaccgattttctgtttgctgttcttcagttgctgatagtagatatggagacttcttcaagcatctccattttgtgctggtatcagcgtcttcagaacttcagttatctcaatggcaaagccagggcttctggtacattatactgctgatgttttttctctggttcctgaggctctacctgcattacttgggccagtggcttttcctccaggccatttcaactcctgttacaaaattccatttttctcttcacatcgttgagctttgctacccaacttcctcacttcacattggagaagagcttcccgtggttgtgatggggcctttaatgctgaatgcaatcctgcttcttttggttttgatcagatggggctgtcagctactctttgcctcctgtcctgatgtcttgtcaaagttaatcattaccatgggactatggacaattctggacccattggcagtgtttatactggatactctcctggggcggcttacagataatgaggagactcctgtggcggatgccgcgaagctctactggatgtttgtaagaaccgtgcagccaggcattcttggcgtggtgatcacagtgctgctttacatcctcctgttcgtcatttcttctttgattttatatttatattgtcttaggttgcacaatgactcttggatattagatgcttttcagcgcatccacagtgaagaaaccaagttcttcataccgtatgacttggagatttccaatcaggagctaagttatatagtgaaatgatctgagcagtggagaggaatcaatggtgaaagaagaaaggtggcagtgtatgattacatctggaaaagccatggcattaagtccagtgtctgcagctgtgacctccaacatcaaaatgaaatttctgtgtctgcacttggtccaggagatattacttctcatgtatctgtatataccatttatcccagtgggttgcaagagctgtaccgccattttctgagactccccggtgggccattgttgaggtgtttggtgatatcagtggcttaaagcttgtccacagtgaagtgatcacagctattcaggagcatataagcaaaacggacagcatcctgggaggctcgtttgacatttaattgagagacatgaaaagaacccgttaaaataaaaaggaaattggtggccccagtggaaggatgagtaaaga

SEQ ID NO: 162791 - DNA, 754 bp, Homo sapiens
  Payload ID: 12077
  Gene Symbol: OFCC1
  Gene Name: orofacial cleft 1 candidate 1
  ENST ID: ENST00000622909
  CDS Start-End: 29-736
gcattgccaagggcaagaagctgagaacatggagagagagaagtttcagcagaaggctctgaagcaaactaagcagaagaaatccaagtcggctgaatttctgatggttaaagaagatagagaagctacagaaggcactggaaatccagcttttaacatgagcagtccagatctctcagcatgtcagactgcagaaaagaaagttattagacacgacatgccggatcgcacccttgcagctcaccaacaaaaattcaggctgccagcctctgcagaaccaaaaggtactttcacaggaaatgaatacggcagaaattactttgacccactgatggatgaggaaataaacccaaggcagtgtgcgacggaggtcagcagagaagatgacgatagaattttctataatcgattaacgaagctttttgatgagagcagacaaggagaaccccaagatgagagtggccgggaggagactctgaattctgaagcacctgggagttccaataagagtcacgaaatccacaaagaagccagcgaagccaccactgctcaccttgaggagttccaaagatctcagaaaactataattctgcttggaagttctccattagaacaggaaattagatctacttcattgcattgtatggaggatgagatgagtcatccatggatactcttgctcaaagtaactgctgtaatcagaagcaggaggtactatagagagcaaagattctaaaacccattctcaggtcag

SEQ ID NO: 162792 - DNA, 875 bp, Homo sapiens
  Payload ID: 12077
  Gene Symbol: OFCC1
  Gene Name: orofacial cleft 1 candidate 1
  ENST ID: ENST00000611763
  CDS Start-End: 1-708
tttaggagagataagtttcagcagaaggctctgaagcaaactaagcagaagaaatccaagtcggctgaatttctgatggttaaagaagatagagaagctacagaaggcactggaaatccagcttttaacatgagcagtccagatctctcagcatgtcagactgcagaaaagaaagttattagacacgacatgccggatcgcacccttgcagctcaccaacaaaaattcaggctgccagcctctgcagaaccaaaaggcactatgccaggaaatgaatacggcagaaattactttgacccactgatggatgaggaaataaacccaaggcagtgtgcgacggaggtcagcagagaagatgacgatagaattttctataatcgattaacgaagctttttgatgagagcagacaaggagaaccccaagatgagagtggccgggaggagactctgaattctgaagcacctgggagttccaataagagtcacgaaatccacaaagaagccagcgaagccaccactgctcaccttgaggagttccaaagatctcagaaaactataattctgcttggaagttctccattagaacaggaaattagatctacttcattgcattgtatggaggatgagatgagtcatccatggatactcttgctcaaagtaactgctgtaatcagaagcaggaggtactatagagagcaaagattctaaaacccattctcaggtcagtgctcgcaatgttcttatgttcactgtgtcgggaagttccatgaacacacaaggcaacatcataagtaggaaaaaccttcagatttggtgttagaactcagagctgtcatccttgattcagatatttatgtgaacttaaacctctttgt

SEQ ID NO: 162793 - DNA, 802 bp, Homo sapiens
  Payload ID: 12078
  Gene Symbol: ORM1
  Gene Name: orosomucoid 1
  Uniprot ID: P02763
  ENST ID: ENST00000259396
  CDS Start-End: 79-684
gcccatagtttattataaaggtgactgcaccctgcagccaccagcactgcctggctccacgtgcctcctggtctcagtatggcgctgtcctgggttcttacagtcctgagcctcctacctctgctggaagcccagatcccattgtgtgccaacctagtaccggtgcccatcaccaacgccaccctggaccggatcactggcaagtggttttatatcgcatcggcctttcgaaacgaggagtacaataagtcggttcaggagatccaagcaaccttcttttacttcacccccaacaagacagaggacacgatctttctcagagagtaccagacccgacaggaccagtgcatctataacaccacctacctgaatgtccagcgggaaaatgggaccatctccagatacgtgggaggccaagagcatttcgctcacttgctgatcctcagggacaccaagacctacatgcttgcttttgacgtgaacgatgagaagaactgggggctgtctgtctatgctgacaagccagagacgaccaaggagcaactgggagagttctacgaagctctcgactgcttgcgcattcccaagtcagatgtcgtgtacaccgattggaaaaaggataagtgtgagccactggagaagcagcacgagaaggagaggaaacaggaggagggggaatcctagcaggacacagccttggatcaggacagagacttgggggccatcctgcccctccaacccgacatgtgtacctcagctttttccctcacttgcatcaataaagcttctgtgtttggaacag

SEQ ID NO: 162794 - DNA, 760 bp, Homo sapiens
  Payload ID: 12079
  Gene Symbol: ORM2
  Gene Name: orosomucoid 2
  Uniprot ID: P19652
  ENST ID: ENST00000431067
  CDS Start-End: 37-642
agcactgcctggctccacgtgcctcctggtctcagtatggcgctgtcctgggttcttacagtcctgagcctcctacctctgctggaagcccagatcccattgtgtgccaacctagtaccggtgcccatcaccaacgccaccctggaccggatcactggcaagtggttttatatcgcatcggcctttcgaaacgaggagtacaataagtcggttcaggagatccaagcaaccttcttttactttacccccaacaagacagaggacacgatctttctcagagagtaccagacccgccagaaccagtgcttctataactccagttacctgaatgtccagcgggagaatgggaccgtctccagatacgagggaggccgagaacatgttgctcacctgctgttccttagggacaccaagaccttgatgtttggttcctacctggacgatgagaagaactgggggctgtctttctatgctgacaagccagagacgaccaaggagcaactgggagagttctacgaagctctcgactgcttgtgcattcccaggtcagatgtcatgtacaccgactggaaaaaggataagtgtgagccactggagaagcagcacgagaaggagaggaaacaggaggagggggaatcctagcaggacacagccttggatcaggacagagacttgggggccatcctgcccctccaacccgacatgtgtacctcagctttttccctcacttgcatcaataaagcttctgtgtttggaacag

SEQ ID NO: 162795 - DNA, 2861 bp, Homo sapiens
  Payload ID: 12080
  Gene Symbol: OTX1
  Gene Name: orthodenticle homeobox 1
  Uniprot ID: P32242
  ENST ID: ENST00000282549
  CDS Start-End: 277-1341
acatacccggggagggcagtagaaaggtgatcaatcttcatcaggctacatttccaatcacctaaacaaccgagcaagacaagccactccgacaaggttggctgcccggcgggtctctgtgagagatccaggtagatggtgaacggccccggcagctgagggcaggccaggcccccagacgcatcagaccctgaaggactgcgtggtgggagccctgcaccgctcctggccccgggccccctggatccgtcggggcgcctccacccagctgttagcatgatgtcttacctcaaacaacccccatacggcatgaacgggctgggcctggccgggcccgccatggacctcctgcacccatccgtgggctatccggccactccgcggaagcagcggcgggagcgcaccaccttcacgcgttcacagctggacgtgctcgaggcgctcttcgccaagactcgctaccctgacatcttcatgcgggaggaggtggcgctcaagatcaacctgccggagtctagagtccaggtctggttcaagaaccgccgcgccaaatgccgccagcagcagcagagcgggagcggaaccaagagccgcccagccaagaagaagtcctctccagtgcgggagagctcgggctccgaaagcagtggccaattcacgccgccagctgtgtccagctctgcctcgtcctctagctcggcgtccagctcttccgccaacccagcggctgcagcggctgcgggactaggtgggaacccggtggcggccgcgtcgtcgctgagtacaccagctgcctcatctatctggagcccggcctccatctcgccaggctcagcgcccgcgtccgtgtcggtgccggagccattggccgcgcctagcaacacctcgtgtatgcagcgctccgtagctgcaggcgccgccaccgcagcagcctcttatcccatgtcctacggccagggcggcagctacggccaaggctaccctacgccctcctcttcctactttggcggcgtggactgcagctcatacctagcgcccatgcactcacatcaccacccgcaccagctcagccccatggcaccctcctccatggcgggccaccatcatcaccacccacatgcgcaccacccgttgagccagtcctcaggccaccaccaccaccatcaccaccaccaccaccaaggctacggtggctctgggcttgccttcaactctgccgactgcttggattacaaggagcctggcgccgctgctgcttcctccgcctggaaactcaacttcaactcccccgactgtctggactataaggaccaagcctcatggcggttccaggtcttgtgagcccaggaatgaaagaggagaagaaacgcaactacctgcgccctccgtggtcccgatcctgttgctgctgctgcaccgcccgcctttgcctcgtcttctccaaaactgaattttcaccccccaaaaagatgtccattgcctgcactgccgcccccatttttgtgccacttgcttggggggatgtgcaaacccaccctgccccttggatggggggaccggtgcttcggcttggcctacacattctatacaggagagatgtattatttccccccttcagcccctactaaactcttaagcctccccttccagtctttctggacagctattaagcacttgcagccttcggaggctctgcgctctgatccgctgtttgagcccaacactttaatttattctttctggacactggagtcactaactggcgtgtttctgcccattggagcacccgcacactactccaaatcaaaaccactaagagttcctcccgcgcagactgctgccccttcagctgccctcgattttgctccacgcctgccggccagagcctcccggcgtttcttccgccccagcggagtgcgctggggcgcgccagggctaggcccgccggaggagcgcgtccccagccttccgcgcacagagccgcatcccgccccgccctgcgctggactggttcaagcttccgcctcggcgggaacgctgtacatagtcaggtccgttccagggaccacttaaactttttagttgctgttggttggttgaactgaacatatcttgtcttagcacccaggaaacagaactttaagatatatacagcacatatatatatatatacatatatatatacacatatataaaaaacaaaagcaaaaaatattttccctctgtccgtcccccttctgctcttcctcaatcaatggcgctttttctttttcagttgttgcaaagctgccctgccctcttcacatcttctccctctgtgtatttattgaagagaaccgcttggtttcaggaagctgggcgcgggatatccgaagtgtggaggaaacagacaagtcagggtacagaggtgggggttgggcaggggcgcagggctgaccccctcacccggtctaagcacagggtcgcagttccagtttacaaacctaaaacaagaaaaccaaaaccagggaacaaaacaacaaaacaaaacaaaatccgtaaaagtacagcattagggaaaaacaaacaaacccaggccccaaacccagttccaactcctctgtcggcttctctctttcaacacccttgttttgtctagtgagtttttagtgcaccttcgttctccgaaatctgcggagagcccgcgcgcctgtgtatcaattttggctttggccgcttcgtccagtaggtgggaaagtaatttgtaaatttgatttgtctgatgtgaagatcacaaattacttgttgaaatgtaaggcagtccccctcctcctctttatctacattacttcccgaaaataaatgcaaattaatgaacggct

SEQ ID NO: 162796 - DNA, 2861 bp, Homo sapiens
  Payload ID: 12080
  Gene Symbol: OTX1
  Gene Name: orthodenticle homeobox 1
  Uniprot ID: P32242
  ENST ID: ENST00000366671
  CDS Start-End: 277-1341
ggacgctgggctccaacgtttcagtagaagcgcttaagacttgcaaacacccttggtggggacctggaaccccgggagatgccgacgagcaagcaggttggctgcccggcgggtctctgtgagagatccaggtagatggtgaacggccccggcagctgagggcaggccaggcccccagacgcatcagaccctgaaggactgcgtggtgggagccctgcaccgctcctggccccgggccccctggatccgtcggggcgcctccacccagctgttagcatgatgtcttacctcaaacaacccccatacggcatgaacgggctgggcctggccgggcccgccatggacctcctgcacccatccgtgggctatccggccactccgcggaagcagcggcgggagcgcaccaccttcacgcgttcacagctggacgtgctcgaggcgctcttcgccaagactcgctaccctgacatcttcatgcgggaggaggtggcgctcaagatcaacctgccggagtctagagtccaggtctggttcaagaaccgccgcgccaaatgccgccagcagcagcagagcgggagcggaaccaagagccgcccagccaagaagaagtcctctccagtgcgggagagctcgggctccgaaagcagtggccaattcacgccgccagctgtgtccagctctgcctcgtcctctagctcggcgtccagctcttccgccaacccagcggctgcagcggctgcgggactaggtgggaacccggtggcggccgcgtcgtcgctgagtacaccagctgcctcatctatctggagcccggcctccatctcgccaggctcagcgcccgcgtccgtgtcggtgccggagccattggccgcgcctagcaacacctcgtgtatgcagcgctccgtagctgcaggcgccgccaccgcagcagcctcttatcccatgtcctacggccagggcggcagctacggccaaggctaccctacgccctcctcttcctactttggcggcgtggactgcagctcatacctagcgcccatgcactcacatcaccacccgcaccagctcagccccatggcaccctcctccatggcgggccaccatcatcaccacccacatgcgcaccacccgttgagccagtcctcaggccaccaccaccaccatcaccaccaccaccaccaaggctacggtggctctgggcttgccttcaactctgccgactgcttggattacaaggagcctggcgccgctgctgcttcctccgcctggaaactcaacttcaactcccccgactgtctggactataaggaccaagcctcatggcggttccaggtcttgtgagcccaggaatgaaagaggagaagaaacgcaactacctgcgccctccgtggtcccgatcctgttgctgctgctgcaccgcccgcctttgcctcgtcttctccaaaactgaattttcaccccccaaaaagatgtccattgcctgcactgccgcccccatttttgtgccacttgcttggggggatgtgcaaacccaccctgccccttggatggggggaccggtgcttcggcttggcctacacattctatacaggagagatgtattatttccccccttcagcccctactaaactcttaagcctccccttccagtctttctggacagctattaagcacttgcagccttcggaggctctgcgctctgatccgctgtttgagcccaacactttaatttattctttctggacactggagtcactaactggcgtgtttctgcccattggagcacccgcacactactccaaatcaaaaccactaagagttcctcccgcgcagactgctgccccttcagctgccctcgattttgctccacgcctgccggccagagcctcccggcgtttcttccgccccagcggagtgcgctggggcgcgccagggctaggcccgccggaggagcgcgtccccagccttccgcgcacagagccgcatcccgccccgccctgcgctggactggttcaagcttccgcctcggcgggaacgctgtacatagtcaggtccgttccagggaccacttaaactttttagttgctgttggttggttgaactgaacatatcttgtcttagcacccaggaaacagaactttaagatatatacagcacatatatatatatatacatatatatatacacatatataaaaaacaaaagcaaaaaatattttccctctgtccgtcccccttctgctcttcctcaatcaatggcgctttttctttttcagttgttgcaaagctgccctgccctcttcacatcttctccctctgtgtatttattgaagagaaccgcttggtttcaggaagctgggcgcgggatatccgaagtgtggaggaaacagacaagtcagggtacagaggtgggggttgggcaggggcgcagggctgaccccctcacccggtctaagcacagggtcgcagttccagtttacaaacctaaaacaagaaaaccaaaaccagggaacaaaacaacaaaacaaaacaaaatccgtaaaagtacagcattagggaaaaacaaacaaacccaggccccaaacccagttccaactcctctgtcggcttctctctttcaacacccttgttttgtctagtgagtttttagtgcaccttcgttctccgaaatctgcggagagcccgcgcgcctgtgtatcaattttggctttggccgcttcgtccagtaggtgggaaagtaatttgtaaatttgatttgtctgatgtgaagatcacaaattacttgttgaaatgtaaggcagtccccctcctcctctttatctacattacttcccgaaaataaatgcaaattaatgaacggct

SEQ ID NO: 162797 - DNA, 1694 bp, Homo sapiens
  Payload ID: 12080
  Gene Symbol: OTX1
  Gene Name: orthodenticle homeobox 1
  ENST ID: ENST00000405984
  CDS Start-End: 248-553
atcaatcttcatcaggctacatttccaatcacctaaacaaccgagcaagacaagccactccgacaaggttggctgcccggcgggtctctgtgagagatccaggtagatggtgaacggccccggcagctgagggcaggccaggcccccagacgcatcagaccctgaaggactgcgtggtgggagccctgcaccgctcctggccccgggccccctggatccgtcggggcgcctccacccagctgttagcatgatgtcttacctcaaacaacccccatacggcatgaacgggctgggcctggccgggcccgccatggacctcctgcacccatccgtgggctatccggttcggctttcttttgcgaaggccgagatctgggcctgccaggggcctgcccgagtcctctatcgcgggtccacgtggccaccaatgacccgcggcgcccccgcgtgtccccgcagccactccgcggaagcagcggcgggagcgcaccaccttcacgcgttcacagctggacgtgctcgaggcgctcttcgccaagactcgctaccctgacatcttcatgcgggaggaggtggcgctcaagatcaacctgccggagtctagagtccaggtctggttcaagaaccgccgcgccaaatgccgccagcagcagcagagcgggagcggaaccaagagccgcccagccaagaagaagtcctctccagtgcgggagagctcgggctccgaaagcagtggccaattcacgccgccagctgtgtccagctctgcctcgtcctctagctcggcgtccagctcttccgccaacccagcggctgcagcggctgcgggactaggtgggaacccggtggcggccgcgtcgtcgctgagtacaccagctgcctcatctatctggagcccggcctccatctcgccaggctcagcgcccgcgtccgtgtcggtgccggagccattggccgcgcctagcaacacctcgtgtatgcagcgctccgtagctgcaggcgccgccaccgcagcagcctcttatcccatgtcctacggccagggcggcagctacggccaaggctaccctacgccctcctcttcctactttggcggcgtggactgcagctcatacctagcgcccatgcactcacatcaccacccgcaccagctcagccccatggcaccctcctccatggcgggccaccatcatcaccacccacatgcgcaccacccgttgagccagtcctcaggccaccaccaccaccatcaccaccaccaccaccaaggctacggtggctctgggcttgccttcaactctgccgactgcttggattacaaggagcctggcgccgctgctgcttcctccgcctggaaactcaacttcaactcccccgactgtctggactataaggaccaagcctcatggcggttccaggtcttgtgagcccaggaatgaaagaggagaagaaacgcaactacctgcgccctccgtggtcccgatcctgttgctgctgctgcaccgcccgcctttgcctcgtcttctccaaaactgaattttcaccccccaaaaagatgtccattgcctgcactgccgcccccatttttgtgccacttgcttggggggatgtgcaaacccaccctgccccttggatggggggaccggtgcttcggcttggcctacacattctatacaggagagatgtattatttc

SEQ ID NO: 162798 - DNA, 3001 bp, Homo sapiens
  Payload ID: 12081
  Gene Symbol: OTX2
  Gene Name: orthodenticle homeobox 2
  Uniprot ID: P32243
  ENST ID: ENST00000339475
  CDS Start-End: 278-1171
cctgagagcgggaccggcctcagctccaacacagcctccactgtgattaaaaataaaaattgctagagcagccctcactcgccacatctactttgatagctggctatttggaatttaaaggatatttgactttttctaacctcccatgaggctgtaagttccactgctccaaacccacccaccaaggactctgaacctgtccaccccgggcgcatcaagatcttccagctgggtacccccgatttgggccgactttgcacctccaaacaaccttagcatgatgtcttatcttaagcaaccgccttacgcagtcaatgggctgagtctgaccacttcgggtatggacttgctgcacccctccgtgggctacccggggccctgggcttcttgtcccgcagccaccccccggaaacagcgccgggagaggacgacgttcactcgggcgcagctagatgtgctggaagcactgtttgccaagacccggtacccagacatcttcatgcgagaggaggtggcactgaaaatcaacttgcccgagtcgagggtgcaggtatggtttaagaatcgaagagctaagtgccgccaacaacagcaacaacagcagaatggaggtcaaaacaaagtgagacctgccaaaaagaagacatctccagctcgggaagtgagttcagagagtggaacaagtggccaattcactcccccctctagcacctcagtcccgaccattgccagcagcagtgctcctgtgtctatctggagcccagcttccatctccccactgtcagatcccttgtccacctcctcttcctgcatgcagaggtcctatcccatgacctatactcaggcttcaggttatagtcaaggatatgctggctcaacttcctactttgggggcatggactgtggatcatatttgacccctatgcatcaccagcttcccggaccaggggccacactcagtcccatgggtaccaatgcagtcaccagccatctcaatcagtccccagcttctctttccacccagggatatggagcttcaagcttgggttttaactcaaccactgattgcttggattataaggaccaaactgcctcctggaagcttaacttcaatgctgactgcttggattataaagatcagacatcctcgtggaaattccaggttttgtgaagacctgtagaacctctttttgtgggtgatttttaaatatactgggctggacattccagttttagccaggcattggttaaaagagttagatgggatgatgctcagactcatctgatcaaagttccgagaggcatagaaggaaaaacgaagggccttagaggggcctacaaaccagcaacatgaaatggacaaaccaatctgcttaagatcctgtcatagttttagatcattggttatcctgatttgcaaagtgatcaaaagcattctagccatgtgcaaccaaacaccaccaaaaataaaatcaaacaaaactaagttgtgaaggaagggagggaaggtcatagccttcttaagcagaggtgttccattgttttagccaatccttggttgaatcttaggaatgaacagtgtctcaagctcattcacgtttcatgaccaactggtagttggcactgaaaaaacttttcagggctgtgtgaattgtgtgactgattgtcctagatgcactactttatttaaaaaataatgttcataaggagtcaatatgtagtttaagagacaatcagtgtgtgtcttataaatggtacatctgtggtttttaatctgtgctagacttcaaaactgtgatctcctgttattgtatgcaaccttgaactccacctctgcaggggttcttctgtgattaaataggttataattataagcaaaattcagagcaactgagtactgatctaaaaagattacctttggctggaggtgagctgcactgaaactttacgacaaaatgtctctggacaaagagagtcagagaagagaagcaaaaggacactaattcatctgtaatttactgttggtaagcctagcagtaaagagacattggtcaattgctctgaccctgatgaattattaaactgagatcattgtcgtttatgcttgcagatgttaaatggaaaagttatatatgcataaaccttttcttcctggatttggcagatatgtataattatattaaaatggttctagcacaacattgggtccagtttaattttacaccgctatttatgaataagaagcctacattcagcctttcctccccaaaacacgtttttcttaggacagagagtaaattagcaaacttatttttactttttttttttgctaatctatgcataaaatagatatgaatgacagtggtaggtagactttttgtgactttcatcaggattgctctgaaattgagtttggagagcctaacaacaagatcttgttttccttgcttttccctccctacttcaaacctgaacgatttcttaggcactttattagaatgttttaaaatatatcaagtttttaagagggaggaggagaattggagtatctctgaaaacatgagaatgacaagaatttcttgttactattctcttatttgattaaggggattttttttttttaacttccaaaaactgaggtaaacatgagagggagtgtaatcagaatctgaaagtaattcaggcagaaatgattcctgaacaaaagagtttcagaaaagttttaaaacctataatttcagtagttgaacataaggcaccctggtcagtttgtgtgtatgtgtttaagaaagtgccgagggggaaaaaatgggtcccttttcagttgtacctgcattttgtaaaccagtcaccagaaaagacaaatgggccaatgatcatggtgctcctcaggtaaaagcaatatttaatttcattttaagctgcttaagctcttacagctgaccaaaattaagtgactcttgattgtaacgttttaaatgaaggttagcagttgcaacca

SEQ ID NO: 162799 - DNA, 1082 bp, Homo sapiens
  Payload ID: 12081
  Gene Symbol: OTX2
  Gene Name: orthodenticle homeobox 2
  Uniprot ID: P32243
  ENST ID: ENST00000408990
  CDS Start-End: 208-1077
tttttaagttagtgctggaacgtggaagagctgctgcctccgaagcagtaaaccagcccctctgtttgtttgtttgctttgcccttagttccactgctccaaacccacccaccaaggactctgaacctgtccaccccgggcgcatcaagatcttccagctgggtacccccgatttgggccgactttgcacctccaaacaaccttagcatgatgtcttatcttaagcaaccgccttacgcagtcaatgggctgagtctgaccacttcgggtatggacttgctgcacccctccgtgggctacccggccaccccccggaaacagcgccgggagaggacgacgttcactcgggcgcagctagatgtgctggaagcactgtttgccaagacccggtacccagacatcttcatgcgagaggaggtggcactgaaaatcaacttgcccgagtcgagggtgcaggtatggtttaagaatcgaagagctaagtgccgccaacaacagcaacaacagcagaatggaggtcaaaacaaagtgagacctgccaaaaagaagacatctccagctcgggaagtgagttcagagagtggaacaagtggccaattcactcccccctctagcacctcagtcccgaccattgccagcagcagtgctcctgtgtctatctggagcccagcttccatctccccactgtcagatcccttgtccacctcctcttcctgcatgcagaggtcctatcccatgacctatactcaggcttcaggttatagtcaaggatatgctggctcaacttcctactttgggggcatggactgtggatcatatttgacccctatgcatcaccagcttcccggaccaggggccacactcagtcccatgggtaccaatgcagtcaccagccatctcaatcagtccccagcttctctttccacccagggatatggagcttcaagcttgggttttaactcaaccactgattgcttggattataaggaccaaactgcctcctggaagcttaacttcaatgctgactgcttggattataaagatcagacatcctcgtggaaattccaggttttgtgaagacc

SEQ ID NO: 162800 - DNA, 715 bp, Homo sapiens
  Payload ID: 12081
  Gene Symbol: OTX2
  Gene Name: orthodenticle homeobox 2
  ENST ID: ENST00000554559
  CDS Start-End: 288-395
agcaaatctccctgagagcgggaccggcctcagctccaacacagcctccactgtgattaaaaataaaaattgctagagcagccctcactcgccacatctactttgatagctggctatttggaatttaaaggatatttgactttttctaacctcccatgaggctgtaagttccactgctccaaacccacccaccaaggactctgaacctgtccaccccgggcgcatcaagatcttccagctgggtacccccgatttgggccgactttgcacctccaaacaaccttagcatgatgtcttatcttaagcaaccgccttacgcagtcaatgggctgagtctgaccacttcgggtatggacttgctgcacccctccgtgggctacccgggtatggtttaagaatcgaagagctaagtgccgccaacaacagcaacaacagcagaatggaggtcaaaacaaagtgagacctgccaaaaagaagacatctccagctcgggaagtgagttcagagagtggaacaagtggccaattcactcccccctctagcacctcagtcccgaccattgccagcagcagtgctcctgtgtctatctggagcccagcttccatctccccactgtcagatcccttgtccacctcctcttcctgcatgcagaggtcctatcccatgacctatactcaggcttcaggttatagtcaaggatatgctggctcaactt

SEQ ID NO: 162801 - DNA, 797 bp, Homo sapiens
  Payload ID: 12081
  Gene Symbol: OTX2
  Gene Name: orthodenticle homeobox 2
  ENST ID: ENST00000555804
  CDS Start-End: 308-797
agcaaatctccctgagagcgggaccggcctcagctccaacacagcctccactgtgattaaaaataaaaattgctagagcagccctcactcgccacatctactttgatagctggctatttggaatttaaaggatatttgactttttctaacctcccatgaggctgtaaggattgtaggaaacttgaaagttccactgctccaaacccacccaccaaggactctgaacctgtccaccccgggcgcatcaagatcttccagctgggtacccccgatttgggccgactttgcacctccaaacaaccttagcatgatgtcttatcttaagcaaccgccttacgcagtcaatgggctgagtctgaccacttcgggtatggacttgctgcacccctccgtgggctacccggccaccccccggaaacagcgccgggagaggacgacgttcactcgggcgcagctagatgtgctggaagcactgtttgccaagacccggtacccagacatcttcatgcgagaggaggtggcactgaaaatcaacttgcccgagtcgagggtgcaggtatggtttaagaatcgaagagctaagtgccgccaacaacagcaacaacagcagaatggaggtcaaaacaaagtgagacctgccaaaaagaagacatctccagctcgggaagtgagttcagagagtggaacaagtggccaattcactcccccctctagcacctcagtcccgaccattgccagcagcagtgctcctgtgtctatctggagcccagcttccatctccccactgtcagatccct

SEQ ID NO: 162802 - DNA, 908 bp, Homo sapiens
  Payload ID: 12081
  Gene Symbol: OTX2
  Gene Name: orthodenticle homeobox 2
  ENST ID: ENST00000554845
  CDS Start-End: 193-908
tggaacgtggaagagctgctgcctccgaagcagtaaaccagcccctctgtttgtttgtttgctttgcccttagttccactgctccaaacccacccaccaaggactctgaacctgtccaccccgggcgcatcaagatcttccagctgggtacccccgatttgggccgactttgcacctccaaacaaccttagcatgatgtcttatcttaagcaaccgccttacgcagtcaatgggctgagtctgaccacttcgggtatggacttgctgcacccctccgtgggctacccggggccctgggcttcttgtcccgcagccaccccccggaaacagcgccgggagaggacgacgttcactcgggcgcagctagatgtgctggaagcactgtttgccaagacccggtacccagacatcttcatgcgagaggaggtggcactgaaaatcaacttgcccgagtcgagggtgcaggtatggtttaagaatcgaagagctaagtgccgccaacaacagcaacaacagcagaatggaggtcaaaacaaagtgagacctgccaaaaagaagacatctccagctcgggaagtgagttcagagagtggaacaagtggccaattcactcccccctctagcacctcagtcccgaccattgccagcagcagtgctcctgtgtctatctggagcccagcttccatctccccactgtcagatcccttgtccacctcctcttcctgcatgcagaggtcctatcccatgacctatactcaggcttcaggttatagtcaaggatatgctggctcaacttcctactttgggggcatggactgtggatcatatttgacccctatgcatcaccagcttcccggaccaggggccacactcagtcccatgggtaccaatgcagtcaccagccatct

SEQ ID NO: 162803 - DNA, 1279 bp, Homo sapiens
  Payload ID: 12081
  Gene Symbol: OTX2
  Gene Name: orthodenticle homeobox 2
  Uniprot ID: P32243
  ENST ID: ENST00000555006
  CDS Start-End: 410-1279
agctccaacacagcctccactgtgattaaaaataaaaattgctagagcagccctcactcgccacatctactttgtatgtattgcagaggggcccacgcgtgtttagaactctagccgccttcctcattttcgttctttaaaaaaaattttttttggttgtgtttgacttttcatggaagggtgaagactgcaaggtttctaactcaatactcttgatttcttttaggatagctggctatttggaatttaaaggatatttgactttttctaacctcccatgaggctgtaagttccactgctccaaacccacccaccaaggactctgaacctgtccaccccgggcgcatcaagatcttccagctgggtacccccgatttgggccgactttgcacctccaaacaaccttagcatgatgtcttatcttaagcaaccgccttacgcagtcaatgggctgagtctgaccacttcgggtatggacttgctgcacccctccgtgggctacccggccaccccccggaaacagcgccgggagaggacgacgttcactcgggcgcagctagatgtgctggaagcactgtttgccaagacccggtacccagacatcttcatgcgagaggaggtggcactgaaaatcaacttgcccgagtcgagggtgcaggtatggtttaagaatcgaagagctaagtgccgccaacaacagcaacaacagcagaatggaggtcaaaacaaagtgagacctgccaaaaagaagacatctccagctcgggaagtgagttcagagagtggaacaagtggccaattcactcccccctctagcacctcagtcccgaccattgccagcagcagtgctcctgtgtctatctggagcccagcttccatctccccactgtcagatcccttgtccacctcctcttcctgcatgcagaggtcctatcccatgacctatactcaggcttcaggttatagtcaaggatatgctggctcaacttcctactttgggggcatggactgtggatcatatttgacccctatgcatcaccagcttcccggaccaggggccacactcagtcccatgggtaccaatgcagtcaccagccatctcaatcagtccccagcttctctttccacccagggatatggagcttcaagcttgggttttaactcaaccactgattgcttggattataaggaccaaactgcctcctggaagcttaacttcaatgctgactgcttggattataaagatcagacatcctcgtggaaattccaggttttgtga

SEQ ID NO: 162804 - DNA, 835 bp, Homo sapiens
  Payload ID: 12081
  Gene Symbol: OTX2
  Gene Name: orthodenticle homeobox 2
  ENST ID: ENST00000554788
  CDS Start-End: 193-300
tggaacgtggaagagctgctgcctccgaagcagtaaaccagcccctctgtttgtttgtttgctttgcccttagttccactgctccaaacccacccaccaaggactctgaacctgtccaccccgggcgcatcaagatcttccagctgggtacccccgatttgggccgactttgcacctccaaacaaccttagcatgatgtcttatcttaagcaaccgccttacgcagtcaatgggctgagtctgaccacttcgggtatggacttgctgcacccctccgtgggctacccgggtatggtttaagaatcgaagagctaagtgccgccaacaacagcaacaacagcagaatggaggtcaaaacaaagtgagacctgccaaaaagaagacatctccagctcgggaagtgagttcagagagtggaacaagtggccaattcactcccccctctagcacctcagtcccgaccattgccagcagcagtgctcctgtgtctatctggagcccagcttccatctccccactgtcagatcccttgtccacctcctcttcctgcatgcagaggtcctatcccatgacctatactcaggcttcaggttatagtcaaggatatgctggctcaacttcctactttgggggcatggactgtggatcatatttgacccctatgcatcaccagcttcccggaccaggggccacactcagtcccatgggtaccaatgcagtcaccagccatctcaatcagtccccagcttctctttccacccagggatatggagcttcaagcttgggttttaactcaaccactgattgcttggattataaggaccaaactgcctcc

SEQ ID NO: 162805 - DNA, 3669 bp, Homo sapiens
  Payload ID: 12082
  Gene Symbol: OTP
  Gene Name: orthopedia homeobox
  Uniprot ID: Q5XKR4
  ENST ID: ENST00000306422
  CDS Start-End: 1140-2117
tactctggttagaaatatattactaatctaaactttgttgttggctggctctgaaaaatcagaacattagaaatggttcgcttcacttgtgcaaagcactttaaattgttcaagtagtttaacatattcaagaggaaaataaagagcatttaactttatttacagccttaagtggagttgggagccgagctgaacttagaaactttgaccaaaagagcgagttaggggcgaggatgcgggcgtgggccaagcggaagagcaggagccgggaagaagcccggtgagaagagtgcagagcgctcgaacccacactccgcgagggtccccaaagcagacagcgggcgctggcggtgccagggaagccgactcctctttgcgctctaggcccactgtggggttggggctcgtatagaccccagggcacagccagggcgcctggaccctaggcgcaggcctactgagccgcggcgaagtccaggcgttgtctgaaggccgcggtgtgccctcgtcgcgccctgggctggcgggccaatatgagcggcaggcccagagagcgcaggtgggggcgaccctcaggtcacgccagggtcatggcccgctctgacccctgctctgcccctgccctaggaagatgttagctcagaggcacagagctacgccttcgaagcgcgcagcgccggccaaggggaaggaaaggggagcctggagaaaatcgcagggaagaactagagggagccgggcccagaagctcagggcgaggccgaggcggctgaggctgctttagctcctgctccgggctggagctgccagggctgccgccgccgcctccttcaggcgggcgcaggcgagcgggcgggcggagtgggggactctccgggcgctgacatttgcaggctgccctcctgattggtcccctcgccgagctgctcacgggttcattcaactgttaagcacctccccgtctctctaaaggacattataatgcaagaagccccctttttaaccacaaaccgaattttctttcatttaggtgatctatatatatctatatcgtatagcttatagcttatatctattttaaataacttaaagccgctaaaatttgggggggaacagctttcgccctggagcggtgcgcgatgctgtctcatgccgacctcctggacgccaggctaggtatgaaagatgccgccgagcttctgggccaccgggaggcggtgaagtgtaggctgggcgtggggggctccgaccccgggggccatccgggggacctggcgcccaactctgacccagtggagggagccactctgctgcccggggaggacatcaccacagtgggctctactccggcctcgctggcggtgagcgccaaagacccggacaagcagcccgggccccagggcggcccgaaccccagccaagccggccagcagcagggccaacagaagcagaagcgccaccggacgcgcttcacccccgcacagctcaacgagttggagaggagcttcgccaagactcactaccccgacatctttatgcgtgaggagctggcactgcgtatcgggctgaccgagtcccgagtgcaggtctggttccagaaccgacgcgccaagtggaagaagcgcaaaaagacgaccaacgtgttccgtgcgcccggcacactgctgcccacgccaggcctgcctcagttcccgtcggctgccgccgccgctgccgccgccatgggcgacagcctgtgctctttccacgccaacgacacccgctgggcggcggccgccatgcctggcgtgtcacagctgcctctgccgccggcgctgggcaggcagcaggccatggcgcagtcgctgtcccagtgcagcctggcggccggtccgccgcccaactccatgggcctgtccaacagcctggcgggttccaacggcgcggggctgcagtcgcacctctaccagcccgccttccccggcatggtgcccgcctccctccccggccccagcaacgtctccggttcgccccagctctgcagctccccggacagcagcgacgtgtggcggggcaccagcatcgcctccctccgccgcaaggcgctagagcacacagtctctatgagcttcacttaatgcagccgcgccccggcccgctccgcccccagcaccgccccgggggccgccccgaggcccttccggcgcgcacccggaccccggcgccctgccccgtcccgccccggccttcgccccgtctcgtttcgtcctcgcctctctcctccactcgctcgggctcaccccaagccccagcccgcgaggcctcccctccgcctgatttcgatcgcccgcggtcccccgtctcccggccgcccctcttcccttcccacccagctgcgccctcggctcggtctccagcgcctcagcccacccttcccgccaccctggcctccctgcttgcgctggccgtgctcgcgccctcctcctggccttctgacgggcggcgttcccacccacaccttcgacgcgacgcctacgacccccctcgcccgccgcctcccctccggtcccctctttccccacacttcgcgaccctcctcccgcgcccggcaaaaagtatccttcccgccattttacgtaccagggagtcgactcaggatctgaaatcagacaccaatggactggtttgtgggcagaaacacacacactcgcactctcgctcacgctcagacgctacacacgcgcgcgcacagacacggtgcacctaggtcacacacggacgtgttcaagggacagcacaatgttagggatttttgtcttaaaggaggacaagcattgctaccaaccgcctcatctgagggcccaactgatatgatttgatttatccttgtactctccaagctcctgtctttctttcctctcccaccacgctacccttgcccagtccacccagtcacatccgtgcagccctctcttggcttgcaagataacgcttttatttttattttatcttattttcattttcttaagcacaactgtgtgagagtgtagaagggaaggcttctcaggaggaacgtgacagtggattgggtggctggagtagactaaagcagtcatgtgacgaggaagaggtgatctgacccattttgataagtctttataaggaagaataaaataaacgtgtaagcaaaattttcttttgtaaaagcaaaagccacatctcttttctggatccttcaggactggggtttgtttgcttccttttctgtttctgtcttctcgctgctctgtgcccttggttgttttgtggtggtcctgtcgtccctcgtgcccctcggccacctgctggcagccgatgggggcactcggacatctacaaccctgcaactttgtacagagaaacacaatcagctctttctgcatgtgctggtcaaatccaaacccagagaacagaagcgctttctaagaatgaacaaatatgtgaaataggatgttttgtgtagataaagcattcttgttacatactggtcaatttgtgatatgttttaacttaatgtctgtgtttatttatggaattcggttttcttaataaatgtttgagctaatataaagcatattatttgacttttccggacaagtttatatcaagttaaatgtaaatggataaaataaaatcattttcagtatgtga

SEQ ID NO: 162806 - DNA, 2002 bp, Homo sapiens
  Payload ID: 12083
  Gene Symbol: OSGEP
  Gene Name: O-sialoglycoprotein endopeptidase
  Uniprot ID: Q9NPF4
  ENST ID: ENST00000206542
  CDS Start-End: 423-1430
ctcgcctccctcctctaattctctaggacacttaggtccccaaccctccctcgggctgtttatcgttgtgccagatgcacagcacattgtgtgacactgacttaagattctaactatgtgcaagagggaaaaaaacagtggagaaggctgggctggaccacgggaaagagataggaaaacggatacgaatgtaaggcacagagttggctcggcgtccctggcagttaggaagacaggtccctggaggggccttggcgggtctccgctcgcgggagttccgcggtgtctttcccagtgctatctgcaggctggccagcttcctctgcgctccggaaagctgcggcccagcgcggactagtgaggacctccacagctcctgacattgccaggagtcctgtcggcgttttctcccagcctccgccatgccggcggtgctgggttttgaaggcagcgccaataagattggcgtgggcgtggtgcgggatggcaaggtgctggcgaacccgcggcggacttacgtcacgcctcctggcacaggattccttccaggtgatacagccaggcatcaccgagctgttatcctagacctgctgcaggaggcactaacagagtctggattaacctcccaggatatcgactgcattgcatacaccaagggccctggcatgggtgccccactggtttctgtggctgttgtggcccgtactgtggcccaactgtggaataagccattggtgggtgtgaaccactgtataggccacattgagatgggccgcctcatcactggagccaccagcccaaccgtgttgtatgtgagtggaggaaatacgcaggtgattgcatactcggaacatcgttaccgtatctttggggaaaccatcgatattgcagtgggtaattgtctggatcgttttgctcgagtgctgaagatttctaacgacccaagtccaggatacaacattgaacagatggcaaagcgaggcaagaagctagttgagctgccatacactgtaaaggggatggacgtctcattctcagggatcctgtctttcattgaggatgtagcccatcggatgctggccacaggcgagtgtactcctgaggatctgtgtttctccctgcaggaaactgtgtttgcaatgctggtagagatcacagagcgagccatggcacattgtggctcccaggaggccctcattgtgggaggagtggggtgtaatgtgaggctacaggagatgatggcaacaatgtgccaggaacgtggagcccggctttttgctacagatgagagattctgtattgacaatggagcgatgatagcccaggctggctgggagatgtttcgggctggacacaggaccccactcagtgattctggggttacacagaggtatcggacagatgaagtagaggtgacctggagggactaataagatcaacagaatcagagtagatagttccttaatcggaacccaaaggaccccgtgcctcaatctctatcctgatgtcatgggagtcctagcaaagctatagactccaagcaaggcttggggtcctttatggaaccccaggatgactcagcaataaaatatttttggttttttggttttgtatgttggtgattggattgtgttgttcaggaccaatgtagatttggtgctggataaattcttgttggagcttgctgctgtggaaccaagaatgaggtatctttttttttttttttaagaaacggaatcttgctgtgtttcccaggctggtctcgaactgggctcaagcagtcttaccacctcagcctcctgagtaaggatgccattgtgcctggcaacaatagtagtatcataactattattatagcatcgggtcccgtgctaactgctttacattcattctctcatttaaattctttgaagtaggtgtgcaagacttctctcaaaatagcctggaggctcacacctgttatcccagtgctgtgggaggccaagtcaggaggatcccttga

SEQ ID NO: 162807 - DNA, 773 bp, Homo sapiens
  Payload ID: 12083
  Gene Symbol: OSGEP
  Gene Name: O-sialoglycoprotein endopeptidase
  ENST ID: ENST00000555223
  CDS Start-End: 1-335
gattccttccaggtgatacagccaggcatcaccgagctgttatcctagacctgctgcaggaggcactaacagagtctggattaacctcccaggatatcgactgcattgcatacaccaagggccctggcatgggtgccccactggtttctgtggctgttgtggcccgtactgtggcccaactgtggaataagccattggtgggtgtgaaccactgtataggccacattgagatgggccgcctcatcactggagccaccagcccaaccgtgttgtatgtgagtggaggaaatacgcagacttggggtttcatggacttcctcatcacccttaggtgattgcatactcggaacatcgttaccgtatctttggggaaaccatcgatattgcagtgggtaattgtctggatcgttttgctcgagtgctgaagatttctaacgacccaagtccaggatacaacattgaacagatggcaaagcgaggcaagaagctagttgagctgccatacactgtaaaggggatggacgtctcattctcagggatcctgtctttcattgaggatgtagcccatcggatgctggccacaggcgagtgtactcctgaggatctgtgtttctccctgcaggaaactgtgtttgcaatgctggtagagatcacagagcgagccatggcacattgtggctcccaggaggccctcattgtgggaggagtggggtgtaatgtgaggctacaggagatgatggcaacaatgtgccaggaacgtggagcccggcttt

SEQ ID NO: 162808 - DNA, 578 bp, Homo sapiens
  Payload ID: 12083
  Gene Symbol: OSGEP
  Gene Name: O-sialoglycoprotein endopeptidase
  ENST ID: ENST00000553640
  CDS Start-End: 130-578
agtgctatctgcaggctggccagcttcctctgcgctccggaaagctgcggcccagcgcggactagtgaggacctccacagctcctgacattgccaggagtcctgtcggcgttttctcccagcctccgccatgccggcggtgctgggttttgaaggcagcgccaataagattggcgtgggcgtggtgcgggatggcaaggtgctggcgaacccgcggcggacttacgtcacgcctcctggcacaggattccttccaggtgatacagccaggcatcaccgagctgttatcctagacctgctgcaggaggcactaacagagtctggattaacctcccaggatatcgactgcattgcatacaccaagggccctggcatgggtgccccactggtttctgtggctgttgtggcccgtactgtggcccaactgtggaataagccattggtgggtgtgaaccactgtataggccacattgagatgggccgcctcatcactggagccaccagcccaaccgtgttgtatgtgattgcatactcggaacatcgttaccgtatctttggggaaaccatcgatattgcagt

SEQ ID NO: 162809 - DNA, 1885 bp, Homo sapiens
  Payload ID: 12084
  Gene Symbol: OSGEPL1
  Gene Name: O-sialoglycoprotein endopeptidase-like 1
  Uniprot ID: Q9H4B0
  ENST ID: ENST00000264151
  CDS Start-End: 104-1348
ctttctcctgcagcgataagggcagtcgacagtctttagtagggaaaggagacaagtgctagctactgccgcccaagtggaaggaattatctatagagtaagtatgctaatcttgactaagactgcaggagttttttttaaaccatcaaaaaggaaagtttatgaatttttaagaagttttaattttcatcctggaacactatttcttcataaaatagtattgggaattgaaactagttgtgatgatacagcagctgctgtggtggatgaaactggaaatgtgttgggagaagcaatacattcccaaactgaagttcatttaaaaacaggtgggattgttcctccagcagctcaacagcttcacagagaaaatattcaacgaatagtacaagaagctctttctgccagtggagtctctccaagtgacctctcagcaattgcaactaccataaaaccaggacttgctttaagcctgggagtgggcttatcatttagcttacagctggtaggacagttaaaaaagccattcattcccattcatcatatggaggctcatgcacttactattaggttgaccaataaagtagaatttccttttttagttcttttgatttctggaggtcactgtctgttggcattagttcaaggagtttcagattttctgcttcttggaaagtctttggacatagcaccaggtgacatgcttgacaaggtggcaagaagactttctttaataaaacatccagagtgctccaccatgagtggtgggaaagccatagaacatttggccaaacaaggaaatagatttcattttgacatcaaacctcccttgcatcatgctaaaaattgtgatttttcttttactggacttcaacacgttactgataaaataataatgaaaaaggaaaaagaggaaggtattgagaaggggcaaatcctgtcttcagcagcagacattgctgccacagtacagcacacaatggcatgtcatcttgtgaaaagaacacatcgggctattctgttttgtaagcagagagacttgttacctcaaaataatgcagtactggttgcatctggtggtgtcgcaagtaacttctatatccgcagagctctggaaattttaacaaatgcaacacagtgcactttgttgtgtcctcctcccagactatgcactgataatggcattatgattgcatggaatggtattgaaagactacgtgctggcttgggcattttacatgacatagaaggcatccgctatgaaccaaaatgtcctcttggagtagacatatcaaaagaagttggagaagcttccataaaagtaccacaattaaaaatggagatatgatttctgctgttcaaaaaagtccctaaagagacaggctcttgccatgttgcccgggctggtcctgaactgctgaattcaagtgatcctcccaccttggcctccagaagtgctgggattatgggtgtgagccaccatgcctagccaaaatgtttcttaaggtatacattttgggtcttagaagacttatacatttgtaatatttattactaaatatctcaaagtattacaataaatgttaccatgtgagctactttgaatcaggcttcttgcacaccaatttaaaaatgttaactcttgatatatacactagttataccactcatgtcagtcaataaattttaaggtttaagtgcaggcctttgtttacagaaatcctaattttttgaaaccataactctgacctgacactaaattcctgtagacatgctaaggaaaatctgcttagtatcgagatcaagaactttcattcaaaaagattattcagttatgttatttgcatattaccattattaaaaataaaaaaatttttaaaagatg

SEQ ID NO: 162810 - DNA, 2216 bp, Homo sapiens
  Payload ID: 12084
  Gene Symbol: OSGEPL1
  Gene Name: O-sialoglycoprotein endopeptidase-like 1
  Uniprot ID: Q9H4B0
  ENST ID: ENST00000519810
  CDS Start-End: 344-1438
ctttggtaaccctgctagggggcgccgctagattccatcctatttctccgatgaaagtatcagaactctcatcacctgcaaatctgggggaaatgcaggtgcgcacagagagcgttttgggcaaagacggcctttaagcttttcttcactaagcatgccgctcgctagcggaacagcagccagctctggacgggaccttgcacagttccgatgacatcacttccgggcgccaggttcgggctttctcctgcagcgataagggcagtcgacagtctttagtagggaaaggagacaagtgctagctactgccgcccaagtggaaggaattatctatagagtaagtatgctaatcttgactaagactgcaggagttttttttaaaccatcaaaaaggaaagtttatgaatttttaagaagttttaattttcatcctggaacactatttcttcataaaatagtattgggaattgaaactagttgtgatgatacagcagctgctgtggtggatgaaactggaaatgtgttgggagaagcaatacattcccaaactgaagttcatttaaaaacaggtgggattgttcctccagcagctcaacagcttcacagagaaaatattcaacgaatagtacaagaagctctttctgccagtggagtctctccaagtgacctctcagcaattgcaactaccataaaaccaggacttgctttaagcctgggagtgggcttatcatttagcttacagctggtaggacagttaaaaaagccattcattcccattcatcatatggaggctcatgcacttactattaggttgaccaataaagtagaatttccttttttagttcttttgatttctggaggtcactgtctgttggcattagttcaaggagtttcagattttctgcttcttggaaagtctttggacatagcaccaggtgacatgcttgacaaggtggcaagaagactttctttaataaaacatccagagtgctccaccatgagtggtgggaaagccatagaacatttggccaaacaaggaaatagatttcattttgacatcaaacctcccttgcatcatgctaaaaattgtgatttttcttttactggacttcaacacgttactgataaaataataatgaaaaaggaaaaagaggaaggtattgagaaggggcaaatcctgtcttcagcagcagacattgctgccacagtacagcacacaatggcatgtcatcttgtgaaaagaacacatcgggctattctgttttgtaagcagagagacttgttacctcaaaataatgcagtactggttgcatctggtggtgtcgcaagtaacttctatatccgcagagctctggaaattttaacaaatgcaacacagtgcactttgttgtgtcctcctcccagactatgcactgataatggcattatgattgcatgatgtcctcttggagtagacatatcaaaagaagttggagaagcttccataaaagtaccacaattaaaaatggagatatgatttctgctgttcaaaaaagtccctaaagggtctcactctctgacctcagctggagtacagtagccagatcacaactcactgcaaccctgacttcctgaactcaagcaatcctcctgccttagcctcttgaatagccgggactacaggtgtgcatgtccatgcccagccaactttatttctattttttgtagagacaggctcttgccatgttgcccgggctggtcctgaactgctgaattcaagtgatcctcccaccttggcctccagaagtgctgggattatgggtgtgagccaccatgcctagccaaaatgtttcttaaggtatacattttgggtcttagaagacttatacatttgtaatatttattactaaatatctcaaagtattacaataaatgttaccatgtgagctactttgaatcaggcttcttgcacaccaatttaaaaatgttaactcttgatatatacactagttataccactcatgtcagtcaataaattttaaggtttaagtgcaggcctttgtttacagaaatcctaattttttgaaaccataactctgacctgacactaaattcctgtagacatgctaaggaaaatctgcttagtatcgagatcaagaactttcattcaaaaagattattcagttatgttatttgcatattaccattattaaaaataaaaaaatttttaaaagatg

SEQ ID NO: 162811 - DNA, 874 bp, Homo sapiens
  Payload ID: 12084
  Gene Symbol: OSGEPL1
  Gene Name: O-sialoglycoprotein endopeptidase-like 1
  ENST ID: ENST00000521630
  CDS Start-End: 266-874
aggttcgggctttctcctgcagcgataagggcagtcgacagtctttagtagggaaaggagacaagtgctagctactgccgcccaagtggaaggtgggtgaaattgctcactcttcaccccactgacgcttttgcgcacctggaaaagcggttccagtttgcgcccgtcgccgccttacagccgacaggagaccagcgctacccaagtcacgtgggttcagcctgcagctttcttggcccgaaagggaattatctatagagtaagtatgctaatcttgactaagactgcaggagttttttttaaaccatcaaaaaggaaagtttatgaatttttaagaagttttaattttcatcctggaacactatttcttcataaaatagtattgggaattgaaactagttgtgatgatacagcagctgctgtggtggatgaaactggaaatgtgttgggagaagcaatacattcccaaactgaagttcatttaaaaacaggtgggattgttcctccagcagctcaacagcttcacagagaaaatattcaacgaatagtacaagaagctctttctgccagtggagtctctccaagtgacctctcagcaattgcaactaccataaaaccaggacttgctttaagcctgggagtgggcttatcatttagcttacagctggtaggacagttaaaaaagccattcattcccattcatcatatggaggctcatgcacttactattaggttgaccaataaagtagaatttccttttttagttcttttgatttctggaggtcactgtctgttggcattagttcaaggagtttcagattttctgcttcttggaaagtctttggacatagcaccaggtgacatgcttgacaag

SEQ ID NO: 162812 - DNA, 1779 bp, Homo sapiens
  Payload ID: 12084
  Gene Symbol: OSGEPL1
  Gene Name: O-sialoglycoprotein endopeptidase-like 1
  Uniprot ID: Q9H4B0
  ENST ID: ENST00000522700
  CDS Start-End: 535-1779
agattccatcctatttctccgatgaaagtatcaggtacctcacccctaagtttagatttgatgatagttcccttaaaaatgaatgacgaataatctaccccatccttttctcacagtagcaaccaaattccagccaagggcaaaaaaaaaatttctttttaatgtagcttagtgtttggaacttgatgttgtgtagtcagacaaacctgtattcggcctccgctggatcagtcactagctgtgtaattttacagaactctcatcacctgcaaatctgggggaaatgcaggtgcgcacagagagcgttttgggcaaagacggcctttaagcttttcttcactaagcatgccgctcgctagcggaacagcagccagctctggacgggaccttgcacagttccgatgacatcacttccgggcgccaggttcgggctttctcctgcagcgataagggcagtcgacagtctttagtagggaaaggagacaagtgctagctactgccgcccaagtggaaggaattatctatagagtaagtatgctaatcttgactaagactgcaggagttttttttaaaccatcaaaaaggaaagtttatgaatttttaagaagttttaattttcatcctggaacactatttcttcataaaatagtattgggaattgaaactagttgtgatgatacagcagctgctgtggtggatgaaactggaaatgtgttgggagaagcaatacattcccaaactgaagttcatttaaaaacaggtgggattgttcctccagcagctcaacagcttcacagagaaaatattcaacgaatagtacaagaagctctttctgccagtggagtctctccaagtgacctctcagcaattgcaactaccataaaaccaggacttgctttaagcctgggagtgggcttatcatttagcttacagctggtaggacagttaaaaaagccattcattcccattcatcatatggaggctcatgcacttactattaggttgaccaataaagtagaatttccttttttagttcttttgatttctggaggtcactgtctgttggcattagttcaaggagtttcagattttctgcttcttggaaagtctttggacatagcaccaggtgacatgcttgacaaggtggcaagaagactttctttaataaaacatccagagtgctccaccatgagtggtgggaaagccatagaacatttggccaaacaaggaaatagatttcattttgacatcaaacctcccttgcatcatgctaaaaattgtgatttttcttttactggacttcaacacgttactgataaaataataatgaaaaaggaaaaagaggaaggtattgagaaggggcaaatcctgtcttcagcagcagacattgctgccacagtacagcacacaatggcatgtcatcttgtgaaaagaacacatcgggctattctgttttgtaagcagagagacttgttacctcaaaataatgcagtactggttgcatctggtggtgtcgcaagtaacttctatatccgcagagctctggaaattttaacaaatgcaacacagtgcactttgttgtgtcctcctcccagactatgcactgataatggcattatgattgcatggaatggtattgaaagactacgtgctggcttgggcattttacatgacatagaaggcatccgctatgaaccaaaatgtcctcttggagtagacatatcaaaagaagttggagaagcttccataaaagtaccacaattaaaaatggagatatga

SEQ ID NO: 162813 - DNA, 945 bp, Homo sapiens
  Payload ID: 12084
  Gene Symbol: OSGEPL1
  Gene Name: O-sialoglycoprotein endopeptidase-like 1
  ENST ID: ENST00000520350
  CDS Start-End: 424-945
ctttctcctgcagcgataagggcagtcgacagtctttagtagggaaaggagacaagtgctagctactgccgcccaagtggaaggaattatctatagatattgggaattgaaactagttgtgatgatacagcagctgctgtggtggatgaaactggaaatgtgttgggagaagcaatacattcccaaactgaagttcatttaaaaacaggtgggattgttcctccagcagctcaacagcttcacagagaaaatattcaacgaatagtacaagaagctctttctgccagtggagtctctccaagtgacctctcagcaattgcaactaccataaaaccaggacttgctttaagcctgggagtgggcttatcatttagcttacagctggtaggacagttaaaaaagccattcattcccattcatcatatggaggctcatgcacttactattaggttgaccaataaagtagaatttccttttttagttcttttgatttctggaggtcactgtctgttggcattagttcaaggagtttcagattttctgcttcttggaaagtctttggacatagcaccaggtgacatgcttgacaaggtggcaagaagactttctttaataaaacatccagagtgctccaccatgagtggtgggaaagccatagaacatttggccaaacaaggaaatagatttcattttgacatcaaacctcccttgcatcatgctaaaaattgtgatttttcttttactggacttcaacacgttactgataaaataataatgaaaaaggaaaaagaggaaggtattgagaaggggcaaatcctgtcttcagcagcagacattgctgccacagtacagcacacaatggcatgtcatcttgtgaaaagaacacatcgggctattctgttttgtaagcagagagacttgttacctcaaaataatgcagtactg

SEQ ID NO: 162814 - DNA, 914 bp, Homo sapiens
  Payload ID: 12084
  Gene Symbol: OSGEPL1
  Gene Name: O-sialoglycoprotein endopeptidase-like 1
  ENST ID: ENST00000517895
  CDS Start-End: 247-914
atcacttccgggcgccaggttcgggctttctcctgcagcgataagggcagtcgacagtctttagtagggaaaggagacaagtgctagctactgccgcccaagtggaaggtgggtgaaattgctcactcttcaccccactgacgcttttgcgcacctggaaaagcggttccagtttgcgcccgtcgccgccttacagccgacaggagaccagcgctacccaagtcacgaattatctatagagtaagtatgctaatcttgactaagactgcaggagttttttttaaaccatcaaaaaggaaagtttatgaatttttaagaagttttaattttcatcctggaacactatttcttcataaaatagtattgggaattgaaactagttgtgatgatacagcagctgctgtggtggatgaaactggaaatgtgttgggagaagcaatacattcccaaactgaagttcatttaaaaacaggtgggattgttcctccagcagctcaacagcttcacagagaaaatattcaacgaatagtacaagaagctctttctgccagtggagtctctccaagtgacctctcagcaattgcaactaccataaaaccaggacttgctttaagcctgggagtgggcttatcatttagcttacagctggtaggacagttaaaaaagccattcattcccattcatcatatggaggctcatgcacttactattaggttgaccaataaagtagaatttccttttttagttcttttgatttctggaggtcactgtctgttggcattagttcaaggagtttcagattttctgcttcttggaaagtctttggacatagcaccaggtgacatgcttgacaaggtggcaagaagactttctttaataaaacatccagagtgctccaccatgagtggtgggaa

SEQ ID NO: 162815 - DNA, 1375 bp, Homo sapiens
  Payload ID: 12085
  Gene Symbol: OSCAR
  Gene Name: osteoclast associated, immunoglobulin-like receptor
  ENST ID: ENST00000351806
  CDS Start-End: 66-824
atttcctgggaggggagagggtgcgaccaagccctggctccagctctagcgggtatctgcccaccatggccctggtgctgatcctccagctgctgaccctcttccccccagcttcataccaccctaagccatggctgggagctcagccggctacagttgtgacccctggggtcaacgtgaccttgagatgccgggcaccccaacccgcttggagatttggacttttcaagcctggagagatcgctccccttctcttccgggatgtgtcctccgagctggcagaattctttctggaggaggtgactccagcccaagggggaagttaccgctgctgctaccgaaggccagactgggggccgggtgtctggtcccagcccagcgatgtcctggagctgctggtgacagaggagctgccgcggccgtcgctggtggcgctgcccgggccggtggtgggtcctggcgccaacgtgagcctgcgctgcgcgggccgcctgcggaacatgagcttcgtgctgtaccgcgagggcgtggcggccccgctgcagtaccgccactccgcgcagccctgggccgacttcacgctgctgggcgcccgcgcccccggcacctacagctgctactatcacacgccctccgcgccctacgtgctgtcgcagcgcagcgaggtgctggtcatcagctgggaagactctggctcctccgactacacccgggggaacctagtccgcctggggctggccgggctggtcctcatctccctgggcgcgctggtcacttttgactggcgcagtcagaaccgcgctcctgctggtatccgcccctgagccccaggagcactgcagcccgagacttccaacctgagtggcggagaagctgggaccctgggctggactgtcctttcctgcagccccacagtcctgctggctgagctccgcggaacggtccttagaccccgctgtgccctgtgctgtagcttctttccaggcctttcccaaggagtagctgaaaggaagacgcgattagtggttaagacttccaagccagaagacagagggttcgaatcccagcactgccgtctactcactgtagtagtagcagctacagaaaggtagtagtgagacgtgaagccagctggacttcctgggttgaatggggacctggagaacttttctgtcttacaagaggattgtaaaatggaccaatcagcactctgtaagatggaccaatcagcgctctgtaaaatggaccaatcagcaggacacgggcggggacaataagggaataaaagctggcgagcgcggcaccccaccagagtctgcttccacgttgtgggagctttgttctcttgctctacacaataaatcttgctgctgct

SEQ ID NO: 162816 - DNA, 1355 bp, Homo sapiens
  Payload ID: 12085
  Gene Symbol: OSCAR
  Gene Name: osteoclast associated, immunoglobulin-like receptor
  ENST ID: ENST00000356532
  CDS Start-End: 1-804
atggccctggtgctgatcctccagctgctgaccctctggcctctgtgtcacacagacatcactccgtctgtggccattatagtccccccagcttcataccaccctaagccatggctgggagctcagccggctacagttgtgacccctggggtcaacgtgaccttgagatgccgggcaccccaacccgcttggagatttggacttttcaagcctggagagatcgctccccttctcttccgggatgtgtcctccgagctggcagaattctttctggaggaggtgactccagcccaagggggaagttaccgctgctgctaccgaaggccagactgggggccgggtgtctggtcccagcccagcgatgtcctggagctgctggtgacagaggagctgccgcggccgtcgctggtggcgctgcccgggccggtggtgggtcctggcgccaacgtgagcctgcgctgcgcgggccgcctgcggaacatgagcttcgtgctgtaccgcgagggcgtggcggccccgctgcagtaccgccactccgcgcagccctgggccgacttcacgctgctgggcgcccgcgcccccggcacctacagctgctactatcacacgccctccgcgccctacgtgctgtcgcagcgcagcgaggtgctggtcatcagctgggaagactctggctcctccgactacacccgggggaacctagtccgcctggggctggccgggctggtcctcatctccctgggcgcgctggtcacttttgactggcgcagtcagaaccgcgctcctgctggtatccgcccctgagccccaggagcactgcagcccgagacttccaacctgagtggcggagaagctgggaccctgggctggactgtcctttcctgcagccccacagtcctgctggctgagctccgcggaacggtccttagaccccgctgtgccctgtgctgtagcttctttccaggcctttcccaaggagtagctgaaaggaagacgcgattagtggttaagacttccaagccagaagacagagggttcgaatcccagcactgccgtctactcactgtagtagtagcagctacagaaaggtagtagtgagacgtgaagccagctggacttcctgggttgaatggggacctggagaacttttctgtcttacaagaggattgtaaaatggaccaatcagcactctgtaagatggaccaatcagcgctctgtaaaatggaccaatcagcaggacacgggcggggacaataagggaataaaagctggcgagcgcggcaccccaccagagtctgcttccacgttgtgggagctttgttctcttgctctacacaataaatcttgctgctgct

SEQ ID NO: 162817 - DNA, 1389 bp, Homo sapiens
  Payload ID: 12085
  Gene Symbol: OSCAR
  Gene Name: osteoclast associated, immunoglobulin-like receptor
  ENST ID: ENST00000358375
  CDS Start-End: 47-838
ggtgcgaccaagccctggctccagctctagcgggtatctgcccaccatggccctggtgctgatcctccagctgctgaccctctggcctctgtgtcacacagacatcactccgtctgtccccccagcttcataccaccctaagccatggctgggagctcagccggctacagttgtgacccctggggtcaacgtgaccttgagatgccgggcaccccaacccgcttggagatttggacttttcaagcctggagagatcgctccccttctcttccgggatgtgtcctccgagctggcagaattctttctggaggaggtgactccagcccaagggggaagttaccgctgctgctaccgaaggccagactgggggccgggtgtctggtcccagcccagcgatgtcctggagctgctggtgacagaggagctgccgcggccgtcgctggtggcgctgcccgggccggtggtgggtcctggcgccaacgtgagcctgcgctgcgcgggccgcctgcggaacatgagcttcgtgctgtaccgcgagggcgtggcggccccgctgcagtaccgccactccgcgcagccctgggccgacttcacgctgctgggcgcccgcgcccccggcacctacagctgctactatcacacgccctccgcgccctacgtgctgtcgcagcgcagcgaggtgctggtcatcagctgggaagactctggctcctccgactacacccgggggaacctagtccgcctggggctggccgggctggtcctcatctccctgggcgcgctggtcacttttgactggcgcagtcagaaccgcgctcctgctggtatccgcccctgagccccaggagcactgcagcccgagacttccaacctgagtggcggagaagctgggaccctgggctggactgtcctttcctgcagccccacagtcctgctggctgagctccgcggaacggtccttagaccccgctgtgccctgtgctgtagcttctttccaggcctttcccaaggagtagctgaaaggaagacgcgattagtggttaagacttccaagccagaagacagagggttcgaatcccagcactgccgtctactcactgtagtagtagcagctacagaaaggtagtagtgagacgtgaagccagctggacttcctgggttgaatggggacctggagaacttttctgtcttacaagaggattgtaaaatggaccaatcagcactctgtaagatggaccaatcagcgctctgtaaaatggaccaatcagcaggacacgggcggggacaataagggaataaaagctggcgagcgcggcaccccaccagagtctgcttccacgttgtgggagctttgttctcttgctctacacaataaatcttgctgctgct

SEQ ID NO: 162818 - DNA, 1892 bp, Homo sapiens
  Payload ID: 12085
  Gene Symbol: OSCAR
  Gene Name: osteoclast associated, immunoglobulin-like receptor
  ENST ID: ENST00000359649
  CDS Start-End: 24-884
gctctagcgggtatctgcccaccatggccctggtgctgatcctccagctgctgaccctctggcctctgtgtcacacagacatcactccgtctgtggccattatagtccccccagcttcataccaccctaagccatggctgggagctcagccggctacagttgtgacccctggggtcaacgtgaccttgagatgccgggcaccccaacccgcttggagatttggacttttcaagcctggagagatcgctccccttctcttccgggatgtgtcctccgagctggcagaattctttctggaggaggtgactccagcccaagggggaagttaccgctgctgctaccgaaggccagactgggggccgggtgtctggtcccagcccagcgatgtcctggagctgctggtgacagaggagctgccgcggccgtcgctggtggcgctgcccgggccggtggtgggtcctggcgccaacgtgagcctgcgctgcgcgggccgcctgcggaacatgagcttcgtgctgtaccgcgagggcgtggcggccccgctgcagtaccgccactccgcgcagccctgggccgacttcacgctgctgggcgcccgcgcccccggcacctacagctgctactatcacacgccctccgcgccctacgtgctgtcgcagcgcagcgaggtgctggtcatcagctgggaaggtgagggccctgaggcccggcccgcctcctccgccccaggaatgcaggccccaggacctccgccctcagacccaggagcccaggcccccagcctctcctccttcagacccaggggtctagtcctgcagcccctcctccctcagacccaggattcctgggacccagcccctcctccctcagatccaggagtctagtcctccagctcctcctccctcagacccaggattcccgggccccagtacctcctccctcagacccaggactccaggcccccagcccctccttcctggacccaggactccaggcccccagcccctccttcctgatccagcagtccaggccccagccccttcttcctggacccaggagttgaagcctccatcgactccccctcaactttgagactgtagagtcaggtccctaagtccaccccaggggctggaaacctggagttcagggcccagactttggggtccgggagctgatggcccctctctcccggctccgcccgcagactctggctcctccgactacacccgggggaacctagtccgcctggggctggccgggctggtcctcatctccctgggcgcgctggtcacttttgactggcgcagtcagaaccgcgctcctgctggtatccgcccctgagccccaggagcactgcagcccgagacttccaacctgagtggcggagaagctgggaccctgggctggactgtcctttcctgcagccccacagtcctgctggctgagctccgcggaacggtccttagaccccgctgtgccctgtgctgtagcttctttccaggcctttcccaaggagtagctgaaaggaagacgcgattagtggttaagacttccaagccagaagacagagggttcgaatcccagcactgccgtctactcactgtagtagtagcagctacagaaaggtagtagtgagacgtgaagccagctggacttcctgggttgaatggggacctggagaacttttctgtcttacaagaggattgtaaaatggaccaatcagcactctgtaagatggaccaatcagcgctctgtaaaatggaccaatcagcaggacacgggcggggacaataagggaataaaagctggcgagcgcggcaccccaccagagtctgcttccacgttgtgggagctttgttctcttgctctacacaataaatcttgctgctgct

SEQ ID NO: 162819 - DNA, 2055 bp, Homo sapiens
  Payload ID: 12085
  Gene Symbol: OSCAR
  Gene Name: osteoclast associated, immunoglobulin-like receptor
  Uniprot ID: Q8IYS5
  ENST ID: ENST00000284648
  CDS Start-End: 199-1047
gcgtgcgcactcgcgcagaacaaagatggagccgtggagtgccatagggctatgacacagtcacccacaggcccccacctcgatactctcttccgtaaatgaggatctgggtctggttttctgatgttgcctcatttcctgggaggggagagggtgcgaccaagccctggctccagctctagcgggtatctgcccaccatggccctggtgctgatcctccagctgctgaccctctggcctctgtgtcacacagacatcactccgtctgtccccccagcttcataccaccctaagccatggctgggagctcagccggctacagttgtgacccctggggtcaacgtgaccttgagatgccgggcaccccaacccgcttggagatttggacttttcaagcctggagagatcgctccccttctcttccgggatgtgtcctccgagctggcagaattctttctggaggaggtgactccagcccaagggggaagttaccgctgctgctaccgaaggccagactgggggccgggtgtctggtcccagcccagcgatgtcctggagctgctggtgacagaggagctgccgcggccgtcgctggtggcgctgcccgggccggtggtgggtcctggcgccaacgtgagcctgcgctgcgcgggccgcctgcggaacatgagcttcgtgctgtaccgcgagggcgtggcggccccgctgcagtaccgccactccgcgcagccctgggccgacttcacgctgctgggcgcccgcgcccccggcacctacagctgctactatcacacgccctccgcgccctacgtgctgtcgcagcgcagcgaggtgctggtcatcagctgggaaggtgagggccctgaggcccggcccgcctcctccgccccaggaatgcaggccccaggacctccgccctcagacccaggagcccaggcccccagcctctcctccttcagacccaggggtctagtcctgcagcccctcctccctcagacccaggattcctgggacccagcccctcctccctcagatccaggagtctagtcctccagctcctcctccctcagacccaggattcccgggccccagtacctcctccctcagacccaggactccaggcccccagcccctccttcctggacccaggactccaggcccccagcccctccttcctgatccagcagtccaggccccagccccttcttcctggacccaggagttgaagcctccatcgactccccctcaactttgagactgtagagtcaggtccctaagtccaccccaggggctggaaacctggagttcagggcccagactttggggtccgggagctgatggcccctctctcccggctccgcccgcagactctggctcctccgactacacccgggggaacctagtccgcctggggctggccgggctggtcctcatctccctgggcgcgctggtcacttttgactggcgcagtcagaaccgcgctcctgctggtatccgcccctgagccccaggagcactgcagcccgagacttccaacctgagtggcggagaagctgggaccctgggctggactgtcctttcctgcagccccacagtcctgctggctgagctccgcggaacggtccttagaccccgctgtgccctgtgctgtagcttctttccaggcctttcccaaggagtagctgaaaggaagacgcgattagtggttaagacttccaagccagaagacagagggttcgaatcccagcactgccgtctactcactgtagtagtagcagctacagaaaggtagtagtgagacgtgaagccagctggacttcctgggttgaatggggacctggagaacttttctgtcttacaagaggattgtaaaatggaccaatcagcactctgtaagatggaccaatcagcgctctgtaaaatggaccaatcagcaggacacgggcggggacaataagggaataaaagctggcgagcgcggcaccccaccagagtctgcttccacgttgtgggagctttgttctcttgctctacacaataaatcttgctgctgct

SEQ ID NO: 162820 - DNA, 629 bp, Homo sapiens
  Payload ID: 12085
  Gene Symbol: OSCAR
  Gene Name: osteoclast associated, immunoglobulin-like receptor
  ENST ID: ENST00000391760
  CDS Start-End: 50-535
gagggtgcgaccaagccctggctccagctctagcgggtatctgcccaccatggccctggtgctgatcctccagctgctgaccctctggcctctgtgtcacacagacatcactccgtctgctggcagaattctttctggaggaggtgactccagcccaagggggaagttaccgctgctgctaccgaaggccagactgggggccgggtgtctggtcccagcccagcgatgtcctggagctgctggtgacagaggagctgccgcggccgtcgctggtggcgctgcccgggccggtggtgggtcctggcgccaacgtgagcctgcgctgcgcgggccgcctgcggaacatgagcttcgtgctgtaccgcgagggcgtggcggccccgctgcagtaccgccactccgcgcagccctgggccgacttcacgctgctgggcgcccgcgcccccggcacctacagctgctactatcacacgccctccgcgccctacgtgctgtcgcagcgcagcgaggtgctggtcatcagctgggaaggtgagggccctgaggcccggcccgcctcctccgccccaggaatgcaggccccaggacctccgccctcagacccaggagcccaggcccccagcctctcc

SEQ ID NO: 162821 - DNA, 1826 bp, Homo sapiens
  Payload ID: 12085
  Gene Symbol: OSCAR
  Gene Name: osteoclast associated, immunoglobulin-like receptor
  Uniprot ID: Q8IYS5
  ENST ID: ENST00000391761
  CDS Start-End: 1-816
atggccctggtgctgatcctccagctgctgaccctcttccccccagcttcataccaccctaagccatggctgggagctcagccggctacagttgtgacccctggggtcaacgtgaccttgagatgccgggcaccccaacccgcttggagatttggacttttcaagcctggagagatcgctccccttctcttccgggatgtgtcctccgagctggcagaattctttctggaggaggtgactccagcccaagggggaagttaccgctgctgctaccgaaggccagactgggggccgggtgtctggtcccagcccagcgatgtcctggagctgctggtgacagaggagctgccgcggccgtcgctggtggcgctgcccgggccggtggtgggtcctggcgccaacgtgagcctgcgctgcgcgggccgcctgcggaacatgagcttcgtgctgtaccgcgagggcgtggcggccccgctgcagtaccgccactccgcgcagccctgggccgacttcacgctgctgggcgcccgcgcccccggcacctacagctgctactatcacacgccctccgcgccctacgtgctgtcgcagcgcagcgaggtgctggtcatcagctgggaaggtgagggccctgaggcccggcccgcctcctccgccccaggaatgcaggccccaggacctccgccctcagacccaggagcccaggcccccagcctctcctccttcagacccaggggtctagtcctgcagcccctcctccctcagacccaggattcctgggacccagcccctcctccctcagatccaggagtctagtcctccagctcctcctccctcagacccaggattcccgggccccagtacctcctccctcagacccaggactccaggcccccagcccctccttcctggacccaggactccaggcccccagcccctccttcctgatccagcagtccaggccccagccccttcttcctggacccaggagttgaagcctccatcgactccccctcaactttgagactgtagagtcaggtccctaagtccaccccaggggctggaaacctggagttcagggcccagactttggggtccgggagctgatggcccctctctcccggctccgcccgcagactctggctcctccgactacacccgggggaacctagtccgcctggggctggccgggctggtcctcatctccctgggcgcgctggtcacttttgactggcgcagtcagaaccgcgctcctgctggtatccgcccctgagccccaggagcactgcagcccgagacttccaacctgagtggcggagaagctgggaccctgggctggactgtcctttcctgcagccccacagtcctgctggctgagctccgcggaacggtccttagaccccgctgtgccctgtgctgtagcttctttccaggcctttcccaaggagtagctgaaaggaagacgcgattagtggttaagacttccaagccagaagacagagggttcgaatcccagcactgccgtctactcactgtagtagtagcagctacagaaaggtagtagtgagacgtgaagccagctggacttcctgggttgaatggggacctggagaacttttctgtcttacaagaggattgtaaaatggaccaatcagcactctgtaagatggaccaatcagcgctctgtaaaatggaccaatcagcaggacacgggcggggacaataagggaataaaagctggcgagcgcggcaccccaccagagtctgcttccacgttgtgggagctttgttctcttgctctacacaataaatcttgctgctgctaa

SEQ ID NO: 162822 - DNA, 1826 bp, Homo sapiens
  Payload ID: 12085
  Gene Symbol: OSCAR
  Gene Name: osteoclast associated, immunoglobulin-like receptor
  Uniprot ID: Q8IYS5
  ENST ID: ENST00000621284
  CDS Start-End: 1-816
atggccctggtgctgatcctccagctgctgaccctcttccccccagcttcataccaccctaagccatggctgggagctcagccggctacagttgtgacccctggggtcaacgtgaccttgagatgccgggcaccccaacccgcttggagatttggacttttcaagcctggagagatcgctccccttctcttccgggatgtgtcctccgagctggcagaattctttctggaggaggtgactccagcccaagggggaatttaccgctgctgctaccgaaggccagactgggggccgggtgtctggtcccagcccagcgatgtcctggagctgctggtgacagaggagctgccgcggccgtcgctggtggcgctgcccgggccggtggtgggtcctggcgccaacgtgagcctgcgctgcgcgggccgcctgcggaacatgagcttcgtgctgtaccgcgagggcgtggcggccccgctgcagtaccgccactccgcgcagccctgggccgacttcacgctgctgggcgcccgcgcccccggcacctacagctgctactatcacacgccctccgcgccctacgtgctgtcgcagcgcagcgaggtgctggtcatcagctgggaaggtgagggccctgaggcccggcccgcctcctccgccccaggaatgcaggccccaggacctccgccctcagacccaggagcccaggcccccagcctctcctccttcagacccaggggtctagtcctgcagcccctcctccctcagacccaggattcctgggacccagcccctcctccctcagatccaggagtctagtcctccagctcctcctccctcagacccaggattcccgggccccagtacctcctccctcagacccaggactccaggcccccagcccctccttcctggacccaggactccaggcccccagcccctccttcctgatccagcagtccaggccccagccccttcttcctggacccaggagttgaagcctccatcgactccccctcaactttgagactgtagagtcaggtccctaagtccaccccaggggctggaaacctggagttcagggcccagactttggggtccgggagctgatggcccctctctcccggctccgcccgcagactctggctcctccgactacacccgggggaacctagtccgcctggggctggccgggctggtcctcatctccctgggcgcgctggtcacttttgactggcgcagtcagaaccgcgctcctgctggtatccgcccctgagccccaggagcactgcagcccgagacttccaacctgagtggcggagaagctgggaccctgggctggactgtcctttcctgcagccccacagtcctgctggctgagctccgcggaacggtccttagaccccgctgtgccctgtgctgtagcttctttccaggcctttcccaaggagtagctgaaaggaagacgcgattagtggttaagacttccaagccagaagacagagggttcgaatcccagcactgccgtctactcactgtagtagtagcagctacagaaaggtagtagtgagacgtgaagccagctggacttcctgggttgaatggggacctggagaacttttctgtcttacaagaggattgtaaaatggaccaatcagcactctgtaagatggaccaatcagcgctctgtaaaatggaccaatcagcaggacatgggcggggacaataagggaataaaagctggcgagcgcggcaccccaccagagtctgcttccacgctgtgggagctttgttctcttgctctacacaataaatcttgctgctgctaa

SEQ ID NO: 162823 - DNA, 2061 bp, Homo sapiens
  Payload ID: 12085
  Gene Symbol: OSCAR
  Gene Name: osteoclast associated, immunoglobulin-like receptor
  Uniprot ID: Q8IYS5
  ENST ID: ENST00000615074
  CDS Start-End: 193-1053
gcactcgcgcagaacaaagatggagccgtggagtgccatagggctatgacacagtcacccacaggcccccacctcgatactctcttccgtaaatgaggatctgggtctggttttctgatgttgcctcatttcctgggaggggagagggtgcgaccaagccctggctccagctctagcgggtatctgcccaccatggccctggtgctgatcctccagctgctgaccctctggcctctgtgtcacacagacatcactccgtctgtggccattatagtccccccagcttcataccaccctaagccatggctgggagctcagccggctacagttgtgacccctggggtcaacgtgaccttgagatgccgggcaccccaacccgcttggagatttggacttttcaagcctggagagatcgctccccttctcttccgggatgtgtcctccgagctggcagaattctttctggaggaggtgactccagcccaagggggaatttaccgctgctgctaccgaaggccagactgggggccgggtgtctggtcccagcccagcgatgtcctggagctgctggtgacagaggagctgccgcggccgtcgctggtggcgctgcccgggccggtggtgggtcctggcgccaacgtgagcctgcgctgcgcgggccgcctgcggaacatgagcttcgtgctgtaccgcgagggcgtggcggccccgctgcagtaccgccactccgcgcagccctgggccgacttcacgctgctgggcgcccgcgcccccggcacctacagctgctactatcacacgccctccgcgccctacgtgctgtcgcagcgcagcgaggtgctggtcatcagctgggaaggtgagggccctgaggcccggcccgcctcctccgccccaggaatgcaggccccaggacctccgccctcagacccaggagcccaggcccccagcctctcctccttcagacccaggggtctagtcctgcagcccctcctccctcagacccaggattcctgggacccagcccctcctccctcagatccaggagtctagtcctccagctcctcctccctcagacccaggattcccgggccccagtacctcctccctcagacccaggactccaggcccccagcccctccttcctggacccaggactccaggcccccagcccctccttcctgatccagcagtccaggccccagccccttcttcctggacccaggagttgaagcctccatcgactccccctcaactttgagactgtagagtcaggtccctaagtccaccccaggggctggaaacctggagttcagggcccagactttggggtccgggagctgatggcccctctctcccggctccgcccgcagactctggctcctccgactacacccgggggaacctagtccgcctggggctggccgggctggtcctcatctccctgggcgcgctggtcacttttgactggcgcagtcagaaccgcgctcctgctggtatccgcccctgagccccaggagcactgcagcccgagacttccaacctgagtggcggagaagctgggaccctgggctggactgtcctttcctgcagccccacagtcctgctggctgagctccgcggaacggtccttagaccccgctgtgccctgtgctgtagcttctttccaggcctttcccaaggagtagctgaaaggaagacgcgattagtggttaagacttccaagccagaagacagagggttcgaatcccagcactgccgtctactcactgtagtagtagcagctacagaaaggtagtagtgagacgtgaagccagctggacttcctgggttgaatggggacctggagaacttttctgtcttacaagaggattgtaaaatggaccaatcagcactctgtaagatggaccaatcagcgctctgtaaaatggaccaatcagcaggacatgggcggggacaataagggaataaaagctggcgagcgcggcaccccaccagagtctgcttccacgctgtgggagctttgttctcttgctctacacaataaatcttgctgctgct

SEQ ID NO: 162824 - DNA, 1547 bp, Homo sapiens
  Payload ID: 12085
  Gene Symbol: OSCAR
  Gene Name: osteoclast associated, immunoglobulin-like receptor
  ENST ID: ENST00000611143
  CDS Start-End: 193-996
gcactcgcgcagaacaaagatggagccgtggagtgccatagggctatgacacagtcacccacaggcccccacctcgatactctcttccgtaaatgaggatctgggtctggttttctgatgttgcctcatttcctgggaggggagagggtgcgaccaagccctggctccagctctagcgggtatctgcccaccatggccctggtgctgatcctccagctgctgaccctctggcctctgtgtcacacagacatcactccgtctgtggccattatagtccccccagcttcataccaccctaagccatggctgggagctcagccggctacagttgtgacccctggggtcaacgtgaccttgagatgccgggcaccccaacccgcttggagatttggacttttcaagcctggagagatcgctccccttctcttccgggatgtgtcctccgagctggcagaattctttctggaggaggtgactccagcccaagggggaatttaccgctgctgctaccgaaggccagactgggggccgggtgtctggtcccagcccagcgatgtcctggagctgctggtgacagaggagctgccgcggccgtcgctggtggcgctgcccgggccggtggtgggtcctggcgccaacgtgagcctgcgctgcgcgggccgcctgcggaacatgagcttcgtgctgtaccgcgagggcgtggcggccccgctgcagtaccgccactccgcgcagccctgggccgacttcacgctgctgggcgcccgcgcccccggcacctacagctgctactatcacacgccctccgcgccctacgtgctgtcgcagcgcagcgaggtgctggtcatcagctgggaagactctggctcctccgactacacccgggggaacctagtccgcctggggctggccgggctggtcctcatctccctgggcgcgctggtcacttttgactggcgcagtcagaaccgcgctcctgctggtatccgcccctgagccccaggagcactgcagcccgagacttccaacctgagtggcggagaagctgggaccctgggctggactgtcctttcctgcagccccacagtcctgctggctgagctccgcggaacggtccttagaccccgctgtgccctgtgctgtagcttctttccaggcctttcccaaggagtagctgaaaggaagacgcgattagtggttaagacttccaagccagaagacagagggttcgaatcccagcactgccgtctactcactgtagtagtagcagctacagaaaggtagtagtgagacgtgaagccagctggacttcctgggttgaatggggacctggagaacttttctgtcttacaagaggattgtaaaatggaccaatcagcactctgtaagatggaccaatcagcgctctgtaaaatggaccaatcagcaggacatgggcggggacaataagggaataaaagctggcgagcgcggcaccccaccagagtctgcttccacgctgtgggagctttgttctcttgctctacacaataaatcttgctgctgct

SEQ ID NO: 162825 - DNA, 1547 bp, Homo sapiens; identical to SEQ ID NO: 162824
  Payload ID: 12085
  Gene Symbol: OSCAR
  Gene Name: osteoclast associated, immunoglobulin-like receptor
  ENST ID: ENST00000611987
  CDS Start-End: 193-996

SEQ ID NO: 162826 - DNA, 2016 bp, Homo sapiens
  Payload ID: 12085
  Gene Symbol: OSCAR
  Gene Name: osteoclast associated, immunoglobulin-like receptor
  Uniprot ID: Q8IYS5
  ENST ID: ENST00000611719
  CDS Start-End: 193-1008
gcactcgcgcagaacaaagatggagccgtggagtgccatagggctatgacacagtcacccacaggcccccacctcgatactctcttccgtaaatgaggatctgggtctggttttctgatgttgcctcatttcctgggaggggagagggtgcgaccaagccctggctccagctctagcgggtatctgcccaccatggccctggtgctgatcctccagctgctgaccctcttccccccagcttcataccaccctaagccatggctgggagctcagccggctacagttgtgacccctggggtcaacgtgaccttgagatgccgggcaccccaacccgcttggagatttggacttttcaagcctggagagatcgctccccttctcttccgggatgtgtcctccgagctggcagaattctttctggaggaggtgactccagcccaagggggaatttaccgctgctgctaccgaaggccagactgggggccgggtgtctggtcccagcccagcgatgtcctggagctgctggtgacagaggagctgccgcggccgtcgctggtggcgctgcccgggccggtggtgggtcctggcgccaacgtgagcctgcgctgcgcgggccgcctgcggaacatgagcttcgtgctgtaccgcgagggcgtggcggccccgctgcagtaccgccactccgcgcagccctgggccgacttcacgctgctgggcgcccgcgcccccggcacctacagctgctactatcacacgccctccgcgccctacgtgctgtcgcagcgcagcgaggtgctggtcatcagctgggaaggtgagggccctgaggcccggcccgcctcctccgccccaggaatgcaggccccaggacctccgccctcagacccaggagcccaggcccccagcctctcctccttcagacccaggggtctagtcctgcagcccctcctccctcagacccaggattcctgggacccagcccctcctccctcagatccaggagtctagtcctccagctcctcctccctcagacccaggattcccgggccccagtacctcctccctcagacccaggactccaggcccccagcccctccttcctggacccaggactccaggcccccagcccctccttcctgatccagcagtccaggccccagccccttcttcctggacccaggagttgaagcctccatcgactccccctcaactttgagactgtagagtcaggtccctaagtccaccccaggggctggaaacctggagttcagggcccagactttggggtccgggagctgatggcccctctctcccggctccgcccgcagactctggctcctccgactacacccgggggaacctagtccgcctggggctggccgggctggtcctcatctccctgggcgcgctggtcacttttgactggcgcagtcagaaccgcgctcctgctggtatccgcccctgagccccaggagcactgcagcccgagacttccaacctgagtggcggagaagctgggaccctgggctggactgtcctttcctgcagccccacagtcctgctggctgagctccgcggaacggtccttagaccccgctgtgccctgtgctgtagcttctttccaggcctttcccaaggagtagctgaaaggaagacgcgattagtggttaagacttccaagccagaagacagagggttcgaatcccagcactgccgtctactcactgtagtagtagcagctacagaaaggtagtagtgagacgtgaagccagctggacttcctgggttgaatggggacctggagaacttttctgtcttacaagaggattgtaaaatggaccaatcagcactctgtaagatggaccaatcagcgctctgtaaaatggaccaatcagcaggacatgggcggggacaataagggaataaaagctggcgagcgcggcaccccaccagagtctgcttccacgctgtgggagctttgttctcttgctctacacaataaatcttgctgctgct

SEQ ID NO: 162827 - DNA, 2049 bp, Homo sapiens
  Payload ID: 12085
  Gene Symbol: OSCAR
  Gene Name: osteoclast associated, immunoglobulin-like receptor
  Uniprot ID: Q8IYS5
  ENST ID: ENST00000620647
  CDS Start-End: 193-1041
gcactcgcgcagaacaaagatggagccgtggagtgccatagggctatgacacagtcacccacaggcccccacctcgatactctcttccgtaaatgaggatctgggtctggttttctgatgttgcctcatttcctgggaggggagagggtgcgaccaagccctggctccagctctagcgggtatctgcccaccatggccctggtgctgatcctccagctgctgaccctctggcctctgtgtcacacagacatcactccgtctgtccccccagcttcataccaccctaagccatggctgggagctcagccggctacagttgtgacccctggggtcaacgtgaccttgagatgccgggcaccccaacccgcttggagatttggacttttcaagcctggagagatcgctccccttctcttccgggatgtgtcctccgagctggcagaattctttctggaggaggtgactccagcccaagggggaatttaccgctgctgctaccgaaggccagactgggggccgggtgtctggtcccagcccagcgatgtcctggagctgctggtgacagaggagctgccgcggccgtcgctggtggcgctgcccgggccggtggtgggtcctggcgccaacgtgagcctgcgctgcgcgggccgcctgcggaacatgagcttcgtgctgtaccgcgagggcgtggcggccccgctgcagtaccgccactccgcgcagccctgggccgacttcacgctgctgggcgcccgcgcccccggcacctacagctgctactatcacacgccctccgcgccctacgtgctgtcgcagcgcagcgaggtgctggtcatcagctgggaaggtgagggccctgaggcccggcccgcctcctccgccccaggaatgcaggccccaggacctccgccctcagacccaggagcccaggcccccagcctctcctccttcagacccaggggtctagtcctgcagcccctcctccctcagacccaggattcctgggacccagcccctcctccctcagatccaggagtctagtcctccagctcctcctccctcagacccaggattcccgggccccagtacctcctccctcagacccaggactccaggcccccagcccctccttcctggacccaggactccaggcccccagcccctccttcctgatccagcagtccaggccccagccccttcttcctggacccaggagttgaagcctccatcgactccccctcaactttgagactgtagagtcaggtccctaagtccaccccaggggctggaaacctggagttcagggcccagactttggggtccgggagctgatggcccctctctcccggctccgcccgcagactctggctcctccgactacacccgggggaacctagtccgcctggggctggccgggctggtcctcatctccctgggcgcgctggtcacttttgactggcgcagtcagaaccgcgctcctgctggtatccgcccctgagccccaggagcactgcagcccgagacttccaacctgagtggcggagaagctgggaccctgggctggactgtcctttcctgcagccccacagtcctgctggctgagctccgcggaacggtccttagaccccgctgtgccctgtgctgtagcttctttccaggcctttcccaaggagtagctgaaaggaagacgcgattagtggttaagacttccaagccagaagacagagggttcgaatcccagcactgccgtctactcactgtagtagtagcagctacagaaaggtagtagtgagacgtgaagccagctggacttcctgggttgaatggggacctggagaacttttctgtcttacaagaggattgtaaaatggaccaatcagcactctgtaagatggaccaatcagcgctctgtaaaatggaccaatcagcaggacatgggcggggacaataagggaataaaagctggcgagcgcggcaccccaccagagtctgcttccacgctgtgggagctttgttctcttgctctacacaataaatcttgctgctgct

SEQ ID NO: 162828 - DNA, 2061 bp, Homo sapiens; identical to SEQ ID NO: 162823
  Payload ID: 12085
  Gene Symbol: OSCAR
  Gene Name: osteoclast associated, immunoglobulin-like receptor
  ENST ID: ENST00000612406
  CDS Start-End: 193-1053

SEQ ID NO: 162829 - DNA, 1358 bp, Homo sapiens
  Payload ID: 12085
  Gene Symbol: OSCAR
  Gene Name: osteoclast associated, immunoglobulin-like receptor
  ENST ID: ENST00000615745
  CDS Start-End: 1-807
atggccctggtgctgatcctccagctgctgaccctctggcctctgtgtcacacagacatcactccgtctgcagccccgtttattgtccccccagcttcataccaccctaagccatggctgggagctcagccggctacagttgtgacccctggggtcaacgtgaccttgagatgccgggcaccccaacccgcttggagatttggacttttcaagcctggagagatcgctccccttctcttccgggatgtgtcctccgagctggcagaattctttctggaggaggtgactccagcccaagggggaatttaccgctgctgctaccgaaggccagactgggggccgggtgtctggtcccagcccagcgatgtcctggagctgctggtgacagaggagctgccgcggccgtcgctggtggcgctgcccgggccggtggtgggtcctggcgccaacgtgagcctgcgctgcgcgggccgcctgcggaacatgagcttcgtgctgtaccgcgagggcgtggcggccccgctgcagtaccgccactccgcgcagccctgggccgacttcacgctgctgggcgcccgcgcccccggcacctacagctgctactatcacacgccctccgcgccctacgtgctgtcgcagcgcagcgaggtgctggtcatcagctgggaagactctggctcctccgactacacccgggggaacctagtccgcctggggctggccgggctggtcctcatctccctgggcgcgctggtcacttttgactggcgcagtcagaaccgcgctcctgctggtatccgcccctgagccccaggagcactgcagcccgagacttccaacctgagtggcggagaagctgggaccctgggctggactgtcctttcctgcagccccacagtcctgctggctgagctccgcggaacggtccttagaccccgctgtgccctgtgctgtagcttctttccaggcctttcccaaggagtagctgaaaggaagacgcgattagtggttaagacttccaagccagaagacagagggttcgaatcccagcactgccgtctactcactgtagtagtagcagctacagaaaggtagtagtgagacgtgaagccagctggacttcctgggttgaatggggacctggagaacttttctgtcttacaagaggattgtaaaatggaccaatcagcactctgtaagatggaccaatcagcgctctgtaaaatggaccaatcagcaggacatgggcggggacaataagggaataaaagctggcgagcgcggcaccccaccagagtctgcttccacgctgtgggagctttgttctcttgctctacacaataaatcttgctgctgct

SEQ ID NO: 162830 - DNA, 2016 bp, Homo sapiens; identical to SEQ ID NO: 162826
  Payload ID: 12085
  Gene Symbol: OSCAR
  Gene Name: osteoclast associated, immunoglobulin-like receptor
  ENST ID: ENST00000611715
  CDS Start-End: 193-1008

SEQ ID NO: 162831 - DNA, 2061 bp, Homo sapiens; identical to SEQ ID NO: 162823
  Payload ID: 12085
  Gene Symbol: OSCAR
  Gene Name: osteoclast associated, immunoglobulin-like receptor
  ENST ID: ENST00000610577
  CDS Start-End: 193-1053

SEQ ID NO: 162832 - DNA, 2061 bp, Homo sapiens
  Payload ID: 12085
  Gene Symbol: OSCAR
  Gene Name: osteoclast associated, immunoglobulin-like receptor
  ENST ID: ENST00000611261
  CDS Start-End: 193-1053
gcactcgcgcagaacaaagatggagccgtggagtgccatagggctatgacacagtcacccacaggcccccacctcgatactctcttccgtaaatgaggatctgggtctggttttctgatgttgcctcatttcctgggaggggagagggtgcgaccaagccctggctccagctctagcgggtatctgcccaccatggccctggtgctgatcctccagctgctgaccctctggcctctgtgtcacacagacatcactccgtctgtggccattatagtccccccagcttcataccaccctaagccatggctgggagctcagccggctacagttgtgacccctggggtcaacgtgaccttgagatgccgggcaccccaacccgcttggagatttggacttttcaagcctggagagatcgctccccttctcttccgggatgtgtcctccgagctggcagaattctttctggaggaggtgactccagcccaagggggaagttaccgctgctgctaccgaaggccagactgggggccgggtgtctggtcccagcccagcgatgtcctggagctgctggtgacagaggagctgccgcggccgtcgctggtggcgctgcccgggccggtggtgggtcctggcgccaacgtgagcctgcgctgcgcgggccgcctgcggaacatgagcttcgtgctgtaccgcgagggcgtggcggccccgctgcagtaccgccactccgcgcagccctgggccgacttcacgctgctgggcgcccgcgcccccggcacctacagctgctactatcacacgccctccgcgccctacgtgctgtcgcagcgcagcgaggtgctggtcatcagctgggaaggtgagggccctgaggcccggcccgcctcctccgccccaggaatgcaggccccaggacctccgccctcagacccaggagcccaggcccccagcctctcctccttcagacccaggggtctagtcctgcagcccctcctccctcagacccaggattcctgggacccagcccctcctccctcagatccaggagtctagtcctccagctcctcctccctcagacccaggattcccgggccccagtacctcctccctcagacccaggactccaggcccccagcccctccttcctggacccaggactccaggcccccagcccctccttcctgatccagcagtccaggccccagccccttcttcctggacccaggagttgaagcctccatcgactccccctcaactttgagactgtagagtcaggtccctaagtccaccccaggggctggaaacctggagttcagggcccagactttggggtccgggagctgatggcccctctctcccggctccgcccgcagactctggctcctccgactacacccgggggaacctagtccgcctggggctggccgggctggtcctcatctccctgggcgcgctggtcacttttgactggcgcagtcagaaccgcgctcctgctggtatccgcccctgagccccaggagcactgcagcccgagacttccaacctgagtggcggagaagctgggaccctgggctggactgtcctttcctgcagccccacagtcctgctggctgagctccgcggaacggtccttagaccccgctgtgccctgtgctgtagcttctttccaggcctttcccaaggagtagctgaaaggaagacgcgattagtggttaagacttccaagccagaagacagagggttcgaatcccagcactgccgtctactcactgtagtagtagcagctacagaaaggtagtagtgagacgtgaagccagctggacttcctgggttgaatggggacctggagaacttttctgtcttacaagaggattgtaaaatggaccaatcagcactctgtaagatggaccaatcagcgctctgtaaaatggaccaatcagcaggacacgggcggggacaataagggaataaaagctggcgagcgcggcaccccaccagagtctgcttccacgttgtgggagctttgttctcttgctctacacaataaatcttgctgctgct

SEQ ID NO: 162833 - DNA, 2016 bp, Homo sapiens; identical to SEQ ID NO: 162826
  Payload ID: 12085
  Gene Symbol: OSCAR
  Gene Name: osteoclast associated, immunoglobulin-like receptor
  ENST ID: ENST00000610915
  CDS Start-End: 193-1008

SEQ ID NO: 162834 - DNA, 1358 bp, Homo sapiens; identical to SEQ ID NO: 162829
  Payload ID: 12085
  Gene Symbol: OSCAR
  Gene Name: osteoclast associated, immunoglobulin-like receptor
  ENST ID: ENST00000611450
  CDS Start-End: 1-807

SEQ ID NO: 162835 - DNA, 2016 bp, Homo sapiens
  Payload ID: 12085
  Gene Symbol: OSCAR
  Gene Name: osteoclast associated, immunoglobulin-like receptor
  Uniprot ID: Q8IYS5
  ENST ID: ENST00000616215
  CDS Start-End: 193-1008
gcactcgcgcagaacaaagatggagccgtggagtgccatagggctatgacacagtcacccacaggcccccacctcgatactctcttccgtaaatgaggatctgggtctggttttctgatgttgcctcatttcctgggaggggagagggtgcgaccaagccctggctccagctctagcgggtatctgcccaccatggccctggtgctgatcctccagctgctgaccctcttccccccagcttcataccaccctaagccatggctgggagctcagccggctacagttgtgacccctggggtcaacgtgaccttgagatgccgggcaccccaacccgcttggagatttggacttttcaagcctggagagatcgctccccttctcttccgggatgtgtcctccgagctggcagaattctttctggaggaggtgactccagcccaagggggaagttaccgctgctgctaccgaaggccagactgggggccgggtgtctggtcccagcccagcgatgtcctggagctgctggtgacagaggagctgccgcggccgtcgctggtggcgctgcccgggccggtggtgggtcctggcgccaacgtgagcctgcgctgcgcgggccgcctgcggaacatgagcttcgtgctgtaccgcgagggcgtggcggccccgctgcagtaccgccactccgcgcagccctgggccgacttcacgctgctgggcgcccgcgcccccggcacctacagctgctactatcacacgccctccgcgccctacgtgctgtcgcagcgcagcgaggtgctggtcatcagctgggaaggtgagggccctgaggcccggcccgcctcctccgccccaggaatgcaggccccaggacctccgccctcagacccaggagcccaggcccccagcctctcctccttcagacccaggggtctagtcctgcagcccctcctccctcagacccaggattcctgggacccagcccctcctccctcagatccaggagtctagtcctccagctcctcctccctcagacccaggattcccgggccccagtacctcctccctcagacccaggactccaggcccccagcccctccttcctggacccaggactccaggcccccagcccctccttcctgatccagcagtccaggccccagccccttcttcctggacccaggagttgaagcctccatcgactccccctcaactttgagactgtagagtcaggtccctaagtccaccccaggggctggaaacctggagttcagggcccagactttggggtccgggagctgatggcccctctctcccggctccgcccgcagactctggctcctccgactacacccgggggaacctagtccgcctggggctggccgggctggtcctcatctccctgggcgcgctggtcacttttgactggcgcagtcagaaccgcgctcctgctggtatccgcccctgagccccaggagcactgcagcccgagacttccaacctgagtggcggagaagctgggaccctgggctggactgtcctttcctgcagccccacagtcctgctggctgagctccgcggaacggtccttagaccccgctgtgccctgtgctgtagcttctttccaggcctttcccaaggagtagctgaaaggaagacgcgattagtggttaagacttccaagccagaagacagagggttcgaatcccagcactgccgtctactcactgtagtagtagcagctacagaaaggtagtagtgagacgtgaagccagctggacttcctgggttgaatggggacctggagaacttttctgtcttacaagaggattgtaaaatggaccaatcagcactctgtaagatggaccaatcagcgctctgtaaaatggaccaatcagcaggacacgggcggggacaataagggaataaaagctggcgagcgcggcaccccaccagagtctgcttccacgttgtgggagctttgttctcttgctctacacaataaatcttgctgctgct

SEQ ID NO: 162836 - DNA, 1358 bp, Homo sapiens; identical to SEQ ID NO: 162829
  Payload ID: 12085
  Gene Symbol: OSCAR
  Gene Name: osteoclast associated, immunoglobulin-like receptor
  ENST ID: ENST00000611789
  CDS Start-End: 1-807

SEQ ID NO: 162837 - DNA, 1892 bp, Homo sapiens
  Payload ID: 12085
  Gene Symbol: OSCAR
  Gene Name: osteoclast associated, immunoglobulin-like receptor
  Uniprot ID: Q8IYS5
  ENST ID: ENST00000616227
  CDS Start-End: 24-884
gctctagcgggtatctgcccaccatggccctggtgctgatcctccagctgctgaccctctggcctctgtgtcacacagacatcactccgtctgtggccattatagtccccccagcttcataccaccctaagccatggctgggagctcagccggctacagttgtgacccctggggtcaacgtgaccttgagatgccgggcaccccaacccgcttggagatttggacttttcaagcctggagagatcgctccccttctcttccgggatgtgtcctccgagctggcagaattctttctggaggaggtgactccagcccaagggggaatttaccgctgctgctaccgaaggccagactgggggccgggtgtctggtcccagcccagcgatgtcctggagctgctggtgacagaggagctgccgcggccgtcgctggtggcgctgcccgggccggtggtgggtcctggcgccaacgtgagcctgcgctgcgcgggccgcctgcggaacatgagcttcgtgctgtaccgcgagggcgtggcggccccgctgcagtaccgccactccgcgcagccctgggccgacttcacgctgctgggcgcccgcgcccccggcacctacagctgctactatcacacgccctccgcgccctacgtgctgtcgcagcgcagcgaggtgctggtcatcagctgggaaggtgagggccctgaggcccggcccgcctcctccgccccaggaatgcaggccccaggacctccgccctcagacccaggagcccaggcccccagcctctcctccttcagacccaggggtctagtcctgcagcccctcctccctcagacccaggattcctgggacccagcccctcctccctcagatccaggagtctagtcctccagctcctcctccctcagacccaggattcccgggccccagtacctcctccctcagacccaggactccaggcccccagcccctccttcctggacccaggactccaggcccccagcccctccttcctgatccagcagtccaggccccagccccttcttcctggacccaggagttgaagcctccatcgactccccctcaactttgagactgtagagtcaggtccctaagtccaccccaggggctggaaacctggagttcagggcccagactttggggtccgggagctgatggcccctctctcccggctccgcccgcagactctggctcctccgactacacccgggggaacctagtccgcctggggctggccgggctggtcctcatctccctgggcgcgctggtcacttttgactggcgcagtcagaaccgcgctcctgctggtatccgcccctgagccccaggagcactgcagcccgagacttccaacctgagtggcggagaagctgggaccctgggctggactgtcctttcctgcagccccacagtcctgctggctgagctccgcggaacggtccttagaccccgctgtgccctgtgctgtagcttctttccaggcctttcccaaggagtagctgaaaggaagacgcgattagtggttaagacttccaagccagaagacagagggttcgaatcccagcactgccgtctactcactgtagtagtagcagctacagaaaggtagtagtgagacgtgaagccagctggacttcctgggttgaatggggacctggagaacttttctgtcttacaagaggattgtaaaatggaccaatcagcactctgtaagatggaccaatcagcgctctgtaaaatggaccaatcagcaggacatgggcggggacaataagggaataaaagctggcgagcgcggcaccccaccagagtctgcttccacgctgtgggagctttgttctcttgctctacacaataaatcttgctgctgct

SEQ ID NO: 162838 - DNA, 2061 bp, Homo sapiens; identical to SEQ ID NO: 162823
  Payload ID: 12085
  Gene Symbol: OSCAR
  Gene Name: osteoclast associated, immunoglobulin-like receptor
  Uniprot ID: Q8IYS5
  ENST ID: ENST00000612953
  CDS Start-End: 193-1053

SEQ ID NO: 162839 - DNA, 2049 bp, Homo sapiens; identical to SEQ ID NO: 162827
  Payload ID: 12085
  Gene Symbol: OSCAR
  Gene Name: osteoclast associated, immunoglobulin-like receptor
  Uniprot ID: Q8IYS5
  ENST ID: ENST00000611480
  CDS Start-End: 193-1041

SEQ ID NO: 162840 - DNA, 2016 bp, Homo sapiens; identical to SEQ ID NO: 162826
  Payload ID: 12085
  Gene Symbol: OSCAR
  Gene Name: osteoclast associated, immunoglobulin-like receptor
  ENST ID: ENST00000621506
  CDS Start-End: 193-1008

SEQ ID NO: 162841 - DNA, 2049 bp, Homo sapiens; identical to SEQ ID NO: 162827
  Payload ID: 12085
  Gene Symbol: OSCAR
  Gene Name: osteoclast associated, immunoglobulin-like receptor
  ENST ID: ENST00000617622
  CDS Start-End: 193-1041

SEQ ID NO: 162842 - DNA, 2055 bp, Homo sapiens
  Payload ID: 12085
  Gene Symbol: OSCAR
  Gene Name: osteoclast associated, immunoglobulin-like receptor
  Uniprot ID: Q8IYS5
  ENST ID: ENST00000613426
  CDS Start-End: 199-1047
gcgtgcgcactcgcgcagaacaaagatggagccgtggagtgccatagggctatgacacagtcacccacaggcccccacctcgatactctcttccgtaaatgaggatctgggtctggttttctgatgttgcctcatttcctgggaggggagagggtgcgaccaagccctggctccagctctagcgggtatctgcccaccatggccctggtgctgatcctccagctgctgaccctctggcctctgtgtcacacagacatcactccgtctgtccccccagcttcataccaccctaagccatggctgggagctcagccggctacagttgtgacccctggggtcaacgtgaccttgagatgccgggcaccccaacccgcttggagatttggacttttcaagcctggagagatcgctccccttctcttccgggatgtgtcctccgagctggcagaattctttctggaggaggtgactccagcccaagggggaatttaccgctgctgctaccgaaggccagactgggggccgggtgtctggtcccagcccagcgatgtcctggagctgctggtgacagaggagctgccgcggccgtcgctggtggcgctgcccgggccggtggtgggtcctggcgccaacgtgagcctgcgctgcgcgggccgcctgcggaacatgagcttcgtgctgtaccgcgagggcgtggcggccccgctgcagtaccgccactccgcgcagccctgggccgacttcacgctgctgggcgcccgcgcccccggcacctacagctgctactatcacacgccctccgcgccctacgtgctgtcgcagcgcagcgaggtgctggtcatcagctgggaaggtgagggccctgaggcccggcccgcctcctccgccccaggaatgcaggccccaggacctccgccctcagacccaggagcccaggcccccagcctctcctccttcagacccaggggtctagtcctgcagcccctcctccctcagacccaggattcctgggacccagcccctcctccctcagatccaggagtctagtcctccagctcctcctccctcagacccaggattcccgggccccagtacctcctccctcagacccaggactccaggcccccagcccctccttcctggacccaggactccaggcccccagcccctccttcctgatccagcagtccaggccccagccccttcttcctggacccaggagttgaagcctccatcgactccccctcaactttgagactgtagagtcaggtccctaagtccaccccaggggctggaaacctggagttcagggcccagactttggggtccgggagctgatggcccctctctcccggctccgcccgcagactctggctcctccgactacacccgggggaacctagtccgcctggggctggccgggctggtcctcatctccctgggcgcgctggtcacttttgactggcgcagtcagaaccgcgctcctgctggtatccgcccctgagccccaggagcactgcagcccgagacttccaacctgagtggcggagaagctgggaccctgggctggactgtcctttcctgcagccccacagtcctgctggctgagctccgcggaacggtccttagaccccgctgtgccctgtgctgtagcttctttccaggcctttcccaaggagtagctgaaaggaagacgcgattagtggttaagacttccaagccagaagacagagggttcgaatcccagcactgccgtctactcactgtagtagtagcagctacagaaaggtagtagtgagacgtgaagccagctggacttcctgggttgaatggggacctggagaacttttctgtcttacaagaggattgtaaaatggaccaatcagcactctgtaagatggaccaatcagcgctctgtaaaatggaccaatcagcaggacatgggcggggacaataagggaataaaagctggcgagcgcggcaccccaccagagtctgcttccacgctgtgggagctttgttctcttgctctacacaataaatcttgctgctgct

SEQ ID NO: 162843 - DNA, 1358 bp, Homo sapiens; identical to SEQ ID NO: 162829
  Payload ID: 12085
  Gene Symbol: OSCAR
  Gene Name: osteoclast associated, immunoglobulin-like receptor
  ENST ID: ENST00000614057
  CDS Start-End: 1-807

SEQ ID NO: 162844 - DNA, 1547 bp, Homo sapiens; identical to SEQ ID NO: 162824
  Payload ID: 12085
  Gene Symbol: OSCAR
  Gene Name: osteoclast associated, immunoglobulin-like receptor
  Uniprot ID: Q8IYS5
  ENST ID: ENST00000617834
  CDS Start-End: 193-996

SEQ ID NO: 162845 - DNA, 1358 bp, Homo sapiens; identical to SEQ ID NO: 162829
  Payload ID: 12085
  Gene Symbol: OSCAR
  Gene Name: osteoclast associated, immunoglobulin-like receptor
  ENST ID: ENST00000612543
  CDS Start-End: 1-807

SEQ ID NO: 162846 - DNA, 2049 bp, Homo sapiens; identical to SEQ ID NO: 162827
  Payload ID: 12085
  Gene Symbol: OSCAR
  Gene Name: osteoclast associated, immunoglobulin-like receptor
  ENST ID: ENST00000622326
  CDS Start-End: 193-1041

SEQ ID NO: 162847 - DNA, 2061 bp, Homo sapiens; identical to SEQ ID NO: 162823
  Payload ID: 12085
  Gene Symbol: OSCAR
  Gene Name: osteoclast associated, immunoglobulin-like receptor
  ENST ID: ENST00000617993
  CDS Start-End: 193-1053

SEQ ID NO: 162848 - DNA, 629 bp, Homo sapiens
  Payload ID: 12085
  Gene Symbol: OSCAR
  Gene Name: osteoclast associated, immunoglobulin-like receptor
  ENST ID: ENST00000622843
  CDS Start-End: 50-535
gagggtgcgaccaagccctggctccagctctagcgggtatctgcccaccatggccctggtgctgatcctccagctgctgaccctctggcctctgtgtcacacagacatcactccgtctgctggcagaattctttctggaggaggtgactccagcccaagggggaatttaccgctgctgctaccgaaggccagactgggggccgggtgtctggtcccagcccagcgatgtcctggagctgctggtgacagaggagctgccgcggccgtcgctggtggcgctgcccgggccggtggtgggtcctggcgccaacgtgagcctgcgctgcgcgggccgcctgcggaacatgagcttcgtgctgtaccgcgagggcgtggcggccccgctgcagtaccgccactccgcgcagccctgggccgacttcacgctgctgggcgcccgcgcccccggcacctacagctgctactatcacacgccctccgcgccctacgtgctgtcgcagcgcagcgaggtgctggtcatcagctgggaaggtgagggccctgaggcccggcccgcctcctccgccccaggaatgcaggccccaggacctccgccctcagacccaggagcccaggcccccagcctctcc

SEQ ID NO: 162849 - DNA, 2049 bp, Homo sapiens; identical to SEQ ID NO: 162827
  Payload ID: 12085
  Gene Symbol: OSCAR
  Gene Name: osteoclast associated, immunoglobulin-like receptor
  ENST ID: ENST00000614003
  CDS Start-End: 193-1041

SEQ ID NO: 162850 - DNA, 2049 bp, Homo sapiens; identical to SEQ ID NO: 162827
  Payload ID: 12085
  Gene Symbol: OSCAR
  Gene Name: osteoclast associated, immunoglobulin-like receptor
  ENST ID: ENST00000616758
  CDS Start-End: 193-1041

SEQ ID NO: 162851 - DNA, 2061 bp, Homo sapiens; identical to SEQ ID NO: 162823
  Payload ID: 12085
  Gene Symbol: OSCAR
  Gene Name: osteoclast associated, immunoglobulin-like receptor
  Uniprot ID: Q8IYS5
  ENST ID: ENST00000617187
  CDS Start-End: 193-1053

SEQ ID NO: 162852 - DNA, 1547 bp, Homo sapiens; identical to SEQ ID NO: 162824
  Payload ID: 12085
  Gene Symbol: OSCAR
  Gene Name: osteoclast associated, immunoglobulin-like receptor
  Uniprot ID: Q8IYS5
  ENST ID: ENST00000621788
  CDS Start-End: 193-996

SEQ ID NO: 162853 - DNA, 1358 bp, Homo sapiens; identical to SEQ ID NO: 162829
  Payload ID: 12085
  Gene Symbol: OSCAR
  Gene Name: osteoclast associated, immunoglobulin-like receptor
  ENST ID: ENST00000622275
  CDS Start-End: 1-807

SEQ ID NO: 162854 - DNA, 1547 bp, Homo sapiens; identical to SEQ ID NO: 162824
  Payload ID: 12085
  Gene Symbol: OSCAR
  Gene Name: osteoclast associated, immunoglobulin-like receptor
  ENST ID: ENST00000617210
  CDS Start-End: 193-996

SEQ ID NO: 162855 - DNA, 2016 bp, Homo sapiens; identical to SEQ ID NO: 162826
  Payload ID: 12085
  Gene Symbol: OSCAR
  Gene Name: osteoclast associated, immunoglobulin-like receptor
  Uniprot ID: Q8IYS5
  ENST ID: ENST00000615546
  CDS Start-End: 193-1008

SEQ ID NO: 162856 - DNA, 2049 bp, Homo sapiens; identical to SEQ ID NO: 162827
  Payload ID: 12085
  Gene Symbol: OSCAR
  Gene Name: osteoclast associated, immunoglobulin-like receptor
  ENST ID: ENST00000612289
  CDS Start-End: 193-1041

SEQ ID NO: 162857 - DNA, 1358 bp, Homo sapiens; identical to SEQ ID NO: 162829
  Payload ID: 12085
  Gene Symbol: OSCAR
  Gene Name: osteoclast associated, immunoglobulin-like receptor
  ENST ID: ENST00000618058
  CDS Start-End: 1-807

SEQ ID NO: 162858 - DNA, 2016 bp, Homo sapiens; identical to SEQ ID NO: 162826
  Payload ID: 12085
  Gene Symbol: OSCAR
  Gene Name: osteoclast associated, immunoglobulin-like receptor
  ENST ID: ENST00000611918
  CDS Start-End: 193-1008

SEQ ID NO: 162859 - DNA, 1547 bp, Homo sapiens; identical to SEQ ID NO: 162824
  Payload ID: 12085
  Gene Symbol: OSCAR
  Gene Name: osteoclast associated, immunoglobulin-like receptor
  ENST ID: ENST00000619170
  CDS Start-End: 193-996

SEQ ID NO: 162860 - DNA, 2061 bp, Homo sapiens; identical to SEQ ID NO: 162823
  Payload ID: 12085
  Gene Symbol: OSCAR
  Gene Name: osteoclast associated, immunoglobulin-like receptor
  ENST ID: ENST00000616461
  CDS Start-End: 193-1053

SEQ ID NO: 162861 - DNA, 2061 bp, Homo sapiens; identical to SEQ ID NO: 162823
  Payload ID: 12085
  Gene Symbol: OSCAR
  Gene Name: osteoclast associated, immunoglobulin-like receptor
  ENST ID: ENST00000614380
  CDS Start-End: 193-1053

SEQ ID NO: 162862 - DNA, 1355 bp, Homo sapiens
  Payload ID: 12085
  Gene Symbol: OSCAR
  Gene Name: osteoclast associated, immunoglobulin-like receptor
  Uniprot ID: Q8IYS5
  ENST ID: ENST00000621290
  CDS Start-End: 1-804
atggccctggtgctgatcctccagctgctgaccctctggcctctgtgtcacacagacatcactccgtctgtggccattatagtccccccagcttcataccaccctaagccatggctgggagctcagccggctacagttgtgacccctggggtcaacgtgaccttgagatgccgggcaccccaacccgcttggagatttggacttttcaagcctggagagatcgctccccttctcttccgggatgtgtcctccgagctggcagaattctttctggaggaggtgactccagcccaagggggaatttaccgctgctgctaccgaaggccagactgggggccgggtgtctggtcccagcccagcgatgtcctggagctgctggtgacagaggagctgccgcggccgtcgctggtggcgctgcccgggccggtggtgggtcctggcgccaacgtgagcctgcgctgcgcgggccgcctgcggaacatgagcttcgtgctgtaccgcgagggcgtggcggccccgctgcagtaccgccactccgcgcagccctgggccgacttcacgctgctgggcgcccgcgcccccggcacctacagctgctactatcacacgccctccgcgccctacgtgctgtcgcagcgcagcgaggtgctggtcatcagctgggaagactctggctcctccgactacacccgggggaacctagtccgcctggggctggccgggctggtcctcatctccctgggcgcgctggtcacttttgactggcgcagtcagaaccgcgctcctgctggtatccgcccctgagccccaggagcactgcagcccgagacttccaacctgagtggcggagaagctgggaccctgggctggactgtcctttcctgcagccccacagtcctgctggctgagctccgcggaacggtccttagaccccgctgtgccctgtgctgtagcttctttccaggcctttcccaaggagtagctgaaaggaagacgcgattagtggttaagacttccaagccagaagacagagggttcgaatcccagcactgccgtctactcactgtagtagtagcagctacagaaaggtagtagtgagacgtgaagccagctggacttcctgggttgaatggggacctggagaacttttctgtcttacaagaggattgtaaaatggaccaatcagcactctgtaagatggaccaatcagcgctctgtaaaatggaccaatcagcaggacatgggcggggacaataagggaataaaagctggcgagcgcggcaccccaccagagtctgcttccacgctgtgggagctttgttctcttgctctacacaataaatcttgctgctgct

SEQ ID NO: 162863 - DNA, 1358 bp, Homo sapiens; identical to SEQ ID NO: 162829
  Payload ID: 12085
  Gene Symbol: OSCAR
  Gene Name: osteoclast associated, immunoglobulin-like receptor
  ENST ID: ENST00000613895
  CDS Start-End: 1-807

SEQ ID NO: 162864 - DNA, 1547 bp, Homo sapiens; identical to SEQ ID NO: 162824
  Payload ID: 12085
  Gene Symbol: OSCAR
  Gene Name: osteoclast associated, immunoglobulin-like receptor
  Uniprot ID: Q8IYS5
  ENST ID: ENST00000621328
  CDS Start-End: 193-996

SEQ ID NO: 162865 - DNA, 1547 bp, Homo sapiens; identical to SEQ ID NO: 162824
  Payload ID: 12085
  Gene Symbol: OSCAR
  Gene Name: osteoclast associated, immunoglobulin-like receptor
  ENST ID: ENST00000620283
  CDS Start-End: 193-996

SEQ ID NO: 162866 - DNA, 1358 bp, Homo sapiens
  Payload ID: 12085
  Gene Symbol: OSCAR
  Gene Name: osteoclast associated, immunoglobulin-like receptor
  ENST ID: ENST00000616447
  CDS Start-End: 1-807
atggccctggtgctgatcctccagctgctgaccctctggcctctgtgtcacacagacatcactccgtctgcagccccgtttattgtccccccagcttcataccaccctaagccatggctgggagctcagccggctacagttgtgacccctggggtcaacgtgaccttgagatgccgggcaccccaacccgcttggagatttggacttttcaagcctggagagatcgctccccttctcttccgggatgtgtcctccgagctggcagaattctttctggaggaggtgactccagcccaagggggaagttaccgctgctgctaccgaaggccagactgggggccgggtgtctggtcccagcccagcgatgtcctggagctgctggtgacagaggagctgccgcggccgtcgctggtggcgctgcccgggccggtggtgggtcctggcgccaacgtgagcctgcgctgcgcgggccgcctgcggaacatgagcttcgtgctgtaccgcgagggcgtggcggccccgctgcagtaccgccactccgcgcagccctgggccgacttcacgctgctgggcgcccgcgcccccggcacctacagctgctactatcacacgccctccgcgccctacgtgctgtcgcagcgcagcgaggtgctggtcatcagctgggaagactctggctcctccgactacacccgggggaacctagtccgcctggggctggccgggctggtcctcatctccctgggcgcgctggtcacttttgactggcgcagtcagaaccgcgctcctgctggtatccgcccctgagccccaggagcactgcagcccgagacttccaacctgagtggcggagaagctgggaccctgggctggactgtcctttcctgcagccccacagtcctgctggctgagctccgcggaacggtccttagaccccgctgtgccctgtgctgtagcttctttccaggcctttcccaaggagtagctgaaaggaagacgcgattagtggttaagacttccaagccagaagacagagggttcgaatcccagcactgccgtctactcactgtagtagtagcagctacagaaaggtagtagtgagacgtgaagccagctggacttcctgggttgaatggggacctggagaacttttctgtcttacaagaggattgtaaaatggaccaatcagcactctgtaagatggaccaatcagcgctctgtaaaatggaccaatcagcaggacacgggcggggacaataagggaataaaagctggcgagcgcggcaccccaccagagtctgcttccacgttgtgggagctttgttctcttgctctacacaataaatcttgctgctgct

SEQ ID NO: 162867 - DNA, 1389 bp, Homo sapiens
  Payload ID: 12085
  Gene Symbol: OSCAR
  Gene Name: osteoclast associated, immunoglobulin-like receptor
  Uniprot ID: Q8IYS5
  ENST ID: ENST00000611535
  CDS Start-End: 47-838
ggtgcgaccaagccctggctccagctctagcgggtatctgcccaccatggccctggtgctgatcctccagctgctgaccctctggcctctgtgtcacacagacatcactccgtctgtccccccagcttcataccaccctaagccatggctgggagctcagccggctacagttgtgacccctggggtcaacgtgaccttgagatgccgggcaccccaacccgcttggagatttggacttttcaagcctggagagatcgctccccttctcttccgggatgtgtcctccgagctggcagaattctttctggaggaggtgactccagcccaagggggaatttaccgctgctgctaccgaaggccagactgggggccgggtgtctggtcccagcccagcgatgtcctggagctgctggtgacagaggagctgccgcggccgtcgctggtggcgctgcccgggccggtggtgggtcctggcgccaacgtgagcctgcgctgcgcgggccgcctgcggaacatgagcttcgtgctgtaccgcgagggcgtggcggccccgctgcagtaccgccactccgcgcagccctgggccgacttcacgctgctgggcgcccgcgcccccggcacctacagctgctactatcacacgccctccgcgccctacgtgctgtcgcagcgcagcgaggtgctggtcatcagctgggaagactctggctcctccgactacacccgggggaacctagtccgcctggggctggccgggctggtcctcatctccctgggcgcgctggtcacttttgactggcgcagtcagaaccgcgctcctgctggtatccgcccctgagccccaggagcactgcagcccgagacttccaacctgagtggcggagaagctgggaccctgggctggactgtcctttcctgcagccccacagtcctgctggctgagctccgcggaacggtccttagaccccgctgtgccctgtgctgtagcttctttccaggcctttcccaaggagtagctgaaaggaagacgcgattagtggttaagacttccaagccagaagacagagggttcgaatcccagcactgccgtctactcactgtagtagtagcagctacagaaaggtagtagtgagacgtgaagccagctggacttcctgggttgaatggggacctggagaacttttctgtcttacaagaggattgtaaaatggaccaatcagcactctgtaagatggaccaatcagcgctctgtaaaatggaccaatcagcaggacatgggcggggacaataagggaataaaagctggcgagcgcggcaccccaccagagtctgcttccacgctgtgggagctttgttctcttgctctacacaataaatcttgctgctgct

SEQ ID NO: 162868 - DNA, 2016 bp, Homo sapiens; identical to SEQ ID NO: 162826
  Payload ID: 12085
  Gene Symbol: OSCAR
  Gene Name: osteoclast associated, immunoglobulin-like receptor
  Uniprot ID: Q8IYS5
  ENST ID: ENST00000613814
  CDS Start-End: 193-1008

SEQ ID NO: 162869 - DNA, 2049 bp, Homo sapiens; identical to SEQ ID NO: 162827
  Payload ID: 12085
  Gene Symbol: OSCAR
  Gene Name: osteoclast associated, immunoglobulin-like receptor
  ENST ID: ENST00000618710
  CDS Start-End: 193-1041

SEQ ID NO: 162870 - DNA, 1547 bp, Homo sapiens
  Payload ID: 12085
  Gene Symbol: OSCAR
  Gene Name: osteoclast associated, immunoglobulin-like receptor
  ENST ID: ENST00000617140
  CDS Start-End: 193-996
gcactcgcgcagaacaaagatggagccgtggagtgccatagggctatgacacagtcacccacaggcccccacctcgatactctcttccgtaaatgaggatctgggtctggttttctgatgttgcctcatttcctgggaggggagagggtgcgaccaagccctggctccagctctagcgggtatctgcccaccatggccctggtgctgatcctccagctgctgaccctctggcctctgtgtcacacagacatcactccgtctgtggccattatagtccccccagcttcataccaccctaagccatggctgggagctcagccggctacagttgtgacccctggggtcaacgtgaccttgagatgccgggcaccccaacccgcttggagatttggacttttcaagcctggagagatcgctccccttctcttccgggatgtgtcctccgagctggcagaattctttctggaggaggtgactccagcccaagggggaagttaccgctgctgctaccgaaggccagactgggggccgggtgtctggtcccagcccagcgatgtcctggagctgctggtgacagaggagctgccgcggccgtcgctggtggcgctgcccgggccggtggtgggtcctggcgccaacgtgagcctgcgctgcgcgggccgcctgcggaacatgagcttcgtgctgtaccgcgagggcgtggcggccccgctgcagtaccgccactccgcgcagccctgggccgacttcacgctgctgggcgcccgcgcccccggcacctacagctgctactatcacacgccctccgcgccctacgtgctgtcgcagcgcagcgaggtgctggtcatcagctgggaagactctggctcctccgactacacccgggggaacctagtccgcctggggctggccgggctggtcctcatctccctgggcgcgctggtcacttttgactggcgcagtcagaaccgcgctcctgctggtatccgcccctgagccccaggagcactgcagcccgagacttccaacctgagtggcggagaagctgggaccctgggctggactgtcctttcctgcagccccacagtcctgctggctgagctccgcggaacggtccttagaccccgctgtgccctgtgctgtagcttctttccaggcctttcccaaggagtagctgaaaggaagacgcgattagtggttaagacttccaagccagaagacagagggttcgaatcccagcactgccgtctactcactgtagtagtagcagctacagaaaggtagtagtgagacgtgaagccagctggacttcctgggttgaatggggacctggagaacttttctgtcttacaagaggattgtaaaatggaccaatcagcactctgtaagatggaccaatcagcgctctgtaaaatggaccaatcagcaggacacgggcggggacaataagggaataaaagctggcgagcgcggcaccccaccagagtctgcttccacgttgtgggagctttgttctcttgctctacacaataaatcttgctgctgct

SEQ ID NO: 162871 - DNA, 2016 bp, Homo sapiens; identical to SEQ ID NO: 162826
  Payload ID: 12085
  Gene Symbol: OSCAR
  Gene Name: osteoclast associated, immunoglobulin-like receptor
  ENST ID: ENST00000616232
  CDS Start-End: 193-1008

SEQ ID NO: 162872 - DNA, 1547 bp, Homo sapiens; identical to SEQ ID NO: 162824
  Payload ID: 12085
  Gene Symbol: OSCAR
  Gene Name: osteoclast associated, immunoglobulin-like receptor
  ENST ID: ENST00000622288
  CDS Start-End: 193-996

SEQ ID NO: 162873 - DNA, 1358 bp, Homo sapiens; identical to SEQ ID NO: 162829
  Payload ID: 12085
  Gene Symbol: OSCAR
  Gene Name: osteoclast associated, immunoglobulin-like receptor
  ENST ID: ENST00000611322
  CDS Start-End: 1-807

SEQ ID NO: 162874 - DNA, 2061 bp, Homo sapiens; identical to SEQ ID NO: 162823
  Payload ID: 12085
  Gene Symbol: OSCAR
  Gene Name: osteoclast associated, immunoglobulin-like receptor
  ENST ID: ENST00000610985
  CDS Start-End: 193-1053

SEQ ID NO: 162875 - DNA, 2016 bp, Homo sapiens; identical to SEQ ID NO: 162826
  Payload ID: 12085
  Gene Symbol: OSCAR
  Gene Name: osteoclast associated, immunoglobulin-like receptor
  ENST ID: ENST00000619631
  CDS Start-End: 193-1008

SEQ ID NO: 162876 - DNA, 1375 bp, Homo sapiens
  Payload ID: 12085
  Gene Symbol: OSCAR
  Gene Name: osteoclast associated, immunoglobulin-like receptor
  Uniprot ID: Q8IYS5
  ENST ID: ENST00000619287
  CDS Start-End: 66-824
atttcctgggaggggagagggtgcgaccaagccctggctccagctctagcgggtatctgcccaccatggccctggtgctgatcctccagctgctgaccctcttccccccagcttcataccaccctaagccatggctgggagctcagccggctacagttgtgacccctggggtcaacgtgaccttgagatgccgggcaccccaacccgcttggagatttggacttttcaagcctggagagatcgctccccttctcttccgggatgtgtcctccgagctggcagaattctttctggaggaggtgactccagcccaagggggaatttaccgctgctgctaccgaaggccagactgggggccgggtgtctggtcccagcccagcgatgtcctggagctgctggtgacagaggagctgccgcggccgtcgctggtggcgctgcccgggccggtggtgggtcctggcgccaacgtgagcctgcgctgcgcgggccgcctgcggaacatgagcttcgtgctgtaccgcgagggcgtggcggccccgctgcagtaccgccactccgcgcagccctgggccgacttcacgctgctgggcgcccgcgcccccggcacctacagctgctactatcacacgccctccgcgccctacgtgctgtcgcagcgcagcgaggtgctggtcatcagctgggaagactctggctcctccgactacacccgggggaacctagtccgcctggggctggccgggctggtcctcatctccctgggcgcgctggtcacttttgactggcgcagtcagaaccgcgctcctgctggtatccgcccctgagccccaggagcactgcagcccgagacttccaacctgagtggcggagaagctgggaccctgggctggactgtcctttcctgcagccccacagtcctgctggctgagctccgcggaacggtccttagaccccgctgtgccctgtgctgtagcttctttccaggcctttcccaaggagtagctgaaaggaagacgcgattagtggttaagacttccaagccagaagacagagggttcgaatcccagcactgccgtctactcactgtagtagtagcagctacagaaaggtagtagtgagacgtgaagccagctggacttcctgggttgaatggggacctggagaacttttctgtcttacaagaggattgtaaaatggaccaatcagcactctgtaagatggaccaatcagcgctctgtaaaatggaccaatcagcaggacatgggcggggacaataagggaataaaagctggcgagcgcggcaccccaccagagtctgcttccacgctgtgggagctttgttctcttgctctacacaataaatcttgctgctgct

SEQ ID NO: 162877 - DNA, 1319 bp, Homo sapiens
  Payload ID: 12086
  Gene Symbol: OSTF1
  Gene Name: osteoclast stimulating factor 1
  Uniprot ID: Q92882
  ENST ID: ENST00000346234
  CDS Start-End: 151-795
ctcttcccgcagccaagggtgggcgccggtcctaggaggcgcacggttgtaagccagacaaaaagaactggggtgcccggagtgccaggtggcgggcaagcggtgggcttttcggcggggtctttaggatttgcagctccaggaagcgagatgtcgaagccgccacccaaaccagtcaaaccagggcaagttaaagtcttcagagccctgtatacgtttgaacccagaactccagatgaattatactttgaggaaggtgatattatctacattactgacatgagcgataccaattggtggaaaggcacctccaaaggcaggactggactaattccaagcaactatgtggctgagcaggcagaatccattgacaatccattgcatgaagcagcaaaaagaggcaacttgagctggttgagagagtgtttggacaacagagtgggtgttaatggcttagacaaagctggaagcactgccttatactgggcttgccacgggggccacaaagatatagtggaaatgctatttactcaaccaaatattgaactgaaccagcagaacaagttgggagatacagctttgcatgctgctgcctggaagggttatgcagatatcgtccagttgcttctggcaaaaggtgctagaacagacttaagaaacattgagaagaagctggccttcgacatggctaccaatgctgcctgtgcatctctcctgaaaaagaaacagggaacagatgcagttcgaacattaagcaatgccgaggactatctcgatgatgaagactcagattaattcctttctggagctttgagatctaaaacttctgttgcttttgccattccaaaactttgtctttgccagaaaagtgttggtaactataaagaaaattatatatgaacacggcagtgttgcactgtgtttgagtagaacgtgtaaatgaattgttcccacctttggtttgccagtaagtgactggattcttggcacatttatgttcaccaaagtagaacaagaagatattatttctatttatcaagcaaaaggaattttaagatttttttttttctttaaaaacaaattaggattttttttttttttttttttttagttaaaatgctttacctcaatggttgagatattttgaatggatttttcaagggggggaaatgcttattataataataaaccaaaatacttaacagaaaattgtcagctattctgacaaaaataaacattttgagagactttatttcttttgtccgtttctgtggtatcactcattgtcgttaagtaagtaaagctttttatatttaggt

SEQ ID NO: 162878 - DNA, 2043 bp, Homo sapiens
  Payload ID: 12087
  Gene Symbol: OCSTAMP
  Gene Name: osteoclast stimulatory transmembrane protein
  Uniprot ID: Q9BR26
  ENST ID: ENST00000279028
  CDS Start-End: 15-1715
gccatttggacagcatgccaggccacccaggagcagctgagcaacttgtcaagaccgggtggaggtcctggcacttggggttctggaaggcccttgccccactgcaggctgcctgggacgccttctcccagcctgttccagccagctgtggccagctgctgacccagctcctcctgtgtgcctccctggctgctgctgctgcaggtctggtttatcactggctggcatccttgctgctttatcctcctggaccttcagccatggttgccactgtctgtggcctcctggtcttcctgagcctgggcctggtacccccagtccgctgcctgtttgcactcagcgtgcccaccctgggtatggagcagggccgccggctgctcctgtcctacagcactgccaccctggccattgctgtggtgcccaacgtcctggccaacgtgggtgcggccgggcaggtgctgaggtgtgtcaccgagggctccctggagagtctcctcaataccactcaccagctgcatgcagcatccagggctctgggccccacaggccaggcaggcagccggggcctgacatttgaggcccaggacaatggctctgccttctaccttcacatgctcagggtcactcagcaggtcctggaggatttctctggcctggagtccctggcccgggcagcagcgctagggacccagcgagtggtcacagggctgtttatgttgggcctcctggtggagtcggcatggtacctccattgctacctgacagacctgcggtttgacaatatctacgccactcaacagctgacccagcggttggcacaggcccaggctacacacctcctggcccctccacccacctggctgctccaggcggctcagctgaggctgtcacaggaggagctgttgagttgtcttctaaggctggggctgcttgccctgctcctcgtggccacggctgtggcggtggccacagaccatgtagccttcctcctggcacaggctactgtggactgggctcagaagttgccaactgtgcccatcacgctcacggtcaagtatgatgtggcatacactgtcctgggcttcatccctttcctcttcaaccagctggctccggagagccccttcctctccgtccacagctcctaccaatgggagctccgcctcacctccgcccgctgcccactgctacccgcccggcgtccccgcgcagctgccccgctggccgcgggggccctgcagctcctggcgggctccacggtgctcctggaggcctacgcccgccgcctgcggcatgccatcgccgcttccttcttcacagcccaggaggcgaggagggtccgccacctgcacgcccggctccagcgaagacacgacaggcaccaaggccagcagctgcccctaggggatccttcttgcgtccccacacccagacctgcctgcaagcctccggcatggatagactacaggctggatgccttaagaaccgagagcagtgagggagaagggaaagagctttggagttgcagagacctgagttgtaaccttggtcctgtgccgcctccctgtgtgaccttgggtaagtcacttcacctctctgagcctcggtttctacatctgcataacgacagcatatttaccattgatgtgacctacttcccacgcagggatgtggtcaggatggaaggaaatactgggcatgataggcctggataaccggtaaagaaccatgcaaaggcgaagacaaggagtgcagagagagctcatggttcctccaggctggttggcgatcaggctcatctcatctgcaccaactgctctacttgttagatggagaccttgcatcatgaatttctcgaaatgctcctggaacttatttatatgcctcaaaatcctctaaactcatttatagtaacccatagttttaattttataaataaacgtatttattaaatcttagattacgttattcctctgcctcaaattccttcagggcctttccattgccaggattagattttgccaaattaaaatataggacact

SEQ ID NO: 162879 - DNA, 402 bp, Homo sapiens
  Payload ID: 12088
  Gene Symbol: OSTN
  Gene Name: osteocrin
  Uniprot ID: P61366
  ENST ID: ENST00000339051
  CDS Start-End: 1-402
atgctggactggagattggcaagtgcacatttcatcctggctgtgacactgacactgtggagctcaggaaaagtcctctcagtagatgtaacaacaacagaggcctttgattctggagtcatagatgtgcagtcaacacccacagtcagggaagagaaatcagccactgacctgacagcaaaactcttgcttcttgatgaattggtgtccctagaaaatgatgtgattgagacaaagaagaaaaggagtttctctggttttgggtctccccttgacagactctcagctggctctgtagatcacaaaggtaaacagaggaaagtagtagatcatccaaaaaggcgatttggtatccccatggatcggattggtagaaaccggctttcaaattccagaggctaa

SEQ ID NO: 162880 - DNA, 3134 bp, Homo sapiens
  Payload ID: 12088
  Gene Symbol: OSTN
  Gene Name: osteocrin
  ENST ID: ENST00000445281
  CDS Start-End: 68-403
agggctgagttttggagaaactgcagagacagtactctaaagttagaatctcctgatctttcacgagatgctggactggagattggcaagtgcacatttcatcctggctgtgacactgacactgtggagctcaggaaaagtcctctcagtagatgtaacaacaacagaggcctttgattctggagtcatagatgtgcagtcaacacccacagtcagggaagagaaatcagccactgacctgacagcaaaactcttgcttcttgatgaattggtgtccctagaaaatgatgtgattgagacaaagaagaaaaggagtttctctggttttgggtctccccttgacagactctcagctggctctgtagatcacaaaggtaaacagagatgcaacttccttgggtgaaatgtcacagcaatatggaagatgcttcactgaagttattcacacttcttaatgattaaacttttaaggaactgaccttctgcaaatcctttccaaagcttgaacttcagtccatcacattacagcattgttacagcttcaattaaattgtgtaaatcattttgatgcacgtacattttaaaattatatattttaattattcaagaatggttaacttccccttaaaccttacttttaaaaataataattaaatacacaatacagtgaaatgccttctgtatggatttaccatgcacatgtttgtagtcaaagaataataacaaaagacagatttgcttctgtaaaatttagttataatctgtccattattggggaatgaggaaaggcaatgctgtgtattttctgttgagtactttcacttccctgtattccatttttccaagagtctgatcggtaataattatgaaattaggcttctcttttcatattcaagtttcagtcatgttcagaaaaataaaacacagccccaatgagcctattgacttagaattaagaaagtgaaggacattactcatttgtcaaacttagatatcacttgtcccctaaaaactttccatttttctaaattctgacagttaagagcagtagtgtctcattaggaggggagtaagctcacacagaggtaaaaatgaaagtaggagggaagtcaaagaattaccaccagaacaggttaggaccagctaagcacacatcattttagctcagtacacttcagcatagtacaatgtgatctttttgatatcttggattaatctaagaaactgtttactgtgtttcacatattggcttctttggcttcaattgtcttattatccttagtaagccaattgaagagcataatgattttgagaatgatttcttaaaaatcattcagattatttttgaatgacttattaaaacataagttttcgtattgtagaaaactcagttctcagtaataactatgatgttactgtagcttggacacataggtccattgtgcattggatatactttgaaaacacacaaaaaaaactttctatggaacagagattcatcataagttacttagcagaagtttataaagcatcgaaaaacacttcctctgtaaaccctaaaaatcactgtctgatacgtgggaggaaaaaagttttgtccagtagagcaaaggcttatttcagcataaaaagagagtgttgtgagttgtgagaaggtgtcttaattttaaaggaagaggagagaaatgggcaattgctaatcttaactaaaaattaatggacttgtatgatccaaagaataaaataaactcaaagaaacataacaaaaatatattagaaaaagagttaaactaagaaattgacctttatgaaggactaatttttcagttatccaatgtgctttttaaagataaagtttaaaagaggcaaaaagaggtgaaagaaatgaacatgtgtacttagaatatatatattggttttgtatgtaacttcttagtttttctggatatttttaaaattgaaagtcttcaaaattaatttaggaaaaatagtaaataattttttttcattgtagtagagggctgtagccaagagaagtgaattttgggaaatctaaccaattctttttttcataaacttgtgttagaaagctagcaatagcacatagggaagtatcctggaggactcaggagttgaaagaattatttaagaagttgtgatatccttgtctgcctttccccaaccttgtgatgaactatagaaatgtttcctattgcttagaagctctttctttccttgtatgcacatttgggtatttgtaagcttctaatccaattgggttctgcttcatgctttgacaaaaggtattaaaacctactttagcctaaaactttctcatggtaaatattggaagttggattatgcaaattgatttcctccattctttattttttaattcaaaattagactatgacatccaacttaattaaaataagaagtcacaatatagtgatttatgctatagtttcatgtgtaatgtattttcacctaatatacacacaatttccatgaagggaagaaaatgttttctccacttataactctattttatttcatattttaatttttaccactacttcattcagagtagaaaataagtcagcaatatactaaataatggggctattcttttaacatagcagtaaattaagacagaatttttgttaagaatatgacaagtcatctcacttatttatccaatgcattaggtattactaatccaactatatttcaacttgaagggacttttttgttttgtttcaaaataatgcattacttttttctctttgcttctgtatgaacctttatagagcaaatgaatatatgtatatggagttctgggttctagtgtcaattacataatcaaatttcataaaaggatgttagttactggctatgttgtcctaaaatttacacacactaaaaaatgtctgtcaagttgtacctttaacctgttcatagctttagggaattaagtttcttaaaccaaattatgaaaaaataacttaatggaatcttctaaaaggaaaaagtataaaaagctttctgaatgatattaccccttatacctaaaggctcaagatgcttgaatatggttcaacttttccaaagttaataaacaagggatgatgaaa

SEQ ID NO: 162881 - DNA, 2971 bp, Homo sapiens
  Payload ID: 12089
  Gene Symbol: OGN
  Gene Name: osteoglycin
  Uniprot ID: P20774
  ENST ID: ENST00000262551
  CDS Start-End: 422-1318
gctaatgcacagacatgaacatctattgaggaaaaccacaaaaaacttcaaaacagctacaacggtatcctaagaatatttcaattaaatattagtatgtctgctgaaggcacttaattattaagaaacttaaaattatcaatctttcttgaatttctgatagagaagtaaaactattttccaaaactatttttcagaatgttcactgatacataaaaactgctagcatctaattaaagatcactaagggttaaatactgttctctggcccttactgcgcacaccctgccaaaacatcctctaagcttttaaatattgcttcgatggtctgaatttttatttccagggaaaaagagagttttgtcccacagtcagcaggccactagtttattaacttccagtcaccttgatttttgctaaaatgaagactctgcagtctacacttctcctgttactgcttgtgcctctgataaagccagcaccaccaacccagcaggactcacgcattatctatgattatggaacagataattttgaagaatccatatttagccaagattatgaggataaatacctggatggaaaaaatattaaggaaaaagaaactgtgataatacccaatgagaaaagtcttcaattacaaaaagatgaggcaataacaccattacctcccaagaaagaaaatgatgaaatgcccacgtgtctgctgtgtgtttgtttaagtggctctgtatactgtgaagaagttgacattgatgctgtaccacccttaccaaaggaatcagcctatctttacgcacgattcaacaaaattaaaaagctgactgccaaagattttgcagacatacctaacttaagaagactcgattttacaggaaatttgatagaagatatagaagatggtactttttcaaaactttctctgttagaagaactttcacttgctgaaaatcaactactaaaacttccagttcttcctcccaagctcactttatttaatgcaaaatacaacaaaatcaagagtaggggaatcaaagcaaatgcattcaaaaaactgaataacctcaccttcctctacttggaccataatgccctggaatccgtgcctcttaatttaccagaaagtctacgtgtaattcatcttcagttcaacaacatagcttcaattacagatgacacattctgcaaggctaatgacaccagttacatccgggaccgcattgaagagatacgcctggagggcaatccaatcgtcctgggaaagcatccaaacagttttatttgcttaaaaagattaccgatagggtcatacttttaacctctattggtacaacatataaatgaaagtacacctacactaatagtctgtctcaacaatgagtaaaggaacttaagtattggtttaatattaaccttgtatctcattttgaaggaatttaatattttaagcaaggatgttcaaaatcttacatataataagtaaaaagtaagactgaatgtctacgttcgaaacaaagtaatatgaaaatatttaaacagcattacaaaatcctagtttatactagactaccatttaaaaatcatgtttttatataaatgcccaaatttgagatgcattattcctattactaatgatgtaagtacgaggataaatccaagaaactttcaactctttgcctttcctggcctttactggatcccaaaagcatttaaggtacatgttccaaaaactttgaaaagctaaatgtttcccatgatcgctcattcttcttttatgattcatacgttattccttataaagtaagaactttgttttcctcctatcaaggcagctattttattaaatttttcacttagtctgagaaatagcagatagtctcatatttaggaaaactttccaaataaaataaatgttattctctgataaagagctaatacagaaatgttcaagttattttactttctggtaatgtcttcagtaaaatattttctttatctaaatattaacattctaagtctaccaaaaaaagttttaaactcaagcaggccaaaaccaatatgcttataagaaataatgaaaagttcatccatttctgataaagttctctatggcaaagtctttcaaatacgagataactgcaaaatattttccttttatactacagaaatgagaatctcatcaataaattagttcaagcataagatgaaaacagaatattctgtggtgccagtgcacactaccttcccacccatacacatccatgttcactgtaacaaactgaatattcacaataaagcttctgagtaacactttctgattactcatgataaactgacatggctaactgcaagaattaaatcttctatctgagagtaataatttatgatgactcagtggtgccagagtaaagtttctaaaataacattcctctcacttgtaccccactaaaagtattagactacacattacattgaagttaaacacaaaattatcagtgttttagaaacatgagtccggactgtgtaagtaaaagtacaaacattatttccaccataaagtatgtattgaaatcaagttgtctctgtgtacagaatacatacttattcccatttttaagcatttgcttctgttttccctacctagaatgtcagatgtttttcagttatctccccatttgtcaaagttgacctcaagataacatttttcattaaagcatctgagatctaagaacacaattattattctaacaatgattattagctcattcacttattttgataactaatgatcacagctattatactactttctcgttattttgtgtgcatgcctcatttccctgacttaaacctcactgagagcgcaaaatgcagctttatactttttactttcaattgcctagcacaatagtgagtacatttgaattgaatatataataaatattgcaaaataaaatccatctaaatagaa

SEQ ID NO: 162882 - DNA, 2743 bp, Homo sapiens
  Payload ID: 12089
  Gene Symbol: OGN
  Gene Name: osteoglycin
  Uniprot ID: P20774
  ENST ID: ENST00000375561
  CDS Start-End: 194-1090
actcagcagtttgaaatcaagacatagcttttctcattcaccctcccacttggggctaatgcacagacatgaacatctattgaggaaaaccacaaaaaacttcaaaacagctacaacgggaaaaagagagttttgtcccacagtcagcaggccactagtttattaacttccagtcaccttgatttttgctaaaatgaagactctgcagtctacacttctcctgttactgcttgtgcctctgataaagccagcaccaccaacccagcaggactcacgcattatctatgattatggaacagataattttgaagaatccatatttagccaagattatgaggataaatacctggatggaaaaaatattaaggaaaaagaaactgtgataatacccaatgagaaaagtcttcaattacaaaaagatgaggcaataacaccattacctcccaagaaagaaaatgatgaaatgcccacgtgtctgctgtgtgtttgtttaagtggctctgtatactgtgaagaagttgacattgatgctgtaccacccttaccaaaggaatcagcctatctttacgcacgattcaacaaaattaaaaagctgactgccaaagattttgcagacatacctaacttaagaagactcgattttacaggaaatttgatagaagatatagaagatggtactttttcaaaactttctctgttagaagaactttcacttgctgaaaatcaactactaaaacttccagttcttcctcccaagctcactttatttaatgcaaaatacaacaaaatcaagagtaggggaatcaaagcaaatgcattcaaaaaactgaataacctcaccttcctctacttggaccataatgccctggaatccgtgcctcttaatttaccagaaagtctacgtgtaattcatcttcagttcaacaacatagcttcaattacagatgacacattctgcaaggctaatgacaccagttacatccgggaccgcattgaagagatacgcctggagggcaatccaatcgtcctgggaaagcatccaaacagttttatttgcttaaaaagattaccgatagggtcatacttttaacctctattggtacaacatataaatgaaagtacacctacactaatagtctgtctcaacaatgagtaaaggaacttaagtattggtttaatattaaccttgtatctcattttgaaggaatttaatattttaagcaaggatgttcaaaatcttacatataataagtaaaaagtaagactgaatgtctacgttcgaaacaaagtaatatgaaaatatttaaacagcattacaaaatcctagtttatactagactaccatttaaaaatcatgtttttatataaatgcccaaatttgagatgcattattcctattactaatgatgtaagtacgaggataaatccaagaaactttcaactctttgcctttcctggcctttactggatcccaaaagcatttaaggtacatgttccaaaaactttgaaaagctaaatgtttcccatgatcgctcattcttcttttatgattcatacgttattccttataaagtaagaactttgttttcctcctatcaaggcagctattttattaaatttttcacttagtctgagaaatagcagatagtctcatatttaggaaaactttccaaataaaataaatgttattctctgataaagagctaatacagaaatgttcaagttattttactttctggtaatgtcttcagtaaaatattttctttatctaaatattaacattctaagtctaccaaaaaaagttttaaactcaagcaggccaaaaccaatatgcttataagaaataatgaaaagttcatccatttctgataaagttctctatggcaaagtctttcaaatacgagataactgcaaaatattttccttttatactacagaaatgagaatctcatcaataaattagttcaagcataagatgaaaacagaatattctgtggtgccagtgcacactaccttcccacccatacacatccatgttcactgtaacaaactgaatattcacaataaagcttctgagtaacactttctgattactcatgataaactgacatggctaactgcaagaattaaatcttctatctgagagtaataatttatgatgactcagtggtgccagagtaaagtttctaaaataacattcctctcacttgtaccccactaaaagtattagactacacattacattgaagttaaacacaaaattatcagtgttttagaaacatgagtccggactgtgtaagtaaaagtacaaacattatttccaccataaagtatgtattgaaatcaagttgtctctgtgtacagaatacatacttattcccatttttaagcatttgcttctgttttccctacctagaatgtcagatgtttttcagttatctccccatttgtcaaagttgacctcaagataacatttttcattaaagcatctgagatctaagaacacaattattattctaacaatgattattagctcattcacttattttgataactaatgatcacagctattatactactttctcgttattttgtgtgcatgcctcatttccctgacttaaacctcactgagagcgcaaaatgcagctttatactttttactttcaattgcctagcacaatagtgagtacatttgaattgaatatataataaatattgcaaaataaaatccatctaaatagaa

SEQ ID NO: 162883 - DNA, 825 bp, Homo sapiens
  Payload ID: 12089
  Gene Symbol: OGN
  Gene Name: osteoglycin
  ENST ID: ENST00000447356
  CDS Start-End: 22-825
gcatttcaccctagagaaagaatgctggcaaagatctctaccacatggaaactgttcttaaagctgctgggccctgaaattttactcagcagtttgaaatcaagacatagcttttctcattcaccctcccacttggggctaatgcacagacatgaacatctattgaggaaaaccacaaaaaacttcaaaacagctacaacgactctgcagtctacacttctcctgttactgcttgtgcctctgataaagccagcaccaccaacccagcaggactcacgcattatctatgattatggaacagataattttgaagaatccatatttagccaagattatgaggataaatacctggatggaaaaaatattaaggaaaaagaaactgtgataatacccaatgagaaaagtcttcaattacaaaaagatgaggcaataacaccattacctcccaagaaagaaaatgatgaaatgcccacgtgtctgctgtgtgtttgtttaagtggctctgtatactgtgaagaagttgacattgatgctgtaccacccttaccaaaggaatcagcctatctttacgcacgattcaacaaaattaaaaagctgactgccaaagattttgcagacatacctaacttaagaagactcgattttacaggaaatttgatagaagatatagaagatggtactttttcaaaactttctctgttagaagaactttcacttgctgaaaatcaactactaaaacttccagttcttcctcccaagctcactttatttaatgcaaaatacaacaaaatcaagagtaggggaatcaaagcaaatgcattcaaa

SEQ ID NO: 162884 - DNA, 2449 bp, Homo sapiens
  Payload ID: 12090
  Gene Symbol: OMD
  Gene Name: osteomodulin
  Uniprot ID: Q99983
  ENST ID: ENST00000375550
  CDS Start-End: 277-1542
gaccaagaacacaagcatcttaatttgaatccacaaagtttcatgtaatgaaaagaaatacataattttaattcaacccgagtgttttccaagaagattgtatttgcttaaattgctacagtaattcaagagacagccctgtctggacacagagttactgtggatttttaagagactcagttaaagaatttaggaatttctgattcatttaaaggatttacaaattcatcaacccctgaaaactaaagcaaattgaacaggaaaaaaaaaaagaagatgggttttttaagtccaatatatgttattttcttcttttttggagtcaaagtacattgccaatatgaaacttatcagtgggatgaagactatgaccaagagccagatgatgattaccaaacaggattcccatttcgtcaaaatgtagactacggagttccttttcatcagtatactttaggctgtgtcagtgaatgcttctgtccaactaactttccatcatcaatgtactgtgataatcgcaaactcaagactatcccaaatattccgatgcacattcagcaactctaccttcagttcaatgaaattgaggctgtgactgcaaattcattcatcaatgcaactcatcttaaagaaattaacctcagccacaacaaaattaaatctcaaaagattgattatggtgtgtttgctaagcttccaaatctactacaacttcatctagagcataataatttagaagaatttccatttcctcttcctaaatctctggaaagactccttcttggttacaatgaaatctccaaactgcagacaaatgctatggatgggctagtaaacttgaccatgcttgatctctgttataattatcttcatgattctctgctaaaagacaaaatctttgccaaaatggaaaaactaatgcagctcaacctctgcagtaacagattagaatcaatgcctcctggtttgccttcttcacttatgtatctgtctttagaaaataattcaatttcttctatacccgaaaaatacttcgacaaacttccaaaacttcatactctaagaatgtcacacaacaaactacaagacatcccatataatatttttaatcttcccaacattgtagaactcagtgttggacacaacaaattgaagcaagcattctatattccaagaaatttggaacacctatacctacaaaataatgaaatagaaaagatgaatcttacagtgatgtgtccttctattgacccactacattaccaccatttaacatacattcgtgtggaccaaaataaactaaaagaaccaataagctcatacatcttcttctgcttccctcatatacacactatttattatggtgaacaacgaagcactaatggtcaaacaatacaactaaagacacaagttttcaggagatttccagatgatgatgatgaaagtgaagatcacgatgatcctgacaatgctcatgagagcccagaacaagaaggagcagaagggcactttgaccttcattattatgaaaatcaagaatagcaagaaactatataggtatacacttacgacttcacaaaacctatacttaatatagtaaatctaagtaaacatgtattactcaaagtaatatatttagaattatgtattagtataagatcagaattgaatttaagttgttggtgacatctgcatcatttcataggattagaacttactcaaaataatgtaaatctttaaaaatataaattagaatgacaagtgggaatcataaattaaacgttaatggtttcttatgctctttttaaatatagaaatatcatgttaaagaaagtgagtgtatcatttctattaacagtaatttttctaaaaatgaggaaggaagtagcattagcagtaaagacccacaggccatgacctttttgatcactctgaggacaatatttaaatgacaggaaggtatattaatgtaacaagcattcatttaaggaatagaccattttctctgacctcttcttcaggaaagctttcacactggtatttgtgatctcaccattatgacatccatccccctagctcaccacatagcacatagaatgatatttttgatttgtaagaggccatccaggtactaaggacccaaggcatacagattcacaaaattaactaatctttttgcctcagaataccaaaacaacaaaattataaagctgtatttggacaactaaaaaacaccaaactatctcattgcaatttgtattttagcagatttcagcaactatcctaaacaatgttattgtgttccattttaactgggataaatgtttttgtaaaaatacaaccatagaaaggcctctttgttacaaaatgatttgcaaagaaataactgctttgtttgcaagattaaattagtgttggcaaaataaagttctaaagataatactaaaca

SEQ ID NO: 162885 - DNA, 4467 bp, Homo sapiens
  Payload ID: 12091
  Gene Symbol: OSTM1
  Gene Name: osteopetrosis associated transmembrane protein 1
  Uniprot ID: Q86WC4
  ENST ID: ENST00000193322
  CDS Start-End: 87-1091
gcggaaaccggaagcggcggctgtccgcggtgccggctgggggcggagaggcggcggtgggctccctggggtgtgtgagcccggtgatggagccgggcccgacagccgcgcagcggaggtgttcgttgccgccgtggctgccgctggggctgctgctgtggtcggggctggccctgggcgcgctccccttcggcagcagtccgcacagggtcttccacgacctcctgtcggagcagcagttgctggaggtggaggacttgtccctgtccctcctgcagggtggagggctggggcctctgtcgctgcccccggacctgccggatctggatcctgagtgccgggagctcctgctggacttcgccaacagcagcgcagagctgacagggtgtctggtgcgcagcgcccggcccgtgcgcctctgtcagacctgctaccccctcttccaacaggtcgtcagcaagatggacaacatcagccgagccgcggggaatacttcagagagtcagagttgtgccagaagtctcttaatggcagatagaatgcaaatagttgtgattctctcagaattttttaataccacatggcaggaggcaaattgtgcaaattgtttaacaaacaacagtgaagaattatcaaacagcacagtatatttccttaatctatttaatcacaccctgacctgctttgaacataaccttcaggggaatgcacatagtcttttacagacaaaaaattattcagaagtatgcaaaaactgccgtgaagcatacaaaactctgagtagtctgtacagtgaaatgcaaaaaatgaatgaacttgagaataaggctgaacctggaacacatttatgcattgatgtggaagatgcaatgaacatcactcgaaaactatggagtcgaactttcaactgttcagtcccttgcagtgacacagtgcctgtaattgctgtttctgtgttcattctctttctacctgttgtcttctaccttagtagctttcttcactcagagcaaaagaaacgcaaactcattctgcccaaacgtctcaagtccagtaccagttttgcaaatattcaggaaaattcaaactgagacctacaaaatggagaattgacatatcacgtgaatgaatggtggaagacacaacttggtttcagaaagaagataaactgtgatttgacaagtcaagctcttaagaaatacaaggacttcagatccatttttaaataagaattttcgatttttctttccttttccacttctttctaacagatttggatatttttaatttccaggcatagcaatgttatctattttaatgtgtatttgtcacaataacagaacatgcaagaacaatcattattttattttataggcatttgattactattctagacttctggtatcttcttactaacataaatatctcaagtagaaaagtttttgaaaactaacatttaaaaattaatcagttacagtaaagactttgaaaaagaaatgtacttgttaggaagtagcttaattaccccccattgcagtattattgttatatatatagttaatatgttgtacatcacaataatatataattcagtctctagtttccctagagtcatttttgaaaccactgattgcaaacctccctgacaatttttaaaagtagtaagccacattacatttatctttgtaaaaagatttatggtaactggtttcttacttgacttttataaatagtattttacatcttatttttgcctttatttcataagtaatttaaaaatcactggattgctttattatattcagggcaatatggattatttttataccaaggatttgcatcgtgaattacattaagttatttggcaatttataatttattactactttaaatcaaatgtagcattatcacactgtatttaaattgtcattttttaaaggaatattttcttcttaagatatatagaggattttggagaagagagacaggaggggtaaaaccagcttaaggttcagcgagcagaaagggacctgagaggatgctcactgtaagactgttggacagtggtgtgtattgaggggatgaatcggaacgatagtctcatgcagaaaatagtgagattaagatcatccttattgtttctaaattatttcaatcagatgaaagtgatacgattgaaatgaaatcacatagttcgtgctcagaaattctattttggtatgtttgtattagcctttagaaaaaacactccgtttcagaattgttcacagttttatttcttaggtttttagagttcaggatttcatttattaatttcttcttgcttttttggtggaaataggctttgttgtaaacattaagaatataaaatctcctctatatagaaacaagaattttgttaaaaagagaatttgaatcccttcctatactataaaatgctctatagggagacaaagtgtttcttttttcttttatgtttactgtttatgtggagtgaaatataaggctcttggatgtataacatactcaaaagctgttacactttctctgatctgctgtgatccactgaaaatgtgctggggtttgttctgctgtcactgtttatgctgctggaacttagcactgtcttgatttgaagcatatgattgagagccatttgaagcaatcttcattaatgcagataaaacaagtttacatgtgcagagttagaaaatgacatgttcaattctgtaagtggtgactttttgagcacctttcagtattatgtatttgtaaaaaccattgtttttggatataaagctaataagcactttaaaaaggaaaaggcagcctttactattttttctggttgagtcattgctctttagacctagcatcagcaatagatttcaaagataagtattaagcgctaccctaaagtgtgtaagtttttcattttgtcatattgaaaaatgatttgcatagtactgaatgttgacacacagcttatatgtatttacaagaatatctttaagtgtttttttgacacattaaaataaaggaaataaggaaattgtaagctttatttggatttttaaatacatttttaaaatttcagatgtaatttaacatcacatttgtttttcaggtattgagtttagatgcctacttttatgagtaccatcagctggacacagtgtctcatacctgtatttgcagcactttgggaggctgaagcagatcgctggagcttatgagttcgagaccagcctggacaacatagtgaaacactgtctctgcaaaaaatacaaaaattagctgggtatggtggtaagtgcctgtagtcctagctacttgggaggctgagatgggaggatgtcttgagcccgggaggtggaggttgcaatgagccaagattgtaccactgcattccaacctgggcgacagagccagaccttgtctcaaaaaaaaaaaaaaaaaaagaaaaaagaaagtactgtctgtcttaaattttgctgcaaataaaaatgtactttggattatttattgttgaacttgagagatagaaataacatcagatatattttttcttttttttttataattaattttttttttttttttttttgtagagacagtgtctcactatgttgcccaagctggtcttgaactcctgagttcaagagatcctcctgccttagcctcccaaagtgctgggattacaagcataagcaccacacctggctgaacatcagatattttaaagtgtagcccagagtctagttggtaaatgttacttatattgggactagtattttctaatgtttctgggatatgctccctataaaatgaaatgttttcctggaacaatgctaattaggattgcattcctggccaaagacatgacatcaaataagtaatagacatcaccagcaatgaattttgaaaagcaaaaaatactattaacctatataaccatttaaaatttaaaaaattatgttccaagtacctctattttctgagctagaagaaaccttagaggccatctgatgatagattcccagagctggatggatccctagggactacctaatctgactttctgtccactgcatggattcttctaaaaagtatgtcacttatttccctaccttattaagactaaataagtggaacatcatagagctctttatttataacagtcattctttgatagtcaactcttaaatggagacttgagatgcttaaatattgtactactgtgcttatcttgtaaagatttcataaaatgatagtattggttattttaaaaaggctttggcttatgctgaattatacatgtagcaccaaaatgttacaactctactaaatttccttgttctaaactattatattagctataataaatattagtcatacatgtaacatgtttaatgacaaataactttctttatctccttggaattaaagagggcttttaaaagataa

SEQ ID NO: 162886 - DNA, 724 bp, Homo sapiens
  Payload ID: 12091
  Gene Symbol: OSTM1
  Gene Name: osteopetrosis associated transmembrane protein 1
  ENST ID: ENST00000440575
  CDS Start-End: 207-724
tgggagtgtggctctgtgcgtgcgtgatgagtgccagatagattcgcggaagaaattgggtggctgtgtgctggcgtgtgattgtgcgcgccggacatggccatgtgagttggttcattcttggtccggtgccccttctgttgggtaaaacttggatctggcccgagaatacttcagagagtcagagttgtgccagaagtctcttaatggcagatagaatgcaaatagttgtgattctctcagaattttttaataccacatggcaggaggcaaattgtgcaaattgtttaacaaacaacagtgaagaattatcaaacagcacagtatatttccttaatctatttaatcacaccctgacctgctttgaacataaccttcaggggaatgcacatagtcttttacagacaaaaaattattcagaagtatgcaaaaactgccgtgaagcatacaaaactctgagtagtctgtacagtgaaatgcaaaaaatgaatgaacttgagaataaggctgaacctggaacacatttatgcattgatgtggaagatgcaatgaacatcactcgaaaactatggagtcgaactttcaactgttcagtcccttgcagtgacacagtgcctgtaattgctgtttctgtgttcattctctttctacctgttgtcttctaccttagtagctttcttcactcagagcaaaagaaacgcaaactcattctgcccaaacgtct

SEQ ID NO: 162887 - DNA, 2505 bp, Homo sapiens
  Payload ID: 12092
  Gene Symbol: OS9
  Gene Name: osteosarcoma amplified 9, endoplasmic reticulum lectin
  Uniprot ID: Q13438
  ENST ID: ENST00000257966
  CDS Start-End: 18-1859
aagaaggggaacgaaagatggcggcggaaacgctgctgtccagtttgttaggactgctgcttctgggactcctgttacccgcaagtctgaccggcggtgtcgggagcctgaacctggaggagctgagtgagatgcgttatgggatcgagatcctgccgttgcctgtcatgggagggcagagccaatcttcggacgtggtgattgtctcctctaagtacaaacagcgctatgagtgtcgcctgccagctggagctattcacttccagcgtgaaagggaggaggaaacacctgcttaccaagggcctgggatccctgagttgttgagcccaatgagagatgctccctgcttgctgaagacaaaggactggtggacatatgaattctgttatggacgccacatccagcaataccacatggaagattcagagatcaaaggtgaagtcctctatctcggctactaccaatcagccttcgactgggatgatgaaacagccaaggcctccaagcagcatcgtcttaaacgctaccacagccagacctatggcaatgggtccaagtgcgaccttaatgggaggccccgggaggccgaggttcggttcctctgtgacgagggtgcaggtatctctggggactacatcgatcgcgtggacgagcccttgtcctgctcttatgtgctgaccattcgcactcctcggctctgcccccaccctctcctccggcccccacccagtgctgcaccgcaggccatcctctgtcacccttccctacagcctgaggagtacatggcctacgttcagaggcaagccgtagactcaaagcagtatggagataaaatcatagaggagctgcaagatctaggcccccaagtgtggagtgagaccaagtctggggtggcaccccaaaagatggcaggtgcgagcccgaccaaggatgacagtaaggactcagatttctggaagatgcttaatgagccagaggaccaggccccaggaggggaggaggtgccggctgaggagcaggacccaagccctgaggcagcagattcagcttctggtgctcccaatgattttcagaacaacgtgcaggtcaaagtcattcgaagccctgcggatttgattcgattcatagaggagctgaaaggtggaacaaaaaaggggaagccaaatataggccaagagcagcctgtggatgatgctgcagaagtccctcagagggaaccagagaaggaaaggggtgatccagaacggcagagagagatggaagaagaggaggatgaggatgaggatgaggatgaagatgaggatgaacggcagttactgggagaatttgagaaggaactggaagggatcctgcttccgtcagaccgagaccggctccgttcggaggtgaaggctggcatggagcgggaactggaaaacatcatccaggagacagagaaagagctggacccagatgggctgaagaaggagtcagagcgggatcgggcaatgctggctctcacatccactctcaacaaactcatcaaaagactggaggaaaaacagagtccagagctggtgaagaagcacaagaaaaagagggttgtccccaaaaagcctcccccatcaccccaacctacagggaaaattgagatcaaaattgtccgcccatgggctgaagggactgaagagggtgcacgttggctgactgatgaggacacgagaaacctcaaggagatcttcttcaatatcttggtgccgggagctgaagaggcccagaaggaacgccagcggcagaaagagctggagagcaattaccgccgggtgtggggctctccaggtggggagggcacaggggacctggacgaatttgacttctgagaccaacactacacttgacccttcacggaatccagactcttcctggactggcttgcctcctccccacctccccaccctggaacccctgagggccaaacagcagagtggagctgagctgtggacctctcgggcaactctgtgggtgtgggggccctgggtgaatgctgctgcccctgctggcagccaccttgagacctcaccgggcctgtgatatttgctctcctgaactctcactcaatcctcttcctctcctctgtggcttttcctgttattgtcccctaatgataggatattccctgctgcctacctggagattcagtaggatcttttgagtggaggtgggtagagagagcaaggagggcaggacacttagcaggcactgagcaagcaggcccccacctgcccttagtgatgtttggagtcgttttaccctcttctattgaattgccttgggatttccttctccctttccctgcccaccctgtcccctacaatttgtgcttctgagttgaggagccttcacctctgttgctgaggaaatggtagaatgctgcctatcacctccagcacaatcccagtgaaaaaggtgtgaagcacccaccatgttcttgaacaatcaggtttctaaataaacaactggaccatc

SEQ ID NO: 162888 - DNA, 2691 bp, Homo sapiens
  Payload ID: 12092
  Gene Symbol: OS9
  Gene Name: osteosarcoma amplified 9, endoplasmic reticulum lectin
  Uniprot ID: Q13438
  ENST ID: ENST00000315970
  CDS Start-End: 42-2045
agggcggaaacagattctctgcataagaaggggaacgaaagatggcggcggaaacgctgctgtccagtttgttaggactgctgcttctgggactcctgttacccgcaagtctgaccggcggtgtcgggagcctgaacctggaggagctgagtgagatgcgttatgggatcgagatcctgccgttgcctgtcatgggagggcagagccaatcttcggacgtggtgattgtctcctctaagtacaaacagcgctatgagtgtcgcctgccagctggagctattcacttccagcgtgaaagggaggaggaaacacctgcttaccaagggcctgggatccctgagttgttgagcccaatgagagatgctccctgcttgctgaagacaaaggactggtggacatatgaattctgttatggacgccacatccagcaataccacatggaagattcagagatcaaaggtgaagtcctctatctcggctactaccaatcagccttcgactgggatgatgaaacagccaaggcctccaagcagcatcgtcttaaacgctaccacagccagacctatggcaatgggtccaagtgcgaccttaatgggaggccccgggaggccgaggttcggttcctctgtgacgagggtgcaggtatctctggggactacatcgatcgcgtggacgagcccttgtcctgctcttatgtgctgaccattcgcactcctcggctctgcccccaccctctcctccggcccccacccagtgctgcaccgcaggccatcctctgtcacccttccctacagcctgaggagtacatggcctacgttcagaggcaagccgactcaaagcagtatggagataaaatcatagaggagctgcaagatctaggcccccaagtgtggagtgagaccaagtctggggtggcaccccaaaagatggcaggtgcgagcccgaccaaggatgacagtaaggactcagatttctggaagatgcttaatgagccagaggaccaggccccaggaggggaggaggtgccggctgaggagcaggacccaagccctgaggcagcagattcagcttctggtgctcccaatgattttcagaacaacgtgcaggtcaaagtcattcgaagccctgcggatttgattcgattcatagaggagctgaaaggtggaacaaaaaaggggaagccaaatataggccaagagcagcctgtggatgatgctgcagaagtccctcagagggaaccagagaaggaaaggggtgatccagaacggcagagagagatggaagaagaggaggatgaggatgaggatgaggatgaagatgaggatgaacggcagttactgggagaatttgagaaggaactggaagggatcctgcttccgtcagaccgagaccggctccgttcggaggtgaaggctggcatggagcgggaactggaaaacatcatccaggagacagagaaagagctggacccagatgggctgaagaaggagtcagagcgggatcgggcaatgctggctctcacatccactctcaacaaactcatcaaaagactggaggaaaaacagagtccagagctggtgaagaagcacaagaaaaagagggttgtccccaaaaagcctcccccatcaccccaacctacagaggaggatcctgagcacagagtccgggtccgggtcaccaagctccgtctcggaggccctaatcaggatctgactgtcctcgagatgaaacgggaaaacccacagctgaaacaaatcgaggggctggtgaaggagctgctggagagggagggactcacagctgcagggaaaattgagatcaaaattgtccgcccatgggctgaagggactgaagagggtgcacgttggctgactgatgaggacacgagaaacctcaaggagatcttcttcaatatcttggtgccgggagctgaagaggcccagaaggaacgccagcggcagaaagagctggagagcaattaccgccgggtgtggggctctccaggtggggagggcacaggggacctggacgaatttgacttctgagaccaacactacacttgacccttcacggaatccagactcttcctggactggcttgcctcctccccacctccccaccctggaacccctgagggccaaacagcagagtggagctgagctgtggacctctcgggcaactctgtgggtgtgggggccctgggtgaatgctgctgcccctgctggcagccaccttgagacctcaccgggcctgtgatatttgctctcctgaactctcactcaatcctcttcctctcctctgtggcttttcctgttattgtcccctaatgataggatattccctgctgcctacctggagattcagtaggatcttttgagtggaggtgggtagagagagcaaggagggcaggacacttagcaggcactgagcaagcaggcccccacctgcccttagtgatgtttggagtcgttttaccctcttctattgaattgccttgggatttccttctccctttccctgcccaccctgtcccctacaatttgtgcttctgagttgaggagccttcacctctgttgctgaggaaatggtagaatgctgcctatcacctccagcacaatcccagtgaaaaaggtgtgaagcacccaccatgttcttgaacaatcaggtttctaaataaacaactggaccatc

SEQ ID NO: 162889 - DNA, 2457 bp, Homo sapiens
  Payload ID: 12092
  Gene Symbol: OS9
  Gene Name: osteosarcoma amplified 9, endoplasmic reticulum lectin
  Uniprot ID: Q13438
  ENST ID: ENST00000389142
  CDS Start-End: 16-1809
gaaggggaacgaaagatggcggcggaaacgctgctgtccagtttgttaggactgctgcttctgggactcctgttacccgcaagtctgaccggcggtgtcgggagcctgaacctggaggagctgagtgagatgcgttatgggatcgagatcctgccgttgcctgtcatgggagggcagagccaatcttcggacgtggtgattgtctcctctaagtacaaacagcgctatgagtgtcgcctgccagctggagctattcacttccagcgtgaaagggaggaggaaacacctgcttaccaagggcctgggatccctgagttgttgagcccaatgagagatgctccctgcttgctgaagacaaaggactggtggacatatgaattctgttatggacgccacatccagcaataccacatggaagattcagagatcaaaggtgaagtcctctatctcggctactaccaatcagccttcgactgggatgatgaaacagccaaggcctccaagcagcatcgtcttaaacgctaccacagccagacctatggcaatgggtccaagtgcgaccttaatgggaggccccgggaggccgaggttcggttcctctgtgacgagggtgcaggtatctctggggactacatcgatcgcgtggacgagcccttgtcctgctcttatgtgctgaccattcgcactcctcggctctgcccccaccctctcctccggcccccacccagtgctgcaccgcaggccatcctctgtcacccttccctacagcctgaggagtacatggcctacgttcagaggcaagccgactcaaagcagtatggagataaaatcatagaggagctgcaagatctaggcccccaagtgtggagtgagaccaagtctggggtggcaccccaaaagatggcaggtgcgagcccgaccaaggatgacagtaaggactcagatttctggaagatgcttaatgagccagaggaccaggccccaggaggggaggaggtgccggctgaggagcaggacccaagccctgaggcagcagattcagcttctggtgctcccaatgattttcagaacaacgtgcaggtcaaagtcattcgaagccctgcggatttgattcgattcatagaggagctgaaaggtggaacaaaaaaggggaagccaaatataggccaagagcagcctgtggatgatgctgcagaagtccctcagagggaaccagagaaggaaaggggtgatccagaacggcagagagagatggaagaagaggaggatgaggatgaggatgaggatgaagatgaggatgaacggcagttactgggagaatttgagaaggaactggaagggatcctgcttccgtcagaccgagaccggctccgttcggagacagagaaagagctggacccagatgggctgaagaaggagtcagagcgggatcgggcaatgctggctctcacatccactctcaacaaactcatcaaaagactggaggaaaaacagagtccagagctggtgaagaagcacaagaaaaagagggttgtccccaaaaagcctcccccatcaccccaacctacagggaaaattgagatcaaaattgtccgcccatgggctgaagggactgaagagggtgcacgttggctgactgatgaggacacgagaaacctcaaggagatcttcttcaatatcttggtgccgggagctgaagaggcccagaaggaacgccagcggcagaaagagctggagagcaattaccgccgggtgtggggctctccaggtggggagggcacaggggacctggacgaatttgacttctgagaccaacactacacttgacccttcacggaatccagactcttcctggactggcttgcctcctccccacctccccaccctggaacccctgagggccaaacagcagagtggagctgagctgtggacctctcgggcaactctgtgggtgtgggggccctgggtgaatgctgctgcccctgctggcagccaccttgagacctcaccgggcctgtgatatttgctctcctgaactctcactcaatcctcttcctctcctctgtggcttttcctgttattgtcccctaatgataggatattccctgctgcctacctggagattcagtaggatcttttgagtggaggtgggtagagagagcaaggagggcaggacacttagcaggcactgagcaagcaggcccccacctgcccttagtgatgtttggagtcgttttaccctcttctattgaattgccttgggatttccttctccctttccctgcccaccctgtcccctacaatttgtgcttctgagttgaggagccttcacctctgttgctgaggaaatggtagaatgctgcctatcacctccagcacaatcccagtgaaaaaggtgtgaagcacccaccatgttcttgaacaatcaggtttctaaataaacaactggaccatcaa

SEQ ID NO: 162890 - DNA, 2091 bp, Homo sapiens
  Payload ID: 12092
  Gene Symbol: OS9
  Gene Name: osteosarcoma amplified 9, endoplasmic reticulum lectin
  Uniprot ID: Q13438
  ENST ID: ENST00000389146
  CDS Start-End: 18-1976
aagaaggggaacgaaagatggcggcggaaacgctgctgtccagtttgttaggactgctgcttctgggactcctgttacccgcaagtctgaccggcggtgtcgggagcctgaacctggaggagctgagtgagatgcgttatgggatcgagatcctgccgttgcctgtcatgggagggcagagccaatcttcggacgtggtgattgtctcctctaagtacaaacagcgctatgagtgtcgcctgccagctggagctattcacttccagcgtgaaagggaggaggaaacacctgcttaccaagggcctgggatccctgagttgttgagcccaatgagagatgctccctgcttgctgaagacaaaggactggtggacatatgaattctgttatggacgccacatccagcaataccacatggaagattcagagatcaaaggtgaagtcctctatctcggctactaccaatcagccttcgactgggatgatgaaacagccaaggcctccaagcagcatcgtcttaaacgctaccacagccagacctatggcaatgggtccaagtgcgaccttaatgggaggccccgggaggccgaggttcggttcctctgtgacgagggtgcaggtatctctggggactacatcgatcgcgtggacgagcccttgtcctgctcttatgtgctgaccattcgcactcctcggctctgcccccaccctctcctccggcccccacccagtgctgcaccgcaggccatcctctgtcacccttccctacagcctgaggagtacatggcctacgttcagaggcaagccgactcaaagcagtatggagataaaatcatagaggagctgcaagatctaggcccccaagtgtggagtgagaccaagtctggggtggcaccccaaaagatggcaggtgcgagcccgaccaaggatgacagtaaggactcagatttctggaagatgcttaatgagccagaggaccaggccccaggaggggaggaggtgccggctgaggagcaggacccaagccctgaggcagcagattcagcttctggtgctcccaatgattttcagaacaacgtgcaggtcaaagtcattcgaagccctgcggatttgattcgattcatagaggagctgaaaggtggaacaaaaaaggggaagccaaatataggccaagagcagcctgtggatgatgctgcagaagtccctcagagggaaccagagaaggaaaggggtgatccagaacggcagagagagatggaagaagaggaggatgaggatgaggatgaggatgaagatgaggatgaacggcagttactgggagaatttgagaaggaactggaagggatcctgcttccgtcagaccgagaccggctccgttcggagacagagaaagagctggacccagatgggctgaagaaggagtcagagcgggatcgggcaatgctggctctcacatccactctcaacaaactcatcaaaagactggaggaaaaacagagtccagagctggtgaagaagcacaagaaaaagagggttgtccccaaaaagcctcccccatcaccccaacctacagaggaggatcctgagcacagagtccgggtccgggtcaccaagctccgtctcggaggccctaatcaggatctgactgtcctcgagatgaaacgggaaaacccacagctgaaacaaatcgaggggctggtgaaggagctgctggagagggagggactcacagctgcagggaaaattgagatcaaaattgtccgcccatgggctgaagggactgaagagggtgcacgttggctgactgatgaggacacgagaaacctcaaggagatcttcttcaatatcttggtgccgggagctgaagaggcccagaaggaacgccagcggcagaaagagctggagagcaattaccgccgggtgtggggctctccaggtggggagggcacaggggacctggacgaatttgacttctgagaccaacactacacttgacccttcacggaatccagactcttcctggactggcttgcctcctccccacctccccaccctggaacccctgagggccaaacagcagagtggagctgag

SEQ ID NO: 162891 - DNA, 2346 bp, Homo sapiens
  Payload ID: 12092
  Gene Symbol: OS9
  Gene Name: osteosarcoma amplified 9, endoplasmic reticulum lectin
  Uniprot ID: Q13438
  ENST ID: ENST00000435406
  CDS Start-End: 18-1700
aagaaggggaacgaaagatggcggcggaaacgctgctgtccagtttgttaggactgctgcttctgggactcctgttacccgcaagtctgaccggcggtgtcgggagcctgaacctggaggagctgagtgagatgcgttatgggatcgagatcctgccgttgcctgtcatgggagggcagagccaatcttcggacgtggtgattgtctcctctaagtacaaacagcgctatgagtgtcgcctgccagctggagctattcacttccagcgtgaaagggaggaggaaacacctgcttaccaagggcctgggatccctgagttgttgagcccaatgagagatgctccctgcttgctgaagacaaaggactggtggacatatgaattctgttatggacgccacatccagcaataccacatggaagattcagagatcaaaggtgaattcctctgtgacgagggtgcaggtatctctggggactacatcgatcgcgtggacgagcccttgtcctgctcttatgtgctgaccattcgcactcctcggctctgcccccaccctctcctccggcccccacccagtgctgcaccgcaggccatcctctgtcacccttccctacagcctgaggagtacatggcctacgttcagaggcaagccgactcaaagcagtatggagataaaatcatagaggagctgcaagatctaggcccccaagtgtggagtgagaccaagtctggggtggcaccccaaaagatggcaggtgcgagcccgaccaaggatgacagtaaggactcagatttctggaagatgcttaatgagccagaggaccaggccccaggaggggaggaggtgccggctgaggagcaggacccaagccctgaggcagcagattcagcttctggtgctcccaatgattttcagaacaacgtgcaggtcaaagtcattcgaagccctgcggatttgattcgattcatagaggagctgaaaggtggaacaaaaaaggggaagccaaatataggccaagagcagcctgtggatgatgctgcagaagtccctcagagggaaccagagaaggaaaggggtgatccagaacggcagagagagatggaagaagaggaggatgaggatgaggatgaggatgaagatgaggatgaacggcagttactgggagaatttgagaaggaactggaagggatcctgcttccgtcagaccgagaccggctccgttcggaggtgaaggctggcatggagcgggaactggaaaacatcatccaggagacagagaaagagctggacccagatgggctgaagaaggagtcagagcgggatcgggcaatgctggctctcacatccactctcaacaaactcatcaaaagactggaggaaaaacagagtccagagctggtgaagaagcacaagaaaaagagggttgtccccaaaaagcctcccccatcaccccaacctacagggaaaattgagatcaaaattgtccgcccatgggctgaagggactgaagagggtgcacgttggctgactgatgaggacacgagaaacctcaaggagatcttcttcaatatcttggtgccgggagctgaagaggcccagaaggaacgccagcggcagaaagagctggagagcaattaccgccgggtgtggggctctccaggtggggagggcacaggggacctggacgaatttgacttctgagaccaacactacacttgacccttcacggaatccagactcttcctggactggcttgcctcctccccacctccccaccctggaacccctgagggccaaacagcagagtggagctgagctgtggacctctcgggcaactctgtgggtgtgggggccctgggtgaatgctgctgcccctgctggcagccaccttgagacctcaccgggcctgtgatatttgctctcctgaactctcactcaatcctcttcctctcctctgtggcttttcctgttattgtcccctaatgataggatattccctgctgcctacctggagattcagtaggatcttttgagtggaggtgggtagagagagcaaggagggcaggacacttagcaggcactgagcaagcaggcccccacctgcccttagtgatgtttggagtcgttttaccctcttctattgaattgccttgggatttccttctccctttccctgcccaccctgtcccctacaatttgtgcttctgagttgaggagccttcacctctgttgctgaggaaatggtagaatgctgcctatcacctccagcacaatcccagtgaaaaaggtgtgaagcacccaccatgttcttgaacaatcaggtttctaaataaacaactggaccatc

SEQ ID NO: 162892 - DNA, 1946 bp, Homo sapiens
  Payload ID: 12092
  Gene Symbol: OS9
  Gene Name: osteosarcoma amplified 9, endoplasmic reticulum lectin
  Uniprot ID: Q13438
  ENST ID: ENST00000439210
  CDS Start-End: 20-1636
ataagaaggggaacgaaagatggcggcggaaacgctgctgtccagtttgttaggactgctgcttctgggactcctgttacccgcaagtctgaccggcggtgtcgggagcctgaacctggaggagctgagtgagatgcgttatgggatcgagatcctgccgttgcctgtcatgggagggcagacaaaggactggtggacatatgaattctgttatggacgccacatccagcaataccacatggaagattcagagatcaaaggtgaagtcctctatctcggctactaccaatcagccttcgactgggatgatgaaacagccaaggcctccaagcagcatcgtcttaaacgctaccacagccagacctatggcaatgggtccaagtgcgaccttaatgggaggccccgggaggccgaggttcggttcctctgtgacgagggtgcaggtatctctggggactacatcgatcgcgtggacgagcccttgtcctgctcttatgtgctgaccattcgcactcctcggctctgcccccaccctctcctccggcccccacccagtgctgcaccgcaggccatcctctgtcacccttccctacagcctgaggagtacatggcctacgttcagaggcaagccgactcaaagcagtatggagataaaatcatagaggagctgcaagatctaggcccccaagtgtggagtgagaccaagtctggggtggcaccccaaaagatggcaggtgcgagcccgaccaaggatgacagtaaggactcagatttctggaagatgcttaatgagccagaggaccaggccccaggaggggaggaggtgccggctgaggagcaggacccaagccctgaggcagcagattcagcttctggtgctcccaatgattttcagaacaacgtgcaggtcaaagtcattcgaagccctgcggatttgattcgattcatagaggagctgaaaggtggaacaaaaaaggggaagccaaatataggccaagagcagcctgtggatgatgctgcagaagtccctcagagggaaccagagaaggaaaggggtgatccagaacggcagagagagatggaagaagaggaggatgaggatgaggatgaggatgaagatgaggatgaacggcagttactgggagaatttgagaaggaactggaagggatcctgcttccgtcagaccgagaccggctccgttcggagacagagaaagagctggacccagatgggctgaagaaggagtcagagcgggatcgggcaatgctggctctcacatccactctcaacaaactcatcaaaagactggaggaaaaacagagtccagagctggtgaagaagcacaagaaaaagagggttgtccccaaaaagcctcccccatcaccccaacctacagggaaaattgagatcaaaattgtccgcccatgggctgaagggactgaagagggtgcacgttggctgactgatgaggacacgagaaacctcaaggagatcttcttcaatatcttggtgccgggagctgaagaggcccagaaggaacgccagcggcagaaagagctggagagcaattaccgccgggtgtggggctctccaggtggggagggcacaggggacctggacgaatttgacttctgagaccaacactacacttgacccttcacggaatccagactcttcctggactggcttgcctcctccccacctccccaccctggaacccctgagggccaaacagcagagtggagctgagctgtggacctctcgggcaactctgtgggtgtgggggccctgggtgaatgctgctgcccctgctggcagccaccttgagacctcaccgggcctgtgatatttgctctcctgaactctcactcaatcctcttcctctcctctgtggcttttcctgttattgtcccctaatgataggatattccctgctgcctacctg

SEQ ID NO: 162893 - DNA, 1660 bp, Homo sapiens
  Payload ID: 12092
  Gene Symbol: OS9
  Gene Name: osteosarcoma amplified 9, endoplasmic reticulum lectin
  ENST ID: ENST00000413095
  CDS Start-End: 18-1238
aagaaggggaacgaaagatggcggcggaaacgctgctgtccagtttgttaggactgctgcttctgggactcctgttacccgcaagtctgaccggcggtgtcgggagcctgaacctggaggagctgagtgagatgcgttatgggatcgagatcctgccgttgcctgtcatgggagggcagagccaatcttcggacgtggtgattgtctcctctaagtacaaacagcgctatgagtgtcgcctgccagctggagctattcacttccagcgtgaaagggaggaggaaacacctgcttaccaagggcctgggatccctgagttgttgagcccaatgagagatgctccctgcttgctgaagacaaaggactggtggacatatgaattctgttatggacgccacatccagcaataccacatggaagattcagcttctggtgctcccaatgattttcagaacaacgtgcaggtcaaagtcattcgaagccctgcggatttgattcgattcatagaggagctgaaaggtggaacaaaaaaggggaagccaaatataggccaagagcagcctgtggatgatgctgcagaagtccctcagagggaaccagagaaggaaaggggtgatccagaacggcagagagagatggaagaagaggaggatgaggatgaggatgaggatgaagatgaggatgaacggcagttactgggagaatttgagaaggaactggaagggatcctgcttccgtcagaccgagaccggctccgttcggaggtgaaggctggcatggagcgggaactggaaaacatcatccaggagacagagaaagagctggacccagatgggctgaagaaggagtcagagcgggatcgggcaatgctggctctcacatccactctcaacaaactcatcaaaagactggaggaaaaacagagtccagagctggtgaagaagcacaagaaaaagagggttgtccccaaaaagcctcccccatcaccccaacctacagggaaaattgagatcaaaattgtccgcccatgggctgaagggactgaagagggtgcacgttggctgactgatgaggacacgagaaacctcaaggagatcttcttcaatatcttggtgccgggagctgaagaggcccagaaggaacgccagcggcagaaagagctggagagcaattaccgccgggtgtggggctctccaggtggggagggcacaggggacctggacgaatttgacttctgagaccaacactacacttgacccttcacggaatccagactcttcctggactggcttgcctcctccccacctccccaccctggaacccctgagggccaaacagcagagtggagctgagctgtggacctctcgggcaactctgtgggtgtgggggccctgggtgaatgctgctgcccctgctggcagccaccttgagacctcaccgggcctgtgatatttgctctcctgaactctcactcaatcctcttcctctcctctgtggcttttcctgttattgtcccctaatgataggatattccctgctgcctacctggagattcagtaggatcttttgagtggaggtgggtagagagagcaaggagggcaggacacttagcaggcactgagcaagcaggcccccacctgcccttagtgatgtttggagt

SEQ ID NO: 162894 - DNA, 583 bp, Homo sapiens
  Payload ID: 12092
  Gene Symbol: OS9
  Gene Name: osteosarcoma amplified 9, endoplasmic reticulum lectin
  ENST ID: ENST00000547079
  CDS Start-End: 26-583
ctctgcataagaaggggaacgaaagatggcggcggaaacgctgctgtccagtttgttaggactgctgcttctgggactcctgttacccgcaagtctgaccggcggtgtcgggagcctgaacctggaggagctgagtgagatgcgttatgggatcgagatcctgccgttgcctgtcatgggagggcagagccaatcttcggacgtggtgattgtctcctctaagtacaaacagcgctatgagtgtcgcctgccagctggagctattcacttccagcgtgaaagggaggaggaaacacctgcttaccaagggcctgggatccctgagttgttgagcccaatgagagatgctccctgcttgctgaagacaaaggactggtggacatatgaattctgttatggacgccacatccagcaataccacatggaagggatcctgcttccgtcagaccgagaccggctccgttcggaggtgaaggctggcatggagcgggaactggaaaacatcatccaggagacagagaaagagctggacccagatgggctgaagaaggagtcagagcgggatcgggcaatgctggctctc

SEQ ID NO: 162895 - DNA, 609 bp, Homo sapiens
  Payload ID: 12092
  Gene Symbol: OS9
  Gene Name: osteosarcoma amplified 9, endoplasmic reticulum lectin
  ENST ID: ENST00000552423
  CDS Start-End: 3-380
agatggcggcggaaacgctgctgtccagtttgttaggactgctgcttctgggactcctgttacccgcaagtctgaccggcggtgtcgggagcctgaacctggaggagctgagtgagatgcgttatgggatcgagatcctgccgttgcctgtcatgggagggcagagccaatcttcggacgtggtgattgtctcctctaagtacaaacagcgctatgagtgtcgcctgccagctggagctattcacttccagcgtgaaagggaggaggaaacacctgcttaccaagggcctgggatccctgagttgttgagcccaatgagagatgctccctgcttgctgaagggaggaatggaaagaccacaagtggaaaacagactttagagatatctctccaagtcacagaaggaaagcagccctccctccttactgaaagtctggagaattgagagtggaagtgaagggaagagaattgagtgtacaaaggactggtggacatatgaattctgttatggacgccacatccagcaataccacatggaagattcagagatcaaaggtgaagtcctctatctcggctactaccaatcagccttcgactgggatgatgaaa

SEQ ID NO: 162896 - DNA, 962 bp, Homo sapiens
  Payload ID: 12092
  Gene Symbol: OS9
  Gene Name: osteosarcoma amplified 9, endoplasmic reticulum lectin
  ENST ID: ENST00000552787
  CDS Start-End: 24-464
ctgcataagaaggggaacgaaagatggcggcggaaacgctgctgtccagtttgttaggactgctgcttctgggactcctgttacccgcaagtctgaccggcggtgtcgggagcctgaacctggaggagctgagtgagatgcgttatgggatcgagatcctgccgttgcctgtcatgggagggcagagccaatcttcggacgtggtgattgtctcctctaagtacaaacagcgctatgagtgtcgcctgccagctggagctattcacttccagcgtgaaagggaggaggaaacacctgcttaccaagggcctgggatccctgagttgttgagcccaatgagagatgctccctgcttgctgaagacaaaggactggtggacatatgaattctgttatggacgccacatccagcaataccacatggaagattcagagatcaaaggcctccaagcagcatcgtcttaaacgctaccacagccagacctatggcaatgggtccaagtgcgaccttaatgggaggccccgggaggccgaggttcggttcctctgtgacgagggtgcaggtatctctggggactacatcgatcgcgtggacgagcccttgtcctgctcttatgtgctgaccattcgcactcctcggctctgcccccaccctctcctccggcccccacccagtgctgcaccgcaggccatcctctgtcacccttccctacagcctgaggagtacatggcctacgttcagaggcaagccggtgagtaattagagaaggaggagaagacggggagatacgggggcagggggtggcaaaagatcaagtattgaatagctggaggaatgtgttcctggcctgcttgcatgctgtttctcagtagactcaaagcagtatggagataaaatcatagaggagctgcaagatctaggcccccaagtgtggagtgagaccaagtctggggtggcacccc

SEQ ID NO: 162897 - DNA, 503 bp, Homo sapiens
  Payload ID: 12092
  Gene Symbol: OS9
  Gene Name: osteosarcoma amplified 9, endoplasmic reticulum lectin
  ENST ID: ENST00000550372
  CDS Start-End: 17-503
agaaggggaacgaaagatggcggcggaaacgctgctgtccagtttgttaggactgctgcttctgggactcctgttacccgcaagtctgaccggcggtgtcgggagcctgaacctggaggagctgagtgagatgcgttatgggatcgagatcctgccgttgcctgtcatgggagggcagagccaatcttcggacgtggtgattgtctcctctaagtacaaacagcgctatgagtgtcgcctgccagctggagctattcacttccagcgtgaaagggaggaggaaacacctgcttaccaagggcctgggatccctgagttgttgagcccaatgagagatgctccctgcttgctgaagacctatggcaatgggtccaagtgcgaccttaatgggaggccccgggaggccgaggttcggttcctctgtgacgagggtgcaggtatctctggggactacatcgatcgcgtggacgagcccttgtcctgctcttatgtgctgaccattc

SEQ ID NO: 162898 - DNA, 2246 bp, Homo sapiens
  Payload ID: 12092
  Gene Symbol: OS9
  Gene Name: osteosarcoma amplified 9, endoplasmic reticulum lectin
  Uniprot ID: Q13438
  ENST ID: ENST00000551035
  CDS Start-End: 18-1760
aagaaggggaacgaaagatggcggcggaaacgctgctgtccagtttgttaggactgctgcttctgggactcctgttacccgcaagtctgaccggcggtgtcgggagcctgaacctggaggagctgagtgagatgcgttatgggatcgagatcctgccgttgcctgtcatgggagggcagagccaatcttcggacgtggtgattgtctcctctaagtacaaacagcgctatgagtgtcgcctgccagctggagctattcacttccagcgtgaaagggaggaggaaacacctgcttaccaagggcctgggatccctgagttgttgagcccaatgagagatgctccctgcttgctgaagacaaaggactggtggacatatgaattctgttatggacgccacatccagcaataccacatggaagattcagagatcaaaggtgaagtcctctatctcggctactaccaatcagccttcgactgggatgatgaaacagccaagttcctctgtgacgagggtgcaggtatctctggggactacatcgatcgcgtggacgagcccttgtcctgctcttatgtgctgaccattcgcactcctcggctctgcccccaccctctcctccggcccccacccagtgctgcaccgcaggccatcctctgtcacccttccctacagcctgaggagtacatggcctacgttcagaggcaagccgtagactcaaagcagtatggagataaaatcatagaggagctgcaagatctaggcccccaagtgtggagtgagaccaagtctggggtggcaccccaaaagatggcaggtgcgagcccgaccaaggatgacagtaaggactcagatttctggaagatgcttaatgagccagaggaccaggccccaggaggggaggaggtgccggctgaggagcaggacccaagccctgaggcagcagattcagcttctggtgctcccaatgattttcagaacaacgtgcaggtcaaagtcattcgaagccctgcggatttgattcgattcatagaggagctgaaaggtggaacaaaaaaggggaagccaaatataggccaagagcagcctgtggatgatgctgcagaagtccctcagagggaaccagagaaggaaaggggtgatccagaacggcagagagagatggaagaagaggaggatgaggatgaggatgaggatgaagatgaggatgaacggcagttactgggagaatttgagaaggaactggaagggatcctgcttccgtcagaccgagaccggctccgttcggaggtgaaggctggcatggagcgggaactggaaaacatcatccaggagacagagaaagagctggacccagatgggctgaagaaggagtcagagcgggatcgggcaatgctggctctcacatccactctcaacaaactcatcaaaagactggaggaaaaacagagtccagagctggtgaagaagcacaagaaaaagagggttgtccccaaaaagcctcccccatcaccccaacctacagggaaaattgagatcaaaattgtccgcccatgggctgaagggactgaagagggtgcacgttggctgactgatgaggacacgagaaacctcaaggagatcttcttcaatatcttggtgccgggagctgaagaggcccagaaggaacgccagcggcagaaagagctggagagcaattaccgccgggtgtggggctctccaggtggggagggcacaggggacctggacgaatttgacttctgagaccaacactacacttgacccttcacggaatccagactcttcctggactggcttgcctcctccccacctccccaccctggaacccctgagggccaaacagcagagtggagctgagctgtggacctctcgggcaactctgtgggtgtgggggccctgggtgaatgctgctgcccctgctggcagccaccttgagacctcaccgggcctgtgatatttgctctcctgaactctcactcaatcctcttcctctcctctgtggcttttcctgttattgtcccctaatgataggatattccctgctgcctacctggagattcagtaggatcttttgagtggaggtgggtagagagagcaaggagggcaggacacttagcaggcactgagcaagcaggcccccacctgcccttagtgatgtttggagtcgttttaccctcttctattgaattgccttgggatttccttctccctttccctgcccaccctgtc

SEQ ID NO: 162899 - DNA, 558 bp, Homo sapiens
  Payload ID: 12092
  Gene Symbol: OS9
  Gene Name: osteosarcoma amplified 9, endoplasmic reticulum lectin
  ENST ID: ENST00000550848
  CDS Start-End: 31-258
agattctctgcataagaaggggaacgaaagatggcggcggaaacgctgctgtccagtttgttaggactgctgcttctgggactcctgttacccgcaagtctgaccggcggtgtcgggagcctgaacctggaggagctgagtgagatgcgttatgggatcgagatcctgccgttgcctgtcatgggagggcagcctttctttgcttccttgccccccgaccctcccttctttcccagagccaatcttcggacgtggtgattgtctcctctaagtacaaacagcgctatgagtgtcgcctgccagctggagctattcacttccagcgtgaaagggaggaggaaacacctgcttaccaagggcctgggatccctgagttgttgagcccaatgagagatgctccctgcttgctgaagacaaaggactggtggacatatgaattctgttatggacgccacatccagcaataccacatggaagattcagagatcaaaggtgaagtcctctatctcggctactaccaatcagccttcgactgggatgatgaaacagccaaggcct

SEQ ID NO: 162900 - DNA, 583 bp, Homo sapiens
  Payload ID: 12092
  Gene Symbol: OS9
  Gene Name: osteosarcoma amplified 9, endoplasmic reticulum lectin
  ENST ID: ENST00000551285
  CDS Start-End: 20-247
ataagaaggggaacgaaagatggcggcggaaacgctgctgtccagtttgttaggactgctgcttctgggactcctgttacccgcaagtctgaccggcggtgtcgggagcctgaacctggaggagctgagtgagatgcgttatgggatcgagatcctgccgttgcctgtcatgggagggcagcctttctttgcttccttgccccccgaccctcccttctttcccagagccaatcttcggacgtggtgattgtctcctctaagtacaaacagcgctatgagtgtcgcctgccagctggagctattcacttccagcgtgaaagggaggaggaaacacctgcttaccaagggcctgggatccctgagttgttgagcccaatgagagatgctccctgcttgctgaagacaaaggactggtggacatatgaattctgttatggacgccacatccagcaataccacatggaagattcagagatcaaaggtgaagtcctctatctcggctactaccaatcagccttcgactgggatgatgaaacagccaaggtggcaagagtgtgggattcaggaagaaagggttctggcc

SEQ ID NO: 162901 - DNA, 2135 bp, Homo sapiens
  Payload ID: 12092
  Gene Symbol: OS9
  Gene Name: osteosarcoma amplified 9, endoplasmic reticulum lectin
  Uniprot ID: Q13438
  ENST ID: ENST00000552285
  CDS Start-End: 208-2046
ctgaccaatcacggacagcgattgatatttctaatcgtcgtgatccacctccccaggaccttggagccacgtttacaaataggaatagggtacgtgggagggatagaacgtacagccaataaaatcatgtggcgccgatgggcgtgttgaggccgctgcctggcttagggcggaaacagattctctgcataagaaggggaacgaaagatggcggcggaaacgctgctgtccagtttgttaggactgctgcttctgggactcctgttacccgcaagtctgaccggcggtgtcgggagcctgaacctggaggagctgagtgagatgcgttatgggatcgagatcctgccgttgcctgtcatgggagggcagagccaatcttcggacgtggtgattgtctcctctaagtacaaacagcgctatgagtgtcgcctgccagctggagctattcacttccagcgtgaaagggaggaggaaacacctgcttaccaagggcctgggatccctgagttgttgagcccaatgagagatgctccctgcttgctgaagacaaaggactggtggacatatgaattctgttatggacgccacatccagcaataccacatggaagattcagagatcaaaggtgaagtcctctatctcggctactaccaatcagccttcgactgggatgatgaaacagccaaggcctccaagcagcatcgtcttaaacgctaccacagccagacctatggcaatgggtccaagtgcgaccttaatgggaggccccgggaggccgaggttcggttcctctgtgacgagggtgcaggtatctctggggactacatcgatcgcgtggacgagcccttgtcctgctcttatgtgctgaccattcgcactcctcggctctgcccccaccctctcctccggcccccacccagtgctgcaccgcaggccatcctctgtcacccttccctacagcctgaggagtacatggcctacgttcagaggcaagccgactcaaagcagtatggagataaaatcatagaggagctgcaagatctaggcccccaagtgtggagtgagaccaagtctggggtggcaccccaaaagatggcaggtgcgagcccgaccaaggatgacagtaaggactcagatttctggaagatgcttaatgagccagaggaccaggccccaggaggggaggaggtgccggctgaggagcaggacccaagccctgaggcagcagattcagcttctggtgctcccaatgattttcagaacaacgtgcaggtcaaagtcattcgaagccctgcggatttgattcgattcatagaggagctgaaaggtggaacaaaaaaggggaagccaaatataggccaagagcagcctgtggatgatgctgcagaagtccctcagagggaaccagagaaggaaaggggtgatccagaacggcagagagagatggaagaagaggaggatgaggatgaggatgaggatgaagatgaggatgaacggcagttactgggagaatttgagaaggaactggaagggatcctgcttccgtcagaccgagaccggctccgttcggaggtgaaggctggcatggagcgggaactggaaaacatcatccaggagacagagaaagagctggacccagatgggctgaagaaggagtcagagcgggatcgggcaatgctggctctcacatccactctcaacaaactcatcaaaagactggaggaaaaacagagtccagagctggtgaagaagcacaagaaaaagagggttgtccccaaaaagcctcccccatcaccccaacctacagggaaaattgagatcaaaattgtccgcccatgggctgaagggactgaagagggtgcacgttggctgactgatgaggacacgagaaacctcaaggagatcttcttcaatatcttggtgccgggagctgaagaggcccagaaggaacgccagcggcagaaagagctggagagcaattaccgccgggtgtggggctctccaggtggggagggcacaggggacctggacgaatttgacttctgagaccaacactacacttgacccttcacggaatccagactcttcctggactggcttgcctcctccccacctccccaccctggaacccctga

SEQ ID NO: 162902 - DNA, 3471 bp, Homo sapiens
  Payload ID: 12093
  Gene Symbol: OTOA
  Gene Name: otoancorin
  Uniprot ID: Q7RTW8
  ENST ID: ENST00000286149
  CDS Start-End: 2-3463
aatgtctcaggaacctacgacatactcccttttcctattcctttttctgagccatggagtgtcgagttatacagtgccaaattccaggcaggatttgcatccattgttgcaaaacatggcggaagaaataatagatggaagctatctgaatgcactgctggatctcatacagtttcaaagctcccacgtgtggacggatgacctgtcccacagagtcctggcctatctgaattcccggaatgttgccttcaccatccccagcctgcaggcagccgtggaaaaccacctggagcagcgtctgcaccagccccagaagctgctggaggacctgaggaagacagacgcccagcagttccgcactgccatgaaatgcctcttagaagacaagaaggacggcttggacctgaaagacatcatcatcgacttaggagagattcgagaacgagccttgcagagccctggcgtgaaccgcagcctgtttctcatcacactggagaggtgtttccagatgctgaactccctggagtgtgtggagatcctgggcaaggtgctgagggggtcctcagggagctttctccagccagacatcacagagcggctccctcgggacctgcgcgaggatgcctttaagaacctatctgcagtgttcaaagatctctacgacaaaacctcggctcattcccagagagctctctattcctggatgactggaatactgcagacatcctccaatgccactgatgactctgcttcatgggtcagtgcggaacacttatgggttttgggcagatacatggttcacctatcgtttgaagaaattacgaaaattagtcctatagaaattgggctgtttatcagctatgacaacgccaccaagcagctggacatggtctatgacatcacacctgagctggcccaggcgtttctggagaggatcagctcctccaactttaacatgaggaatacctccaccatccacaggcaagcgcatgagctctgggccttggagccctttcccaagatgctggggctgctggtttgtttctacaatgacctggaattgctggatgccactgtggctcaagtcctgctttaccagatgatcaagtgcagccacctgaggggcttccaggctggcgtccagaagctcaaagcagaactcctggacattgccatggagaaccagaccctcaatgagaccctgggttctttgtcggatgcagttgtaggtttgacctacagccaactggaatccctctcccccgaggctgtgcacggagccatctccaccctcaaccaggtctcaggttgggccaagagccaggtcatcatcttgtctgccaaatacttggcccatgagaaggtgctgtctttctacaatgtcagccagatgggcgcactgctggctggggtcagcacccaggccttctgcagcatgaaacgcaaggacatctcgcaggtcctgagaagtgccgtctcccagtatgtatccgacttgtcacctgcccagcagcaaggtatcctcagcaagatggtccaagcggaagacactgccccaggcatcgtggagatacaaggggctttctttaaggaagtgtctctctttgatttaaggaggcaacctggattcaactctacagtcctgaaggataaggaacttggaaggagccaggctctgttcctgtatgagcttctgttaaagaccaccagaaggcctgaggagcttttgagtgctgggcagctggtcaaaggcgtgacctgctcacacattgatgccatgagcactgacttctttctggcccatttccaggattttcagaacaacttcgccctgctttcaccctatcaggttaattgtttggcgtggaaatactgggaagtttccagattgtctatgccacctttcctcttggctgcactcccggcccgctacctggcttctgtcccagcctcccagtgtgtgccctttctgatcagcctggggaagagctggttggactccttggttttagattcccacaaaaagacttcagtcctcaggaaagtgcagcagtgcctggacgactccattgctgatgagtacactgtggacatcatggggaacctgctgtgtcacttgccggcagccatcatcgacagggggatctcccccagggcttgggcgactgctctacacggcctcagagactgcccagacctcaaccctgagcaaaaggctgcagtgaggctcaagctcctgggacagtatggactccctcagcactggacagccgagaccacgaaggacttgggaccctttctagtacttttctcaggagatgaattaagctctatagccacaaagtttcctgagatccttctgcaagcagcttccaagatggccaggaccctgcccactaaagaattcctctgggctgtctttcagtctgttcggaacagcagtgataagatccccagctatgaccctatgcctggttgccatggagtcgtggccccctcttctgatgacatcttcaagttggccgaagccaacgcctgctgggccctggaggacctgcggtgcatggaggaagacacattcatcaggaccgtggaactgctgggagctgtccagggtttcagccggcctcagctgatgaccctgaaggagaaagcaatacaggtttgggacatgccatcttactggagagaacaccatatcgtctccctggggcgcattgctctggctcttaatgagagtgagctggagcagctggacctcagctccatagacactgtggcttccctaagctggcaaacagaatggaccccgggacaggctgaatccattttgcaagggtacctggatgattcaggatacagtatccaggacctgaagagctttcatttggtaggacttggtgcaaccctgtgtgctataaacatcactgaaatcccacttataaagatctcagaattcagggtggtagtggccagaattgggaccctgctctgcagcacacatgtcttagccgagtttaagaggaaggctgaagttgtgtttggggatcccactgagtggaccagttctgtcttgcaggagcttgggaccattgcagctggattaactaaggcagagctccggatgcttgacaaggatttgatgccatatttccagccatcagcaataaaatgccttcctgatgagatattcaaagagctgtccgcggagcagatcgcctccctgggtccggagaacgccgcggcggtgacccacgcccagcgccggcggctcagtccactgcagctgcagagcctccagcaggcgctagatggcgccaagactcactcctggcaggacgcgcccgctagcgccggtcccactagaacctcatcctcgcgttctcccgcaggagctctccagtcgtggggtctttggcttggttgtcccctgctggttctaatggccaagctcctgtggtgagtggcctg

SEQ ID NO: 162903 - DNA, 3466 bp, Homo sapiens
  Payload ID: 12093
  Gene Symbol: OTOA
  Gene Name: otoancorin
  Uniprot ID: Q7RTW8
  ENST ID: ENST00000388956
  CDS Start-End: 95-3277
ttcgcctgtattttgctcctgcgctggtagcttgggtttgggcacagtgccatctggggttctaaacttcctggacaaaggccagctgctgctgatgggaaactcaatcacctacagggaccaggcagccgtggaaaaccacctggagcagcgtctgcaccagccccagaagctgctggaggacctgaggaagacagacgcccagcagttccgcactgccatgaaatgcctcttagaagacaagaaggacggcttggacctgaaagacatcatcatcgacttaggagagattcgagaacgagccttgcagagccctggcgtgaaccgcagcctgtttctcatcacactggagaggtgtttccagatgctgaactccctggagtgtgtggagatcctgggcaaggtgctgagggggtcctcagggagctttctccagccagacatcacagagcggctccctcgggacctgcgcgaggatgcctttaagaacctatctgcagtgttcaaagatctctacgacaaaacctcggctcattcccagagagctctctattcctggatgactggaatactgcagacatcctccaatgccactgatgactctgcttcatgggtcagtgcggaacacttatgggttttgggcagatacatggttcacctatcgtttgaagaaattacgaaaattagtcctatagaaattgggctgtttatcagctatgacaacgccaccaagcagctggacatggtctatgacatcacacctgagctggcccaggcgtttctggagaggatcagctcctccaactttaacatgaggaatacctccaccatccacaggctggggctgctggtttgtttctacaatgacctggaattgctggatgccactgtggctcaagtcctgctttaccagatgatcaagtgcagccacctgaggggcttccaggctggcgtccagaagctcaaagcagaactcctggacattgccatggagaaccagaccctcaatgagaccctgggttctttgtcggatgcagttgtaggtttgacctacagccaactggaatccctctcccccgaggctgtgcacggagccatctccaccctcaaccaggtctcaggttgggccaagagccaggtcatcatcttgtctgccaaatacttggcccatgagaaggtgctgtctttctacaatgtcagccagatgggcgcactgctggctggggtcagcacccaggccttctgcagcatgaaacgcaaggacatctcgcaggtcctgagaagtgccgtctcccagtatgtatccgacttgtcacctgcccagcagcaaggtatcctcagcaagatggtccaagcggaagacactgccccaggcatcgtggagatacaaggggctttctttaaggaagtgtctctctttgatttaaggaggcaacctggattcaactctacagtcctgaaggataaggaacttggaaggagccaggctctgttcctgtatgagcttctgttaaagaccaccagaaggcctgaggagcttttgagtgctgggcagctggtcaaaggcgtgacctgctcacacattgatgccatgagcactgacttctttctggcccatttccaggattttcagaacaacttcgccctgctttcaccctatcaggttaattgtttggcgtggaaatactgggaagtttccagattgtctatgccacctttcctcttggctgcactcccggcccgctacctggcttctgtcccagcctcccagtgtgtgccctttctgatcagcctggggaagagctggttggactccttggttttagattcccacaaaaagacttcagtcctcaggaaagtgcagcagtgcctggacgactccattgctgatgagtacactgtggacatcatggggaacctgctgtgtcacttgccggcagccatcatcgacagggggatctcccccagggcttgggcgactgctctacacggcctcagagactgcccagacctcaaccctgagcaaaaggctgcagtgaggctcaagctcctgggacagtatggactccctcagcactggacagccgagaccacgaaggacttgggaccctttctagtacttttctcaggagatgaattaagctctatagccacaaagtttcctgagatccttctgcaagcagcttccaagatggccaggaccctgcccactaaagaattcctctgggctgtctttcagtctgttcggaacagcagtgataagatccccagctatgaccctatgcctggttgccatggagtcgtggccccctcttctgatgacatcttcaagttggccgaagccaacgcctgctgggccctggaggacctgcggtgcatggaggaagacacattcatcaggaccgtggaactgctgggagctgtccagggtttcagccggcctcagctgatgaccctgaaggagaaagcaatacaggtttgggacatgccatcttactggagagaacaccatatcgtctccctggggcgcattgctctggctcttaatgagagtgagctggagcagctggacctcagctccatagacactgtggcttccctaagctggcaaacagaatggaccccgggacaggctgaatccattttgcaagggtacctggatgattcaggatacagtatccaggacctgaagagctttcatttggtaggacttggtgcaaccctgtgtgctataaacatcactgaaatcccacttataaagatctcagaattcagggtggtagtggccagaattgggaccctgctctgcagcacacatgtcttagccgagtttaagaggaaggctgaagttgtgtttggggatcccactgagtggaccagttctgtcttgcaggagcttgggaccattgcagctggattaactaaggcagagctccggatgcttgacaaggatttgatgccatatttccagccatcagcaataaaatgccttcctgatgagatattcaaagagctgtccgcggagcagatcgcctccctgggtccggagaacgccgcggcggtgacccacgcccagcgccggcggctcagtccactgcagctgcagagcctccagcaggcgctagatggcgccaagactcactcctggcaggacgcgcccgctagcgccggtcccactagaacctcatcctcgcgttctcccgcaggagctctccagtcgtggggtctttggcttggttgtcccctgctggttctaatggccaagctcctgtggtgagtggcctgagcgcatcgtcctgtgttgccccaagcagctggccaacatgtgtagagacaggatgctccagatggtgggacacccttccctggatccagaccctcatctagggcagggaaaccctggggccttgatggtgaaaatgcaccccaaatgaaaaataattattaaaaatgatcttgcaaatta

SEQ ID NO: 162904 - DNA, 2703 bp, Homo sapiens
  Payload ID: 12093
  Gene Symbol: OTOA
  Gene Name: otoancorin
  Uniprot ID: Q7RTW8
  ENST ID: ENST00000388957
  CDS Start-End: 68-2515
ccccattccttggtctcgtctgagcagttaggttccgcctgtggttgcacatttggttcatctgaggatgttcaggctggggctgctggtttgtttctacaatgacctggaattgctggatgccactgtggctcaagtcctgctttaccagatgatcaagtgcagccacctgaggggcttccaggctggcgtccagaagctcaaagcagaactcctggacattgccatggagaaccagaccctcaatgagaccctgggttctttgtcggatgcagttgtaggtttgacctacagccaactggaatccctctcccccgaggctgtgcacggagccatctccaccctcaaccaggtctcaggttgggccaagagccaggtcatcatcttgtctgccaaatacttggcccatgagaaggtgctgtctttctacaatgtcagccagatgggcgcactgctggctggggtcagcacccaggccttctgcagcatgaaacgcaaggacatctcgcaggtcctgagaagtgccgtctcccagtatgtatccgacttgtcacctgcccagcagcaaggtatcctcagcaagatggtccaagcggaagacactgccccaggcatcgtggagatacaaggggctttctttaaggaagtgtctctctttgatttaaggaggcaacctggattcaactctacagtcctgaaggataaggaacttggaaggagccaggctctgttcctgtatgagcttctgttaaagaccaccagaaggcctgaggagcttttgagtgctgggcagctggtcaaaggcgtgacctgctcacacattgatgccatgagcactgacttctttctggcccatttccaggattttcagaacaacttcgccctgctttcaccctatcaggttaattgtttggcgtggaaatactgggaagtttccagattgtctatgccacctttcctcttggctgcactcccggcccgctacctggcttctgtcccagcctcccagtgtgtgccctttctgatcagcctggggaagagctggttggactccttggttttagattcccacaaaaagacttcagtcctcaggaaagtgcagcagtgcctggacgactccattgctgatgagtacactgtggacatcatggggaacctgctgtgtcacttgccggcagccatcatcgacagggggatctcccccagggcttgggcgactgctctacacggcctcagagactgcccagacctcaaccctgagcaaaaggctgcagtgaggctcaagctcctgggacagtatggactccctcagcactggacagccgagaccacgaaggacttgggaccctttctagtacttttctcaggagatgaattaagctctatagccacaaagtttcctgagatccttctgcaagcagcttccaagatggccaggaccctgcccactaaagaattcctctgggctgtctttcagtctgttcggaacagcagtgataagatccccagctatgaccctatgcctggttgccatggagtcgtggccccctcttctgatgacatcttcaagttggccgaagccaacgcctgctgggccctggaggacctgcggtgcatggaggaagacacattcatcaggaccgtggaactgctgggagctgtccagggtttcagccggcctcagctgatgaccctgaaggagaaagcaatacaggtttgggacatgccatcttactggagagaacaccatatcgtctccctggggcgcattgctctggctcttaatgagagtgagctggagcagctggacctcagctccatagacactgtggcttccctaagctggcaaacagaatggaccccgggacaggctgaatccattttgcaagggtacctggatgattcaggatacagtatccaggacctgaagagctttcatttggtaggacttggtgcaaccctgtgtgctataaacatcactgaaatcccacttataaagatctcagaattcagggtggtagtggccagaattgggaccctgctctgcagcacacatgtcttagccgagtttaagaggaaggctgaagttgtgtttggggatcccactgagtggaccagttctgtcttgcaggagcttgggaccattgcagctggattaactaaggcagagctccggatgcttgacaaggatttgatgccatatttccagccatcagcaataaaatgccttcctgatgagatattcaaagagctgtccgcggagcagatcgcctccctgggtccggagaacgccgcggcggtgacccacgcccagcgccggcggctcagtccactgcagctgcagagcctccagcaggcgctagatggcgccaagactcactcctggcaggacgcgcccgctagcgccggtcccactagaacctcatcctcgcgttctcccgcaggagctctccagtcgtggggtctttggcttggttgtcccctgctggttctaatggccaagctcctgtggtgagtggcctgagcgcatcgtcctgtgttgccccaagcagctggccaacatgtgtagagacaggatgctccagatggtgggacacccttccctggatccagaccctcatctagggcagggaaaccctggggccttgatggtgaaaatgcaccccaaatgaaaaataattattaaaaatgatcttgcaaatt

SEQ ID NO: 162905 - DNA, 3610 bp, Homo sapiens
  Payload ID: 12093
  Gene Symbol: OTOA
  Gene Name: otoancorin
  Uniprot ID: Q7RTW8
  ENST ID: ENST00000388958
  CDS Start-End: 2-3421
aatgtctcaggaacctacgacatactcccttttcctattcctttttctgagccatggagtgtcgagttatacagtgccaaattccaggcaggatttgcatccattgttgcaaaacatggcggaagaaataatagatggaagctatctgaatgcactgctggatctcatacagtttcaaagctcccacgtgtggacggatgacctgtcccacagagtcctggcctatctgaattcccggaatgttgccttcaccatccccagcctgcaggcagccgtggaaaaccacctggagcagcgtctgcaccagccccagaagctgctggaggacctgaggaagacagacgcccagcagttccgcactgccatgaaatgcctcttagaagacaagaaggacggcttggacctgaaagacatcatcatcgacttaggagagattcgagaacgagccttgcagagccctggcgtgaaccgcagcctgtttctcatcacactggagaggtgtttccagatgctgaactccctggagtgtgtggagatcctgggcaaggtgctgagggggtcctcagggagctttctccagccagacatcacagagcggctccctcgggacctgcgcgaggatgcctttaagaacctatctgcagtgttcaaagatctctacgacaaaacctcggctcattcccagagagctctctattcctggatgactggaatactgcagacatcctccaatgccactgatgactctgcttcatgggtcagtgcggaacacttatgggttttgggcagatacatggttcacctatcgtttgaagaaattacgaaaattagtcctatagaaattgggctgtttatcagctatgacaacgccaccaagcagctggacatggtctatgacatcacacctgagctggcccaggcgtttctggagaggatcagctcctccaactttaacatgaggaatacctccaccatccacaggctggggctgctggtttgtttctacaatgacctggaattgctggatgccactgtggctcaagtcctgctttaccagatgatcaagtgcagccacctgaggggcttccaggctggcgtccagaagctcaaagcagaactcctggacattgccatggagaaccagaccctcaatgagaccctgggttctttgtcggatgcagttgtaggtttgacctacagccaactggaatccctctcccccgaggctgtgcacggagccatctccaccctcaaccaggtctcaggttgggccaagagccaggtcatcatcttgtctgccaaatacttggcccatgagaaggtgctgtctttctacaatgtcagccagatgggcgcactgctggctggggtcagcacccaggccttctgcagcatgaaacgcaaggacatctcgcaggtcctgagaagtgccgtctcccagtatgtatccgacttgtcacctgcccagcagcaaggtatcctcagcaagatggtccaagcggaagacactgccccaggcatcgtggagatacaaggggctttctttaaggaagtgtctctctttgatttaaggaggcaacctggattcaactctacagtcctgaaggataaggaacttggaaggagccaggctctgttcctgtatgagcttctgttaaagaccaccagaaggcctgaggagcttttgagtgctgggcagctggtcaaaggcgtgacctgctcacacattgatgccatgagcactgacttctttctggcccatttccaggattttcagaacaacttcgccctgctttcaccctatcaggttaattgtttggcgtggaaatactgggaagtttccagattgtctatgccacctttcctcttggctgcactcccggcccgctacctggcttctgtcccagcctcccagtgtgtgccctttctgatcagcctggggaagagctggttggactccttggttttagattcccacaaaaagacttcagtcctcaggaaagtgcagcagtgcctggacgactccattgctgatgagtacactgtggacatcatggggaacctgctgtgtcacttgccggcagccatcatcgacagggggatctcccccagggcttgggcgactgctctacacggcctcagagactgcccagacctcaaccctgagcaaaaggctgcagtgaggctcaagctcctgggacagtatggactccctcagcactggacagccgagaccacgaaggacttgggaccctttctagtacttttctcaggagatgaattaagctctatagccacaaagtttcctgagatccttctgcaagcagcttccaagatggccaggaccctgcccactaaagaattcctctgggctgtctttcagtctgttcggaacagcagtgataagatccccagctatgaccctatgcctggttgccatggagtcgtggccccctcttctgatgacatcttcaagttggccgaagccaacgcctgctgggccctggaggacctgcggtgcatggaggaagacacattcatcaggaccgtggaactgctgggagctgtccagggtttcagccggcctcagctgatgaccctgaaggagaaagcaatacaggtttgggacatgccatcttactggagagaacaccatatcgtctccctggggcgcattgctctggctcttaatgagagtgagctggagcagctggacctcagctccatagacactgtggcttccctaagctggcaaacagaatggaccccgggacaggctgaatccattttgcaagggtacctggatgattcaggatacagtatccaggacctgaagagctttcatttggtaggacttggtgcaaccctgtgtgctataaacatcactgaaatcccacttataaagatctcagaattcagggtggtagtggccagaattgggaccctgctctgcagcacacatgtcttagccgagtttaagaggaaggctgaagttgtgtttggggatcccactgagtggaccagttctgtcttgcaggagcttgggaccattgcagctggattaactaaggcagagctccggatgcttgacaaggatttgatgccatatttccagccatcagcaataaaatgccttcctgatgagatattcaaagagctgtccgcggagcagatcgcctccctgggtccggagaacgccgcggcggtgacccacgcccagcgccggcggctcagtccactgcagctgcagagcctccagcaggcgctagatggcgccaagactcactcctggcaggacgcgcccgctagcgccggtcccactagaacctcatcctcgcgttctcccgcaggagctctccagtcgtggggtctttggcttggttgtcccctgctggttctaatggccaagctcctgtggtgagtggcctgagcgcatcgtcctgtgttgccccaagcagctggccaacatgtgtagagacaggatgctccagatggtgggacacccttccctggatccagaccctcatctagggcagggaaaccctggggccttgatggtgaaaatgcaccccaaatgaaaaataattattaaaaatgatcttgcaaatta

SEQ ID NO: 162906 - DNA, 1782 bp, Homo sapiens
  Payload ID: 12094
  Gene Symbol: OC90
  Gene Name: otoconin 90
  Uniprot ID: Q02509
  ENST ID: ENST00000254627
  CDS Start-End: 88-1521
agcatcattcatccagctgcactccagtggagccttcacggagtccgttccagttgctgcctaagccccatcctttgttctcctgctatgattgcgtttctcctcaccagtgtgctgatgatcccccatgccggaggccatcctctggacactccacatcttccacaggagctgcctccaggactcccaaacaatatcaatatcactttcttcagtgggatgtttaaaaatgtggaaagtgtggctgaaatttttgattgcctgggcccccacttcacctggctgcaggctgtcttcaccaatttccctgtgctgatccagtttgtcaatggtatgaagtgtgtggctggtctctgcccccgagactttgaagactatggttgcacctgcaggtttgagatggaagggttgcctgtggatgaatctgacagctgctgcttccagcaccgcaggtgctatgaggaggccgctgagatggactgtctccaagaccccgccaaacttagcacagaggtcaattgtgtcagcaagaagatcatatgtgagtccaaggacaactgtgagcacctgctgtgtacctgtgataaggctgccatagagtgcttggctcgatccagcctcaactcttccctgaaccttctggacacctccttctgcctggctcagactccagagacaaccatcaaggaagacttgacaacacttctgcccagagtggttcctgtggagcccacagacaccagcctgacagccctttcaggagaagaagcaggccacgatcaggaaggagtgggagctgctagggctacgtcccctccaggatctgcagagatagttgcaacaagggttacagctaaaattgtaacccttgtccctgctggcattaaatctctggggctggcagtgtcatctgttgaaaatgatcctgaggagaccactgaaaaagcctgtgacagattcaccttcctgcacctgggaagtggggacaacatgcaggtgatgccacagcttggagagatgctcttttgtctgacatcccggtgcccggaggaatttgagtcttatggctgttactgtggacaagaaggaagaggcgagccaagggatgacctagacaggtgctgcttgtcccatcactgctgcctagagcaagtgagaaggctgggctgcctgcttgagaggcttccttggtcaccggtggtgtgtgtggatcatacgcccaagtgtgggggccaaagcctgtgtgagaagttgctctgtgcctgtgaccagacggcagctgagtgcatgacctctgcctcctttaaccaaagcctcaagtccccaagcagactcgggtgccctgggcagccagcagcctgtgaagacagcctgcaccctgtgcccgcagcccccaccctgggctccagctctgaggaggacagcgaggaggaccctccacaggaggacctcggcagagccaagaggtttctgcggaagtcactgggtcccttggggatcgggcctcttcatggaagatagatgcccagagaaaatggctaacaccttcagtagcgtggctcctgctccaccttcagctctttatctctcagcctcctctgtcccttggagccttcttcccttcctttaactcagaggcggggagggaacagaggccgtgagccctgcccatgcctcatcagctgtggtcacctcacaagccaatgtacacttggagaaggcacaccatggtacctccatgctcctttagtgcactgtggaagctcaataaatactccaatc

SEQ ID NO: 162907 - DNA, 7156 bp, Homo sapiens
  Payload ID: 12095
  Gene Symbol: OTOF
  Gene Name: otoferlin
  Uniprot ID: Q9HC10
  ENST ID: ENST00000272371
  CDS Start-End: 128-6121
atcggaggggggtcgggaggaggaggaggaggcagcggcagagaagagagaggcgtgtgagccgtgctccaccggctagctccttcccgctgctcctgcctggcagtgccaggcagcccacaccagcatggccttgctcatccacctcaagacagtctcggagctgcggggcaggggcgaccggatcgccaaagtgactttccgagggcaatccttctactctcgggtcctggagaactgtgaggatgtggctgactttgatgagacatttcggtggccggtggccagcagcatcgacagaaatgagatgctggagattcaggttttcaactacagcaaagtcttcagcaacaagctcatcgggaccttccgcatggtgctgcagaaggtggtagaggagagccatgtggaggtgactgacacgctgattgatgacaacaatgctatcatcaagaccagcctgtgcgtggaggtccggtatcaggccactgacggcacagtgggctcctgggacgatggggacttcctgggagatgagtctcttcaagaggaagagaaggacagccaagagacggatggactgctcccaggctcccggcccagctcccggcccccaggagagaagagcttccggagagccgggaggagcgtgttctccgccatgaagctcggcaaaaaccggtctcacaaggaggagccccaaagaccagatgaaccggcggtgctggagatggaagaccttgaccatctggccattcggctaggagatggactggatcccgactcggtgtctctagcctcagtcacagctctcaccactaatgtctccaacaagcgatctaagccagacattaagatggagccaagtgctgggcggcccatggattaccaggtcagcatcacggtgatcgaggcccggcagctggtgggcttgaacatggaccctgtggtgtgcgtggaggtgggtgacgacaagaagtacacatccatgaaggagtccactaactgcccctattacaacgagtacttcgtcttcgacttccatgtctctccggatgtcatgtttgacaagatcatcaagatttcggtgattcactccaagaacctgctgcgcagtggcaccctggtgggctccttcaaaatggacgtgggaaccgtgtactcgcagccagagcaccagttccatcacaagtgggccatcctgtctgaccccgatgacatctcctcggggctgaagggctacgtgaagtgtgacgttgccgtggtgggcaaaggggacaacatcaagacgccccacaaggccaatgagaccgacgaagatgacattgaggggaacttgctgctccccgagggggtgccccccgaacgccagtgggcccggttctatgtgaaaatttaccgagcagaggggctgccccgtatgaacacaagcctcatggccaatgtaaagaaggctttcatcggtgaaaacaaggacctcgtggacccctacgtgcaagtcttctttgctggccagaagggcaagacttcagtgcagaagagcagctatgagcccctgtggaatgagcaggtcgtctttacagacctcttccccccactctgcaaacgcatgaaggtgcagatccgagactcggacaaggtcaacgacgtggccatcggcacccacttcattgacctgcgcaagatttctaatgacggagacaaaggcttcctgcccacactgggcccagcctgggtgaacatgtacggctccacacgtaactacacgctgctggatgagcatcaggacctgaacgagggcctgggggagggtgtgtccttccgggcccggctcctgctgggcctggctgtggagatcgtagacacctccaaccctgagctcaccagctccacagaggtgcaggtggagcaggccacgcccatctcggagagctgtgcaggtaaaatggaagaattctttctctttggagccttcctggaggcctcaatgatcgaccggagaaacggagacaagcccatcacctttgaggtcaccataggcaactatgggaacgaagttgatggcctgtcccggccccagcggcctcggccccggaaggagccgggggatgaggaagaagtagacctgattcagaacgcaagtgatgacgaggccggtgatgccggggacctggcctcagtctcctccactccaccaatgcggccccaggtcaccgacaggaactacttccatctgccctacctggagcgaaagccctgcatctacatcaagagctggtggccggaccagcgccgccgcctctacaatgccaacatcatggaccacattgccgacaagctggaagaaggcctgaacgacatacaggagatgatcaaaacggagaagtcctaccctgagcgtcgcctgcggggcgtcctggaggagctgagctgtggctgctgccgcttcctctccctcgctgacaaggaccagggccactcatcccgcaccaggcttgaccgggagcgcctcaagtcctgcatgagggagctggaaaacatggggcagcaggccaggatgctgcgggcccaggtgaagcggcacacggtgcgggacaagctgaggctgtgccagaacttcctgcagaagctgcgcttcctggcggacgagccccagcacagcattcccgacatcttcatctggatgatgagcaacaacaagcgtgtcgcctatgcccgtgtgccctccaaggacctgctcttctccatcgtggaggaggagactggcaaggactgcgccaaggtcaagacgctcttccttaagctgccagggaagcggggcttcggctcggcaggctggacagtgcaggccaaggtggagctgtacctgtggctgggcctcagcaaacagcgcaaggagttcctgtgcggcctgccctgtggcttccaggaggtcaaggcagcccagggcctgggcctgcatgccttcccacccgtcagcctggtctacaccaagaagcaggcgttccagctccgagcgcacatgtaccaggcccgcagcctctttgccgccgacagcagcggactctcagacccctttgcccgcgtcttcttcatcaatcagagtcagtgcacagaggtgctgaatgagaccctgtgtcccacctgggaccagatgctggtgttcgacaacctggagctctatggtgaagctcatgagctgagggacgatccgcccatcattgtcattgaaatctatgaccaggattccatgggcaaagctgacttcatgggccggaccttcgccaaacccctggtgaagatggcagacgaggcgtactgcccaccccgcttcccacctcagctcgagtactaccagatctaccgtggcaacgccacagctggagacctgctggcggccttcgagctgctgcagattggaccagcagggaaggctgacctgccccccatcaatggcccggtggacgtggaccgaggtcccatcatgcccgtgcccatgggcatccggcccgtgctcagcaagtaccgagtggaggtgctgttctggggcctacgggacctaaagcgggtgaacctggcccaggtggaccggccacgggtggacatcgagtgtgcagggaagggggtgcagtcgtccctgatccacaattataagaagaaccccaacttcaacaccctcgtcaagtggtttgaagtggacctcccagagaacgagctgctgcacccgcccttgaacatccgtgtggtggactgccgggccttcggtcgctacacactggtgggctcccatgccgtcagctccctgcgacgcttcatctaccggcccccagaccgctcggcccccagctggaacaccacggtcaggcttctccggcgctgccgtgtgctgtgcaatgggggctcctcctctcactccacaggggaggttgtggtgactatggagccagaggtacccatcaagaaactggagaccatggtgaagctggacgcgacttctgaagctgttgtcaaggtggatgtggctgaggaggagaaggagaagaagaagaagaagaagggcactgcggaggagccagaggaggaggagccagacgagagcatgctggactggtggtccaagtactttgcctccattgacaccatgaaggagcaacttcgacaacaagagccctctggaattgacttggaggagaaggaggaagtggacaataccgagggcctgaaggggtcaatgaagggcaaggagaaggcaagggctgccaaagaggagaagaagaagaaaactcagagctctggctctggccaggggtccgaggcccccgagaagaagaaacccaagattgatgagcttaaggtataccccaaagagctggagtccgagtttgataactttgaggactggctgcacactttcaacttgcttcggggcaagaccggggatgatgaggatggctccaccgaggaggagcgcattgtgggacgcttcaagggctccctctgcgtgtacaaagtgccactcccagaggacgtgtcccgggaagccggctacgactccacctacggcatgttccagggcatcccgagcaatgaccccatcaatgtgctggtccgagtctatgtggtccgggccacggacctgcaccctgctgacatcaacggcaaagctgacccctacatcgccatccggctaggcaagactgacatccgcgacaaggagaactacatctccaagcagctcaaccctgtctttgggaagtcctttgacatcgaggcctccttccccatggaatccatgctgacggtggctgtgtatgactgggacctggtgggcactgatgacctcattggggaaaccaagatcgacctggagaaccgcttctacagcaagcaccgcgccacctgcggcatcgcccagacctactccacacatggctacaatatctggcgggaccccatgaagcccagccagatcctgacccgcctctgcaaagacggcaaagtggacggcccccactttgggccccctgggagagtgaaggtggccaaccgcgtcttcactgggccctctgagattgaggacgagaacggtcagaggaagcccacagacgagcatgtggcgctgttggccctgaggcactgggaggacatcccccgcgcaggctgccgcctggtgccagagcatgtggagacgaggccgctgctcaaccccgacaagccgggcatcgagcagggccgcctggagctgtgggtggacatgttccccatggacatgccagcccctgggacgcctctggacatctcacctcggaagcccaagaagtacgagctgcgggtcatcatctggaacacagatgaggtggtcttggaggacgacgacttcttcacaggggagaagtccagtgacatcttcgtgagggggtggctgaagggccagcaggaggacaagcaggacacagacgtccactaccactccctcactggcgagggcaacttcaactggcgctacctgttccccttcgactacctggcggcggaggagaagatcgtcatctccaagaaggagtccatgttctcctgggacgagaccgagtacaagatccccgcgcggctcaccctgcagatctgggatgcggaccacttctccgctgacgacttcctgggggccatcgagctggacctgaaccggttcccgcggggcgcaaagacagccaagcagtgcaccatggagatggccaccggggaggtggacgtgcccctcgtgtccatcttcaagcaaaagcgcgtcaaaggctggtggcccctcctggcccgcaatgagaacgatgagtttgagctcacgggcaaggtggaggctgagctgcatttactgacagcagaggaggcagagaagaacccagtgggcctggcccgcaatgaacctgaccccctagagaaacccaaccggcccgacacgagcttcatctggttcctgaaccctctcaagtcggctcgctacttcttgtggcacacgtatcgctggctgctcctcaaactgttgctgctcctgctgctgctcctcctcctcgccctgttcctctactctgtgcctggctacctggtcaagaaaatcctcggggcctgagcccagtggcctcctggccggcccgacacggccttcgtctggttcctcaaccctctcaagtccatcaagtacctcatctgcacccggtacaagtggctcatcatcaagatcgtgctggcgctgttggggctgctcatgttggggctcttcctctacagcctccctggctacatggtcaaaaagctccttggggcatgaaggccgccagctcccgccagccgctccccagccctgccgcatttcctttcagtggcttggactctttcccatctcccctggggagcctgaggagcccagcgtccactcttcatgccttgggccgagcctgcctcctgcttgcgggggccgcctgtcctcactgccccaggctgcggcttgcccagtcccgcccctctgacccctgcctgtgggctggggagccttggatggggtggggacctggaatgggtctctcttgccccacctggctgaggcgccacccttcttcaggcccaggctccagaggaagactcctgaaaccctccccaggtcttccaagtacaggattgaagctttagtgaaattaaccaaggaccatgggtcagtgcccagggctttaaaaagaatgaacgagcaaaaggtatccccgccgtgacccctgcagatagcaccggtctttgatccgcagcaggggccagaccctgcccacaagtcccagcgcggctgcttctgccactgctgggctccacttggctcctctcacttcccagggggtcgcctgtcctgcctgtgggtttccatggcttcccagagctccctctgccccagccagcgcctccaggcccagctgaggagctgtgagaagcagcagaggggactccccatcccgggcacaccctgtcctcccacccctgcccccttgcccttccagccctttcagctgcagctgggagctggcccgtcaagtgctgcccctgcctgtgtctgggtttctgttggctgtttttcttttcttgagtggtgatttttctctaaataaaagaagtcaagcactga

SEQ ID NO: 162908 - DNA, 4756 bp, Homo sapiens
  Payload ID: 12095
  Gene Symbol: OTOF
  Gene Name: otoferlin
  Uniprot ID: Q9HC10
  ENST ID: ENST00000339598
  CDS Start-End: 227-3919
ccgtgagttctgcccaggccctgtgagctcaccagagccacagactcacagcccagaggtggcttcttccttcaggaactgaagaacccccatgaacaccaacatctccaggttctgagaacagaacctgggaaattgatgacttcctcatgatgaccgatactcaggatggccctagcgagagctcccagatcatgaggaagaaggcctgaacgacatacaggagatgatcaaaacggagaagtcctaccctgagcgtcgcctgcggggcgtcctggaggagctgagctgtggctgctgccgcttcctctccctcgctgacaaggaccagggccactcatcccgcaccaggcttgaccgggagcgcctcaagtcctgcatgagggagctggaaaacatggggcagcaggccaggatgctgcgggcccaggtgaagcggcacacggtgcgggacaagctgaggctgtgccagaacttcctgcagaagctgcgcttcctggcggacgagccccagcacagcattcccgacatcttcatctggatgatgagcaacaacaagcgtgtcgcctatgcccgtgtgccctccaaggacctgctcttctccatcgtggaggaggagactggcaaggactgcgccaaggtcaagacgctcttccttaagctgccagggaagcggggcttcggctcggcaggctggacagtgcaggccaaggtggagctgtacctgtggctgggcctcagcaaacagcgcaaggagttcctgtgcggcctgccctgtggcttccaggaggtcaaggcagcccagggcctgggcctgcatgccttcccacccgtcagcctggtctacaccaagaagcaggcgttccagctccgagcgcacatgtaccaggcccgcagcctctttgccgccgacagcagcggactctcagacccctttgcccgcgtcttcttcatcaatcagagtcagtgcacagaggtgctgaatgagaccctgtgtcccacctgggaccagatgctggtgttcgacaacctggagctctatggtgaagctcatgagctgagggacgatccgcccatcattgtcattgaaatctatgaccaggattccatgggcaaagctgacttcatgggccggaccttcgccaaacccctggtgaagatggcagacgaggcgtactgcccaccccgcttcccacctcagctcgagtactaccagatctaccgtggcaacgccacagctggagacctgctggcggccttcgagctgctgcagattggaccagcagggaaggctgacctgccccccatcaatggcccggtggacgtggaccgaggtcccatcatgcccgtgcccatgggcatccggcccgtgctcagcaagtaccgagtggaggtgctgttctggggcctacgggacctaaagcgggtgaacctggcccaggtggaccggccacgggtggacatcgagtgtgcagggaagggggtgcagtcgtccctgatccacaattataagaagaaccccaacttcaacaccctcgtcaagtggtttgaagtggacctcccagagaacgagctgctgcacccgcccttgaacatccgtgtggtggactgccgggccttcggtcgctacacactggtgggctcccatgccgtcagctccctgcgacgcttcatctaccggcccccagaccgctcggcccccagctggaacaccacgggggaggttgtggtgactatggagccagaggtacccatcaagaaactggagaccatggtgaagctggacgcgacttctgaagctgttgtcaaggtggatgtggctgaggaggagaaggagaagaagaagaagaagaagggcactgcggaggagccagaggaggaggagccagacgagagcatgctggactggtggtccaagtactttgcctccattgacaccatgaaggagcaacttcgacaacaagagccctctggaattgacttggaggagaaggaggaagtggacaataccgagggcctgaaggggtcaatgaagggcaaggagaaggcaagggctgccaaagaggagaagaagaagaaaactcagagctctggctctggccaggggtccgaggcccccgagaagaagaaacccaagattgatgagcttaaggtataccccaaagagctggagtccgagtttgataactttgaggactggctgcacactttcaacttgcttcggggcaagaccggggatgatgaggatggctccaccgaggaggagcgcattgtgggacgcttcaagggctccctctgcgtgtacaaagtgccactcccagaggacgtgtcccgggaagccggctacgactccacctacggcatgttccagggcatcccgagcaatgaccccatcaatgtgctggtccgagtctatgtggtccgggccacggacctgcaccctgctgacatcaacggcaaagctgacccctacatcgccatccggctaggcaagactgacatccgcgacaaggagaactacatctccaagcagctcaaccctgtctttgggaagtcctttgacatcgaggcctccttccccatggaatccatgctgacggtggctgtgtatgactgggacctggtgggcactgatgacctcattggggaaaccaagatcgacctggagaaccgcttctacagcaagcaccgcgccacctgcggcatcgcccagacctactccacacatggctacaatatctggcgggaccccatgaagcccagccagatcctgacccgcctctgcaaagacggcaaagtggacggcccccactttgggccccctgggagagtgaaggtggccaaccgcgtcttcactgggccctctgagattgaggacgagaacggtcagaggaagcccacagacgagcatgtggcgctgttggccctgaggcactgggaggacatcccccgcgcaggctgccgcctggtgccagagcatgtggagacgaggccgctgctcaaccccgacaagccgggcatcgagcagggccgcctggagctgtgggtggacatgttccccatggacatgccagcccctgggacgcctctggacatctcacctcggaagcccaagaagtacgagctgcgggtcatcatctggaacacagatgaggtggtcttggaggacgacgacttcttcacaggggagaagtccagtgacatcttcgtgagggggtggctgaagggccagcaggaggacaagcaggacacagacgtccactaccactccctcactggcgagggcaacttcaactggcgctacctgttccccttcgactacctggcggcggaggagaagatcgtcatctccaagaaggagtccatgttctcctgggacgagaccgagtacaagatccccgcgcggctcaccctgcagatctgggatgcggaccacttctccgctgacgacttcctgggggccatcgagctggacctgaaccggttcccgcggggcgcaaagacagccaagcagtgcaccatggagatggccaccggggaggtggacgtgcccctcgtgtccatcttcaagcaaaagcgcgtcaaaggctggtggcccctcctggcccgcaatgagaacgatgagtttgagctcacgggcaaggtggaggctgagctgcatttactgacagcagaggaggcagagaagaacccagtgggcctggcccgcaatgaacctgaccccctagagaaacccaaccggcccgacacggccttcgtctggttcctcaaccctctcaagtccatcaagtacctcatctgcacccggtacaagtggctcatcatcaagatcgtgctggcgctgttggggctgctcatgttggggctcttcctctacagcctccctggctacatggtcaaaaagctccttggggcatgaaggccgccagctcccgccagccgctccccagccctgccgcatttcctttcagtggcttggactctttcccatctcccctggggagcctgaggagcccagcgtccactcttcatgccttgggccgagcctgcctcctgcttgcgggggccgcctgtcctcactgccccaggctgcggcttgcccagtcccgcccctctgacccctgcctgtgggctggggagccttggatggggtggggacctggaatgggtctctcttgccccacctggctgaggcgccacccttcttcaggcccaggctccagaggaagactcctgaaaccctccccaggtcttccaagtacaggattgaagctttagtgaaattaaccaaggaccatgggtcagtgcccagggctttaaaaagaatgaacgagcaaaaggtatccccgccgtgacccctgcagatagcaccggtctttgatccgcagcaggggccagaccctgcccacaagtcccagcgcggctgcttctgccactgctgggctccacttggctcctctcacttcccagggggtcgcctgtcctgcctgtgggtttccatggcttcccagagctccctctgccccagccagcgcctccaggcccagctgaggagctgtgagaagcagcagaggggactccccatcccgggcacaccctgtcctcccacccctgcccccttgcccttccagccctttcagctgcagctgggagctggcccgtcaagtgctgcccctgcctgtgtctgggtttctgttggctgtttttcttttcttgagtggtgatttttctctaaataaaagaagtcaagcactga

SEQ ID NO: 162909 - DNA, 4954 bp, Homo sapiens
  Payload ID: 12095
  Gene Symbol: OTOF
  Gene Name: otoferlin
  Uniprot ID: Q9HC10
  ENST ID: ENST00000338581
  CDS Start-End: 227-3919
ccgtgagttctgcccaggccctgtgagctcaccagagccacagactcacagcccagaggtggcttcttccttcaggaactgaagaacccccatgaacaccaacatctccaggttctgagaacagaacctgggaaattgatgacttcctcatgatgaccgatactcaggatggccctagcgagagctcccagatcatgaggaagaaggcctgaacgacatacaggagatgatcaaaacggagaagtcctaccctgagcgtcgcctgcggggcgtcctggaggagctgagctgtggctgctgccgcttcctctccctcgctgacaaggaccagggccactcatcccgcaccaggcttgaccgggagcgcctcaagtcctgcatgagggagctggaaaacatggggcagcaggccaggatgctgcgggcccaggtgaagcggcacacggtgcgggacaagctgaggctgtgccagaacttcctgcagaagctgcgcttcctggcggacgagccccagcacagcattcccgacatcttcatctggatgatgagcaacaacaagcgtgtcgcctatgcccgtgtgccctccaaggacctgctcttctccatcgtggaggaggagactggcaaggactgcgccaaggtcaagacgctcttccttaagctgccagggaagcggggcttcggctcggcaggctggacagtgcaggccaaggtggagctgtacctgtggctgggcctcagcaaacagcgcaaggagttcctgtgcggcctgccctgtggcttccaggaggtcaaggcagcccagggcctgggcctgcatgccttcccacccgtcagcctggtctacaccaagaagcaggcgttccagctccgagcgcacatgtaccaggcccgcagcctctttgccgccgacagcagcggactctcagacccctttgcccgcgtcttcttcatcaatcagagtcagtgcacagaggtgctgaatgagaccctgtgtcccacctgggaccagatgctggtgttcgacaacctggagctctatggtgaagctcatgagctgagggacgatccgcccatcattgtcattgaaatctatgaccaggattccatgggcaaagctgacttcatgggccggaccttcgccaaacccctggtgaagatggcagacgaggcgtactgcccaccccgcttcccacctcagctcgagtactaccagatctaccgtggcaacgccacagctggagacctgctggcggccttcgagctgctgcagattggaccagcagggaaggctgacctgccccccatcaatggcccggtggacgtggaccgaggtcccatcatgcccgtgcccatgggcatccggcccgtgctcagcaagtaccgagtggaggtgctgttctggggcctacgggacctaaagcgggtgaacctggcccaggtggaccggccacgggtggacatcgagtgtgcagggaagggggtgcagtcgtccctgatccacaattataagaagaaccccaacttcaacaccctcgtcaagtggtttgaagtggacctcccagagaacgagctgctgcacccgcccttgaacatccgtgtggtggactgccgggccttcggtcgctacacactggtgggctcccatgccgtcagctccctgcgacgcttcatctaccggcccccagaccgctcggcccccagctggaacaccacgggggaggttgtggtgactatggagccagaggtacccatcaagaaactggagaccatggtgaagctggacgcgacttctgaagctgttgtcaaggtggatgtggctgaggaggagaaggagaagaagaagaagaagaagggcactgcggaggagccagaggaggaggagccagacgagagcatgctggactggtggtccaagtactttgcctccattgacaccatgaaggagcaacttcgacaacaagagccctctggaattgacttggaggagaaggaggaagtggacaataccgagggcctgaaggggtcaatgaagggcaaggagaaggcaagggctgccaaagaggagaagaagaagaaaactcagagctctggctctggccaggggtccgaggcccccgagaagaagaaacccaagattgatgagcttaaggtataccccaaagagctggagtccgagtttgataactttgaggactggctgcacactttcaacttgcttcggggcaagaccggggatgatgaggatggctccaccgaggaggagcgcattgtgggacgcttcaagggctccctctgcgtgtacaaagtgccactcccagaggacgtgtcccgggaagccggctacgactccacctacggcatgttccagggcatcccgagcaatgaccccatcaatgtgctggtccgagtctatgtggtccgggccacggacctgcaccctgctgacatcaacggcaaagctgacccctacatcgccatccggctaggcaagactgacatccgcgacaaggagaactacatctccaagcagctcaaccctgtctttgggaagtcctttgacatcgaggcctccttccccatggaatccatgctgacggtggctgtgtatgactgggacctggtgggcactgatgacctcattggggaaaccaagatcgacctggagaaccgcttctacagcaagcaccgcgccacctgcggcatcgcccagacctactccacacatggctacaatatctggcgggaccccatgaagcccagccagatcctgacccgcctctgcaaagacggcaaagtggacggcccccactttgggccccctgggagagtgaaggtggccaaccgcgtcttcactgggccctctgagattgaggacgagaacggtcagaggaagcccacagacgagcatgtggcgctgttggccctgaggcactgggaggacatcccccgcgcaggctgccgcctggtgccagagcatgtggagacgaggccgctgctcaaccccgacaagccgggcatcgagcagggccgcctggagctgtgggtggacatgttccccatggacatgccagcccctgggacgcctctggacatctcacctcggaagcccaagaagtacgagctgcgggtcatcatctggaacacagatgaggtggtcttggaggacgacgacttcttcacaggggagaagtccagtgacatcttcgtgagggggtggctgaagggccagcaggaggacaagcaggacacagacgtccactaccactccctcactggcgagggcaacttcaactggcgctacctgttccccttcgactacctggcggcggaggagaagatcgtcatctccaagaaggagtccatgttctcctgggacgagaccgagtacaagatccccgcgcggctcaccctgcagatctgggatgcggaccacttctccgctgacgacttcctgggggccatcgagctggacctgaaccggttcccgcggggcgcaaagacagccaagcagtgcaccatggagatggccaccggggaggtggacgtgcccctcgtgtccatcttcaagcaaaagcgcgtcaaaggctggtggcccctcctggcccgcaatgagaacgatgagtttgagctcacgggcaaggtggaggctgagctgcatttactgacagcagaggaggcagagaagaacccagtgggcctggcccgcaatgaacctgaccccctagagaaacccaaccggcccgacacgagcttcatctggttcctgaaccctctcaagtcggctcgctacttcttgtggcacacgtatcgctggctgctcctcaaactgttgctgctcctgctgctgctcctcctcctcgccctgttcctctactctgtgcctggctacctggtcaagaaaatcctcggggcctgagcccagtggcctcctggccggcccgacacggccttcgtctggttcctcaaccctctcaagtccatcaagtacctcatctgcacccggtacaagtggctcatcatcaagatcgtgctggcgctgttggggctgctcatgttggggctcttcctctacagcctccctggctacatggtcaaaaagctccttggggcatgaaggccgccagctcccgccagccgctccccagccctgccgcatttcctttcagtggcttggactctttcccatctcccctggggagcctgaggagcccagcgtccactcttcatgccttgggccgagcctgcctcctgcttgcgggggccgcctgtcctcactgccccaggctgcggcttgcccagtcccgcccctctgacccctgcctgtgggctggggagccttggatggggtggggacctggaatgggtctctcttgccccacctggctgaggcgccacccttcttcaggcccaggctccagaggaagactcctgaaaccctccccaggtcttccaagtacaggattgaagctttagtgaaattaaccaaggaccatgggtcagtgcccagggctttaaaaagaatgaacgagcaaaaggtatccccgccgtgacccctgcagatagcaccggtctttgatccgcagcaggggccagaccctgcccacaagtcccagcgcggctgcttctgccactgctgggctccacttggctcctctcacttcccagggggtcgcctgtcctgcctgtgggtttccatggcttcccagagctccctctgccccagccagcgcctccaggcccagctgaggagctgtgagaagcagcagaggggactccccatcccgggcacaccctgtcctcccacccctgcccccttgcccttccagccctttcagctgcagctgggagctggcccgtcaagtgctgcccctgcctgtgtctgggtttctgttggctgtttttcttttcttgagtggtgatttttctctaaataaaagaagtcaagcactga

SEQ ID NO: 162910 - DNA, 5108 bp, Homo sapiens
  Payload ID: 12095
  Gene Symbol: OTOF
  Gene Name: otoferlin
  Uniprot ID: Q9HC10
  ENST ID: ENST00000402415
  CDS Start-End: 150-4073
ccgtgagttctgcccaggccctgtgagctcaccagagccacagactcacagcccagaggtggcttcttccttcaggaactgaagaacccccatgaacaccaacatctccaggttctgagaacagaacctgggaaattgatgacttcctcatgatgaccgatactcaggatggccctagcgagagctcccagatcatgaggtccctcactcccctgatcaacagggaggaggcatttggggaggctggggaggcggggctgtggcccagcatcacccacactcctgattcacaggaagaaggcctgaacgacatacaggagatgatcaaaacggagaagtcctaccctgagcgtcgcctgcggggcgtcctggaggagctgagctgtggctgctgccgcttcctctccctcgctgacaaggaccagggccactcatcccgcaccaggcttgaccgggagcgcctcaagtcctgcatgagggagctggaaaacatggggcagcaggccaggatgctgcgggcccaggtgaagcggcacacggtgcgggacaagctgaggctgtgccagaacttcctgcagaagctgcgcttcctggcggacgagccccagcacagcattcccgacatcttcatctggatgatgagcaacaacaagcgtgtcgcctatgcccgtgtgccctccaaggacctgctcttctccatcgtggaggaggagactggcaaggactgcgccaaggtcaagacgctcttccttaagctgccagggaagcggggcttcggctcggcaggctggacagtgcaggccaaggtggagctgtacctgtggctgggcctcagcaaacagcgcaaggagttcctgtgcggcctgccctgtggcttccaggaggtcaaggcagcccagggcctgggcctgcatgccttcccacccgtcagcctggtctacaccaagaagcaggcgttccagctccgagcgcacatgtaccaggcccgcagcctctttgccgccgacagcagcggactctcagacccctttgcccgcgtcttcttcatcaatcagagtcagtgcacagaggtgctgaatgagaccctgtgtcccacctgggaccagatgctggtgttcgacaacctggagctctatggtgaagctcatgagctgagggacgatccgcccatcattgtcattgaaatctatgaccaggattccatgggcaaagctgacttcatgggccggaccttcgccaaacccctggtgaagatggcagacgaggcgtactgcccaccccgcttcccacctcagctcgagtactaccagatctaccgtggcaacgccacagctggagacctgctggcggccttcgagctgctgcagattggaccagcagggaaggctgacctgccccccatcaatggcccggtggacgtggaccgaggtcccatcatgcccgtgcccatgggcatccggcccgtgctcagcaagtaccgagtggaggtgctgttctggggcctacgggacctaaagcgggtgaacctggcccaggtggaccggccacgggtggacatcgagtgtgcagggaagggggtgcagtcgtccctgatccacaattataagaagaaccccaacttcaacaccctcgtcaagtggtttgaagtggacctcccagagaacgagctgctgcacccgcccttgaacatccgtgtggtggactgccgggccttcggtcgctacacactggtgggctcccatgccgtcagctccctgcgacgcttcatctaccggcccccagaccgctcggcccccagctggaacaccacggtcaggcttctccggcgctgccgtgtgctgtgcaatgggggctcctcctctcactccacaggggaggttgtggtgactatggagccagaggtacccatcaagaaactggagaccatggtgaagctggacgcgacttctgaagctgttgtcaaggtggatgtggctgaggaggagaaggagaagaagaagaagaagaagggcactgcggaggagccagaggaggaggagccagacgagagcatgctggactggtggtccaagtactttgcctccattgacaccatgaaggagcaacttcgacaacaagagccctctggaattgacttggaggagaaggaggaagtggacaataccgagggcctgaaggggtcaatgaagggcaaggagaaggcaagggctgccaaagaggagaagaagaagaaaactcagagctctggctctggccaggggtccgaggcccccgagaagaagaaacccaagattgatgagcttaaggtataccccaaagagctggagtccgagtttgataactttgaggactggctgcacactttcaacttgcttcggggcaagaccggggatgatgaggatggctccaccgaggaggagcgcattgtgggacgcttcaagggctccctctgcgtgtacaaagtgccactcccagaggacgtgtcccgggaagccggctacgactccacctacggcatgttccagggcatcccgagcaatgaccccatcaatgtgctggtccgagtctatgtggtccgggccacggacctgcaccctgctgacatcaacggcaaagctgacccctacatcgccatccggctaggcaagactgacatccgcgacaaggagaactacatctccaagcagctcaaccctgtctttgggaagtcctttgacatcgaggcctccttccccatggaatccatgctgacggtggctgtgtatgactgggacctggtgggcactgatgacctcattggggaaaccaagatcgacctggagaaccgcttctacagcaagcaccgcgccacctgcggcatcgcccagacctactccacacatggctacaatatctggcgggaccccatgaagcccagccagatcctgacccgcctctgcaaagacggcaaagtggacggcccccactttgggccccctgggagagtgaaggtggccaaccgcgtcttcactgggccctctgagattgaggacgagaacggtcagaggaagcccacagacgagcatgtggcgctgttggccctgaggcactgggaggacatcccccgcgcaggctgccgcctggtgccagagcatgtggagacgaggccgctgctcaaccccgacaagccgggcatcgagcagggccgcctggagctgtgggtggacatgttccccatggacatgccagcccctgggacgcctctggacatctcacctcggaagcccaagaagtacgagctgcgggtcatcatctggaacacagatgaggtggtcttggaggacgacgacttcttcacaggggagaagtccagtgacatcttcgtgagggggtggctgaagggccagcaggaggacaagcaggacacagacgtccactaccactccctcactggcgagggcaacttcaactggcgctacctgttccccttcgactacctggcggcggaggagaagatcgtcatctccaagaaggagtccatgttctcctgggacgagaccgagtacaagatccccgcgcggctcaccctgcagatctgggatgcggaccacttctccgctgacgacttcctgggggccatcgagctggacctgaaccggttcccgcggggcgcaaagacagccaagcagtgcaccatggagatggccaccggggaggtggacgtgcccctcgtgtccatcttcaagcaaaagcgcgtcaaaggctggtggcccctcctggcccgcaatgagaacgatgagtttgagctcacgggcaaggtggaggctgagctgcatttactgacagcagaggaggcagagaagaacccagtgggcctggcccgcaatgaacctgaccccctagagaaacccaaccggcccgacacgagcttcatctggttcctgaaccctctcaagtcggctcgctacttcttgtggcacacgtatcgctggctgctcctcaaactgttgctgctcctgctgctgctcctcctcctcgccctgttcctctactctgtgcctggctacctggtcaagaaaatcctcggggcctgagcccagtggcctcctggccggcccgacacggccttcgtctggttcctcaaccctctcaagtccatcaagtacctcatctgcacccggtacaagtggctcatcatcaagatcgtgctggcgctgttggggctgctcatgttggggctcttcctctacagcctccctggctacatggtcaaaaagctccttggggcatgaaggccgccagctcccgccagccgctccccagccctgccgcatttcctttcagtggcttggactctttcccatctcccctggggagcctgaggagcccagcgtccactcttcatgccttgggccgagcctgcctcctgcttgcgggggccgcctgtcctcactgccccaggctgcggcttgcccagtcccgcccctctgacccctgcctgtgggctggggagccttggatggggtggggacctggaatgggtctctcttgccccacctggctgaggcgccacccttcttcaggcccaggctccagaggaagactcctgaaaccctccccaggtcttccaagtacaggattgaagctttagtgaaattaaccaaggaccatgggtcagtgcccagggctttaaaaagaatgaacgagcaaaaggtatccccgccgtgacccctgcagatagcaccggtctttgatccgcagcaggggccagaccctgcccacaagtcccagcgcggctgcttctgccactgctgggctccacttggctcctctcacttcccagggggtcgcctgtcctgcctgtgggtttccatggcttcccagagctccctctgccccagccagcgcctccaggcccagctgaggagctgtgagaagcagcagaggggactccccatcccgggcacaccctgtcctcccacccctgcccccttgcccttccagccctttcagctgcagctgggagctggcccgtcaagtgctgcccctgcctgtgtctgggtttctgttggctgtttttcttttcttgagtggtgatttttctctaaataaaagaagtcaagcactga

SEQ ID NO: 162911 - DNA, 6937 bp, Homo sapiens
  Payload ID: 12095
  Gene Symbol: OTOF
  Gene Name: otoferlin
  Uniprot ID: Q9HC10
  ENST ID: ENST00000403946
  CDS Start-End: 108-6101
aggaggaggaggcagcggcagagaagagagaggcgtgtgagccgtgctccaccggctagctccttcccgctgctcctgcctggcagtgccaggcagcccacaccagcatggccttgctcatccacctcaagacagtctcggagctgcggggcaggggcgaccggatcgccaaagtgactttccgagggcaatccttctactctcgggtcctggagaactgtgaggatgtggctgactttgatgagacatttcggtggccggtggccagcagcatcgacagaaatgagatgctggagattcaggttttcaactacagcaaagtcttcagcaacaagctcatcgggaccttccgcatggtgctgcagaaggtggtagaggagagccatgtggaggtgactgacacgctgattgatgacaacaatgctatcatcaagaccagcctgtgcgtggaggtccggtatcaggccactgacggcacagtgggctcctgggacgatggggacttcctgggagatgagtctcttcaagaggaagagaaggacagccaagagacggatggactgctcccaggctcccggcccagctcccggcccccaggagagaagagcttccggagagccgggaggagcgtgttctccgccatgaagctcggcaaaaaccggtctcacaaggaggagccccaaagaccagatgaaccggcggtgctggagatggaagaccttgaccatctggccattcggctaggagatggactggatcccgactcggtgtctctagcctcagtcacagctctcaccactaatgtctccaacaagcgatctaagccagacattaagatggagccaagtgctgggcggcccatggattaccaggtcagcatcacggtgatcgaggcccggcagctggtgggcttgaacatggaccctgtggtgtgcgtggaggtgggtgacgacaagaagtacacatccatgaaggagtccactaactgcccctattacaacgagtacttcgtcttcgacttccatgtctctccggatgtcatgtttgacaagatcatcaagatttcggtgattcactccaagaacctgctgcgcagtggcaccctggtgggctccttcaaaatggacgtgggaaccgtgtactcgcagccagagcaccagttccatcacaagtgggccatcctgtctgaccccgatgacatctcctcggggctgaagggctacgtgaagtgtgacgttgccgtggtgggcaaaggggacaacatcaagacgccccacaaggccaatgagaccgacgaagatgacattgaggggaacttgctgctccccgagggggtgccccccgaacgccagtgggcccggttctatgtgaaaatttaccgagcagaggggctgccccgtatgaacacaagcctcatggccaatgtaaagaaggctttcatcggtgaaaacaaggacctcgtggacccctacgtgcaagtcttctttgctggccagaagggcaagacttcagtgcagaagagcagctatgagcccctgtggaatgagcaggtcgtctttacagacctcttccccccactctgcaaacgcatgaaggtgcagatccgagactcggacaaggtcaacgacgtggccatcggcacccacttcattgacctgcgcaagatttctaatgacggagacaaaggcttcctgcccacactgggcccagcctgggtgaacatgtacggctccacacgtaactacacgctgctggatgagcatcaggacctgaacgagggcctgggggagggtgtgtccttccgggcccggctcctgctgggcctggctgtggagatcgtagacacctccaaccctgagctcaccagctccacagaggtgcaggtggagcaggccacgcccatctcggagagctgtgcaggtaaaatggaagaattctttctctttggagccttcctggaggcctcaatgatcgaccggagaaacggagacaagcccatcacctttgaggtcaccataggcaactatgggaacgaagttgatggcctgtcccggccccagcggcctcggccccggaaggagccgggggatgaggaagaagtagacctgattcagaacgcaagtgatgacgaggccggtgatgccggggacctggcctcagtctcctccactccaccaatgcggccccaggtcaccgacaggaactacttccatctgccctacctggagcgaaagccctgcatctacatcaagagctggtggccggaccagcgccgccgcctctacaatgccaacatcatggaccacattgccgacaagctggaagaaggcctgaacgacatacaggagatgatcaaaacggagaagtcctaccctgagcgtcgcctgcggggcgtcctggaggagctgagctgtggctgctgccgcttcctctccctcgctgacaaggaccagggccactcatcccgcaccaggcttgaccgggagcgcctcaagtcctgcatgagggagctggaaaacatggggcagcaggccaggatgctgcgggcccaggtgaagcggcacacggtgcgggacaagctgaggctgtgccagaacttcctgcagaagctgcgcttcctggcggacgagccccagcacagcattcccgacatcttcatctggatgatgagcaacaacaagcgtgtcgcctatgcccgtgtgccctccaaggacctgctcttctccatcgtggaggaggagactggcaaggactgcgccaaggtcaagacgctcttccttaagctgccagggaagcggggcttcggctcggcaggctggacagtgcaggccaaggtggagctgtacctgtggctgggcctcagcaaacagcgcaaggagttcctgtgcggcctgccctgtggcttccaggaggtcaaggcagcccagggcctgggcctgcatgccttcccacccgtcagcctggtctacaccaagaagcaggcgttccagctccgagcgcacatgtaccaggcccgcagcctctttgccgccgacagcagcggactctcagacccctttgcccgcgtcttcttcatcaatcagagtcagtgcacagaggtgctgaatgagaccctgtgtcccacctgggaccagatgctggtgttcgacaacctggagctctatggtgaagctcatgagctgagggacgatccgcccatcattgtcattgaaatctatgaccaggattccatgggcaaagctgacttcatgggccggaccttcgccaaacccctggtgaagatggcagacgaggcgtactgcccaccccgcttcccacctcagctcgagtactaccagatctaccgtggcaacgccacagctggagacctgctggcggccttcgagctgctgcagattggaccagcagggaaggctgacctgccccccatcaatggcccggtggacgtggaccgaggtcccatcatgcccgtgcccatgggcatccggcccgtgctcagcaagtaccgagtggaggtgctgttctggggcctacgggacctaaagcgggtgaacctggcccaggtggaccggccacgggtggacatcgagtgtgcagggaagggggtgcagtcgtccctgatccacaattataagaagaaccccaacttcaacaccctcgtcaagtggtttgaagtggacctcccagagaacgagctgctgcacccgcccttgaacatccgtgtggtggactgccgggccttcggtcgctacacactggtgggctcccatgccgtcagctccctgcgacgcttcatctaccggcccccagaccgctcggcccccagctggaacaccacggtcaggcttctccggcgctgccgtgtgctgtgcaatgggggctcctcctctcactccacaggggaggttgtggtgactatggagccagaggtacccatcaagaaactggagaccatggtgaagctggacgcgacttctgaagctgttgtcaaggtggatgtggctgaggaggagaaggagaagaagaagaagaagaagggcactgcggaggagccagaggaggaggagccagacgagagcatgctggactggtggtccaagtactttgcctccattgacaccatgaaggagcaacttcgacaacaagagccctctggaattgacttggaggagaaggaggaagtggacaataccgagggcctgaaggggtcaatgaagggcaaggagaaggcaagggctgccaaagaggagaagaagaagaaaactcagagctctggctctggccaggggtccgaggcccccgagaagaagaaacccaagattgatgagcttaaggtataccccaaagagctggagtccgagtttgataactttgaggactggctgcacactttcaacttgcttcggggcaagaccggggatgatgaggatggctccaccgaggaggagcgcattgtgggacgcttcaagggctccctctgcgtgtacaaagtgccactcccagaggacgtgtcccgggaagccggctacgactccacctacggcatgttccagggcatcccgagcaatgaccccatcaatgtgctggtccgagtctatgtggtccgggccacggacctgcaccctgctgacatcaacggcaaagctgacccctacatcgccatccggctaggcaagactgacatccgcgacaaggagaactacatctccaagcagctcaaccctgtctttgggaagtcctttgacatcgaggcctccttccccatggaatccatgctgacggtggctgtgtatgactgggacctggtgggcactgatgacctcattggggaaaccaagatcgacctggagaaccgcttctacagcaagcaccgcgccacctgcggcatcgcccagacctactccacacatggctacaatatctggcgggaccccatgaagcccagccagatcctgacccgcctctgcaaagacggcaaagtggacggcccccactttgggccccctgggagagtgaaggtggccaaccgcgtcttcactgggccctctgagattgaggacgagaacggtcagaggaagcccacagacgagcatgtggcgctgttggccctgaggcactgggaggacatcccccgcgcaggctgccgcctggtgccagagcatgtggagacgaggccgctgctcaaccccgacaagccgggcatcgagcagggccgcctggagctgtgggtggacatgttccccatggacatgccagcccctgggacgcctctggacatctcacctcggaagcccaagaagtacgagctgcgggtcatcatctggaacacagatgaggtggtcttggaggacgacgacttcttcacaggggagaagtccagtgacatcttcgtgagggggtggctgaagggccagcaggaggacaagcaggacacagacgtccactaccactccctcactggcgagggcaacttcaactggcgctacctgttccccttcgactacctggcggcggaggagaagatcgtcatctccaagaaggagtccatgttctcctgggacgagaccgagtacaagatccccgcgcggctcaccctgcagatctgggatgcggaccacttctccgctgacgacttcctgggggccatcgagctggacctgaaccggttcccgcggggcgcaaagacagccaagcagtgcaccatggagatggccaccggggaggtggacgtgcccctcgtgtccatcttcaagcaaaagcgcgtcaaaggctggtggcccctcctggcccgcaatgagaacgatgagtttgagctcacgggcaaggtggaggctgagctgcatttactgacagcagaggaggcagagaagaacccagtgggcctggcccgcaatgaacctgaccccctagagaaacccaaccggcccgacacggccttcgtctggttcctcaaccctctcaagtccatcaagtacctcatctgcacccggtacaagtggctcatcatcaagatcgtgctggcgctgttggggctgctcatgttggggctcttcctctacagcctccctggctacatggtcaaaaagctccttggggcatgaaggccgccagctcccgccagccgctccccagccctgccgcatttcctttcagtggcttggactctttcccatctcccctggggagcctgaggagcccagcgtccactcttcatgccttgggccgagcctgcctcctgcttgcgggggccgcctgtcctcactgccccaggctgcggcttgcccagtcccgcccctctgacccctgcctgtgggctggggagccttggatggggtggggacctggaatgggtctctcttgccccacctggctgaggcgccacccttcttcaggcccaggctccagaggaagactcctgaaaccctccccaggtcttccaagtacaggattgaagctttagtgaaattaaccaaggaccatgggtcagtgcccagggctttaaaaagaatgaacgagcaaaaggtatccccgccgtgacccctgcagatagcaccggtctttgatccgcagcaggggccagaccctgcccacaagtcccagcgcggctgcttctgccactgctgggctccacttggctcctctcacttcccagggggtcgcctgtcctgcctgtgggtttccatggcttcccagagctccctctgccccagccagcgcctccaggcccagctgaggagctgtgagaagcagcagaggggactccccatcccgggcacaccctgtcctcccacccctgcccccttgcccttccagccctttcagctgcagctgggagctggcccgtcaagtgctgcccctgcctgtgtctgggtttctgttggctgtttttcttttcttgagtggtgatttttctctaaataaaagaagtcaagcactg

SEQ ID NO: 162912 - DNA, 557 bp, Homo sapiens
  Payload ID: 12095
  Gene Symbol: OTOF
  Gene Name: otoferlin
  ENST ID: ENST00000426958
  CDS Start-End: 1-424
aaagcgggtgaacctggcccaggtggaccggccacgggtggacatcgagtgtgcagggaagggggtgcagtcgtccctgatccacaattataagaagaaccccaacttcaacaccctcgtcaagtggtttgaagtggacctcccagagaacgagctgctgcacccgcccttgaacatccgtgtggtggactgccgggccttcggtcgctacacactggtgggctcccatgccgtcagctccctgcgacgcttcatctaccggcccccagaccgctcggcccccagctggaacaccacgggggaggttgtggtgactatggagccagaggtacccatcaagaaactggagaccatggtgaagctggacgcggtaaggcgggtggggtcagccccctgctggctgggaacatgcaacttcgtgtgacacatcctgtgaaccagactatctgccccgagagaaaaggacactaagagcctcctttggcatgtgactgtcgggggctgagcttgattgtgtgtccaaacagctccctcctaatactatcctggaatgcaca

SEQ ID NO: 162913 - DNA, 4992 bp, Homo sapiens
  Payload ID: 12096
  Gene Symbol: OTOG
  Gene Name: otogelin
  Uniprot ID: Q6ZRI0
  ENST ID: ENST00000342528
  CDS Start-End: 285-4811
aggagacttccgagcccgtctctccctccatcctccagctgctgcccctgtagcccaggagcccatactgaggccccagggcctccgctcccatcttcttctcttccagctgctgcctgcccagcaggccaggtcttcgtgaactgcagcgacctgcacacggacctggagctgagcagggagaggacgtgtgagcagcaactgctgaacctgagcgtgtcagcccgtggcccctgcctctcgggctgcgcctgtccccagggtctgctcagacacggggatgcatgtttcctgccagaggagtgcccctgcacttggaaggggaaggagtatttccctggggaccaggtgatgtctccttgccatacctgagcacatcagatgtcagcttctctgtgattgtagagaatgtgaactgctacagctctggcatgatctgcaggaaatttatttccatcaacgttgggaactcactcattgtctttgatgatgactccggaaatcctagtccagagagcttcctggatgacaagcaggaggtccacacatggcgagtgggatttttcacactggtgcatttcccacaggagcacatcaccctcttgtgggaccagagaaccacagtgcacgtccaggctgggcctcagtggcagggccagctggcgggcctctgtgggaactttgacttaaaaaccatcaatgagatgaggaccccggagaacctagagctaactaacccccaggagtttggcagcagttgggctgcagttgagtgcccagacaccctcgatcctcgggatatgtgtgtcctgaatcctctccgagaaccatttgccaagaaggagtgcagcatcctgctcagtgaggtgtttgagatctgccaccctgtggttgatgtcacttggttttactcaaactgcctgacagacacatgtggctgcagccagggtggtgactgtgagtgcttctgtgccagcgtctccgcttatgcccaccagtgttgccagcatggggtggctgttgactggcgaaccccccgcctctgcctgctaggtaagggcccctatcagctatccagcttggcagccggtggtgctctggtgggcatgaaggcggtgggcgatgacatagtcctagtgaggacagaggatgtggcgccagcagacattgtgagcttcctgctgacagctgctctgtacaaggccaaggcccatgacccagatgtggtgtccctggaggcagcagacagacccaacttcttccttcacgtcacagccaacgggtctctggagctggctaagtggcagggccgtgacaccttccaacagcatgcctccttcttgctgcaccgggggacacggcaggcaggcctggtggccctggagtccctggccaagcccagctccttcctctatgtgtcgggcgcggtgctggccctgcggctgtacgaacacacagaggtgttccgccggggcacactcttccgccttctggatgccaagccctcgggggctgcctaccccatctgcgagtggcgctacgatgcctgtgccagcccctgcttccaaacctgccgggacccacgggcagccagctgccgggacgtacccagggtagaaggctgtgtccctgtgtgccccaccccccaggtcctggatgaagtcacacagagatgtgtctacttggaggactgtgtggagccagcagtttgggttcccacagaggcccttggcaatgagaccctccctcccagtcaagggttgcccactcccagtgatgaggagccacagctgtcacaggaaagccccaggacccccacccacaggccagccctcaccccagctgccccactcaccacagccctgaacccaccagtgacagccactgaggagccagtggtgtctccaggccccacccagaccaccctgcagcagccactggagctcactgcatctcaactccccgccggccccacggagtccccagccagcaagggagtgactgccagcctcctggccatcccccatacaccagagtcctcatccctccctgttgcactgcagacacccacacctggcatggtgtcaggtgccatggagacaacaagggtgactgtgatctttgcaggaagccctaacatcacagtctcctcccggtcgccccctgcccctcgcttcccgctcatgaccaaggctgtgacagtccgaggccatggctccttgcctgttaggacgacacccccacagccctccttgacagcaagtccctcctccagacctgtggcttcccctggagccatctccaggtcccccacctcctcgggatcccacaaggctgtgctgacacctgcagtaactaaggtcataagcaggacaggggtcccccagcccacccaggcccagagtgcttcaagtcccagcacccctctaactgtggctggaacagcagcagaacaggttcctgtcagtccccttgcaaccaggagcttggagatagtgctatccacagagaagggcgaagccgggcacagccagcccatgggctcgcctgcctccccacagccacacccactcccctctgcaccaccccgcccagcccagcataccaccatggccaccaggtctccagctctgcccccagagaccccagctgccgccagcctgtcaacagccactgatgggctggcagccacacccttcatgtcccttgagtcaactcgtccctcccagctcctctctggcctgcctcccgacaccagcctgcccctggccaaggtgggcacatctgccccagtggccacacccggccccaaagcctctgtcatcaccactccactccagccacaggccacgactctgcctgctcagacacttagcccagtactgcctttcactccagcagcaatgacccaggcgcacccacccactcacatagcacccccagcagcaggcacagctccaggcctgctgctgggagccacattgccaacctctggagtcctgcctgtggctgagggcacggcctccatggtatctgttgtcccacgaaagagcaccacagggaaggtggccatcctatccaagcaagtgtctctgcccacttccatgtatggttctgcagagggtgggcccacagagctcacgcctgctacgagccaccctctcacgcccttggtggctgagcccgagggagcccaggcaggcacagctctgccagtgcccacatcctatgccctgagccgtgtctcagccaggacggccccccaagacagcatgctggttctgttgcctcagctggctgaggcccatggaacctcggcagggcctcacctggcagcagagccggtggacgaggccaccacagaaccatctgggcgctcagccccagccctgagcatcgtagagggtttggcggaggctttggcaactaccactgaggccaatacatccaccacctgtgttccaatcgccgagcaggactgcgtccgccacatctgcctggagggccagctgattcgcgtgaatcagtcccagcactgtccccagggtgctgctccccctcgctgtgggatcctgggcctcgccgtgcgggtgggtggggaccgctgctgcccactctgggagtgtgcctgccggtgctcaatcttccctgacctgagcttcgtgaccttcgatgggagccacgtagctctgttcaaggaggccatctacatcctcagccagagcccagatgaaatgctcaccgtccatgtactggactgcaaaagtgccaacctggggcacctgaactggcccccgttctgtctggtgatgttgaacatgactcacttggcccatcaggtcactattgatcgcttcaaccgaaaggtgactgtggacttgcagcctgtgtggccaccggtgagcaggtatggattcagaattgaggacacaggccacatgtacatgatcctgactccctcagacatccagatccagtggctccacagctcaggactcatgatcgtggaggccagcaaaaccagcaaggcccagggccatggcctgtgcggtatctgtgatggagatgcagccaatgaccttaccctgaaggatggctcagtggtgggtggggctgaggaccctgctccctttctggacagctggcaggtgcccagctccctgacctcagtgggccagacccgcttccgcccagacagctgcgccacaactgactgctcgccctgccttcgcatggtgtccaaccgcaccttcagtgcctgccaccgctttgtgcctccggagtcattctgtgagctgtggatccgggacaccaagtacgtgcagcagccctgcgtggccctgactgtgtacgtggccatgtgccacaaatttcatgtgtgcatcgagtggcggcgctctgactactgccccttcctgtgctccagcgactccacataccaggcatgtgtgacagcctgtgagccacccaagacatgccaggatgggatactagggcctctggacccagagcactgccaggtgctgggcgagggctgcgtctgctccgagggcaccatcttacaccggcgccactctgcactctgcatcccggaggccaagtgcgcctgtggtgactgtccagactccatccccgaatgtcaagaaggggaggcgctcactgtgcacaggaataccacggaactctgctgccctctgtaccagtgtgtgtgtgagaacttccgctgtccccaagtgcagtgtggcctgggcactgccctggtggaggtgtggagccccgaccgctgctgcccctacaaatcctgtggataaaagaaggaaaaagcaagtttcccattccaaagagggtttccgtcttaaaaagtccttactgcggccgggcacggtggctcacacctgtaatcccagcactttgagaggccaaggcgggtggatcatgaggtcaggagttcaagaccagcctggccaagacggtgaaaccctgtgtctactg

SEQ ID NO: 162914 - DNA, 8778 bp, Homo sapiens
  Payload ID: 12096
  Gene Symbol: OTOG
  Gene Name: otogelin
  Uniprot ID: Q6ZRI0
  ENST ID: ENST00000399391
  CDS Start-End: 1-8778
atgggagtcctggcgtctgcgctctgctggctgctttgtgtctggctgccctggggtgagcaggcagccgagtccctgcgggtgcagcgcctcggtgagagggttgtggactcagggaggtcgggggctcgaggaatgagaaacgttaaaggaatgaggaatgggcccgcgcagactcgtgtttcctccagcagcagccaccaggaggcgacccttgccatgggggacaaggctacagtcgtgggaggccagcaggctgaagccccagactccgtggccatgtcttcctgggaaaggcggctccatcgggccaagtgtgcaccatcctacttgttctcctgcttcaatggaggcgagtgtgtgcacccagccttctgtgactgcagacgcttcaatgccactggaccgcgctgccagatggtgtacaatgccggccctgagagggacagcatttgccgggcgtgggggcagcaccacgtggagacatttgatgggctctactactacctctccggaaagggcagctacaccctggtgggtcgccatgagcccgagggacagagcttctccatccaggtacacaatgacccgcagtgtggctcttcaccctacacctgctccagggctgtcagcctcttctttgtgggtgagcaggagatccatctggccaaggaggtcacccatggaggcatgagggtccaactgccacatgtcatggggagcgcgcgtctgcagcagcttgccggctatgtcatcgtgcggcatcagtcagccttcacactggcctgggatggtgcctcggctgtctacatcaagatgagtccagagcttctgggctggacccatgggctgtgtgggaacaacaatgctgaccccaaggatgatctggtgaccagctctgggaagctgactgacgacgtggttgagtttgtgcacagctggcaggagcaggcccctaaccagcctccagggcccacaacttcctccctgcctcgcccaccgtgcctacagcagaacccaggaaccatgcagggcgtgtacgagcagtgtgaggctctactgcggcccccctttgacgcctgccacgcctacgtcagccctctgcccttcacagccagttgtaccagtgatctctgccaatcaatgggtgatgtagccacctggtgccgggcactggcggagtatgcccgggcgtgtgcccaggcagggcggcccttgcaaggctggaggacccagctccggcaatgcactgtgcactgcaaggagaaggcctttacctacaatgagtgcatcgcctgctgccctgcctcctgccatccccgggcatcctgtgtggacagtgagatcgcctgtgtggacggctgctattgccccaatgggctcatcttcgaggatgggggctgcgtggcaccagctgagtgtccctgtgagtttcacgggactctgtacccacctggctctgtggtgaaggaagactgcaatacttgcacatgcacctcaggcaagtgggagtgcagcacagctgtctgcccagctgagtgctcagtgactggtgacattcacttcacaacctttgatggccgccggtacacgttccccgccacatgtcagtacatcctggccaagagccgctcttcgggcaccttcaccgtgacattgcagaatgccccatgtggcctgaaccaagatggagcctgtgtccagtcagtgtcagtgattctgcaccaggaccctcggaggcaggtgaccctgacccaggcaggggatgtccttctgtttgaccagtacaagatcatcccgccatacacagatgatgcctttgagatccgtaggctgtcctccgtgttcctgcgggtgaggacgaacgtgggcgtgcgggtgctctacgaccgtgaagggctccgactgtacctgcaagtggaccagcgatgggtggaggataccgtgggcctctgcggcaccttcaatggcaacacgcaggatgacttcctgtctccagtgggtgtacctgagagcaccccacaactttttggcaattcctggaaaacactttctgcttgctccccgctggtctctggctcccctctggacccctgcgatgtgcacctgcaagccgcctcctactcagtgcaggcctgcagcgtgctcacgggggagatgtttgcgccctgctctgcgttcctgagccccgtgccctactttgagcagtgccgcagggatgcctgccgctgcgggcagccctgcctgtgcgccacactggcccactacgcccacctgtgccggcgccatgggctccccgttgatttccgcgcccgcctgccagcctgtgcactgtcctgtgaggcctccaaggagtatagcccctgcgtggccccgtgtggacgtacctgccaggacctggccagccctgaggcctgtggggttgatggtggcgatgacctgagcagagacgagtgtgtggagggctgtgcctgcccaccggacacctatctggacacccaggctgacctctgtgtcccccggaaccagtgctcctgccacttccagggagtggactatccccccggagacagtgacatcccatccctgggccactgccactgcaaagatggagtcatgagctgtgatagcagagccccagctgctgcctgcccagcaggccaggtcttcgtgaactgcagcgacctgcacacggacctggagctgagcagggagaggacgtgtgagcagcaactgctgaacctgagcgtgtcagcccgtggcccctgcctctcgggctgcgcctgtccccagggtctgctcagacacggggatgcatgtttcctgccagaggagtgcccctgcacttggaaggggaaggagtatttccctggggaccaggtgatgtctccttgccatacctgtgtgtgccagcggggctcattccagtgcaccctgcacccttgcgcctccacctgcactgcctatggggaccggcattaccgcacgtttgatgggctcccgtttgacttcgtgggggcatgcaaagtgcacctggtcaagagcacatcagatgtcagcttctctgtgattgtagagaatgtgaactgctacagctctggcatgatctgcaggaaatttatttccatcaacgttgggaactcactcattgtctttgatgatgactccggaaatcctagtccagagagcttcctggatgacaagcaggaggtccacacatggcgagtgggatttttcacactggtgcatttcccacaggagcacatcaccctcttgtgggaccagagaaccacagtgcacgtccaggctgggcctcagtggcagggccagctggcgggcctctgtgggaactttgacttaaaaaccatcaatgagatgaggaccccggagaacctagagctaactaacccccaggagtttggcagcagttgggctgcagttgagtgcccagacaccctcgatcctcgggatatgtgtgtcctgaatcctctccgagaaccatttgccaagaaggagtgcagcatcctgctcagtgaggtgtttgagatctgccaccctgtggttgatgtcacttggttttactcaaactgcctgacagacacatgtggctgcagccagggtggtgactgtgagtgcttctgtgccagcgtctccgcttatgcccaccagtgttgccagcatggggtggctgttgactggcgaaccccccgcctctgcccgtatgactgtgacttctttaacaaagtgctaggtaagggcccctatcagctatccagcttggcagccggtggtgctctggtgggcatgaaggcggtgggcgatgacatagtcctagtgaggacagaggatgtggcgccagcagacattgtgagcttcctgctgacagctgctctgtacaaggccaaggcccatgacccagatgtggtgtccctggaggcagcagacagacccaacttcttccttcacgtcacagccaacgggtctctggagctggctaagtggcagggccgtgacaccttccaacagcatgcctccttcttgctgcaccgggggacacggcaggcaggcctggtggccctggagtccctggccaagcccagctccttcctctatgtgtcgggcgcggtgctggccctgcggctgtacgaacacacagaggtgttccgccggggcacactcttccgccttctggatgccaagccctcgggggctgcctaccccatctgcgagtggcgctacgatgcctgtgccagcccctgcttccaaacctgccgggacccacgggcagccagctgccgggacgtacccagggtagaaggctgtgtccctgtgtgccccaccccccaggtcctggatgaagtcacacagagatgtgtctacttggaggactgtgtggagccagcagtttgggttcccacagaggcccttggcaatgagaccctccctcccagtcaagggttgcccactcccagtgatgaggagccacagctgtcacaggaaagccccaggacccccacccacaggccagccctcaccccagctgccccactcaccacagccctgaacccaccagtgacagccactgaggagccagtggtgtctccaggccccacccagaccaccctgcagcagccactggagctcactgcatctcaactccccgccggccccacggagtccccagccagcaagggagtgactgccagcctcctggccatcccccatacaccagagtcctcatccctccctgttgcactgcagacacccacacctggcatggtgtcaggtgccatggagacaacaagggtgactgtgatctttgcaggaagccctaacatcacagtctcctcccggtcgccccctgcccctcgcttcccgctcatgaccaaggctgtgacagtccgaggccatggctccttgcctgttaggacgacacccccacagccctccttgacagcaagtccctcctccagacctgtggcttcccctggagccatctccaggtcccccacctcctcgggatcccacaaggctgtgctgacacctgcagtaactaaggtcataagcaggacaggggtcccccagcccacccaggcccagagtgcttcaagtcccagcacccctctaactgtggctggaacagcagcagaacaggttcctgtcagtccccttgcaaccaggagcttggagatagtgctatccacagagaagggcgaagccgggcacagccagcccatgggctcgcctgcctccccacagccacacccactcccctctgcaccaccccgcccagcccagcataccaccatggccaccaggtctccagctctgcccccagagaccccagctgccgccagcctgtcaacagccactgatgggctggcagccacacccttcatgtcccttgagtcaactcgtccctcccagctcctctctggcctgcctcccgacaccagcctgcccctggccaaggtgggcacatctgccccagtggccacacccggccccaaagcctctgtcatcaccactccactccagccacaggccacgactctgcctgctcagacacttagcccagtactgcctttcactccagcagcaatgacccaggcgcacccacccactcacatagcacccccagcagcaggcacagctccaggcctgctgctgggagccacattgccaacctctggagtcctgcctgtggctgagggcacggcctccatggtatctgttgtcccacgaaagagcaccacagggaaggtggccatcctatccaagcaagtgtctctgcccacttccatgtatggttctgcagagggtgggcccacagagctcacgcctgctacgagccaccctctcacgcccttggtggctgagcccgagggagcccaggcaggcacagctctgccagtgcccacatcctatgccctgagccgtgtctcagccaggacggccccccaagacagcatgctggttctgttgcctcagctggctgaggcccatggaacctcggcagggcctcacctggcagcagagccggtggacgaggccaccacagaaccatctgggcgctcagccccagccctgagcatcgtagagggtttggcggaggctttggcaactaccactgaggccaatacatccaccacctgtgttccaatcgccgagcaggactgcgtccgccacatctgcctggagggccagctgattcgcgtgaatcagtcccagcactgtccccagggtgctgctccccctcgctgtgggatcctgggcctcgccgtgcgggtgggtggggaccgctgctgcccactctgggagtgtgcctgccggtgctcaatcttccctgacctgagcttcgtgaccttcgatgggagccacgtagctctgttcaaggaggccatctacatcctcagccagagcccagatgaaatgctcaccgtccatgtactggactgcaaaagtgccaacctggggcacctgaactggcccccgttctgtctggtgatgttgaacatgactcacttggcccatcaggtcactattgatcgcttcaaccgaaaggtgactgtggacttgcagcctgtgtggccaccggtgagcaggtatggattcagaattgaggacacaggccacatgtacatgatcctgactccctcagacatccagatccagtggctccacagctcaggactcatgatcgtggaggccagcaaaaccagcaaggcccagggccatggcctgtgcggtatctgtgatggagatgcagccaatgaccttaccctgaaggatggctcagtggtgggtggggctgaggaccctgctccctttctggacagctggcaggtgcccagctccctgacctcagtgggccagacccgcttccgcccagacagctgcgccacaactgactgctcgccctgccttcgcatggtgtccaaccgcaccttcagtgcctgccaccgctttgtgcctccggagtcattctgtgagctgtggatccgggacaccaagtacgtgcagcagccctgcgtggccctgactgtgtacgtggccatgtgccacaaatttcatgtgtgcatcgagtggcggcgctctgactactgccccttcctgtgctccagcgactccacataccaggcatgtgtgacagcctgtgagccacccaagacatgccaggatgggatactagggcctctggacccagagcactgccaggtgctgggcgagggctgcgtctgctccgagggcaccatcttacaccggcgccactctgcactctgcatcccggaggccaagtgcgcctgcactgacagcatgggggtgccgagggccctgggggagacctggaacagctccctcagcggctgctgccagcaccagtgccaagccccagacaccattgtcccggtggatctgggctgccccagtccccgccctgagagctgcctgcgattcggggaggtggccttgctcctacccaccaaggacccctgctgcctggggactgtctgtgtgtgtaaccagactctgtgtgagggtctcgcccccacatgccgcccaggccaccgcctcctcacccacttccaggaggactcctgctgccccagctacagctgtgagtgtgacccagatctctgtgaggcagagctggtccccagctgccgacaggaccagatcctgatcacgggccgcctgggggactcctgctgcacctcctacttctgcgcctgtggtgactgtccagactccatccccgaatgtcaagaaggggaggcgctcactgtgcacaggaataccacggaactctgctgccctctgtaccagtgtgtgtgtgagaacttccgctgtccccaagtgcagtgtggcctgggcactgccctggtggaggtgtggagccccgaccgctgctgcccctacaaatcctgtgaatgtgactgtgacacaatcccggtgccccggtgccatctgtgggagaaatcccagctggatgaggagttcatgcacagcgtggagaatgtgtgtggctgcgccaagtacgagtgtgtgaaggccccggtgtgtctgagccgcgagctgggtgtgatgcagcccggccagacagtggtggagctctcagcagatggcgtgtgccacacctcccgctgcaccaccgtgctcgaccctctcaccaacttctaccagatcaacaccacctccgtgctctgtgacatccactgtgaggcgaaccaggagtacgagcacccgcgggacctcgctgcctgctgcggctcctgcaggaacgtgtcctgtctcttcaccttccccaatggcaccacctccctgttcttgcccggggcatcctggatcgcagactgcgcccgccaccactgcagcagcacgcccctgggtgccgtgctggtccgctctcccataagctgcccaccgctcaatgagactgagtgtgccaaggttgggggttccgtggtaccttccttggaaggatgctgcaggacctgtaaggaggatgggcgctcctgcaagaaggtgaccatccgcatgaccatccgcaagaatgaatgcaggagcagcacccctgtgaacctagtgtcctgcgatgggaggtgcccatccgccagcatctacaactacaacatcaacacctatgcccgattctgcaagtgctgccgtgaggtgggcctgcagcggcgctctgtgcagctcttctgtgccaccaatgccacctgggtgccctatacagtgcaggagcccaccgactgtgcctgccagtggtcctga

SEQ ID NO: 162915 - DNA, 9948 bp, Homo sapiens
  Payload ID: 12096
  Gene Symbol: OTOG
  Gene Name: otogelin
  ENST ID: ENST00000399397
  CDS Start-End: 1-8742
atgggagtcctggcgtctgcgctctgctggctgctttgtgtctggctgccctggggtgagcaggcagccgagtccctgcgggtgcagcgcctcgccgcagcacccgttctgtggggcagtgcagagccacagccagagccagccgggcaacccagcagcagccaccaggaggcgacccttgccatgggggacaaggctacagtcgtgggaggccagcaggctgaagccccagactccgtggccatgtcttcctgggaaaggcggctccatcgggccaagtgtgcaccatcctacttgttctcctgcttcaatggaggcgagtgtgtgcacccagccttctgtgactgcagacgcttcaatgccactggaccgcgctgccagatggtgtacaatgccggccctgagagggacagcatttgccgggcgtgggggcagcaccacgtggagacatttgatgggctctactactacctctccggaaagggcagctacaccctggtgggtcgccatgagcccgagggacagagcttctccatccaggtacacaatgacccgcagtgtggctcttcaccctacacctgctccagggctgtcagcctcttctttgtgggtgagcaggagatccatctggccaaggaggtcacccatggaggcatgagggtccaactgccacatgtcatggggagcgcgcgtctgcagcagcttgccggctatgtcatcgtgcggcatcagtcagccttcacactggcctgggatggtgcctcggctgtctacatcaagatgagtccagagcttctgggctggacccatgggctgtgtgggaacaacaatgctgaccccaaggatgatctggtgaccagctctgggaagctgactgacgacgtggttgagtttgtgcacagctggcaggagcaggcccctaaccagcctccagggcccacaacttcctccctgcctcgcccaccgtgcctacagcagaacccaggaaccatgcagggcgtgtacgagcagtgtgaggctctactgcggcccccctttgacgcctgccacgcctacgtcagccctctgcccttcacagccagttgtaccagtgatctctgccaatcaatgggtgatgtagccacctggtgccgggcactggcggagtatgcccgggcgtgtgcccaggcagggcggcccttgcaaggctggaggacccagctccggcaatgcactgtgcactgcaaggagaaggcctttacctacaatgagtgcatcgcctgctgccctgcctcctgccatccccgggcatcctgtgtggacagtgagatcgcctgtgtggacggctgctattgccccaatgggctcatcttcgaggatgggggctgcgtggcaccagctgagtgtccctgtgagtttcacgggactctgtacccacctggctctgtggtgaaggaagactgcaatacttgcacatgcacctcaggcaagtgggagtgcagcacagctgtctgcccagctgagtgctcagtgactggtgacattcacttcacaacctttgatggccgccggtacacgttccccgccacatgtcagtacatcctggccaagagccgctcttcgggcaccttcaccgtgacattgcagaatgccccatgtggcctgaaccaagatggagcctgtgtccagtcagtgtcagtgattctgcaccaggaccctcggaggcaggtgaccctgacccaggcaggggatgtccttctgtttgaccagtacaagatcatcccgccatacacagatgatgcctttgagatccgtaggctgtcctccgtgttcctgcgggtgaggacgaacgtgggcgtgcgggtgctctacgaccgtgaagggctccgactgtacctgcaagtggaccagcgatgggtggaggataccgtgggcctctgcggcaccttcaatggcaacacgcaggatgacttcctgtctccagtgggtgtacctgagagcaccccacaactttttggcaattcctggaaaacactttctgcttgctccccgctggtctctggctcccctctggacccctgcgatgtgcacctgcaagccgcctcctactcagtgcaggcctgcagcgtgctcacgggggagatgtttgcgccctgctctgcgttcctgagccccgtgccctactttgagcagtgccgcagggatgcctgccgctgcgggcagccctgcctgtgcgccacactggcccactacgcccacctgtgccggcgccatgggctccccgttgatttccgcgcccgcctgccagcctgtgcactgtcctgtgaggcctccaaggagtatagcccctgcgtggccccgtgtggacgtacctgccaggacctggccagccctgaggcctgtggggttgatggtggcgatgacctgagcagagacgagtgtgtggagggctgtgcctgcccaccggacacctatctggacacccaggctgacctctgtgtcccccggaaccagtgctcctgccacttccagggagtggactatccccccggagacagtgacatcccatccctgggccactgccactgcaaagatggagtcatgagctgtgatagcagagccccagctgctgcctgcccagcaggccaggtcttcgtgaactgcagcgacctgcacacggacctggagctgagcagggagaggacgtgtgagcagcaactgctgaacctgagcgtgtcagcccgtggcccctgcctctcgggctgcgcctgtccccagggtctgctcagacacggggatgcatgtttcctgccagaggagtgcccctgcacttggaaggggaaggagtatttccctggggaccaggtgatgtctccttgccatacctgtgtgtgccagcggggctcattccagtgcaccctgcacccttgcgcctccacctgcactgcctatggggaccggcattaccgcacgtttgatgggctcccgtttgacttcgtgggggcatgcaaagtgcacctggtcaagagcacatcagatgtcagcttctctgtgattgtagagaatgtgaactgctacagctctggcatgatctgcaggaaatttatttccatcaacgttgggaactcactcattgtctttgatgatgactccggaaatcctagtccagagagcttcctggatgacaagcaggaggtccacacatggcgagtgggatttttcacactggtgcatttcccacaggagcacatcaccctcttgtgggaccagagaaccacagtgcacgtccaggctgggcctcagtggcagggccagctggcgggcctctgtgggaactttgacttaaaaaccatcaatgagatgaggaccccggagaacctagagctaactaacccccaggagtttggcagcagttgggctgcagttgagtgcccagacaccctcgatcctcgggatatgtgtgtcctgaatcctctccgagaaccatttgccaagaaggagtgcagcatcctgctcagtgaggtgtttgagatctgccaccctgtggttgatgtcacttggttttactcaaactgcctgacagacacatgtggctgcagccagggtggtgactgtgagtgcttctgtgccagcgtctccgcttatgcccaccagtgttgccagcatggggtggctgttgactggcgaaccccccgcctctgcccgtatgactgtgacttctttaacaaagtgctaggtaagggcccctatcagctatccagcttggcagccggtggtgctctggtgggcatgaaggcggtgggcgatgacatagtcctagtgaggacagaggatgtggcgccagcagacattgtgagcttcctgctgacagctgctctgtacaaggccaaggcccatgacccagatgtggtgtccctggaggcagcagacagacccaacttcttccttcacgtcacagccaacgggtctctggagctggctaagtggcagggccgtgacaccttccaacagcatgcctccttcttgctgcaccgggggacacggcaggcaggcctggtggccctggagtccctggccaagcccagctccttcctctatgtgtcgggcgcggtgctggccctgcggctgtacgaacacacagaggtgttccgccggggcacactcttccgccttctggatgccaagccctcgggggctgcctaccccatctgcgagtggcgctacgatgcctgtgccagcccctgcttccaaacctgccgggacccacgggcagccagctgccgggacgtacccagggtagaaggctgtgtccctgtgtgccccaccccccaggtcctggatgaagtcacacagagatgtgtctacttggaggactgtgtggagccagcagtttgggttcccacagaggcccttggcaatgagaccctccctcccagtcaagggttgcccactcccagtgatgaggagccacagctgtcacaggaaagccccaggacccccacccacaggccagccctcaccccagctgccccactcaccacagccctgaacccaccagtgacagccactgaggagccagtggtgtctccaggccccacccagaccaccctgcagcagccactggagctcactgcatctcaactccccgccggccccacggagtccccagccagcaagggagtgactgccagcctcctggccatcccccatacaccagagtcctcatccctccctgttgcactgcagacacccacacctggcatggtgtcaggtgccatggagacaacaagggtgactgtgatctttgcaggaagccctaacatcacagtctcctcccggtcgccccctgcccctcgcttcccgctcatgaccaaggctgtgacagtccgaggccatggctccttgcctgttaggacgacacccccacagccctccttgacagcaagtccctcctccagacctgtggcttcccctggagccatctccaggtcccccacctcctcgggatcccacaaggctgtgctgacacctgcagtaactaaggtcataagcaggacaggggtcccccagcccacccaggcccagagtgcttcaagtcccagcacccctctaactgtggctggaacagcagcagaacaggttcctgtcagtccccttgcaaccaggagcttggagatagtgctatccacagagaagggcgaagccgggcacagccagcccatgggctcgcctgcctccccacagccacacccactcccctctgcaccaccccgcccagcccagcataccaccatggccaccaggtctccagctctgcccccagagaccccagctgccgccagcctgtcaacagccactgatgggctggcagccacacccttcatgtcccttgagtcaactcgtccctcccagctcctctctggcctgcctcccgacaccagcctgcccctggccaaggtgggcacatctgccccagtggccacacccggccccaaagcctctgtcatcaccactccactccagccacaggccacgactctgcctgctcagacacttagcccagtactgcctttcactccagcagcaatgacccaggcgcacccacccactcacatagcacccccagcagcaggcacagctccaggcctgctgctgggagccacattgccaacctctggagtcctgcctgtggctgagggcacggcctccatggtatctgttgtcccacgaaagagcaccacagggaaggtggccatcctatccaagcaagtgtctctgcccacttccatgtatggttctgcagagggtgggcccacagagctcacgcctgctacgagccaccctctcacgcccttggtggctgagcccgagggagcccaggcaggcacagctctgccagtgcccacatcctatgccctgagccgtgtctcagccaggacggccccccaagacagcatgctggttctgttgcctcagctggctgaggcccatggaacctcggcagggcctcacctggcagcagagccggtggacgaggccaccacagaaccatctgggcgctcagccccagccctgagcatcgtagagggtttggcggaggctttggcaactaccactgaggccaatacatccaccacctgtgttccaatcgccgagcaggactgcgtccgccacatctgcctggagggccagctgattcgcgtgaatcagtcccagcactgtccccagggtgctgctccccctcgctgtgggatcctgggcctcgccgtgcgggtgggtggggaccgctgctgcccactctgggagtgtgcctgccggtgctcaatcttccctgacctgagcttcgtgaccttcgatgggagccacgtagctctgttcaaggaggccatctacatcctcagccagagcccagatgaaatgctcaccgtccatgtactggactgcaaaagtgccaacctggggcacctgaactggcccccgttctgtctggtgatgttgaacatgactcacttggcccatcaggtcactattgatcgcttcaaccgaaaggtgactgtggacttgcagcctgtgtggccaccggtgagcaggtatggattcagaattgaggacacaggccacatgtacatgatcctgactccctcagacatccagatccagtggctccacagctcaggactcatgatcgtggaggccagcaaaaccagcaaggcccagggccatggcctgtgcggtatctgtgatggagatgcagccaatgaccttaccctgaaggatggctcagtggtgggtggggctgaggaccctgctccctttctggacagctggcaggtgcccagctccctgacctcagtgggccagacccgcttccgcccagacagctgcgccacaactgactgctcgccctgccttcgcatggtgtccaaccgcaccttcagtgcctgccaccgctttgtgcctccggagtcattctgtgagctgtggatccgggacaccaagtacgtgcagcagccctgcgtggccctgactgtgtacgtggccatgtgccacaaatttcatgtgtgcatcgagtggcggcgctctgactactgccccttcctgtgctccagcgactccacataccaggcatgtgtgacagcctgtgagccacccaagacatgccaggatgggatactagggcctctggacccagagcactgccaggtgctgggcgagggctgcgtctgctccgagggcaccatcttacaccggcgccactctgcactctgcatcccggaggccaagtgcgcctgcactgacagcatgggggtgccgagggccctgggggagacctggaacagctccctcagcggctgctgccagcaccagtgccaagccccagacaccattgtcccggtggatctgggctgccccagtccccgccctgagagctgcctgcgattcggggaggtggccttgctcctacccaccaaggacccctgctgcctggggactgtctgtgtgtgtaaccagactctgtgtgagggtctcgcccccacatgccgcccaggccaccgcctcctcacccacttccaggaggactcctgctgccccagctacagctgtgagtgtgacccagatctctgtgaggcagagctggtccccagctgccgacaggaccagatcctgatcacgggccgcctgggggactcctgctgcacctcctacttctgcgcctgtggtgactgtccagactccatccccgaatgtcaagaaggggaggcgctcactgtgcacaggaataccacggaactctgctgccctctgtaccagtgtgtgtgtgagaacttccgctgtccccaagtgcagtgtggcctgggcactgccctggtggaggtgtggagccccgaccgctgctgcccctacaaatcctgtgaatgtgactgtgacacaatcccggtgccccggtgccatctgtgggagaaatcccagctggatgaggagttcatgcacagcgtggagaatgtgtgtggctgcgccaagtacgagtgtgtgaaggccccggtgtgtctgagccgcgagctgggtgtgatgcagcccggccagacagtggtggagctctcagcagatggcgtgtgccacacctcccgctgcaccaccgtgctcgaccctctcaccaacttctaccagatcaacaccacctccgtgctctgtgacatccactgtgaggcgaaccaggagtacgagcacccgcgggacctcgctgcctgctgcggctcctgcaggaacgtgtcctgtctcttcaccttccccaatggcaccacctccctgttcttgcccggggcatcctggatcgcagactgcgcccgccaccactgcagcagcacgcccctgggtgccgtgctggtccgctctcccataagctgcccaccgctcaatgagactgagtgtgccaaggttgggggttccgtggtaccttccttggaaggatgctgcaggacctgtaaggaggatgggcgctcctgcaagaaggtgaccatccgcatgaccatccgcaagaatgaatgcaggagcagcacccctgtgaacctagtgtcctgcgatgggaggtgcccatccgccagcatctacaactacaacatcaacacctatgcccgattctgcaagtgctgccgtgaggtgggcctgcagcggcgctctgtgcagctcttctgtgccaccaatgccacctgggtgccctatacagtgcaggagcccaccgactgtgcctgccagtggtcctgaggcctgggggcccgggctagctggaccacctctgccagccccactttctgtttccagctggcccaatgtgaatgggggtattaaaggtggtagaaatctggcacgtgttgagcatggaatggtgggaagaggtcacaggagtaaccagaaagggtcacccctgcccatcctggctccctttctgggctccccattttccgcacatgggaaagtgccacagttgagggctcagggagctcacctctgtccctggtttgagatggaaaatgggctttaggtccaggggcagcagcctctgaacctctgtgaccctggccacagctcttggtggagggggtgagagctgtgggaagatgggaaggtgcatggtgcttacatgggaaccacagctggacccaagaccaagcacaggggcaggatgcagtggcccattctcttggcctttttgactacacaagaaaccagacacagtaaaaggaaagagggctatacctgcaacactcaggcctgcagatggctgcccagaaggagttcccaaagacaaagatggtggattctagggcccaggttgtctcaccaagatctgtgaaatcagagtgagctcagtgaccttcgcatctcctgtagtccaaagaaaggtgcctggtgtcctggtattgatatggtaattcaggaaaggatttggaagacctaagcctgtacccttaccccaaggcaaccttcccagcaggcaggccggccttgtgaggcggtgctgggggagtgaaaccctcagtgagggcccagcactacttatctaggatgctggttgacagcccatgccttcaaggccctaggttgctgagggggtaccttcagcctgcaaatgcagctccaggctttgcagtgtgccttttctccaaggccatgacagagtcgggctcagaggagcctgattatgggttgtgtggctcagccagtgccagtctctgtgctccatgggactgtttagcaagagagtgtctgttggtgtcagtggaaaacacagccccagcctccctgagcacttgtgagatccttgtcactgaaccagagcgtcccctaaagccagggccagcgtccccttccacaccccactctgcaagtctcccaccccctgtgccactttgtgccacgtggaaccgaagggcatgaacataaggttgtgcaggccccagcactgccctg

SEQ ID NO: 162916 - DNA, 282 bp, Homo sapiens
  Payload ID: 12096
  Gene Symbol: OTOG
  Gene Name: otogelin
  ENST ID: ENST00000428619
  CDS Start-End: 1-282
gccatgggggacaaggctacagtcgtgggaggccaggctgaagccccagactccgtggccatgtcttcctgggaaaggcggctccatcgggccaagtgtgcaccatcctacttgttctcctgcttcaatggaggcgagtgtgtgcacccagccttctgtgactgcagacgcttcaatgccactggaccgcgctgccagatggtgtacaatgccggccctgagagggacagcatttgccgggcgtgggggcagcaccacgtggagacatttgatgggctctac

SEQ ID NO: 162917 - DNA, 3289 bp, Homo sapiens
  Payload ID: 12097
  Gene Symbol: OTOGL
  Gene Name: otogelin-like
  ENST ID: ENST00000298820
  CDS Start-End: 1-2258
gtgaaattatagttgctcatatcgaaaaatgttccatgaatcagaatggaaactccttaaaaaagctagctccctctggaagaatctctggactttgttttaagaagttaaatgtgacaacacccatacataaaataattgtcaatcggttggcaagaaaggtagaagtggattccattgttgtgcctttgcccttttcaagtcaggaactgtccatagaggattctggttcaatgtatgtaattactactccagctggactaatcataaagtggtctcatcttacaggaatcatagacattcattttggcttccgatttaacttgtcatcctacacagaaggactctgtggaatttgcaatgaagatccggatgatgatctaaggatgcaaaatggcacaattattacaaatatggaagacataggattatttattgagagctgggaaattgagaaatcatttgaagtaacaatgagaagacctgttaggaattgtactgagcatgattgcagccagtgcattgatttattaaatagaagaattttcattccatgtcatgataaagtttcaccggaagacttttgtgaaaagatgtggatcaattatacctatttttggaactatgaatgtgatgcactttctgcatatgtggctctgtgcaacaagtttgatatctgtattcagtggagaacacctgattactgctccctgagttgcccagaggggaaggaatatcaaccctgtgtgcgaccttgtgaagcaagaacatgcctgaaccaatggttctatggacacacttcctgtttgaatctaagagaagactgtgtgtgcaaagttggaactattcttcacaggccacattcagcccagtgcattccagagaaagagtgtgcatgcactgatagtgaagaccaaccccgcactgctggggagatttggaatgggggcattgatgaatgcactctatacaaatgtttggagaatggaagcattatccctatagaacctgactgtgatgaagagcccacgccagtttgtgaacgagaagctgaagttgtcatgggcatcattgataaatggacctgctgttcaaaggaagtttgtggatgtgacacgactttgtgtgaaactagcattccaacatgtacaaatagtcaaaaattgattgttggccacagtcctctttcttgctgtccacagtacaaatgtgaatgtgacccattgaaatgccccagtatttcaacaccagaatgcagagaagatcaattcatgattcaagttcgacaggaagaaccttgttgtttttcccctttttgtgtttgtgaatcttgcaccaaacctgttccactatgtcatgatggggaatttctcacagtagatcttaatagcacacacttctgttgtcctcagtattactgtgtatgtgaaccaaacctttgtcctatgccattactcaactgtgcagaagatatgaatcttgtgaaagaaaatgtatctggtcaatgttgcccaacatggcactgtgaaaaggatgatgtgtgtgtatttcaagaagtatcagtattgaatcctggacaatccatgataaagtatttggaagaagacttttgttatgctatagagtgtctggaagaaaaagataaccatacgggctttcacactctgaattttacactggtgaattgttcaaaaaaatgtgatgttcaccaggtatatactccatccccaagtgattatggttgttgtggtacctgcaaaaatgtatcctgcaaatttcacatggaaaatggaacatcagttgtatacgcggtagggagtacctggcactacaattgcaccacatatgaatgtgttaaaactgatgaaggagcaataattctgaactacacaatggtctgtcccccttttaatgagactgaatgcaaaatgaatgaagggattgtgaagctttataatgaaggctgttgcaagatctgcaaacgagaagaaagaatatgccagaaagtgatcattaaatcggtcataaggaaacaggactgtatgagccaaagccctataaatgttgcatcttgtgacggcaaatgcccatcagctaccatatataacatcaatattgaaagtcacctaagattctgcaagtgttgtcgtgaaaatggagtacgaaacttgtctgtgcctctgtattgctcaggaaatggcactgaaattatgtacactctccaggaacccatagactgtacgtgccagtggaattaaacccttgggttccaagagctctatacaacatcataacgtcagatagaattaacttttattgctattacttaggcatgtggcagatttatgctgtttaacaatactgtatttttcagacttggaatgtggaaatttagcaatttgtacaaaatatatacagtttcaatagcaaaattaaatttattgctttactctattttagaaaatcaaatgactgtaagttgttcagctgaaatgctgttatgtatttaattacaacttggtgcagatacagtatattctcatcaactggaaggttattttgcaaaattccttcaatttcactcagtagctctttttttcttaatttgcaaagtctgctatagctatccaaattaaggtaccctttaatatgtactccttaatctggtaaatgtgatcagttaaaattgtcatctagatagcaataaagagtgatatgcttagagatagataatggattatttaaaacctgaatggtttatagagaagtcattataaattcccctcattttgcaggtgtaacagataaccagagaagctgtgtgactcgtacaaatttattcagtgtaataatatagtaaattcatgttaacagttggattaaatcctagctctctcttattccagtactatatcacttttaaaatcctgagcagtatgtagtaagagtatatcacagaatctttcattcttaaagagtttgcattggatagaattaagtattttaagtttaacatatttgaaaaatgccccccatacattgttattccaatagtaaggagcagggaaatatagcatcatttgctaaatagaggagatagatcttgaactgttattttttatataattaaaactgctattaaatgtgttgtcagtatttaacatttagttactgtctcattaatatttaattttgaggatgtacttgcatactgttgaagttgagtgctgttttgctgttaatgctgctgctttgccaatgaagaatgaaataaatttatctgaatgta

SEQ ID NO: 162918 - DNA, 8083 bp, Homo sapiens
  Payload ID: 12097
  Gene Symbol: OTOGL
  Gene Name: otogelin-like
  ENST ID: ENST00000458043
  CDS Start-End: 7-7041
aatttaatgataccttggagtatattcttgcttcatgtactgctgttttcattacaagaatatatttgtgcatcgtctatattgatgggaacatcaaaaaacgggtttaatgaaaatcgacagaaaagagctcttttagcagcacagtttgaagctacttctccgagatactttttccatgatgctattaattggggtgagagcaaaataaaaggttcttgtccttatgaatgccttaatggagctttctgttctaagactggaacatgtgactgtcaaatatttcaggctcttgggacaagatgccagatcatcccaaacatgggcaacggcagagatgggatttgtaaaacctggggacagtatcattttgaaacattcgatggcatctactattacttcccaggaaactgttcttacatttttgcaaaggactgtggtgatttggagcctcggtacactgtatgggttcataacagccctaaatgccttggttcggtgtattcttgttatcggtcaatcagcttgttcttttcaaaccaagaggaaattcgaatttatggtcatgaaataaaaaagaatggaatcagtttaacattgcctcagacaattggacagattttcattgagaaactagctgactacattcttgtgaaaacaacctttggcttttcattggcttgggacgggatatctgggatctacctcaagctgtctgaggaccataaggggaaatcatgtggcctatgtggaaactacaatgacattcaatctgatgatttcataattctgcaagaggactatacagaagacatcgctatgtttgcaaatagttggtcggtgcaaactccagatgacaccaaatgtgtactcacaccctcagattttccaaatccgtgctccagtggaatgccagcatttgaggcaatcttcttcaagtgtcagatactgttgcagtttccttttctgagctgccatgagtatatcgatccatacttatatattgccagctgtgttaatgatctttgcaaaactgatgatgatgaaacctattgccgagcagccactgagtatgctagagcctgctctcatgctggctaccctattcaagactggagagatgactttccagcatgcactgataaatgtgatgatagctttgtccatcgggactgtatcagttgttgtccaccaacctgcacatttgagaagcaatgtcttgggagcaatctccattgtcttgatggatgttactgcccagatggcctcgtaatggacaatgggacttgcatctccttggaaaattgcccatgcggttttcatggattagcttattcagttggttcaaaaattgaacaagaatgtactgaatgtgtgtgtgttggtggagtttggaactgcactgagcaagactgtccagttcaatgctcagttgtaggtgattctcactttacaacttttgatggtcgacattattcttttattggcatgtgccaatacatcctcgtgaaaggaactggaaaagataaattcacgattactttacagaaagctccctgtgagcagaatcttggcttggtctgccttcagtctataactctgattctggaggatgattttaacaaacaagtgacccttggtaggggaggacaaattctcactagtcctaaccaaggcttcaacctgaatggtattgttgaaattcaaactctgtcatccttatttatacttctaaaaaccacatttggtttaaagattctgtttgctatagatggggaaagaatttatattcagcttactagcgcatggaaaagaagaacattaggtctgtgtggcacttttaatggcaacataagggatgattttctttctccatcaggcatgatagaaggtacaccacaacttcacgcaaatgcgtggagagtttcttctacctgttttgcacctgttcatgtcccagtggtggacccctgtaacatcaatcaacaaaacattgggtatgcagcacactgtgatgtcatccaccaggagctctttgctccttgccacatctatattagccctgggctgtactatcagctatgccgccacgatgcatgcaagtgtggaagctcctgcctgtgcaatgctcttgcccactatgcctacctctgcggccagcacggtgttcccattgatttcagaactcagatttctttctgtgctgtggtgtgccagaagggcatgctgtaccatcactgttcctcgttctgcctccattcctgcatttctctctcttccccggagcagtgcagtgatgactgtgctgaaggctgtaattgtccggaaggcaaattctatgaagacactcttaacttttgtgtacccatattccactgccgttgtcattataggggcagtgtttatcaacctggagagctcatccccacaccctcgggcttatgccagtgttcaaatgggactgtgaaatgtgatgaattagcaacgccctctgctgttcacatctgcccagagggaaaagagtatttcgactgcaggtttcctgaccctgaattaccagctggtggtgttaattgtgagactacatgtgcaaacctagccatgaacttcacctgcaccccatcctcaccctgtataagtggctgtgtttgtgctccaggaatggcagagcacagaggaaagtgttatgttcctgaaagctgcccatgtatttggaaagattgggagtatctctcaggagaagtgattgctacaccgtgttacacctgcgtttgtcgacgaggaatgttcaattgcacatattatccatgcccagcagtgtgcacaatatacggggaccgacattattattcttttgatggactagaatatgactatatcagtgattgccaggtgtttttgataaagagtgcagatgattcagatatatctgtcattgcccagaacaagaaatgctttgacaacgatattgtttgttctaaaagtgttttgatttcagttggggacactgaaatttacctgaatgatactccttacaaacagaaacaatcaggtttttttctggaaaacaaatctacctaccagctttggaaggctggttactatatagtagtatactttccagagaaagatatcactattctttgggataggaagacaactattcatatcaaagttgggccacagtggaagaacaagctatcaggattgtgtggaaactttgacaaatgcacttcaaatgatatgaccacatctaataacttggaagtgagaaatgctcgggtatttggagatagttgggcattaggacagtgtgaaagtccagatgaaacaattaaaccctgtgaggcacatcaaaacaaatttccttatgccaagaaagaatgctccattttgtacagtgatatttttgcttcttgtcgcaatgtgattgacgttacttcttttgccaaaaattgtcatgaagatacatgtaactgcaatcttggtggcgactgtgagtgtttgtgcactagtatagctgcatatgcatacaagtgttgtcaggaaggaatatcaattcattggagatcatctactgtttgttcacttgattgtgaatactacaatgaaggacttggagaaggaccatatatgctggcaagctatgggcagagtggccttgttctgggggccaatatgaccagcagaagcgttttctgtttgccgagaagcagtgttcataccagtttatttttttattttatgatcactccaggccttttcaaagagaaggtatcatcattagcacttgtttccttggaatctgctgaaaggccaaactactttctctatgtccatgacaatgatactcttagcttggagctgtgggaggcgaattcagcctttcatcggagagcaacatttttccaccatcagggcctctggattcctggttacagtgcatttgagttatacagcaagaaaggctttttcatcatattcacagattctagtgtcaaagcatcaaaatatgatgattctgaagaatttaaacattcaagtagcttcagcatagaagaaatccaggcagcagtgccttacaggaagatgtgtgaatggagatatgaaccttgtgctacaccctgttttaaaacatgtagtgaccctgaagcactagcatgtaaatttcttccaccggttgaaggatgcttgccctactgccctaaaaatatgatccttgatgaggtcaccctcaagtgtgtttatccacgagactgtatacctgtgattcccacagaaccaacattaatgccaccagctaagccaactgtgcccatgtttacagtttgggaaatgattactccatcagacatcactgtgtttgatatgctaacaccaactacaggcttggaatgtgagcctcagaaatttgatcctgtttatgattgtagccaatacatatgccttaatatggaatggcagttatacaactggtcccttaattgcccaaaggacgtggaaatgcctgactgtggtttccgaggaaggccagttcaagtgaacagtgatatctgctgccctgagtgggaatgtccttgtcggtgttccatgttgtcagaactgagcattattacatttgatggaaacaacgcagcattatatagcatggcttcttatatcttagtaagaattcctggtgaaattatagttgctcatatcgaaaaatgttccatgaatcagaatggaaactccttaaaaaagctagctccctctggaagaatctctggactttgttttaagaagttaaatgtgacaacacccatacataaaataattgtcaatcggttggcaagaaaggtagaagtggattccattgttgtgcctttgcccttttcaagtcaggaactgtccatagaggattctggttcaatgtatgtaattactactccagctggactaatcataaagtggtctcatcttacaggaatcatagacattcattttggcttccgatttaacttgtcatcctacacagaaggactctgtggaatttgcaatgaagatccggatgatgatctaaggatgcaaaatggcacaattattacaaatatggaagacataggattatttattgagagctgggaaattgagaaatcatttgaagtaacaatgagaagacctgttaggaattgtactgagcatgattgcagccagtgcattgatttattaaatagaagaattttcattccatgtcatgataaagtttcaccggaagacttttgtgaaaagatgtggatcaattatacctatttttggaactatgaatgtgatgcactttctgcatatgtggctctgtgcaacaagtttgatatctgtattcagtggagaacacctgattactgctccctgagttgcccagaggggaaggaatatcaaccctgtgtgcgaccttgtgaagcaagaacatgcctgaaccaatggttctatggacacacttcctgtttgaatctaagagaagactgtgtgtgcaaagttggaactattcttcacaggccacattcagcccagtgcattccagagaaagagtgtgcatgcactgatagtgaagaccaaccccgcactgctggggagatttggaatgggggcattgatgaatgcactctatacaaatgtttggagaatggaagcattatccctatagaacctgactgtgatgaagagcccacgccagtttgtgaacgagaagctgaagttgtcatgggcatcattgataaatggacctgctgttcaaaggaagtttgtggatgtgacacgactttgtgtgaaactagcattccaacatgtacaaatagtcaaaaattgattgttggccacagtcctctttcttgctgtccacagtacaaatgtgaatgtgacccattgaaatgccccagtatttcaacaccagaatgcagagaagatcaattcatgattcaagttcgacaggaagaaccttgttgtttttcccctttttgtgtttgtgaatcttgcaccaaacctgttccactatgtcatgatggggaatttctcacagtagatcttaatagcacacacttctgttgtcctcagtattactgtgtatgtgaaccaaacctttgtcctatgccattactcaactgtgcagaagatatgaatcttgtgaaagaaaatgtatctggtcaatgttgcccaacatggcactgtgaatgtaactgtgaaaaccttattatgccaacttgtgaagtgggagaatttactgcaatagaccataacttccagagtgattgtggatgcatacagtatctctgtgaaaaggatgatgtgtgtgtatttcaagaagtatcagtattgaatcctggacaatccatgataaagtatttggaagaagacttttgttatgctatagagtgtctggaagaaaaagataaccatacgggctttcacactctgaattttacactggtgaattgttcaaaaaaatgtgatgttcaccaggtatatactccatccccaagtgattatggttgttgtggtacctgcaaaaatgtatcctgcaaatttcacatggaaaatggaacatcagttgtatacgcggtagggagtacctggcactacaattgcaccacatatgaatgtgttaaaactgatgaaggagcaataattctgaactacacaatggtctgtcccccttttaatgagactgaatgcaaaatgaatgaagggattgtgaagctttataatgaaggctgttgcaagatctgcaaacgagaagaaagaatatgccagaaagtgatcattaaatcggtcataaggaaacaggactgtatgagccaaagccctataaatgttgcatcttgtgacggcaaatgcccatcagctaccatatataacatcaatattgaaagtcacctaagattctgcaagtgttgtcgtgaaaatggagtacgaaacttgtctgtgcctctgtattgctcaggaaatggcactgaaattatgtacactctccaggaacccatagactgtacgtgccagtggaattaaacccttgggttccaagagctctatacaacatcataacgtcagatagaattaacttttattgctattacttaggcatgtggcagatttatgctgtttaacaatactgtatttttcagacttggaatgtggaaatttagcaatttgtacaaaatatatacagtttcaatagcaaaattaaatttattgctttactctattttagaaaatcaaatgactgtaagttgttcagctgaaatgctgttatgtatttaattacaacttggtgcagatacagtatattctcatcaactggaaggttattttgcaaaattccttcaatttcactcagtagctctttttttcttaatttgcaaagtctgctatagctatccaaattaaggtaccctttaatatgtactccttaatctggtaaatgtgatcagttaaaattgtcatctagatagcaataaagagtgatatgcttagagatagataatggattatttaaaacctgaatggtttatagagaagtcattataaattcccctcattttgcaggtgtaacagataaccagagaagctgtgtgactcgtacaaatttattcagtgtaataatatagtaaattcatgttaacagttggattaaatcctagctctctcttattccagtactatatcacttttaaaatcctgagcagtatgtagtaagagtatatcacagaatctttcattcttaaagagtttgcattggatagaattaagtattttaagtttaacatatttgaaaaatgccccccatacattgttattccaatagtaaggagcagggaaatatagcatcatttgctaaatagaggagatagatcttgaactgttattttttatataattaaaactgctattaaatgtgttgtcagtatttaacatttagttactgtctcattaatatttaattttgaggatgtacttgcatactgttgaagttgagtgctgttttgctgttaatgctgctgctttgccaatgaagaatgaaataaatttatctgaatgtatcaataacttt

SEQ ID NO: 162919 - DNA, 8032 bp, Homo sapiens
  Payload ID: 12097
  Gene Symbol: OTOGL
  Gene Name: otogelin-like
  Uniprot ID: Q3ZCN5
  ENST ID: ENST00000547103
  CDS Start-End: 7-7005
aatttaatgataccttggagtatattcttgcttcatgtactgctgttttcattacaagaatatatttgtgcatcgtctatattgatgggaacatcaaaaaacgggtttaatgaaaatcgacagaaaagagctcttttagcagcacagtttgaagctacttctccgagatactttttccatgatgctattaattggggtgagagcaaaataaaaggttcttgtccttatgaatgccttaatggagctttctgttctaagactggaacatgtgactgtcaaatatttcaggctcttgggacaagatgccagatcatcccaaacatgggcaacggcagagatgggatttgtaaaacctggggacagtatcattttgaaacattcgatggcatctactattacttcccaggaaactgttcttacatttttgcaaaggactgtggtgatttggagcctcggtacactgtatgggttcataacagccctaaatgccttggttcggtgtattcttgttatcggtcaatcagcttgttcttttcaaaccaagaggaaattcgaatttatggtcatgaaataaaaaagaatggaatcagtttaacattgcctcagacaattggacagattttcattgagaaactagctgactacattcttgtgaaaacaacctttggcttttcattggcttgggacgggatatctgggatctacctcaagctgtctgaggaccataaggggaaatcatgtggcctatgtggaaactacaatgacattcaatctgatgatttcataattctgcaagaggactatacagaagacatcgctatgtttgcaaatagttggtcggtgcaaactccagatgacaccaaatgtgtactcacaccctcagattttccaaatccgtgctccagtggaatgccagcatttgaggcaatcttcttcaagtgtcagatactgttgcagtttccttttctgagctgccatgagtatatcgatccatacttatatattgccagctgtgttaatgatctttgcaaaactgatgatgatgaaacctattgccgagcagccactgagtatgctagagcctgctctcatgctggctaccctattcaagactggagagatgactttccagcatgcactgataaatgtgatgatagctttgtccatcgggactgtatcagttgttgtccaccaacctgcacatttgagaagcaatgtcttgggagcaatctccattgtcttgatggatgttactgcccagatggcctcgtaatggacaatgggacttgcatctccttggaaaattgcccatgcggttttcatggattagcttattcagttggttcaaaaattgaacaagaatgtactgaatgtgtgtgtgttggtggagtttggaactgcactgagcaagactgtccagttcaatgctcagttgtaggtgattctcactttacaacttttgatggtcgacattattcttttattggcatgtgccaatacatcctcgtgaaaggaactggaaaagataaattcacgattactttacagaaagctccctgtgagcagaatcttggcttggtctgccttcagtctataactctgattctggaggatgattttaacaaacaagtgacccttggtaggggaggacaaattctcactagtcctaaccaaggcttcaacctgaatggtattgttgaaattcaaactctgtcatccttatttatacttctaaaaaccacatttggtttaaagattctgtttgctatagatggggaaagaatttatattcagcttactagcgcatggaaaagaagaacattaggtctgtgtggcacttttaatggcaacataagggatgattttctttctccatcaggcatgatagaaggtacaccacaacttcacgcaaatgcgtggagagtttcttctacctgttttgcacctgttcatgtcccagtggtggacccctgtaacatcaatcaacaaaacattgggtatgcagcacactgtgatgtcatccaccaggagctctttgctccttgccacatctatattagccctgggctgtactatcagctatgccgccacgatgcatgcaagtgtggaagctcctgcctgtgcaatgctcttgcccactatgcctacctctgcggccagcacggtgttcccattgatttcagaactcagatttctttctgtgctgtggtgtgccagaagggcatgctgtaccatcactgttcctcgttctgcctccattcctgcatttctctctcttccccggagcagtgcagtgatgactgtgctgaaggctgtaattgtccggaaggcaaattctatgaagacactcttaacttttgtgtacccatattccactgccgttgtcattataggggcagtgtttatcaacctggagagctcatccccacaccctcgggcttatgccagtgttcaaatgggactgtgaaatgtgatgaattagcaacgccctctgctgttcacatctgcccagagggaaaagagtatttcgactgcaggtttcctgaccctgaattaccagctggtggtgttaattgtgagactacatgtgcaaacctagccatgaacttcacctgcaccccatcctcaccctgtataagtggctgtgtttgtgctccaggaatggcagagcacagaggaaagtgttatgttcctgaaagctgcccatgtatttggaaagattgggagtatctctcaggagaagtgattgctacaccgtgttacacctgcgtttgtcgacgaggaatgttcaattgcacatattatccatgcccagcagtgtgcacaatatacggggaccgacattattattcttttgatggactagaatatgactatatcagtgattgccaggtgtttttgataaagagtgcagatgattcagatatatctgtcattgcccagaacaagaaatgctttgacaacgatattgtttgttctaaaagtgttttgatttcagttggggacactgaaatttacctgaatgatactccttacaaacagaaacaatcaggtttttttctggaaaacaaatctacctaccagctttggaaggctggttactatatagtagtatactttccagagaaagatatcactattctttgggataggaagacaactattcatatcaaagttgggccacagtggaagaacaagctatcaggattgtgtggaaactttgacaaatgcacttcaaatgatatgaccacatctaataacttggaagtgagaaatgctcgggtatttggagatagttgggcattaggacagtgtgaaagtccagatgaaacaattaaaccctgtgaggcacatcaaaacaaatttccttatgccaagaaagaatgctccattttgtacagtgatatttttgcttcttgtcgcaatgtgattgacgttacttcttttgccaaaaattgtcatgaagatacatgtaactgcaatcttggtggcgactgtgagtgtttgtgcactagtatagctgcatatgcatacaagtgttgtcaggaaggaatatcaattcattggagatcatctactgtttgttcacttgattgtgaatactacaatgaaggacttggagaaggaccatatatgctggcaagctatgggcagagtggccttgttctgggggccaatatgaccagcagaagcgttttctgtttgccgagaagcagtgttcataccagtttatttttttattttatgatcactccaggccttttcaaagagaaggtatcatcattagcacttgtttccttggaatctgctgaaaggccaaactactttctctatgtccatgacaatgatactcttagcttggagctgtgggaggcgaattcagcctttcatcggagagcaacatttttccaccatcagggcctctggattcctggttacagtgcatttgagttatacagcaagaaaggctttttcatcatattcacagattctagtgtcaaagcatcaaaatatgatgattctgaagaatttaaacattcaagtagcttcagcatagaagaaatccaggcagcagtgccttacaggaagatgtgtgaatggagatatgaaccttgtgctacaccctgttttaaaacatgtagtgaccctgaagcactagcatgtaaatttcttccaccggttgaaggatgcttgccctactgccctaaaaatatgatccttgatgaggtcaccctcaagtgtgtttatccacgagactgtatacctgtgattcccacagaaccaacattaatgccaccagctaagccaactgtgcccatcactgtgtttgatatgctaacaccaactacaggcttggaatgtgagcctcagaaatttgatcctgtttatgattgtagccaatacatatgccttaatatggaatggcagttatacaactggtcccttaattgcccaaaggacgtggaaatgcctgactgtggtttccgaggaaggccagttcaagtgaacagtgatatctgctgccctgagtgggaatgtccttgtcggtgttccatgttgtcagaactgagcattattacatttgatggaaacaacgcagcattatatagcatggcttcttatatcttagtaagaattcctggtgaaattatagttgctcatatcgaaaaatgttccatgaatcagaatggaaactccttaaaaaagctagctccctctggaagaatctctggactttgttttaagaagttaaatgtgacaacacccatacataaaataattgtcaatcggttggcaagaaaggtagaagtggattccattgttgtgcctttgcccttttcaagtcaggaactgtccatagaggattctggttcaatgtatgtaattactactccagctggactaatcataaagtggtctcatcttacaggaatcatagacattcattttggcttccgatttaacttgtcatcctacacagaaggactctgtggaatttgcaatgaagatccggatgatgatctaaggatgcaaaatggcacaattattacaaatatggaagacataggattatttattgagagctgggaaattgagaaatcatttgaagtaacaatgagaagacctgttaggaattgtactgagcatgattgcagccagtgcattgatttattaaatagaagaattttcattccatgtcatgataaagtttcaccggaagacttttgtgaaaagatgtggatcaattatacctatttttggaactatgaatgtgatgcactttctgcatatgtggctctgtgcaacaagtttgatatctgtattcagtggagaacacctgattactgctccctgagttgcccagaggggaaggaatatcaaccctgtgtgcgaccttgtgaagcaagaacatgcctgaaccaatggttctatggacacacttcctgtttgaatctaagagaagactgtgtgtgcaaagttggaactattcttcacaggccacattcagcccagtgcattccagagaaagagtgtgcatgcactgatagtgaagaccaaccccgcactgctggggagatttggaatgggggcattgatgaatgcactctatacaaatgtttggagaatggaagcattatccctatagaacctgactgtgatgaagagcccacgccagtttgtgaacgagaagctgaagttgtcatgggcatcattgataaatggacctgctgttcaaaggaagtttgtggatgtgacacgactttgtgtgaaactagcattccaacatgtacaaatagtcaaaaattgattgttggccacagtcctctttcttgctgtccacagtacaaatgtgaatgtgacccattgaaatgccccagtatttcaacaccagaatgcagagaagatcaattcatgattcaagttcgacaggaagaaccttgttgtttttcccctttttgtgtttgtgaatcttgcaccaaacctgttccactatgtcatgatggggaatttctcacagtagatcttaatagcacacacttctgttgtcctcagtattactgtgtatgtgaaccaaacctttgtcctatgccattactcaactgtgcagaagatatgaatcttgtgaaagaaaatgtatctggtcaatgttgcccaacatggcactgtgaatgtaactgtgaaaaccttattatgccaacttgtgaagtgggagaatttactgcaatagaccataacttccagagtgattgtggatgcatacagtatctctgtgaaaaggatgatgtgtgtgtatttcaagaagtatcagtattgaatcctggacaatccatgataaagtatttggaagaagacttttgttatgctatagagtgtctggaagaaaaagataaccatacgggctttcacactctgaattttacactggtgaattgttcaaaaaaatgtgatgttcaccaggtatatactccatccccaagtgattatggttgttgtggtacctgcaaaaatgtatcctgcaaatttcacatggaaaatggaacatcagttgtatacgcggtagggagtacctggcactacaattgcaccacatatgaatgtgttaaaactgatgaaggagcaataattctgaactacacaatggtctgtcccccttttaatgagactgaatgcaaaatgaatgaagggattgtgaagctttataatgaaggctgttgcaagatctgcaaacgagaagaaagaatatgccagaaagtgatcattaaatcggtcataaggaaacaggactgtatgagccaaagccctataaatgttgcatcttgtgacggcaaatgcccatcagctaccatatataacatcaatattgaaagtcacctaagattctgcaagtgttgtcgtgaaaatggagtacgaaacttgtctgtgcctctgtattgctcaggaaatggcactgaaattatgtacactctccaggaacccatagactgtacgtgccagtggaattaaacccttgggttccaagagctctatacaacatcataacgtcagatagaattaacttttattgctattacttaggcatgtggcagatttatgctgtttaacaatactgtatttttcagacttggaatgtggaaatttagcaatttgtacaaaatatatacagtttcaatagcaaaattaaatttattgctttactctattttagaaaatcaaatgactgtaagttgttcagctgaaatgctgttatgtatttaattacaacttggtgcagatacagtatattctcatcaactggaaggttattttgcaaaattccttcaatttcactcagtagctctttttttcttaatttgcaaagtctgctatagctatccaaattaaggtaccctttaatatgtactccttaatctggtaaatgtgatcagttaaaattgtcatctagatagcaataaagagtgatatgcttagagatagataatggattatttaaaacctgaatggtttatagagaagtcattataaattcccctcattttgcaggtgtaacagataaccagagaagctgtgtgactcgtacaaatttattcagtgtaataatatagtaaattcatgttaacagttggattaaatcctagctctctcttattccagtactatatcacttttaaaatcctgagcagtatgtagtaagagtatatcacagaatctttcattcttaaagagtttgcattggatagaattaagtattttaagtttaacatatttgaaaaatgccccccatacattgttattccaatagtaaggagcagggaaatatagcatcatttgctaaatagaggagatagatcttgaactgttattttttatataattaaaactgctattaaatgtgttgtcagtatttaacatttagttactgtctcattaatatttaattttgaggatgtacttgcatactgttgaagttgagtgctgttttgctgttaatgctgctgctttgccaatgaagaatgaaataaatttatctgaa

SEQ ID NO: 162920 - DNA, 2087 bp, Homo sapiens
  Payload ID: 12097
  Gene Symbol: OTOGL
  Gene Name: otogelin-like
  ENST ID: ENST00000551340
  CDS Start-End: 1-500
gccacagtcctctttcttgctgtccacagtacaaatgtgaatgtgacccattgaaatgccccagtatttcaacaccagaatgcagagaagatcaattcatgattcaagttcgacaggaagaaccttgttgtttttcccctttttgtgtttgtgaatcttgcaccaaacctgttccactatgtcatgatggggaatttctcacagtagatcttaatagcacacacttctgttgtcctcagtattactgtgtatgtgaaccaaacctttgtcctatgccattactcaactgtgcagaagatatgaatcttgtgaaagaaaatgtatctggtcaatgttgcccaacatggcactgtgaatgtaactgtgaaaaccttattatgccaacttgtgaagtgcagccttgtgcagatgcagacatcagaaccctaggctgccttggtagagcagatcaagaacatttccatgaagcaaagttcctaagggagaatttactgcaatagaccataacttccagagtgattgtggatgcatacagtatctctgtgaaaaggatgatgtgtgtgtatttcaagaagtatcagtattgaatcctggacaatccatgataaagtatttggaagaagacttttgttatgctatagagtgtctggaagaaaaagataaccatacgggctttcacactctgaattttacactggtgaattgttcaaaaaaatgtgatgttcaccaggtatatactccatccccaagtgattatggttgttgtggtacctgcaaaaatgtatcctgcaaatttcacatggaaaatggaacatcagttgtatacgcggtagggagtacctggcactacaattgcaccacatatgaatgtgttaaaactgatgaaggagcaataattctgaactacacaatggtctgtcccccttttaatgagactgaatgcaaaatgaatgaagggattgtgaagctttataatgaaggctgttgcaagatctgcaaacgagaagaaagaatatgccagaaagtgatcattaaatcggtcataaggaaacaggactgtatgagccaaagccctataaatgttgcatcttgtgacggcaaatgcccatcagctaccatatataacatcaatattgaaagtcacctaagattctgcaagtgttgtcgtgaaaatggagtacgaaacttgtctgtgcctctgtattgctcaggaaatggcactgaaattatgtacactctccaggaacccatagactgtacgtgccagtggaattaaacccttgggttccaagagctctatacaacatcataacgtcagatagaattaacttttattgctattacttaggcatgtggcagatttatgctgtttaacaatactgtatttttcagacttggaatgtggaaatttagcaatttgtacaaaatatatacagtttcaatagcaaaattaaatttattgctttactctattttagaaaatcaaatgactgtaagttgttcagctgaaatgctgttatgtatttaattacaacttggtgcagatacagtatattctcatcaactggaaggttattttgcaaaattccttcaatttcactcagtagctctttttttcttaatttgcaaagtctgctatagctatccaaattaaggtaccctttaatatgtactccttaatctggtaaatgtgatcagttaaaattgtcatctagatagcaataaagagtgatatgcttagagatagataatggattatttaaaacctgaatggtttatagagaagtcattataaattcccctcattttgcaggtgtaacagataaccagagaagctgtgtgactcgtacaaatttattcagtgtaataatatagtaaattcatgttaacagttggattaaatcctagctctctcttattccagtactatatcacttttaaaatcctgagcagtatgtagtaagagtatatcacagaatctttcattcttaaagagtttgcattggatagaattaagtattttaagtttaacatatttgaaaaatgccccccatacattgttattccaatagtaaggagcagggaaa

SEQ ID NO: 162921 - DNA, 908 bp, Homo sapiens
  Payload ID: 12097
  Gene Symbol: OTOGL
  Gene Name: otogelin-like
  ENST ID: ENST00000550182
  CDS Start-End: 1-801
caagttcgacaggaagaaccttgttgtttttcccctttttgtgtttgtgaatcttgcaccaaacctgttccactatgtcatgatggggaatttctcacagtagatcttaatagcacacacttctgttgtcctcagtattactgtgtatgtgaaccaaacctttgtcctatgccattactcaactgtgcagaagatatgaatcttgtgaaagaaaatgtatctggtcaatgttgcccaacatggcactgtgaatgtaactgtgaaaaccttattatgccaacttgtgaagtgggagaatttactgcaatagaccataacttccagagtgattgtggatgcatacagtatctctgtgaaaaggatgatgtgtgtgtatttcaagaagtatcagtattgaatcctggacaatccatgataaagtatttggaagaagacttttgttatgctatagagtgtctggaagaaaaagataaccatacgggctttcacactctgaattttacactggtgaattgttcaaaaaaatgtgatgttcaccaggtatatactccatccccaagtgattatggttgttgtggtacctgcaaaaatgtatcctgcaaatttcacatggaaaatggaacatcagttgtatacgcggtagggagtacctggcactacaattgcaccacatatgaatgtgttaaaactgatgaaggagcaataattctgaactacacaatggtctgtcccccttttaatgagactgaatgcaaaatggtttgtactttgttgtatctaagaaaatttattattatataatttagaaaatacacattgatattttctaaggtcatactttcattgtggcttatacataatggcgaatgtgttattttcatgaatgaataaaagctctgttctatttt

SEQ ID NO: 162922 - DNA, 1434 bp, Homo sapiens
  Payload ID: 12098
  Gene Symbol: OTOL1
  Gene Name: otolin 1
  Uniprot ID: A6NHN0
  ENST ID: ENST00000327928
  CDS Start-End: 1-1434
atgtggatgttttcttggctttgtgctattttaattattttggctattgctggtatgaacacaatagcaaagaccacaccacataccaaatttacgaagaaatctgaggaaagagagatgccaaagggtctaaagccatccagtggcccacctccagaagaagaagaaaccctcttcacagaaatggctgaaatggcagaaccaattaccaaaccctcggccttggattctgtctttggcactgccactctctctccctttgaaaacttcactcttgacccagctgatttctttttgaattgttgtgattgttgttcacctgtacccgggcagaaaggagaacctggagagactggacagccaggtcctaaaggagaggctggaaatttggggatcccagggccaccaggagttgttgggccccaaggccctagaggctacaaaggagagaaaggactcaaaggagaacgtggggaccaaggagttccaggatacccaggaaaaccgggagcacaaggtgaacctggccctaagggagataaaggaaacattggtttgggaggagtgaaaggacaaaaaggctccaagggagacacatgtgggaattgtaccaaaggagaaaaaggagaccaaggggctatgggctcacctggcctgcacggagggcctggcgccaagggagagaagggggagatgggggagaagggggagatgggggataagggctgctgtggagattctggggagaggggaggaaaaggacagaaaggtgaggggggtatgaaaggggaaaaaggtagcaaaggagacagtggaatggaaggcaaaagcggccgtaatggtctgcctggggccaaaggtgatccagggattaaaggagaaaaaggagagttaggtcctcctggtctcctgggacctactgggccgaagggtgacattggcaacaaaggggtccgaggccccactgggaagaagggctctcggggctttaaaggctccaagggtgagttggctagagtgccccggtcggctttcagcgctggtttgtcaaagccatttcctcctcctaacatccccatcaaatttgaaaagattctctataatgaccaagggaattacagtcctgtcactgggaagtttaactgctctattcctgggacatatgttttttcctaccatattacggtgagggggcgacctgctcgaatcagtctggtggcccagaataagaagcagttcaagtccagagaaactctctatggtcaggaaatagaccaggcctctctcctcgtcatcttgaaattaagtgcaggagaccaagtctggcttgaggtgtcaaaagattggaatggggtgtatgtcagtgctgaggatgacagcatttttactgggttccttttgtacccagaggaaacttctggaatttcaccataa

SEQ ID NO: 162923 - DNA, 1864 bp, Homo sapiens
  Payload ID: 12099
  Gene Symbol: OTOP1
  Gene Name: otopetrin 1
  Uniprot ID: Q7RTM1
  ENST ID: ENST00000296358
  CDS Start-End: 26-1864
cagacttggcgcgggtgtctcgaagatgctcgagggcctggggtcgcccgcctcgccccgggcagctgcaagcgcctcggtcgcagggtcgtcggggccagcggcctgctcgcctccctcgtcctcggccccgaggtccccggaatccccggccccccggcggggcggtgtgcgcgccagcgtcccacagaaactggccgagatgctgagcagccagtatgggctgatcgtgttcgtggcggggctgctgctgctgctggcctgggccgtgcacgccgcgggcgtgagcaagagcgacctgctgtgcttcctgacggcgctcatgctgctgcagctgctgtggatgctgtggtacgtgggccgcagctccgcgcaccgccgcctcttccgcctcaaggacacgcacgcgggtgccggctggctgcgcggtagtatcacattgtttgcagtcattaccgtcatcctgggatgccttaaaattggatacttcattggattttcagaatgtttatcagccactgaaggagttttcccagtcacccattcagtgcatactttgttgcaggtatattttctttgggggcatgcaaaggatattatccagtctttcaaaacactggaaaggtttggagtgatccactcggtgttcaccaacctgcttctgtgggccaatggcgtcctcaatgagtcaaagcaccaactcaatgagcacaaggaacggctcatcactctgggttttgggaacataacaacagttttagatgaccacacaccgcagtgtaactgcacgcccccaactctgtgcactgccatctcccacgggatctactacctctaccccttcaacatagagtatcagatcctggcctccacaatgctctacgtcctgtggaagaacatcgggcgcaaagttgacagccatcagcaccagaagatgcagttcaagtctgatggggtcatggtgggcgcagtcctgggcctgaccgtgctggccgccaccattgctgtggtggtggtatacctgattcatattgggcgctccaagaccaagagcgagtcggcactcatcatgttctacctgtatgccatcaccctgctgatgcttatgggggctgcggggctggctggaatccggatttacaggatagacgagaagtcactggatgagtccaaaaatccggcccgcaaactggactcggacctcttggtgggcactgcctcgggctcctggcttatctcctggggctcaatcttggccatcctctgtgctgagggccacccccgctacacctggtacaacctgccctactccatcctggcgatcgtggagaagtacatccagaacctcttcatctttgaatccattcaccgagagcctgaaaaactctctgaggacatccaaacccttcgggtggtcacagtctgcaatggcaacaccatgccccttgcttcttcctgccccaagagtggaggtgtggccagagatgtggctccccagggcaaggacatgccaccagcagccaatggaaatgtgtgcatgagagaaagccatgacaaggaggaggagaagcaggaggagagcagctggggagggagcccaagcccagtccgccttccccgtttcttacagggcaacgccaagagaaaagtcctgaggaatattgcagccttcttgttcctctgcaatatttcgctttggatacctcccgcctttggctgtcgacctgagtatgacaatggattggaggagattgtctttggctttgaaccctggataattgtggtcaacctggccatgcctttttctattttctatcgaatgcacgcagctgcctccctctttgaggtctattgtaagatatag

SEQ ID NO: 162924 - DNA, 2147 bp, Homo sapiens
  Payload ID: 12100
  Gene Symbol: OTOP2
  Gene Name: otopetrin 2
  Uniprot ID: Q7RTS6
  ENST ID: ENST00000331427
  CDS Start-End: 93-1781
agaggagacgctcgccgtcccctgacccccagctcagcgccggctccaagcccagccagtgatccctctagccttctccagtcgcctccgccatgtccgaggagctggcccagggccccaaggagagccccccggcgccgcgtgcgggccccagggaggtgtggaagaagggtggccgcctgctgtcggtgctgctggcggtgaacgtgctgctcctcgcctgcacgctcatcagcggcggagccttcaacaaggtggccgtgtacgacaccgacgtgttcgcgctgctcactgcgatgatgctgctggcaacgctctggatcctcttctacctcctccgaaccgtgcgctgcccctgcgcggtaccctaccgggacgcgcacgctggccccatctggctccgaggtgggctggtgctgtttggaatctgcaccctcatcatggatgtcttcaagaccggctactactccagtttctttgagtgccagtcagccatcaagatcctgcaccccctcatccaggctgtgtttgtcatcatccagacctactttctctgggtctctgctaaagactgcgttcacgtccacctggatctgacctggtgtggtctcatgttcacactcaccaccaacctggccatctggatggcggccgtggtggatgaatctgtgcaccaatcccactcctacagcagttctcacagcaacgccagccacgcccgtctcatctctgaccagcatgcagacaacccggtcggaggagactcctgcctctgcagcacggccgtctgccagatcttccagcaggggtacttctacctatatcccttcaacatcgagtacagcctcttcgcctccaccatgctgtatgtcatgtggaagaatgtgggtagattcctggcctccacccctggccacagccacaccccaacccctgtcagcctcttccgggagaccttttttgctggcccggttctgggcctgctgctcttcgtggtggggctggctgtcttcatcatctacgaggttcaagtgagcggggacgggagccgcaccaggcaggccctggtcatctactacagcttcaacattgtctgcttgggactcaccaccttggtcagcctgagcggctccatcatctaccgttttgaccgccgggccatggaccaccataagaaccccacgcgcactctggacgtggccctgctgatgggtgccgccctgggtcagtacgccatctcttactactccatcgtggctgtggtggcgggcacaccccaggacctgctggcagggctcaacctcacccatgcactgctcatgatcgcccagcacaccttccagaacatgtttatcatcgagagccttcaccgaggaccgcccggggctgagcctcacagtacccaccccaaggagccctgccaagacctcaccttcaccaacctggatgccctccacacgttgtccgcctgcccacccaaccccgggctggttagccccagcccttcagaccagcgggaagcagtggccatcgtctcaacccccagaagccagtggagacgccagtgcctaaaagacatttctctgtttctcctactctgcaatgtcattctgtggatcatgcctgccttcggggcccgccctcatttcagcaacacagtggaggtggatttctacggctactccctctgggcggtcatcgtcaacatctgcctccctttcggcatcttctaccgcatgcacgctgtgtccagcctgctggaggtctacgtgctgtcctgaggcctccaacagaggcatggggggcaggaagagggggctcagctcatgtgcccactcagacaccctctgggaatgaatcccagctggtgccatatgacagcccatttccttctggtcccagagtggaattttcacaaaagttatttttccaggttcaatttttaaatcacagtcaggacaggcccatccaccccagtatgaccgtggggcatgaggtgactggggaagggagacctctcctggcagcatttctaggacccaacaagatctggaggtgccggctctggttccatctctaatcccctgctgtggcctggccagtgtactgcccggagctggaaaccaataaacctgtgatttgccccc

SEQ ID NO: 162925 - DNA, 2086 bp, Homo sapiens
  Payload ID: 12100
  Gene Symbol: OTOP2
  Gene Name: otopetrin 2
  Uniprot ID: Q7RTS6
  ENST ID: ENST00000580223
  CDS Start-End: 31-1719
tccctctagccttctccagtcgcctccgccatgtccgaggagctggcccagggccccaaggagagccccccggcgccgcgtgcgggccccagggaggtgtggaagaagggtggccgcctgctgtcggtgctgctggcggtgaacgtgctgctcctcgcctgcacgctcatcagcggcggagccttcaacaaggtggccgtgtacgacaccgacgtgttcgcgctgctcactgcgatgatgctgctggcaacgctctggatcctcttctacctcctccgaaccgtgcgctgcccctgcgcggtaccctaccgggacgcgcacgctggccccatctggctccgaggtgggctggtgctgtttggaatctgcaccctcatcatggatgtcttcaagaccggctactactccagtttctttgagtgccagtcagccatcaagatcctgcaccccctcatccaggctgtgtttgtcatcatccagacctactttctctgggtctctgctaaagactgcgttcacgtccacctggatctgacctggtgtggtctcatgttcacactcaccaccaacctggccatctggatggcggccgtggtggatgaatctgtgcaccaatcccactcctacagcagttctcacagcaacgccagccacgcccgtctcatctctgaccagcatgcagacaacccggtcggaggagactcctgcctctgcagcacggccgtctgccagatcttccagcaggggtacttctacctatatcccttcaacatcgagtacagcctcttcgcctccaccatgctgtatgtcatgtggaagaatgtgggtagattcctggcctccacccctggccacagccacaccccaacccctgtcagcctcttccgggagaccttttttgctggcccggttctgggcctgctgctcttcgtggtggggctggctgtcttcatcatctacgaggttcaagtgagcggggacgggagccgcaccaggcaggccctggtcatctactacagcttcaacattgtctgcttgggactcaccaccttggtcagcctgagcggctccatcatctaccgttttgaccgccgggccatggaccaccataagaaccccacgcgcactctggacgtggccctgctgatgggtgccgccctgggtcagtacgccatctcttactactccatcgtggctgtggtggcgggcacaccccaggacctgctggcagggctcaacctcacccatgcactgctcatgatcgcccagcacaccttccagaacatgtttatcatcgagagccttcaccgaggaccgcccggggctgagcctcacagtacccaccccaaggagccctgccaagacctcaccttcaccaacctggatgccctccacacgttgtccgcctgcccacccaaccccgggctggttagccccagcccttcagaccagcgggaagcagtggccatcgtctcaacccccagaagccagtggagacgccagtgcctaaaagacatttctctgtttctcctactctgcaatgtcattctgtggatcatgcctgccttcggggcccgccctcatttcagcaacacagtggaggtggatttctacggctactccctctgggcggtcatcgtcaacatctgcctccctttcggcatcttctaccgcatgcacgctgtgtccagcctgctggaggtctacgtgctgtcctgaggcctccaacagaggcatggggggcaggaagagggggctcagctcatgtgcccactcagacaccctctgggaatgaatcccagctggtgccatatgacagcccatttccttctggtcccagagtggaattttcacaaaagttatttttccaggttcaatttttaaatcacagtcaggacaggcccatccaccccagtatgaccgtggggcatgaggtgactggggaagggagacctctcctggcagcatttctaggacccaacaagatctggaggtgccggctctggttccatctctaatcccctgctgtggcctggccagtgtactgcccggagctggaaaccaataaacctgtgatttgccccca

SEQ ID NO: 162926 - DNA, 2363 bp, Homo sapiens
  Payload ID: 12101
  Gene Symbol: OTOP3
  Gene Name: otopetrin 3
  Uniprot ID: Q7RTS5
  ENST ID: ENST00000328801
  CDS Start-End: 1-1791
atgggccgcggagcccgagcggcggctgcgcagtcccgctgggggagggcgtcgcgggcatcggtctcacctggacggacgatccgctcagcgcccgcagtcggtgaagcacaggagactgaagcagccccggagaaggagaaccgagtggatgtgggggccgaggagagagcggccgccacccggccccggcagaagtcctggctggtgaggcatttctctctgctgctgcggcgggaccggcaggcccagaaggctggacaactcttctcggggctcctggccctgaatgtggtgttcctgggtggcgccttcatctgcagcatgatcttcaacaaggtggccgtcactctgggtgacgtgtggatcctgctggccacgctgaaggtcctctccctgctttggcttctctactatgtggcaagcaccacccgccgaccacacgccgtgctctaccaagatccccacgcggggcccctctgggtgcggggttccctagtgctcttcggcagctgcaccttctgcctcaacatcttccgagtgggctacgatgtgagccacatccgctgcaagtcacagctggaccttgtcttctctgtcatcgagatggtcttcatcggcgtccagacctgggtgctctggaaacactgcaaagactgtgttcgggtccagaccaacttcactaggtgtggcctgatgctgaccctggccacaaacctgctgctgtgggttctggccgttaccaatgactccatgcaccgagagatcgaagctgagcttggcatcctcatggaaaaatccacaggcaatgagaccaacacctgtctgtgcctcaatgccaccgcgtgtgaagctttccggagaggcttcctgatgctctaccccttcagcactgagtactgcctcatctgctgtgctgtgctgtttgtcatgtggaagaacgtgggccgccacgtggcaccccacatgggtgcccaccctgccaccgcacccttccacctgcacggggccatcttcgggccgctgctgggcctgctggtgctgctggcaggtgtgtgcgtctttgtgctcttccaaatcgaggccagtggccctgccattgcttgccagtacttcaccctctactatgccttctatgtggctgtgctgcccaccatgagtctggcgtgcctggcgggcacagccatacacgggctggaggagagagagctggacacggtcaagaaccctacccgcagcctggatgtggtgctgctaatgggtgctgcactgggccagatgggcatcgcctatttctccatcgtggccattgtggccaagcgcccgcatgagctgctcaaccgcctcatcctggcctactcgctgctgctcatcctgcagcacatcgctcagaacctcttcatcatcgagggcctgcaccggcgcccactctgggagacagttcccgagggcctggcaggaaagcaggaggctgagcctccccgcagaggctccttgctggagctgggccagggcctgcagcgggcctcactggcctacatccactcctacagccacctcaactggaagcggagggcactcaaggagatctcactcttcctcatcctctgcaatatcacactgtggatgatgcctgcatttggcatacacccggagtttgagaacgggctagaaaaggatttctacggctaccagatatggttcgccatcgtcaacttcggcctgcctctgggggtcttctaccgcatgcactctgtgggaggcctggtggaggtctacctgggggcctgaggctgcccacccccggcagaacctcgaagtgccaaggtggggaagatggtagcccagagtctctgagcagatgcctcattctgaggtgccgagaccagcctgaggctctcaaggcctcctgctccccagagcctcactgaaggggagggcactgcctagagccagaggccaacagcaggggcctggacactgagcttctgatgcccacggccaggcctgggcacatgcctgccccctgccttcccaccacgatccgcaagccaagggtgcaccccaggaggctggcaggggccccctcacggctactctgtgggagggtcagacctacatgaccgagtctggggagcttggcgaggggcacccctctccagccaggactcagaggtctgccccctgctgcgagaagagcacctggtccaagtgtggctctggacatcctcagagctcagagctccgagctaggaggccagctcctctccccacacacctgtctcctaatgagctcattcattggctgccaggcagggttcaacagctctctcctgccgcataaaccctatttgtttaatgga

SEQ ID NO: 162927 - DNA, 2516 bp, Homo sapiens
  Payload ID: 12101
  Gene Symbol: OTOP3
  Gene Name: otopetrin 3
  ENST ID: ENST00000580749
  CDS Start-End: 54-194
ttggctgcaccctctgggtccgagcccccgggagggtaattaacgagggattaatgagatttccaaagtcaacagaaaaatcgatgggccgcggagcccgagcggcggctgcgcagtcccgctgggggagggcgtcgcgggcatcggtctcacctggacggacgatccgctcagcgcccgcagtcggtggttagcccacggcgatgcctctcccggcctcagcccctgctgaggctacacccatgccttcttcagaagcacaggagactgaagcagccccggagaaggagaaccgagtggatgtgggggccgaggagagagcggccgccacccggccccggcagaagtcctggctggtgaggcatttctctctgctgctgcggcgggaccggcaggcccagaaggctggacaactcttctcggggctcctggccctgaatgtggtgttcctgggtggcgccttcatctgcagcatgatcttcaacaaggtggccgtcactctgggtgacgtgtggatcctgctggccacgctgaaggtcctctccctgctttggcttctctactatgtggcaagcaccacccgccgaccacacgccgtgctctaccaagatccccacgcggggcccctctgggtgcggggttccctagtgctcttcggcagctgcaccttctgcctcaacatcttccgagtgggctacgatgtgagccacatccgctgcaagtcacagctggaccttgtcttctctgtcatcgagatggtcttcatcggcgtccagacctgggtgctctggaaacactgcaaagactgtgttcgggtccagaccaacttcactaggtgtggcctgatgctgaccctggccacaaacctgctgctgtgggttctggccgttaccaatgactccatgcaccgagagatcgaagctgagcttggcatcctcatggaaaaatccacaggcaatgagaccaacacctgtctgtgcctcaatgccaccgcgtgtgaagctttccggagaggcttcctgatgctctaccccttcagcactgagtactgcctcatctgctgtgctgtgctgtttgtcatgtggaagaacgtgggccgccacgtggcaccccacatgggtgcccaccctgccaccgcacccttccacctgcacggggccatcttcgggccgctgctgggcctgctggtgctgctggcaggtgtgtgcgtctttgtgctcttccaaatcgaggccagtggccctgccattgcttgccagtacttcaccctctactatgccttctatgtggctgtgctgcccaccatgagtctggcgtgcctggcgggcacagccatacacgggctggaggagagagagctggacacggtcaagaaccctacccgcagcctggatgtggtgctgctaatgggtgctgcactgggccagatgggcatcgcctatttctccatcgtggccattgtggccaagcgcccgcatgagctgctcaaccgcctcatcctggcctactcgctgctgctcatcctgcagcacatcgctcagaacctcttcatcatcgagggcctgcaccggcgcccactctgggagacagttcccgagggcctggcaggaaagcaggaggctgagcctccccgcagaggctccttgctggagctgggccagggcctgcagcgggcctcactggcctacatccactcctacagccacctcaactggaagcggagggcactcaaggagatctcactcttcctcatcctctgcaatatcacactgtggatgatgcctgcatttggcatacacccggagtttgagaacgggctagaaaaggatttctacggctaccagatatggttcgccatcgtcaacttcggcctgcctctgggggtcttctaccgcatgcactctgtgggaggcctggtggaggtctacctgggggcctgaggctgcccacccccggcagaacctcgaagtgccaaggtggggaagatggtagcccagagtctctgagcagatgcctcattctgaggtgccgagaccagcctgaggctctcaaggcctcctgctccccagagcctcactgaaggggagggcactgcctagagccagaggccaacagcaggggcctggacactgagcttctgatgcccacggccaggcctgggcacatgcctgccccctgccttcccaccacgatccgcaagccaagggtgcaccccaggaggctggcaggggccccctcacggctactctgtgggagggtcagacctacatgaccgagtctggggagcttggcgaggggcacccctctccagccaggactcagaggtctgccccctgctgcgagaagagcacctggtccaagtgtggctctggacatcctcagagctcagagctccgagctaggaggccagctcctctccccacacacctgtctcctaatgagctcattcattggctgccaggcagggttcaacagctctctcctgccgcataaaccctatttgtttaatggattgc

SEQ ID NO: 162928 - DNA, 1477 bp, Homo sapiens
  Payload ID: 12102
  Gene Symbol: OTOR
  Gene Name: otoraplin
  Uniprot ID: Q9NRC9
  ENST ID: ENST00000246081
  CDS Start-End: 45-431
ccccgcttccagtcagagttcaagttaaaacagaaaaaaggaagatggcaagaatattgttacttttcctcccgggtcttgtggctgtatgtgctgtgcatggaatatttatggaccgtctagcttccaagaagctctgtgcagatgatgagtgtgtctatactatttctctggctagtgctcaagaagattataatgccccggactgtagattcattaacgttaaaaaagggcagcagatctatgtgtactcaaagctggtaaaagaaaatggagctggagaattttgggctggcagtgtttatggtgatggccaggacgagatgggagtcgtgggttatttccccaggaacttggtcaaggaacagcgtgtgtaccaggaagctaccaaggaagttcccaccacggatattgacttcttctgcgagtaataaattagttaaaactgcaaatagaaagaaaacaccaaaaataaagaaaagagcaaaagtggccaaaaaatgcatgtctgtaattttggactgacgttttaagaatttgttaccttacagaagagcaagggcttaggggttggaggtggcagataaaagaggattttcaactcaaatcttgtttcctgctggcctggtctgcccacgagctagagcggggaaatgttgagctcaaatgggtaaattgagaccagaaaattattttttcaacctagagaatctcctcttacagggggatgcatataacagatcatgtatgtgtagttatttctaagtagtaattcttcccagctctttgatttgccatatataaaataggtgggtcgtatgtcttccctttagacatgatgttttctactcatttgtctctctggccaattgaattattaataaaaggtctgtattatcaaagagtattctagtatttttgttacttttaatatttgatgccttttggaggtaaagctgttgggggaagaagagtttttggacccatagatgtttggatgatgtctctaatttgtcatttagaaaaatctcaaaaatgatttcagttgaataacttgccttctaaatgatcaatttacttctcccccaattttaaagaagtatgtgtatatttaataggggaaggtagtttatggaaatatttttaatggaatagttttcccttaatatgtatccttgctggatattattcaagctgcaagtcatcaaaagacccagaaaaaaaaaagtctgtaggttattttctctacttctatttcaactttgaatttcctcttcctgtgcaaattcctctagtcaagtgtgatatatcaagaaatctgaggaggatgcaggttttgtggtcctgatgggcccacaagtttttctatatttaactggaaatatgctttgattttgtgttattaatataattcttttgatgtagtcatgagtttttctttgtttgcatataattaaaatgcctctacttaatgtca

SEQ ID NO: 162929 - DNA, 566 bp, Homo sapiens
  Payload ID: 12103
  Gene Symbol: OTOS
  Gene Name: otospiralin
  Uniprot ID: Q8NHW6
  ENST ID: ENST00000319460
  CDS Start-End: 156-425
cccatccaggcagcacggctggctgagcagagacaagggctgcccacactgggactggtagaggaagccggccctgacggatgggtggtctcgcccttcctgggttcatcctgctgcaggtgggcctgagtcgcagatcaggaagcaccgggaagatgcaggcctgcatggtgccggggctggccctctgcctcctactggggcctcttgcaggggccaagcctgtgcaggaggaaggagacccttacgcggagctgccggccatgccctactggcctttctccacctctgacttctggaactatgtgcagcacttccaggccctgggggcctacccccagatcgaggacatggcccgaaccttctttgcccacttccccctggggagcacgctgggcttccacgttccctatcaggaggactgaatggtgtccagcctggtgcccgcccaccccgccaggctgcactcggtcgggcctccacaggcatggagtccccgcaaaaacctggcccctgcaggagtcaggcctggtctcacgctcaataaactccggactgaagatgca

SEQ ID NO: 162930 - DNA, 645 bp, Homo sapiens
  Payload ID: 12103
  Gene Symbol: OTOS
  Gene Name: otospiralin
  Uniprot ID: Q8NHW6
  ENST ID: ENST00000391989
  CDS Start-End: 232-501
cagcgtggacttgccagaagcctccctggcagccgagggcccttctataaagaggactcttgagctggcagcagagcccatccaggcagcacggctggctgagcagagacaagggctgcccacactgggactggtagaggaagccggccctgacggatgggtggtctcgcccttcctgggttcatcctgctgcaggtgggcctgagtcgcagatcaggaagcaccgggaagatgcaggcctgcatggtgccggggctggccctctgcctcctactggggcctcttgcaggggccaagcctgtgcaggaggaaggagacccttacgcggagctgccggccatgccctactggcctttctccacctctgacttctggaactatgtgcagcacttccaggccctgggggcctacccccagatcgaggacatggcccgaaccttctttgcccacttccccctggggagcacgctgggcttccacgttccctatcaggaggactgaatggtgtccagcctggtgcccgcccaccccgccaggctgcactcggtcgggcctccacaggcatggagtccccgcaaaaacctggcccctgcaggagtcaggcctggtctcacgctcaataaactccggactgaagatgcacaa

SEQ ID NO: 162931 - DNA, 2933 bp, Homo sapiens
  Payload ID: 12104
  Gene Symbol: OTUD1
  Gene Name: OTU deubiquitinase 1
  Uniprot ID: Q5VV17
  ENST ID: ENST00000376495
  CDS Start-End: 1-1446
atgcagctctacagcagcgtctgcacccactaccccgccggggccccgggtcccacggccgccgcccccgcgccacccgccgccgctacccccttcaaggtctcgctgcagcccccgggagccgccggcgccgcgcccgagcccgagaccggtgagtgccagcccgccgcggccgccgagcaccgggaagccgccgctgtccccgccgccaagatgcccgccttctcctcctgcttcgaggtggtgtccggggccgccgcgcccgcctccgccgccgccggcccgcccggcgcgtcctgcaagccgccgctgccgccgcactacacgtccaccgcacagatcaccgtgcgggccctgggcgccgacaggctcctgctgcacgggcccgatcccgttcccggcgccgcgggctccgccgctgccccgcgcggccgctgcctcctgctcgccccggcgcccgcagccccggtcccgccgcggcggggctcctcggcctggctcctggaggagctgctgcggcccgactgccccgagcccgcgggcttggacgcgacacgggaggggcccgatcggaacttccgactgagcgagcaccgccaggccctggccgccgccaagcaccgaggccccgcggcgaccccggggagccccgatcccggccccggtccgtggggcgaagagcacttggcggagaggggccccaggggctgggagaggggcggcgatcgctgcgacgcgcccggtggggacgcggcgcggaggcccgacccagaggccgaggcaccccccgccgggagcatcgaggccgccccgagtagtgcggcggagccggtgatcgtctccaggtcggatcccagagacgagaagctggccctatacctggccgaggtggagaagcaggacaagtatctgcggcagaggaataagtaccgattccacatcattccagacggcaactgcctctaccgagctgtcagcaagacggtgtatggggaccagagcctgcaccgggagttgagggagcagacggtgcactacatcgccgaccatctcgaccacttcagccccctgattgagggcgacgtgggggagtttatcatcgctgctgcccaagacggggcatgggccgggtacccggagttgctggccatggggcagatgctgaatgtgaatatccatttaactactggagggaggctggagagtcccacggtgtctaccatgattcattatttgggcccagaggattccctgaggcctagtatttggctcagttggctcagtaacggacactatgatgctgtatttgatcactcctatcctaacccagagtacgacaactggtgcaaacaaactcaagtgcaaaggaaacgcgacgaagaacttgccaaatctatggccatatccttgtctaaaatgtatattgaacaaaatgcatgctcttgaaatgtctcaaaaccttacaccctgggaataattgcatatataacttgtgtttggagaatcacatgaactttaatcagggtaatagcactttcaaacttgctagtagattttactgtaggtgtaatgccttaatcatctttttgaatgttttctcagagctggaggttgctgggcacctaaatgatgtttcatgatagctttgggtgattttactgctatttataatttgctgtataaagtgagcattacttaatttgcaagctgatttctcacagtgtaaatttgttcattcctggtagtctattttctataaaaatgtatttttgcacaacatttttaaaaactggtgtaccttcatctatgacgtgttccattttgacaaacagctttcaggcgtaaatccagagaagtgctttatatgaaatgtattattttgaacagagtttgtgatttggtagttattttatgttgttgaaatttgaatttcacaattcttagataattatttcaaatggatattgatgcattcttgttaccagatgtttggcccattccattttgatgaaacagagctgttgttttggaagtcattatttttctagaaatggcgaatcttttaaagaaaattacttaatggaaggttgtgggaaggtgtttttttgtgttttttttttggtttttgttttgtttttcctcttttaagggatagtagcaggtcttacttgaatgaaagtctgatatttgctgatggcagaatgattattctgtaccctggttgatgtgtagagtagattgtctggtgctctcagttgtttttatttacatttgtcacgttgttgtaagagaatgttaacatggtataaaactctgtgacaagataagcctcctgctttatataacttcttgaatccagctaagagatttataaactaatggcataaatgtctggagccaaccttggcagttatagcaggagaacactgtcttaatatttctttacattctttcaaaaggcaaaataggattgccctgtattgatgtagaaatgtctgtaaacagagcttgtatggtttgctgggtcaaacaatgtttccaacttaaaatcaatctcattgccactttaactacttttagtcatatttattaagtaatgcagtttgtactttttttattttgtaacattttgtgatttttttgtacaaaactgtatttgtacaatagagcaattcccagctgatggaatgaatgaataaaatgcaaaattatacttttacaatgcctttttggatagagtggtttttaaattgtgatgtttgtaggaaactttcttgcatgtatgcatgtacacaattttttttttccataaagatgccacagcaatagagaggtttcctaaattatcacatgaagaggataggctaatcatgagtaatttcaaaggataagtctgaataaaatataatttaaaagtggagtaatccaagaaa

SEQ ID NO: 162932 - DNA, 6397 bp, Homo sapiens
  Payload ID: 12105
  Gene Symbol: OTUD3
  Gene Name: OTU deubiquitinase 3
  Uniprot ID: Q5T2D3
  ENST ID: ENST00000375120
  CDS Start-End: 2-1198
catgtcccgaaagcaggcggcgaagagccggccgggcagcggcagccggaaagccgaggccgagcgcaagcgggacgagcgggcggcgcgccgggccctggccaaggagcggcggaatcggccggagtctggcggcggcggcggctgcgaggaggagttcgtcagcttcgccaaccagctgcaggccctggggctgaagctgcgggaggtgccgggggacggcaattgcttgttcagagctcttggtgatcaattggagggacactcacgaaatcatctcaagcacagacaggagacagtggactacatgataaagcagcgggaagattttgaaccctttgtagaagatgacattccttttgagaagcatgtggccagtttggcaaagcctggtacttttgctggcaatgatgcaattgtagcctttgcaagaaatcatcagttgaatgtagtgattcatcaacttaatgcccctttgtggcagattcgtggtacagagaaaagcagcgtgagggagttacacatcgcatatcggtatggagagcactacgacagtgttcggaggatcaatgacaactcagaggcacctgcacatctccagacggattttcagatgcttcatcaagatgaatcaaataaaagagaaaagatcaagacaaagggaatggactctgaagacgacctgagagatgaagtagaggatgctgtccagaaagtttgtaatgcaactggatgttcagattttaatttaatagtccagaacctggaagctgaaaattataatattgaatctgcaataattgccgtgcttcggatgaaccaagggaagagaaataatgcagaagagaatcttgagcccagtggtcgagtgctgaagcagtgtggccctttgtgggaggagggtggcagtggtgccagaatctttggaaatcagggcttaaatgaaggcaggaccgaaaacaataaggcacaggccagccctagtgaagaaaacaaagcaaataaaaaccagctcgcaaaggtcacaaacaaacagaggcgagaacagcagtggatggagaagaagaagcggcaggaggagaggcaccgccacaaagccctggagagcagaggtagccacagggacaataacagaagcgaagcagaggcgaacacgcaggtcaccttggtgaagaccttcgccgctctcaacatctgactctttggcctcttgggagttgtaagaagcggctggaaaaggattgctgtgtgctagactttccagtgaggccgtccttttataaaacgcaacacaaccaacgaagcccacacatgagctcacacactgagttagtttcgttcaagctgcctctttttttgttcgaagttttattagtgatatgttggtgttttatgaaaatgcagtgaggccattcatattctgtaatacaaaattaaaatactgagttttaggggcagatagttaggtcaggaaaaaccttttaagtggtggctttatttgccctgaaaatcagacttcagtgaccctaggatctttccttaacatttggggtgagttttgctgtaattgttcatgagtagtttagaataattgttagaaattcagaatgacaagtttccttagtttctctttcattctcaaacagatatatagggtagcttataaatgatctccaactcaggaatatgctttgatttacttctaatccaagttactcagaaaataattcaggaattgttttcccaaagttacgtgagggttgtggcctgcagtcaggatggaaattaaccgcatttctctccttcctgattctgatgttatttcagatgggatgcaggtgctgttagttcatttgcactcaagccatatgataaatgcagctgactgttaattaggcctggccttgttgggaagttgatagtggtgttgggtttttggtatttgtttcctgacagtggggagatggcatgttactgcttgtgatacagttctggaattctgatagtgtgtagagcagggtctatagttgtaacaggagacgaactcctggggttttgcctaagaggagtctaaagaattatgtttttataggagaagcctggaagaataaggtttttcatgttcgcattttaaataacgattttcttcccttctgttgtagacttagatgccttcagagagatacgtggtaacttgaccttataggtcgctaaacttagtattgtggaaattaaatcttataaaatgctacatttatttctttttatttaagccctgtttggcatttcaaagttgggaaaactccagcatctgctggaagttgttggaccagcagggttggttgacttaggttggaccagcagagaagagaacatactttggttgaggccttcgaatcactcttcagttctgaaatagacagacttgagcagtggagagacgtctttcctaaaactgagttaggtggatgtgaacttaagaactataacgtatgaggcagcccatcttggatcatctttgtcttttgggacctaatacttgggcaaataattgatgctgagttgaaaggtaaattattagttatcttccccacccctcgcatttcagaattataaaaattcggaggcaaattgaaaactaaaatgtttggtaggccctggagtcgccagattgtctttatcaccaggcctttggctttcttcagtttcactggtatcttttggttttgtttttgactttggtggctttttgtagttggagcatcagtagtctcttggaattgctcctaggacattgtggtttaggtttcttcctgggtacagtacattgtaaaatttagcagattaaaaaaagtacacagcattttttttctgtgcacgtcgcagagtcctgagcttgaggctgtgttactctactcattccaaacgaatgaaagatctctgttgccttactctaaggaagtgggatcgagtgcgttaggatctatggttgtcttggttttcaactctgggcagattcctgactggctgagtgtttctgaatgaagatgttttcctgtctgttttgtactgcttgagtgcagaggccagatcctctcagaaagataagattgtatgccagaaattcagattagcagtcagcttaagagagacttattgtcagaagtagtagaattgctttatttacttggttaatgaaggtggccttgggccctattgggttttagaagttttagaagctgctaaaaagttattaaagaatattgggaacatttattttttaaattacctaattctggtaataggcttcagcatttctggagtataataatggtggtttaaaaaactaatcaaacggctttagtaattttactactggtttcacagcttttcagttacagttggtctgtttagtgtgttaattattaggaatcgggtacatgcatccaacttcagtgataccttctagctaatggtttcaatttagacttcactgcctcagtctcactgggtacatgagaaggttggaatcaacatgcttagttgcctcagtgggcacttgaaaattccttcactggcagcccgagtggaggcccagtatgtctagtcctgggatgactgttgtcagcagctgttactctagtacaggtgctcctgtgaactctttattaggaactgaatgtgtcttaacctctgtgttacatcttggctggcagagatttatgttacatgagattgtcttggtagcttgtagtgtggtcaggagaaaggggatggagcagtggtgcatagctgcttactgctcttataaacggtatataaaggttttacggattttgaaaatatttttttttagaggtcaaaataaataccattttagtggcaacagctttgaactagagaggtagatgtattaaagcagcatagaaccataacttctagataatgtagttgccactaggagatattagaaagttagaatgtatgtgtgtatttagtttttcaataataatgaacatacactttcaggagcaaagtatggttgagaaattgtggcagaaagaattttaaatgttagtcgaagttgtctgtagtttctttattaagctctgaaaacacttccaatgccagtttgattctgagggcttgggaagtgggatctcccttgtggagcagctggagctggctgggagggagcctctccatgggtaatttattatgcctgccctgcttcccccagggagctgcttcagtgtgaaatgatgtgattgtcgggggtggggtgggaggagggccaccttcagtcggggagttgctcacatattacacaggtagcatcaggtggacttcagcgctgaactgtactagtagtgagtccctgtagtcaatgtgcaatttctctaattctgagaaactctgtagactctgcctgggttttactgggtcagcatagaatgctatcagtttacctctgtgaaatattcagtcagttgaaggaaacttggattcctagtcagaggtgactaaaagttaccctgaccaaaaggatctctgcggggggaagagaatggagcttcctgattttaatgtgttgcgtcagtggccctcttcgactcccgttttgggtagatgcgtagctcttcactttcttacctcaaggctctgtctagccatgttaaatctttagactcagtctgatgccgtttttctgttttgccattctcattattcacagctttcagaacaagtgttgctaaaactccggggcctttgacagttgttctgaggtgatttaataatggactttttataagttatgttttcctggctctaaagtaaatttttttttttttttttttgagacagagtcttgctttgttgcccaggctggagtgtggtggggcaatctcggctcactgcaacctccacctcccgggttcaagcgattctcctgcctcagcctcctgagtagctgggattacaggtgtgtgccaccatgcttggctaatttttgtatttttagtagagacggggtttcaccatgttagccaggctggtctcaaactcctgaccttgtgatctgcccgcctcagcctcccaaagtgctaggattacgggtgtgagcaaccctgcccggccagtaaattgtatttttttaatgacatcattgatttgaagatctagatggcataaattacgacgtctgccatcgcatattagaaaggggacagtcatatttgtaacgtggagagaacacggagcaccagtcaccacgtgcacttaggatgcagagcttaccgcacaccgctgatggggacctccggaaagagcggtgccttgtggttggcctggaagttctctcccaaggtgaaattcctttaaaacctcaggctctgacctatgtctttgaagcagctgctttgtagagtccctctctttactgtcctcgttaggactgttttgtggttccatgaaaatgtttagcatccttgcagaattacttgagaaggggctggtaccagtgtaaagaatctatttctgtaaaactacgaacttttgcatagggaatttattctaagcaggtcatagccgtgatccagagctgctgctgctcactgccagtccttgcggctggcggcgattgccggacagactctctgtggcctggctctcatccttggcgtgtcagcctgcggcaggctgccagccatccatgacaatcatgtgagctcagccacagacctcagctggcggtttgatccctggcaggtccctcgagcagtactggtaagaggcttcacacattttcccactcttacagttcatttttcatagtaggaagggcccttggcctccccagtgcctcttccagagcctccaccagcactaagctcagaggaaagaagaaaagggccaggagtcagacgtcacacccgggggctcccctttcccatgtagaagtgttggcatgcgtcagtctcctttacagaggggtggatgtatccgtggaggaggggccttctctctttctaattgcactatacttgttctagcttcagtctggagatacttaagacctccatggggtcgtgatccatagacttagcaagtcttgccttatctatggagctcgatggtgagaattgtgaccattgtctgatgtccatagttccttccccctagattgtttctttccacggattgtgttcatctgaaccattttattttttatttaccaaagtactgtacttggctatttgcagtgttttcaaaaccaaatgtttctttttttgtgtttttaatcttcgatacttggtgcaatagaagctgcaaagatgtgccactttatctatgaaatggagttttgtataccaataaattctagtttaaaaacaaa

SEQ ID NO: 162933 - DNA, 3829 bp, Homo sapiens
  Payload ID: 12106
  Gene Symbol: OTUD4
  Gene Name: OTU deubiquitinase 4
  Uniprot ID: Q01804
  ENST ID: ENST00000447906
  CDS Start-End: 189-3533
ggcagggcttccctatgcgcccggagagcgcggaccgctgcctcgggccgccgccgcctgccgccgctcgcggagcccgagccccagcccgagccgccgcctgccccaggccggggcgtcgagcagccggcggcctggccatgtggggctagccctcgccgcgcctggcctgcagcaggaccagcaacatggaggctgccgtcggcgtccccgacggcggggaccagggcggcgcggggccccgcgaggacgcgacgcccatggacgcctatctgcggaaactgggcttgtatcggaaactggtcgccaaggacgggtcgtgcctgttccgggccgtggcggagcaggtattgcactctcagtctcgccatgttgaagtcagaatggcctgtattcactatcttcgagagaacagagagaaatttgaagcgtttatagaaggatcatttgaagaatatttaaagcgtttggaaaatccacaggaatgggtaggacaagtggaaataagtgccctttctcttatgtacaggaaagattttataatttatcgggaaccaaatgtttctccttcacaagtaacagaaaataattttcctgaaaaggtgttactgtgtttttcaaatggaaatcattatgatattgtgtatcccataaagtataaagaaagctctgctatgtgtcagtctctcctttatgaattgctgtatgagaaggtatttaaaactgatgttagtaaaattgtgatggaactagacacgttggaagtagctgatgaagataacagtgaaatatcagattcagaggatgacagttgcaagagtaagactgctgctgctgctgctgatgtgaatggatttaaacctttgtcaggcaatgagcagctgaagaacaatgggaactctactagcctgcctttgtctagaaaggttcttaagtcactcaatcctgcagtctatagaaatgtggaatatgaaatttggctgaagtctaaacaagctcagcaaaaacgtgattattccattgctgctggcttacaatatgaagttggagacaaatgtcaagttaggttggatcacaatggaaaatttttgaatgcagatgttcaaggaattcattctgagaatggaccagttttggttgaagaactgggaaagaagcacacatcaaagaacctcaaggcacctcccccagaaagctggaacacagtgtcagggaagaagatgaaaaaaccttccacttctggacaaaatttccattctgatgtggattacagagggccaaagaatccaagcaagccaataaaagccccatcagcactacctcctcgactgcagcatccttcaggagtaagacaacatgcgttctctagtcattcttcagggtcacagtctcagaaattctccagtgagcacaaaaatcttagccggacaccttcacagatcataagaaaacctgatcgtgaaagagttgaggattttgatcacacaagtcgagaatctaactatttcggcctttccccagaagagcgcagagagaagcaagctatagaagaatcccgtttactctatgagattcagaacagagatgaacaggctttcccagccctttccagctcatcagtcaatcagtcagcttctcagagtagcaatccatgtgtccagagaaaatcatcacatgtaggtgatagaaaaggaagcaggcggagaatggatacagaagaacgaaaagacaaagactctattcatggacatagtcagttggataaaagacccgaaccaagcacattggagaatattactgatgataaatatgcaacagtttcatcaccatcaaagtcaaagaagttagagtgcccttctcctgcggaacaaaagccagcagaacatgtgtctttgtcaaatccagctccccttctagtttctccagaggtacatctaactcctgcggtgccttctttaccagccactgtgccagcctggccaagtgaacctacaacttttggaccaacaggtgtccctgctccaattcccgttttgtcagtgacacagactttgaccactggacctgattcagctgtatcccaagctcatttaacaccctctccagttcctgtgtcaatacaggcagttaaccagcccttgatgcctttgcctcagacattgagcctttatcaagacccactctatcctgggtttccttgtaatgaaaagggagatcgagccattgtaccaccttattcactgtgtcagactggggaggacctacctaaagataagaatattcttcgattcttcttcaatcttggtgtgaaggcatacagttgtcctatgtgggccccacattcttacctgtaccctctgcaccaggcctacctggcagcctgcaggatgtacccaaaggtccctgtccctgtttatcctcataatccctggttccaagaggctcctgctgctcagaatgaaagtgattgtacctgtactgatgcccactttcctatgcagactgaggccagtgttaatggtcaaatgccacagccagagattggaccgccgacattttcttcacctctggttatccctccatctcaggtgtctgaaagtcatggacaattgtcttaccaggctgatcttgaatctgagacccctgggcagcttctgcatgctgattatgaagagtcactaagtggcaagaatatgttcccccagccatcttttggacccaatccattcttaggcccagttcctattgcacctcctttctttcctcatgtttggtatgggtacccttttcagggattcatagaaaatccagtaatgaggcagaatattgtcctgccctctgatgaaaaaggagaattggatctgtctctggaaaatctggatctgtctaaagattgtggttcagtttcaacagtagatgagtttccagaagccaggggtgaacatgtacattctctccctgaagcaagtgtgagcagtaagccggacgaaggccggacagagcaatcttcccagacacgaaaggcagatacggcattggcttccatccctcctgtagcagagggaaaggctcatcctcccactcagattctaaacagagagagagaaactgtgcctgttgaacttgaacctaaaaggaccattcaaagcctgaaagaaaaaacagaaaaagtaaaagatcctaagactgctgctgatgtggtcagccctggggccaactctgttgatagcagagtgcaaagaccaaaagaagagagttcagaagatgaaaatgaagtgtctaatattttgagaagtggtagatccaagcagttctataatcaaacttatggaagcaggaagtacaaaagtgattggggctattctggtaggggtggatatcaacatgtgagaagtgaggagtcctggaaaggacagccaagcagaagtcgggatgaaggttatcagtaccatcgaaatgtcagagggcgaccatttaggggagataggaggagatcagggatgggagatggccataggggacagcacacttgatggttgttgccgaagtattttctaacagaaactcttaggtggaatgtttctgaaggctttaaaaaaaatacaataaagtaaaaaccgcagttggaactctttcctctccccagccccccttaccttcactcccatactggacaagacattttggacatgagttcaagggggcaggttaattcctggcattgccagttttcttcattcagaatctgtttgttgatcaagtgactgtccccgtaaaaagtagaagataagtttgttaaagtattttttataaacagcttaatataaaa

SEQ ID NO: 162934 - DNA, 7069 bp, Homo sapiens
  Payload ID: 12106
  Gene Symbol: OTUD4
  Gene Name: OTU deubiquitinase 4
  Uniprot ID: Q01804
  ENST ID: ENST00000454497
  CDS Start-End: 139-3288
cccattgtaacgccggagtgggacgctgctttgcgtctgaaaggtgcaaattgaaactcgaaagcccgcaaattaacggggtgtctctctcctgatgaagaggtattgcactctcagtctcgccatgttgaagtcagaatggcctgtattcactatcttcgagagaacagagagaaatttgaagcgtttatagaaggatcatttgaagaatatttaaagcgtttggaaaatccacaggaatgggtaggacaagtggaaataagtgccctttctcttatgtacaggaaagattttataatttatcgggaaccaaatgtttctccttcacaagtaacagaaaataattttcctgaaaaggtgttactgtgtttttcaaatggaaatcattatgatattgtgtatcccataaagtataaagaaagctctgctatgtgtcagtctctcctttatgaattgctgtatgagaaggtatttaaaactgatgttagtaaaattgtgatggaactagacacgttggaagtagctgatgaagataacagtgaaatatcagattcagaggatgacagttgcaagagtaagactgctgctgctgctgctgatgtgaatggatttaaacctttgtcaggcaatgagcagctgaagaacaatgggaactctactagcctgcctttgtctagaaaggttcttaagtcactcaatcctgcagtctatagaaatgtggaatatgaaatttggctgaagtctaaacaagctcagcaaaaacgtgattattccattgctgctggcttacaatatgaagttggagacaaatgtcaagttaggttggatcacaatggaaaatttttgaatgcagatgttcaaggaattcattctgagaatggaccagttttggttgaagaactgggaaagaagcacacatcaaagaacctcaaggcacctcccccagaaagctggaacacagtgtcagggaagaagatgaaaaaaccttccacttctggacaaaatttccattctgatgtggattacagagggccaaagaatccaagcaagccaataaaagccccatcagcactacctcctcgactgcagcatccttcaggagtaagacaacatgcgttctctagtcattcttcagggtcacagtctcagaaattctccagtgagcacaaaaatcttagccggacaccttcacagatcataagaaaacctgatcgtgaaagagttgaggattttgatcacacaagtcgagaatctaactatttcggcctttccccagaagagcgcagagagaagcaagctatagaagaatcccgtttactctatgagattcagaacagagatgaacaggctttcccagccctttccagctcatcagtcaatcagtcagcttctcagagtagcaatccatgtgtccagagaaaatcatcacatgtaggtgatagaaaaggaagcaggcggagaatggatacagaagaacgaaaagacaaagactctattcatggacatagtcagttggataaaagacccgaaccaagcacattggagaatattactgatgataaatatgcaacagtttcatcaccatcaaagtcaaagaagttagagtgcccttctcctgcggaacaaaagccagcagaacatgtgtctttgtcaaatccagctccccttctagtttctccagaggtacatctaactcctgcggtgccttctttaccagccactgtgccagcctggccaagtgaacctacaacttttggaccaacaggtgtccctgctccaattcccgttttgtcagtgacacagactttgaccactggacctgattcagctgtatcccaagctcatttaacaccctctccagttcctgtgtcaatacaggcagttaaccagcccttgatgcctttgcctcagacattgagcctttatcaagacccactctatcctgggtttccttgtaatgaaaagggagatcgagccattgtaccaccttattcactgtgtcagactggggaggacctacctaaagataagaatattcttcgattcttcttcaatcttggtgtgaaggcatacagttgtcctatgtgggccccacattcttacctgtaccctctgcaccaggcctacctggcagcctgcaggatgtacccaaaggtccctgtccctgtttatcctcataatccctggttccaagaggctcctgctgctcagaatgaaagtgattgtacctgtactgatgcccactttcctatgcagactgaggccagtgttaatggtcaaatgccacagccagagattggaccgccgacattttcttcacctctggttatccctccatctcaggtgtctgaaagtcatggacaattgtcttaccaggctgatcttgaatctgagacccctgggcagcttctgcatgctgattatgaagagtcactaagtggcaagaatatgttcccccagccatcttttggacccaatccattcttaggcccagttcctattgcacctcctttctttcctcatgtttggtatgggtacccttttcagggattcatagaaaatccagtaatgaggcagaatattgtcctgccctctgatgaaaaaggagaattggatctgtctctggaaaatctggatctgtctaaagattgtggttcagtttcaacagtagatgagtttccagaagccaggggtgaacatgtacattctctccctgaagcaagtgtgagcagtaagccggacgaaggccggacagagcaatcttcccagacacgaaaggcagatacggcattggcttccatccctcctgtagcagagggaaaggctcatcctcccactcagattctaaacagagagagagaaactgtgcctgttgaacttgaacctaaaaggaccattcaaagcctgaaagaaaaaacagaaaaagtaaaagatcctaagactgctgctgatgtggtcagccctggggccaactctgttgatagcagagtgcaaagaccaaaagaagagagttcagaagatgaaaatgaagtgtctaatattttgagaagtggtagatccaagcagttctataatcaaacttatggaagcaggaagtacaaaagtgattggggctattctggtaggggtggatatcaacatgtgagaagtgaggagtcctggaaaggacagccaagcagaagtcgggatgaaggttatcagtaccatcgaaatgtcagagggcgaccatttaggggagataggaggagatcagggatgggagatggccataggggacagcacacttgatggttgttgccgaagtattttctaacagaaactcttaggtggaatgtttctgaaggctttaaaaaaaatacaataaagtaaaaaccgcagttggaactctttcctctccccagccccccttaccttcactcccatactggacaagacattttggacatgagttcaagggggcaggttaattcctggcattgccagttttcttcattcagaatctgtttgttgatcaagtgactgtccccgtaaaaagtagaagataagtttgttaaagtattttttataaacagcttaatataaaacattatagatttagtgtttggcttttttccttataagtttataagtttgatttcagatgttggaaatgtgtgctttatagtgtttactaaagtgacaagaaaatataccatttgacacactatagattccaaacataacgttgcaccaaatagaaatgtatattttattatgcaatgccttagtcataaactgggctcaaacaattctcagcctaaaacactgttgtcttttaaaatgcttccaacccaaaggcctttcatctcaatatctgtcaaacttgaataatgtcttctctttaatattcacataaggcagcctattaactgtgtcttagcaatgttgtatatagttcttttaatattcataaggtatatttttgaattttggtatttgttgagattgcatagaagaatagtaggaaatccaatgaaatggctgtttccaccaagaattcttagcactggtgtaaatatcatggtgcctactcgaaagaaatgtagatgctatgcattttgaaaataatctgcatcagttagaactgcagaagtttttttaatgccactttaacactaatgcactgacagattctaaatattttgtgagaagaaatgttaaaaatttttagcttgacaggtttctagagttgttttcttcctcccccccccccccgcaccattggttgtgtatcactttcactttacacttgcatgttctacttgtcagggctggaactattgtatagaagataatatgattgtgacttctagttcttttctagaggatgctgctagaaaatggttttgctttgtattttatagcttgttacccttaggtaggtaacatcttacattctgttttcttccagtctttgcagtattcactagaggttccctttgcatgttgcactctgttctcatttggagattgaactctgaattaacacagtattcattcatctgtgttattttgtaaaaataactgtagcttatattctttatttgtgcataccaatgtgaaaatccactcttttattatgttgagattatcttctgatcaggaagtttgagtgctatgcaaataacatagtagtaatttctctttgcatgccatgtgtaatatacctagccaaaaccagatgcggtgactttctttttttgtaaagcaaattacttaagaaaatacaattcacttgaatttgacaaactgaaacagatgggttttctgggttctctgataacctatgggaatgtttggatgccagttgggctagtgaatcgccactgtactgtaataatggttatttacctctgtgctgttttaattacctaacgtctgtgtaactgctgatttgagtagtgattagcatttagataatgtaacaggattttagagagcactttgaaagataacattttattatgatggtgctaggtaaaaaattgtaaagactgggatggttgtgtggaaaacttttcttgagagaacctattgaaaggaatttgttgtcaccttcttaactagaatagttgttgaaggtaccgcttaagccatttttttcttaacatcggtggctcagttaaggaatgagaagatagagggtcctccactttcagctcatgcttttttatgtaggactagcttacctgattttaatgaaaatcacattttgatacaaacaccagatttgaaagttcaatgtgtttgatctcaggagtccaaaataagttgttgcttctagtgtcctgcattttattgactggggtttgatctcagcttctgaaaatgtttaaaaattggaaggaaatactactcatatcttcattgtcactttgtcttacctcaattgagtaacagaatatagctcctgaaggaaacactgatttgctttctgtttcccatatctcacctctaggatatgatggaagaagtgcttgaaagagaattttagcagatggtacttttctcagtgacctctggaataaaagaactgacttttgatagttttaaaattaatctttgcatgaaggttggtttcgctttttttcctttaagtttgtttttaaatgtattagtccaggggattttgccttatgctgaggtcaaactaaggataagcaagcttttgtccttcattttaactgttatgtcatactgttatgttgacatatttctttataagagaatagaggcaaaagtatagaactgaggatcatttgtatttttgagttggaaattatgaaacttcaccatattatgatcatacatattttgaagaacagactgaccaaagctcacctgttttttgtgttaggtgctttggctgaacttgattccagcccccttttccctttggtgttgtgtatgtctcttcatttcctctcaaatcttcaactcttgccccatgtctccttggcagcaggatgctggcatctgtgtagtcctcatactgtttactgataacccacaaattcattttcatggcagacctaagctcagaccctgccttgtcctggcaagcataggttttcccagaccacaatgctgatatatcttatttaatgcagactgtattcttgcagcgtgttgtttcctttgtgactcaaggttgaattaaaatgcctgtgaactgcaaacttgcttatgattgacttggtgcaataaagttcctttctaaccatttctggtttagaaaacattcagccatcctagaaactagcaatatttatttttgcctctttcgttttaccttcatttttagatgaggtaaatgttttgtcttttacttaagggtactaagcaaggtccactctagtgtagctgaagagaatgcatatttggctacactatttctgtttactgtattttgcttcctactttatgtctaaatgctattgtttgtttaaaatcctaataatgtctcatttccaatatgttattttcagataactaaggttttgctactaatgtcagccatttactctcccactaattgggattattttttaaaagaggtctttctccccgaaatacaagttttagaaaatcttagaagaggggtgggtgcatgtcttaatgctgggaagcggcaactttggggttgaacttacttgaatggattaaaaattgcattgtgttacagagctagaaaattttatgtatgaaaaacgataatagccttacactgagtacaaataatactttaagagcatgtgaagatgtgatcatttgtgatgttacttgtaaaaaaaagtatatatacatatcttttgaagtgttaaaaggaaactagtactttatattctttatcatatcactttttgtaagtgttgaatatattcctgtttatttttctatgttctgttttgtagccttaagaagtgtttcaaacatatctgaatgtataaaataagagtaaatgccctacatggtgtgatgctgcattatatataaaactgtgtgcatatattaaattttgtctcttgat

SEQ ID NO: 162935 - DNA, 543 bp, Homo sapiens
  Payload ID: 12106
  Gene Symbol: OTUD4
  Gene Name: OTU deubiquitinase 4
  ENST ID: ENST00000504501
  CDS Start-End: 127-543
aaattaacggggtgtctctctcctgatgaagagtgttgctgtggggtatgttcacagccacccactgcctccggtccttattgttagtaggtattgcactctcagtctcgccatgttgaagtcagaatggcctgtattcactatcttcgagagaacagagagaaatttgaagcgtttatagaaggatcatttgaagaatatttaaagcgtttggaaaatccacaggaatgggtaggacaagtggaaataagtgccctttctcttatgtacaggaaagattttataatttatcgggaaccaaatgtttctccttcacaagtaacagaaaataattttcctgaaaaggtgttactgtgtttttcaaatggaaatcattatgatattgtgtatcccataaagtataaagaaagctctgctatgtgtcagtctctcctttatgaattgctgtatgagaaggtatttaaaactgatgttagtaaaattgtgatggaactagacacgttggaagtagctgatgaagataacagtgaaatatcagattca

SEQ ID NO: 162936 - DNA, 864 bp, Homo sapiens
  Payload ID: 12106
  Gene Symbol: OTUD4
  Gene Name: OTU deubiquitinase 4
  Uniprot ID: Q01804
  ENST ID: ENST00000509620
  CDS Start-End: 65-502
ttacactaagaactctttgttacatcaggtattgcactctcagtctcgccatgttgaagtcagaatggcctgtattcactatcttcgagagaacagagagaaatttgaagcgtttatagaaggatcatttgaagaatatttaaagcgtttggaaaatccacaggaatgggtaggacaagtggaaataagtgccctttctcttatgtacaggaaagattttataatttatcgggaaccaaatgtttctccttcacaagtaacagaaaataattttcctgaaaaggtgttactgtgtttttcaaatggaaatcattatgatattgtgtatcccataaagtataaagaaagctctgctatgtgtcagtctctcctttatgaattgctgtatgagaaggtatttaaaactgatgttagtaaaattgtgatggaactagacacgttggaagtagctgatgaagataacagtgaaatatcagattcagaggatgacagttgcaagtaagaatgaaatcctaaaatacctttcttagtgccatacaaggaaagttaagtaaatgtctttacatttcagtaaatgtctttctataacatatattgaggtattaatggtattcataaaatacagcagtctgctgaagtttctttatccctgtcactaattttacctaatttctattatgggactgtttgttttgaaagttggtgtttttggttgatgagaatttacgtctgcaatctagatgcatatttgtagaataaatttggtcctacctatatgtgtgtgtattgtaaaattttaaagttaacttgtcaattgttcacatacccagtaatgaaataaaatggccgtttggatttccttca

SEQ ID NO: 162937 - DNA, 1255 bp, Homo sapiens
  Payload ID: 12106
  Gene Symbol: OTUD4
  Gene Name: OTU deubiquitinase 4
  ENST ID: ENST00000514973
  CDS Start-End: 139-1255
cccattgtaacgccggagtgggacgctgctttgcgtctgaaaggtgcaaattgaaactcgaaagcccgcaaattaacggggtgtctctctcctgatgaagaggtattgcactctcagtctcgccatgttgaagtcagaatggcctgtattcactatcttcgagagaacagagagaaatttgaagcgtttatagaaggatcatttgaagaatatttaaagcgtttggaaaatccacaggaatgggtaggacaagtggaaataagtgccctttctcttatgtacaggaaagattttataatttatcgggaaccaaatgtttctccttcacaagtaacagaaaataattttcctgaaaaggtgttactgtgtttttcaaatggaaatcattatgatattgtgtatcccataaagtataaagaaagctctgctatgtgtcagtctctcctttatgaattgctgtatgagaaggtatttaaaactgatgttagtaaaattgtgatggaactagacacgttggaagtagctgatgaagataacagtgaaatatcagattcagaggatgacagttgcaagagtaagactgctgctgctgctgctgatgtgaatggatttaaacctttgtcaggcaatgagctgaagaacaatgggaactctactagcctgcctttgtctagaaaggttcttaagtcactcaatcctgcagtctatagaaatgtggaatatgaaatttggctgaagtctaaacaagctcagcaaaaacgtgattattccattgctgctggcttacaatatgaagttggagacaaatgtcaagttaggttggatcacaatggaaaatttttgaatgcagatgttcaaggaattcattctgagaatggaccagttttggttgaagaactgggaaagaagcacacatcaaagaacctcaaggcacctcccccagaaagctggaacacagtgtcagggaagaagatgaaaaaaccttccacttctggacaaaatttccattctgatgtggattacagagggccaaagaatccaagcaagccaataaaagccccatcagcactacctcctcgactgcagcatccttcaggagtaagacaacatgcgttctctagtcattcttcagggtcacagtctcagaaattctccagtgagcacaaaaatcttagccggacaccttcacagatcataagaaaacctgatcgtgaaagagttgaggattttgatcacacaagtcgagaatctaact

SEQ ID NO: 162938 - DNA, 2740 bp, Homo sapiens
  Payload ID: 12107
  Gene Symbol: OTUD5
  Gene Name: OTU deubiquitinase 5
  Uniprot ID: Q96G74
  ENST ID: ENST00000156084
  CDS Start-End: 62-1777
ccgggttctctcccggcgtgccccgcgccgggtttgttggggggtactcggcagtgcagccatgactatactccccaaaaagaagccgccgcctcccgacgccgaccccgccaacgagccgccgccgcccgggccgatgcccccggcgccgcggcgcggcggaggtgtgggcgtgggcggcggcggcacgggcgtgggcggcggcgatcgcgaccgtgactccggcgtcgtgggggcccgtccgcgagcttcgccaccgcctcaaggcccgctaccaggaccgccgggcgctcttcatcgctgggcgctggccgtgccgcctggtgcagtggcgggtccccggccacaacaggcttctccacctccttgcgggggcccaggtggtcccggcggcggtcccggcgacgcgctgggcgcagcggcggcgggtgtgggtgccgcgggcgtggtggtgggtgtgggtggtgccgtaggcgtgggcggctgctgctccgggcctgggcacagcaagcggcgacgtcaagctcccggggttggcgcggttggcgggggcagtcccgagcgtgaggaggtcggcgcaggctacaacagtgaggacgagtatgaggcggctgcagcacgcatcgaggctatggaccctgccactgtcgagcagcaggagcattggtttgaaaaggccctacgagacaagaagggcttcatcatcaagcagatgaaggaggatggcgcctgtctcttccgggctgtagctgaccaggtgtatggagaccaggacatgcatgaggttgtgcgaaagcattgcatggactatctgatgaagaatgccgactacttctccaactatgtcacagaggactttaccacctacattaacaggaagcggaaaaacaattgccatggcaaccacattgagatgcaggccatggcagagatgtacaaccgtcctgtggaggtgtaccagtacagcacaggtacttctgcagtggaacccatcaacacattccatgggatacatcaaaacgaggacgaacccattcgtgttagctaccatcggaatatccactataattcagtggtgaatcctaacaaggccaccattggtgtggggctgggcctgccatcattcaaaccagggtttgcagagcagtctctgatgaagaatgccataaaaacatcggaggagtcatggattgaacagcagatgctagaagacaagaaacgggccacagactgggaggccacaaatgaagccatcgaggagcaggtggctcgggaatcctacctgcagtggttgcgggatcaggagaaacaggctcgccaggtccgaggccccagccagccccggaaagccagcgccacatgcagttcggccacagcagcagcctccagtggcctggaggagtggactagccggtccccgcggcagcggagttcagcctcgtcacctgagcaccctgagctgcatgctgaattgggcatgaagcccccttccccaggcactgttttagctcttgccaaacctccttcgccctgtgcgccaggtacaagcagtcagttctcggcaggggccgaccgggcaacttccccccttgtgtccctctaccctgctttggagtgccgggccctcattcagcagatgtccccctctgcctttggtctgaatgactgggatgatgatgagatcctagcttcggtgctggcagtgtcccaacaggaatacctagacagtatgaagaaaaacaaagtgcacagagacccgcccccagacaagagttgatggagacccagggattggacaccatctcccaaccccagtactcctgctctccggtgccacctcaccttctttggcttcttccctcttgcctccttctgttctttctgctctcccctcttttccctcctcctcacttccctctggctagcccacccctgcactctctctcattgccgctgccactatcacctgtctctctgccagctgatgtgccctgttgccccccaccccatcccgcacagaaccatccctgcattccacaggggactcgggcaagggtgccgaagatagacaagaggcacacagagacagaccaactggcagccaggcagccccagaggagagagacattcagacagaggaaagtctccctgcccctcattccttccaagatgagaaaaacttgccgccaccccccgacactgatgccagggaggtgggaggaagaagtgggaaatttcccttcccagtacccccaagaacgtctgagccttcaatgttgaattttttctttattaaaattacttttatcttataaaatcaactaatcaaaaatgatatagacgacagcactggctctgtgaaggtggcatctttctgggcaggcaggccatggggcatggaggagggtgcaaagatatgggttgctgtcttctggcctccagctgcatggaggccggcccagggtctagggtgtgcactgggcaagggcagggcggcaggtgtcaggccggcttggacaatgaaaccctgaccttgctgcattccttttgcttccaccaccactagcttctttggaatcttggggtgggggtcatctttggggattatggctgccacccgggatttgagtgtagggagtgtgggagcagccttggcagatggggcacccgtgccctgcaggtgttgacaagatccgccatctgtaatgtccttggcacaataaaaccaaatgtcagtttc

SEQ ID NO: 162939 - DNA, 2692 bp, Homo sapiens
  Payload ID: 12107
  Gene Symbol: OTUD5
  Gene Name: OTU deubiquitinase 5
  Uniprot ID: Q96G74
  ENST ID: ENST00000376488
  CDS Start-End: 30-1730
tttgttggggggtactcggcagtgcagccatgactatactccccaaaaagaagccgccgcctcccgacgccgaccccgccaacgagccgccgccgcccgggccgatgcccccggcgccgcggcgcggcggaggtgtgggcgtgggcggcggcggcacgggcgtgggcggcggcgatcgcgaccgtgactccggcgtcgtgggggcccgtccgcgagcttcgccaccgcctcaaggcccgctaccaggaccgccgggcgctcttcatcgctgggcgctggccgtgccgcctggtgcagtggcgggtccccggccacaacaggcttctccacctccttgcgggggcccaggtggtcccggcggcggtcccggcgacgcgctgggcgcagcggcggcgggtgtgggtgccgcgggcgtggtggtgggtgtgggtggtgccgtaggcgtgggcggctgctgctccgggcctgggcacagcaagcggcgacgtcaagctcccggggttggcgcggttggcgggggcagtcccgagcgtgaggaggtcggcgcaggctacaacagtgaggacgagtatgaggcggctgcagcacgcatcgaggctatggaccctgccactgtcgagcagcaggagcattggtttgaaaaggccctacgagacaagaagggcttcatcatcaagcagatgaaggaggatggcgcctgtctcttccgggctgtagctgaccaggtgtatggagaccaggacatgcatgaggttgtgcgaaagcattgcatggactatctgatgaagaatgccgactacttctccaactatgtcacagaggactttaccacctacattaacaggaagcggaaaaacaattgccatggcaaccacattgagatgcaggccatggcagagatgtacaaccgtcctgtggaggtgtaccagtacagcacagaacccatcaacacattccatgggatacatcaaaacgaggacgaacccattcgtgttagctaccatcggaatatccactataattcagtggtgaatcctaacaaggccaccattggtgtggggctgggcctgccatcattcaaaccagggtttgcagagcagtctctgatgaagaatgccataaaaacatcggaggagtcatggattgaacagcagatgctagaagacaagaaacgggccacagactgggaggccacaaatgaagccatcgaggagcaggtggctcgggaatcctacctgcagtggttgcgggatcaggagaaacaggctcgccaggtccgaggccccagccagccccggaaagccagcgccacatgcagttcggccacagcagcagcctccagtggcctggaggagtggactagccggtccccgcggcagcggagttcagcctcgtcacctgagcaccctgagctgcatgctgaattgggcatgaagcccccttccccaggcactgttttagctcttgccaaacctccttcgccctgtgcgccaggtacaagcagtcagttctcggcaggggccgaccgggcaacttccccccttgtgtccctctaccctgctttggagtgccgggccctcattcagcagatgtccccctctgcctttggtctgaatgactgggatgatgatgagatcctagcttcggtgctggcagtgtcccaacaggaatacctagacagtatgaagaaaaacaaagtgcacagagacccgcccccagacaagagttgatggagacccagggattggacaccatctcccaaccccagtactcctgctctccggtgccacctcaccttctttggcttcttccctcttgcctccttctgttctttctgctctcccctcttttccctcctcctcacttccctctggctagcccacccctgcactctctctcattgccgctgccactatcacctgtctctctgccagctgatgtgccctgttgccccccaccccatcccgcacagaaccatccctgcattccacaggggactcgggcaagggtgccgaagatagacaagaggcacacagagacagaccaactggcagccaggcagccccagaggagagagacattcagacagaggaaagtctccctgcccctcattccttccaagatgagaaaaacttgccgccaccccccgacactgatgccagggaggtgggaggaagaagtgggaaatttcccttcccagtacccccaagaacgtctgagccttcaatgttgaattttttctttattaaaattacttttatcttataaaatcaactaatcaaaaatgatatagacgacagcactggctctgtgaaggtggcatctttctgggcaggcaggccatggggcatggaggagggtgcaaagatatgggttgctgtcttctggcctccagctgcatggaggccggcccagggtctagggtgtgcactgggcaagggcagggcggcaggtgtcaggccggcttggacaatgaaaccctgaccttgctgcattccttttgcttccaccaccactagcttctttggaatcttggggtgggggtcatctttggggattatggctgccacccgggatttgagtgtagggagtgtgggagcagccttggcagatggggcacccgtgccctgcaggtgttgacaagatccgccatctgtaatgtccttggcacaataaaaccaaatgtcagttt

SEQ ID NO: 162940 - DNA, 2682 bp, Homo sapiens
  Payload ID: 12107
  Gene Symbol: OTUD5
  Gene Name: OTU deubiquitinase 5
  Uniprot ID: Q96G74
  ENST ID: ENST00000396743
  CDS Start-End: 62-1762
ccgggttctctcccggcgtgccccgcgccgggtttgttggggggtactcggcagtgcagccatgactatactccccaaaaagaagccgccgcctcccgacgccgaccccgccaacgagccgccgccgcccgggccgatgcccccggcgccgcggcgcggcggaggtgtgggcgtgggcggcggcggcacgggcgtgggcggcggcgatcgcgaccgtgactccggcgtcgtgggggcccgtccgcgagcttcgccaccgcctcaaggcccgctaccaggaccgccgggcgctcttcatcgctgggcgctggccgtgccgcctggtgcagtggcgggtccccggccacaacaggcttctccacctccttgcgggggcccaggtggtcccggcggcggtcccggcgacgcgctgggcgcagcggcggcgggtgtgggtgccgcgggcgtggtggtgggtgtgggtggtgccgtaggcgtgggcggctgctgctccgggcctgggcacagcaagcggcgacgtcaagctcccggggttggcgcggttggcgggggcagtcccgagcgtgaggaggtcggcgcaggctacaacagtgaggacgagtatgaggcggctgcagcacgcatcgaggctatggaccctgccactgtcgagcagcaggagcattggtttgaaaaggccctacgagacaagaagggcttcatcatcaagcagatgaaggaggatggcgcctgtctcttccgggctgtagctgaccaggtgtatggagaccaggacatgcatgaggttgtgcgaaagcattgcatggactatctgatgaagaatgccgactacttctccaactatgtcacagaggactttaccacctacattaacaggaagcggaaaaacaattgccatggcaaccacattgagatgcaggccatggcagagatgtacaaccgtcctgtggaggtgtaccagtacagcacagaacccatcaacacattccatgggatacatcaaaacgaggacgaacccattcgtgttagctaccatcggaatatccactataattcagtggtgaatcctaacaaggccaccattggtgtggggctgggcctgccatcattcaaaccagggtttgcagagcagtctctgatgaagaatgccataaaaacatcggaggagtcatggattgaacagcagatgctagaagacaagaaacgggccacagactgggaggccacaaatgaagccatcgaggagcaggtggctcgggaatcctacctgcagtggttgcgggatcaggagaaacaggctcgccaggtccgaggccccagccagccccggaaagccagcgccacatgcagttcggccacagcagcagcctccagtggcctggaggagtggactagccggtccccgcggcagcggagttcagcctcgtcacctgagcaccctgagctgcatgctgaattgggcatgaagcccccttccccaggcactgttttagctcttgccaaacctccttcgccctgtgcgccaggtacaagcagtcagttctcggcaggggccgaccgggcaacttccccccttgtgtccctctaccctgctttggagtgccgggccctcattcagcagatgtccccctctgcctttggtctgaatgactgggatgatgatgagatcctagcttcggtgctggcagtgtcccaacaggaatacctagacagtatgaagaaaaacaaagtgcacagagacccgcccccagacaagagttgatggagacccagggattggacaccatctcccaaccccagggactcgggcaagggtgccgaagatagacaagaggcacacagagacagaccaactggcagccaggcagccccagaggagagagacattcagacagaggaaagtctccctgcccctcattccttccaagatgagaaaaacttgccgccaccccccgacactgatgccagggaggtgggaggaagaagtgggaaatttcccttcccagtacccccaagaacgtctgagccttcaatgttgaattttttctttattaaaattacttttatcttataaaatcaactaatcaaaaatgatatagacgacagcactggctctgtgaaggtggcatctttctgggcaggcaggccatggggcatggaggagggtgcaaagatatgggttgctgtcttctggcctccagctgcatggaggccggcccagggtctagggtgtgcactgggcaagggcagggcggcaggtgtcaggccggcttggacaatgaaaccctgaccttgctgcattccttttgcttccaccaccactagcttctttggaatcttggggtgggggtcatctttggggattatggctgccacccgggatttgagtgtagggagtgtgggagcagccttggcagatggggcacccgtgccctgcaggtgttgacaagatccgccatctgtaatgtccttggcacaataaaaccaaatgtcagtttccctgagcgactctgttctgtgtggggcaggggttgggcgggcctctgggcagaggatgcaatggcacggaccttggcttgacctcagaggtgtgaatgctctccagcagggtctgtctgggggcctggagtttgtatttgatttgctgcttattaaacctccttctggacctattgccactgg

SEQ ID NO: 162941 - DNA, 2077 bp, Homo sapiens
  Payload ID: 12107
  Gene Symbol: OTUD5
  Gene Name: OTU deubiquitinase 5
  ENST ID: ENST00000455452
  CDS Start-End: 1-1335
ggcgtggtggtgggtgtgggtggtgccgtaggcgtgggcggctgctgctccgggcctgggcacagcaagcggcgacgtcaagctcccggggttggcgcggttggcgggggcagtcccgagcgtgaggaggtcggcgcaggctacaacagtgaggacgagtatgaggcggctgcagcacgcatcgaggctatggaccctgccactgtcgagcagcaggagcattggtttgaaaaggccctacgagacaagaagggcttcatcatcaagcagatgaaggaggatggcgcctgtctcttccgggctgtagctgaccaggtgtatggagaccaggacatgcatgaggttgtgcgaaagcattgcatggactatctgatgaagaatgccgactacttctccaactatgtcacagaggactttaccacctacattaacaggaagcggaaaaacaattgccatggcaaccacattgagatgcaggccatggcagagatgtacaaccgtcctgtggaggtgtaccagtacagcacaggtacttctgcagtggaacccatcaacacattccatgggatacatcaaaacgaggacgaacccattcgtgttagctaccatcggaatatccactataattcagtggtgaatcctaacaaggccaccattggtgtggggctgggcctgccatcattcaaaccagggtttgcagagcagtctctgatgaagaatgccataaaaacatcggaggagtcatggattgaacagcagatgctagaagacaagaaacgggccacagactgggaggccacaaatgaagccatcgaggagcaggtggctcgggaatcctacctgcagtggttgcgggatcaggagaaacaggctcgccaggtccgaggccccagccagccccggaaagccagcgccacatgcagttcggccacagcagcagcctccagtggcctggaggagtggactagccggtccccgcggcagcggagttcagcctcgtcacctgagcaccctgagctgcatgctgaattgggcatgaagcccccttccccaggcactgttttagctcttgccaaacctccttcgccctgtgcgccaggtacaagcagtcagttctcggcaggggccgaccgggcaacttccccccttgtgtccctctaccctgctttggagtgccgggccctcattcagcagatgtccccctctgcctttggtctgaatgactgggatgatgatgagatcctagcttcggtgctggcagtgtcccaacaggaatacctagacagtatgaagaaaaacaaagtgcacagagacccgcccccagacaagagttgatggagacccagggattggacaccatctcccaaccccagggactcgggcaagggtgccgaagatagacaagaggcacacagagacagaccaactggcagccaggcagccccagaggagagagacattcagacagaggaaagtctccctgcccctcattccttccaagatgagaaaaacttgccgccaccccccgacactgatgccagggaggtgggaggaagaagtgggaaatttcccttcccagtacccccaagaacgtctgagccttcaatgttgaattttttctttattaaaattacttttatcttataaaatcaactaatcaaaaatgatatagacgacagcactggctctgtgaaggtggcatctttctgggcaggcaggccatggggcatggaggagggtgcaaagatatgggttgctgtcttctggcctccagctgcatggaggccggcccagggtctagggtgtgcactgggcaagggcagggcggcaggtgtcaggccggcttggacaatgaaaccctgaccttgctgcattccttttgcttccaccaccactagcttctttggaatcttggggtgggggtcatctttggggattatggctgccacccgggatttgagtgtagggagtgtgggagcagccttggcagatggggcacccgtgccctgcaggtgttgacaagatccgccatctgtaatgtccttggcacaataaaaccaaatgtcagtttccctga

SEQ ID NO: 162942 - DNA, 1493 bp, Homo sapiens
  Payload ID: 12107
  Gene Symbol: OTUD5
  Gene Name: OTU deubiquitinase 5
  Uniprot ID: Q96G74
  ENST ID: ENST00000428668
  CDS Start-End: 213-1262
gtgacgctacaggggccagctatgctcccgggagtgttgatgttttccagtcattccggctgacagcgttcaagttggaatcctggaggggaggtgtttttcctgtcgtacgtgggacaggccacgctgtccgtccgcagtaccgacgcctgcagcaggagcattggtttgaaaaggccctacgagacaagaagggcttcatcatcaagcagatgaaggaggatggcgcctgtctcttccgggctgtagctgaccaggtgtatggagaccaggacatgcatgaggttgtgcgaaagcattgcatggactatctgatgaagaatgccgactacttctccaactatgtcacagaggactttaccacctacattaacaggaagcggaaaaacaattgccatggcaaccacattgagatgcaggccatggcagagatgtacaaccgtcctgtggaggtgtaccagtacagcacagaacccatcaacacattccatgggatacatcaaaacgaggacgaacccattcgtgttagctaccatcggaatatccactataattcagtggtgaatcctaacaaggccaccattggtgtggggctgggcctgccatcattcaaaccagggtttgcagagcagtctctgatgaagaatgccataaaaacatcggaggagtcatggattgaacagcagatgctagaagacaagaaacgggccacagactgggaggccacaaatgaagccatcgaggagcaggtggctcgggaatcctacctgcagtggttgcgggatcaggagaaacaggctcgccaggtccgaggccccagccagccccggaaagccagcgccacatgcagttcggccacagcagcagcctccagtggcctggaggagtggactagccggtccccgcggcagcggagttcagcctcgtcacctgagcaccctgagctgcatgctgaattgggcatgaagcccccttccccaggcactgttttagctcttgccaaacctccttcgccctgtgcgccaggtacaagcagtcagttctcggcaggggccgaccgggcaacttccccccttgtgtccctctaccctgctttggagtgccgggccctcattcagcagatgtccccctctgcctttggtctgaatgactgggatgatgatgagatcctagcttcggtgctggcagtgtcccaacaggaatacctagacagtatgaagaaaaacaaagtgcacagagacccgcccccagacaagagttgatggagacccagggattggacaccatctcccaaccccagtactcctgctctccggtgccacctcaccttctttggcttcttccctcttgcctccttctgttctttctgctctcccctcttttccctcctcctcacttccctctggctagcccacccctgcactctctctcattgccgctgccactatcacctgtctctctgccagctgatgtgccctgttgccccccacccc

SEQ ID NO: 162943 - DNA, 2487 bp, Homo sapiens
  Payload ID: 12107
  Gene Symbol: OTUD5
  Gene Name: OTU deubiquitinase 5
  ENST ID: ENST00000610466
  CDS Start-End: 325-1953
gtttcctttgaagcagaaggccggaacaagcgtagcaataaacttgctggacttggagagaaggctaagacaaactcgccgcactgccttcatcttggactttacatccgggttctcctctcggcgtgacccgcgcgccgccaccgccgccgccgccgccgccgcctcctccgccgccgagggttctcgaaccggtgccgcgatccctttatccgggtctcgccgttcccgtcgtgcctcgcgcactacactagccccctcatccgggttctctcccggcgtgccccgcgccgggtttgttggggggtactcggcagtgcagccatgactatactccccaaaaagaagccgccgcctcccgacgccgaccccgccggcgcgggcgtgggcggcggcgatcgcgaccgtgactccggcgtcgtgggggcccgtccgcgagcttcgccaccgcctcaaggcccgctaccaggaccgccgggcgctcttcatcgctgggcgctggccgtgccgcctggtgcagtggcgggtccccggccacaacaggcttctccacctccttgcgggggcccaggtggtcccggcggcggtcccggcgacgcgctgggcgcagcggcggcgggtgtgggtgccgcgggcgtggtggtgggtgtgggtggtgccgtaggcgtgggcggctgctgctccgggcctgggcacagcaagcggcgacgtcaagctcccggggttggcgcggttggcgggggcagtcccgagcgtgaggaggtcggcgcaggctacaacagtgaggacgagtatgaggcggctgcagcacgcatcgaggctatggaccctgccactgtcgagcagcaggagcattggtttgaaaaggccctacgagacaagaagggcttcatcatcaagcagatgaaggaggatggcgcctgtctcttccgggctgtagctgaccaggtgtatggagaccaggacatgcatgaggttgtgcgaaagcattgcatggactatctgatgaagaatgccgactacttctccaactatgtcacagaggactttaccacctacattaacaggaagcggaaaaacaattgccatggcaaccacattgagatgcaggccatggcagagatgtacaaccgtcctgtggaggtgtaccagtacagcacagaacccatcaacacattccatgggatacatcaaaacgaggacgaacccattcgtgttagctaccatcggaatatccactataattcagtggtgaatcctaacaaggccaccattggtgtggggctgggcctgccatcattcaaaccagggtttgcagagcagtctctgatgaagaatgccataaaaacatcggaggagtcatggattgaacagcagatgctagaagacaagaaacgggccacagactgggaggccacaaatgaagccatcgaggagcaggtggctcgggaatcctacctgcagtggttgcgggatcaggagaaacaggctcgccaggtccgaggccccagccagccccggaaagccagcgccacatgcagttcggccacagcagcagcctccagtggcctggaggagtggactagccggtccccgcggcagcggagttcagcctcgtcacctgagcaccctgagctgcatgctgaattgggcatgaagcccccttccccaggcactgttttagctcttgccaaacctccttcgccctgtgcgccaggtacaagcagtcagttctcggcaggggccgaccgggcaacttccccccttgtgtccctctaccctgctttggagtgccgggccctcattcagcagatgtccccctctgcctttggtctgaatgactgggatgatgatgagatcctagcttcggtgctggcagtgtcccaacaggaatacctagacagtatgaagaaaaacaaagtgcacagagacccgcccccagacaagagttgatggagacccagggattggacaccatctcccaaccccagtactcctgctctccggtgccacctcaccttctttggcttcttccctcttgcctccttctgttctttctgctctcccctcttttccctcctcctcacttccctctggctagcccacccctgcactctctctcattgccgctgccactatcacctgtctctctgccagctgatgtgccctgttgccccccaccccatcccgcacagaaccatccctgcattccacaggggactcgggcaagggtgccgaagatagacaagaggcacacagagacagaccaactggcagccaggcagccccagaggagagagacattcagacagaggaaagtctccctgcccctcattccttccaagatgagaaaaacttgccgccaccccccgacactgatgccagggaggtgggaggaagaagtgggaaatttcccttcccagtacccccaagaacgtctgagccttcaatgttgaattttttctttattaaaattacttttatctt

SEQ ID NO: 162944 - DNA, 1689 bp, Homo sapiens
  Payload ID: 12108
  Gene Symbol: OTUD6A
  Gene Name: OTU deubiquitinase 6A
  Uniprot ID: Q7L8S5
  ENST ID: ENST00000338352
  CDS Start-End: 35-901
agcaaatttcaactcccgcttgccattcaacatcatggatgatccgaagagtgaacagcagcgcatactgcgccgccaccaacgcgagaggcaggagctgcaggcccagatccggagcttaaaaaactcggtccccaagaccgacaagacgaaaagaaagcagttgctccaagacgtggcccgcatggaggccgagatggctcagaagcaccggcaggagctggagaagttccaagacgacagtagcattgaatctgtcgtcgaagacctggccaagatgaatctggaaaaccggcctccccgctcctccaaagcccacagaaagagagaaagaatggagtccgaggagagggagcgccaggagagcatcttccaggctgagatgtcggagcacctggccggcttcaagcgcgaggaggaggagaagctcgccgccatcctgggagccaggggtctggagatgaaagcgatcccggccgacggccactgcatgtaccgcgccatccaagaccagctggtgttcagcgtgtctgtggagatgctgcgctgccgcaccgccagctacatgaagaagcacgtcgacgagttcctgcccttcttcagcaaccccgagaccagcgactccttcggctacgacgacttcatgatctactgcgacaacatcgtgcgcaccacggcatggggaggccagctggagctgagggccctgtcgcacgtcctgaagacccccatcgaggtgatccaggccgactcgcccaccttgatcatcggggaggagtacgtcaagaagccgatcatcctggtctacctgcgctatgcctacagcctcggcgagcactacaactccgtgacaccgctcgaggccggcgccgccgggggcgtgctcccgcgtctcctgtaggccccaaggcgctgagcagccccgggaaactgtcgccgtcgccgcatctcctcagtaggctcagtttattttccccttttgcttttctctgtttttcttttccttccttttaatcaaaactacccgcccccgccccgcccccgctttcctaaccttgctgctttcacagggtgggaaacgaaattcgagggaaattccccggaaatatgagggaaatctctgcattgcaccaccagaggggcataaatttgaaagttctaacctcttcttgcccttaagggtcttttacctccctcaccaactaagatttggtcatgttgcgtataacttcaccacaaaaatggaaatattggccgggcgcggtggctcacgcctgtaatcccagcactttgggaggccgaggcgggcggatcacgaggtcaggagttcgagaccagcctggccaacatggtgaaaccccacctctacaaaaaatacaaaaattagccgggcgtggtggcaggcacctgtagtcccagatactcgggaggctaaggcaggagaatcgcttgacgggaagcggaggttgcagtgagccgagatcgtgcctttgcactccagcgtggaagacagtgagactccgtctcaaaaaaatgaaaaattagccaggcaggttggcgggggcctgtaatcctagctacttggggtgctgaggcaggagaatcaactgaacccgggaggcggaggctgcagtgggccgggatcgtactactgcactccagcatggaagacagcgagactccgtctcc

SEQ ID NO: 162945 - DNA, 10770 bp, Homo sapiens
  Payload ID: 12109
  Gene Symbol: OTUD7A
  Gene Name: OTU deubiquitinase 7A
  Uniprot ID: Q8TE49
  ENST ID: ENST00000307050
  CDS Start-End: 94-2874
gttctctcgctcaggtctctgcatgtagttgtcacttgcagctccatttccatcacgtggtaaaatgccctttctcttctttcctgcagatggatggtttctagtgtgcttccaaaccccacctcggctgagtgttgggcagcacttctacatgatcctatgactcttgatatggacgcagtcctgtcagactttgttcggtccacgggggcagaacctggtctggccagagacctgctggaaggcaaaaactgggacctgacagccgctctgagcgactatgagcagctccgccaggtgcacacagccaatctgccacatgtgttcaatgaagggcggggtcccaagcagccagagcgagagccacagcccgggcacaaggtggagcgaccctgcctgcagaggcaggacgacattgcccaagaaaagcggctttcccgggggatttcccacgccagctcagccatcgtctccctggcccggtcccacgtggcaagtgaatgcaacaacgagcagttccccctggagatgccaatctacacattccagttgccagacctgagcgtgtacagcgaggatttcaggagcttcatcgagcgggacttgatcgagcaggcaacaatggtggctttggagcaggcaggtcgcctgaactggtggtccactgtgtgcacgagctgtaaacggcttcttcctctggccacaacaggggatgggaactgccttttacatgctgcttcactgggaatgtgggggtttcacgaccgggacctggtgttacggaaagctctctataccatgatgaggacgggagctgagagggaagccctgaagcggaggtggaggtggcagcagacgcagcagaataaggaggaggagtgggagcgggagtggacggagctgctgaagctggcctccagcgagccgcgcacacacttcagcaagaatggcggcacgggcgggggtgtggacaactctgaggaccccgtgtacgagagcctggaagagttccacgtttttgtcctagcccatatattaagaaggcccatcgttgttgtggcagatacaatgttaagagactcaggtggagaagcgttcgcacccatcccattcggagggatctacctgcccttggaggtccctcccaacagatgccactgctcgcctctggttctggcctatgatcaagcccatttctctgcccttgtgtccatggaacagagagaccagcaaagagaacaagccgtgatccccctgacggattctgagcacaagctgctgcctctgcactttgcagtggaccctggcaaggactgggagtgggggaaagacgacaacgataacgcccggctggcccaccttatcctgtcgctagaagccaagctgaaccttctgcacagctacatgaacgtgacgtggatccggatcccctccgagacacgggcgcccctggcacagccggagtctcccacggcctcggcaggggaggacgtgcagtccctggccgactcgctggactcggaccgcgattcggtgtgcagcaattctaacagcaataacggcaagaacggcaaggacaaggagaaggagaagcagcgcaaggagaaggacaagacgcgcgccgactccgtggccaacaagctgggcagcttcagcaagacgctgggcatcaagctgaagaaaaacatgggcggcctcggcggcctggtgcacggcaagatgggccgcgccaactccgccaatggcaagaacggggactcggccgagcggggcaaggagaagaaggccaagtcgcgcaagggcagcaaggaggagtctggtgcgtcggccagcacgtcgccgtcggaaaagaccacgccgtcgcccacagacaaggcagcgggcgcgtcgccggcggagaagggcggtgggccgcggggcgacgcctggaagtacagcacggatgtgaagctgagcctcaacatcctgcgcgccgccatgcagggggagcgcaagttcatcttcgccggcctgctgctcaccagccaccggcaccagttccacgaggagatgatcggctactacctgacgagcgcgcaggagcgcttcagcgccgagcaggagcagcggcgccgcgacgccgctactgcggccgccgctgccgccgccgccgccgccgccacggccaagcggccgccgcgcagaccggagacggagggcgtgccggtcccggagcgcgcctctccgggcccacccacgcagctggtgctcaagctcaaggagcggccgagccccgggcccgcggcagggcgtgcggcgcgggcggcggcgggcggcacggcctccccggggggaggcgcgcggcgtgcgagcgccagcggaccagtgcctggccgcagccccccggcgccagcgcgccagagcgtcatccacgtgcaggcgtcgggcgcgcgggacgaggcgtgcgcgccggccgtgggggcgctgcggccgtgcgccacgtacccgcagcagaaccgctcgctgtcgtcgcagagctacagcccggcgcgcgccgccgccctgcgcaccgtcaacacggtcgagtcgctggcgcgcgcggtgcccggggccctaccgggcgcggcggggacggcgggggcggccgagcacaagtcgcagacctacaccaacggcttcggcgccctgcgcgacggcctggagttcgccgacgccgacgcgccgaccgcgcgctcgaacggtgagtgcggccgtggcggcccggggccggtgcagcggcgctgccagcgcgagaactgtgcgttctacgggcgcgccgagaccgagcactactgctcctactgctaccgcgaggagctgcggcggcggcgcgaggcgcgcggggcccggccctgagcggcgcggcgcggcgcgggcggcgaggttctaccttcgaggatttcttttccattgtgtcggtgtcttttttacatgccctggtccaccggaaggccggcgcctcctctgtcagtgccgtgtacgtgtttggtcaaacgttcctaatggtgcctgaacctacactgacgccactcaggtagtagacggataggaaacaagtcatactgttggaagtgggtgtgctagcctagcatctgcctcgtacctgtggaaactcaatagccattgcaagagtatttttgttcctcagtaagagaaataaagaaattcgcagccctttgttttaagaagggagtgttttacatgctttttttgcttttttttttttctcctaccctagcgatgacctcttccaggtagcggtcccttgtgcgcggttggtagtacccagggcttagagcgagcgcgcacccggggctgcggtggaggctcctctgtgagctctacctgcctcccatcccgaggcctaggagaaggcgggtacctggccgccagctgacgccctggtggtcactgtggccctttagaaacacacagctccatttcataagcaaaacctcctcccccagccccggctcaagcaccattcacactgccatccaagccgcgggcggccgtggaaagggcactggaccacccgtctcgcgggcgccgtgaggtacagcgatggctcccagtgccgggcagttcaggtgacaggagctttccaaagacacctagggtccaaaaagcagggttcccatctcacaatttggatttgctcatagaggagcagataggacaggctgctcacatttctcctttgaaggcacttccacagtggactgtcgctggcgggcccctgggcggtgaccatcggtgccccgggagacagcgaggaattgaccctttggtcactgtgtaagcccccactaggctgctgctctttccaaagggaaggggctgggggaaccaggaaggaagcccacccccacacctgcatctgtctgggttcagccaggtaaagggactcactgtgatcgtggcccctccacggggcaggacgaccctgcctccgtctcgtgacacaatgagggagcagcccgatccctgagcggtctcttttttggtgcctcctacatttcttgaggaaaaaaaaaatgtgtccttagctaccctgttttgagcagcaatatgcagcctcttccttccaagattacctccggagaacaccgttcttggccaaggacactgaggagctaaatctgcctcactaaggaacgagcttgtttccaagaaatgaggataagatgggtaaaatcctcactaacaaagaatactataaaacctgtgagagccttagaatagcttctaataatcctaggacaggagaaagcgcctggctttgctgtgagtgtatcctcagaaaaagcaggaggtcgaccatctcttcactggagccagcttctcctctagaaacgatgcttttttccctaactaaagagcagcaaaaacaaaaaaaaagggggggcgaggggattttttttacttgtttgagaaattataataaaataattgagtatctcctgtgagtaatgcctttttgtttttaattattccacagcaggtggagttttcagtaatttgttcaagttttgcataagtggttccttaaatcaaaaattatttattaaataggatctttaagaaattttttgaaagttttacttttcctgctgaacaatattttcaatgtgtggtaattactgtactaacatccatgtccctaatattactggggtttcttttattactcagaaaacaaaagtggttttttaaaaatctcatggagagggtctgtggcagctttctggactgattcttcgtgtcacgctgagcagctgctttggcatccaaagctgtgggatcacagaaagtgttgcttcaggtgtggatgccagccactcctcatgctcgtcactcttaaaagattgagacacccaaccttaaaaatgctccaataatccattcagaaaccaaactcatatgcacaagatgtcaaggaggcataaagtcaattcttgcttgtttttttcatttcttaatgtaaaaacagccaaccagaaatttctaaaactggctatgctaattcagatattttctttctcacgctatctgccaggtttgtctaatttaaaaaataaaaaaataaaacagaataaaaaccgtccattgtaatagaggaaaaccttccaaaccaggcagagtacgtaattatcaaaacaccaggacctattctacccttgcatttccaagttacctccacccatcaccatctgatgacagatgtgccctaaataagagcctgagataaagccactggctgcatcctgcaccccagcttctcaatgtggtaacgaggcgccagacgcctgtagacacctgctccaggctgatacattaccactcagtccacatgacttaggaatagccatttccttttgtgagagagctggatccatccttcctctaaacagtattaaaaatgcaaaagggagagagcggatggtcatattaaatgtgctagtcccgtgcaccgacagcatgctccttgagaagaggcgtgtagacctcgtccctggccagagaccaacttcagcaggctggccagaaactattaaaaactgtgttgactgcatgtgggccaagggcttccctcgtgttccatggcgtgagggccctttgtggagcagggagaaagggaagaaggtgagtcctaccggggtgcatggccctgctgccctagctgaccctgcctgagagcagccttccccacctgatctggccacacttccctttctaggaaggacaggtgtctccaagggactgcaggtttccagaggatcccagatacttctaaacccctgcgaaggttatttcagaaatttactttacatttcctgcacatttgttatctgggtaaatgatttttttaaaatattgttaagggaaggtgtttttcagtgtattctgttggtagactttatgctgtgttacgttgaaattttacaagccaagtttaaactgtactataaaaattatttttgtattattttcagaacatgccacagagcaatattttgcacccgttattgccacagggttgtcccttggaagggtaactggaggtgggaaggagctccactgtgggctccggggggttaaacgctttttgctgcttgttcaaataccttctgaaagtgggaatgtatcagtgtctttttttattgaaagcttgatttccttttttctgttcatggattttggtactgcacctttcctcttaaatgaatactttgtattcactaaattactgtggaccttttcatacctattaccacccagtggcatttgaatctatttacaaatcgaatgttttcccaaatgatttaatttactacttctcgtagcttactgtcaagaattgggggtgctgaagataaaaggactctccatgccccccaggtgcacacctcagggtgtggacatcctccatgcagagcccgccctgtctctggggaggggtcatgggcccatcaccccccccccccacttagtgtccacaaacttattttgcgaactattctactttgcaaaaataaacttaaaatatacttcccattggttaagataaaagggctgtacttatcagtggtgggaaatttgtacaagaaaaaacagacttttccaaatccatgtgtgtaagttccattccatgtgagtcttttatttacgaagagacctggagtaaaagctgaaggcatctactgtatgtttggggctcctttctttatggccatgattttttttctcctcatcttggtgtggactttaaaattaagtacccccagtgttctgtcctttttctttcctcagtgcttctaatagataagaagaaatgtgtttctgtggctgagcaagccctgctgggccagacagaccttaccagccctggcttcatcctcgctgggctgcagaggcggcccctgctctagttgagtccggttctgctgccagctgaggacagacacaccgtatgaagggcctagaggtggctggcatgccagggagcaggtggccccttccaaaacgccttaaagtggtggctctctagagatctgaggcaccaccttcccatttactcctgactctaaactctagctggcctgttttagtgtggctggccggggcagtgaccagcgctcagctttgttcttgtttaattcaagtccaccctgttgcccgtgtcctctccacagctctgggtctgttggcccggagtgtatttctgccagtgctgcctcactgactcgggagtgggtcctgggtagttcacgatagagaggccagcacacgccatggggagagccccccacgctcaccccaggaggccctgcggcacatccaggctggaccactctgcaagcttctgtcacaaaagacagctccgggcactgtgcaaattggcctgttagcagttatgcaggtcccttctttgccaaaagatctattattcctccccactgcacccccagcagaaaagagcgagggagatgccctgcagggaccccttgggaacaacagttatgtgcagtctgtgcagtatgaagaacttggccccaccaggctgagccgaagacacacgtagttgcagagtagcactgaagccatcatctccaaccatgctagtaatgttactgtttctatttattttgccaaatgatttgttgaaaattgcatttttgctattttaatcttgccaaaaaagggggcctcactaatcctaattatgtacatacagaatgatgcacattgcttgcatctttttattcctcccaaagagcatatcaaggatatatatatacataatttgttagtttaacataaggcgaagagtaccatttggttttaagagtaaatataggctgaatttattcaagaccaaagcaacctatttaatgaggacaaatgagtgaaaccagctgttttagaatttatctgcagacactggagtgctcctttaaacgaagaaacagcctcccatggcagaggaaaagccaggtccttacaaaggcctctcccatcccagtacttcttctgcctgctgctctgccctgggacgtaggccttcctgccgtttctagtcacaggcaccctcctgcctcagggcctttgcacatgccattccttctacctgaacattcttccccagagagccacatggttcacccctcactacctgccagtctttgctccaatgtcacctttcaacgaggccttccctgacttatttaaaaggacaacacaccccaccctccctccctacccacctctctgcatcttcttcttgtgcacctatcaccatctgagtgctgcagatgttaatcattcatccatttatttgattctcgcctccccatctcccatagactgtaagctccatgtgggcaggaacttttatatgtcttgctcattgctgtatcctggtgcctacaacagtgcctgacacatattaggcactggataagtatttattgaaaaaaggaaattaaatcagtaaattgaaaactattaagaggccagaaaatgtcaatttcagctttcatcaaatctaggttctattattgtgagaactttagctgacccagtgacctggctcctatgggtacaagatggttagatacaccgggcagcagcggtggcttctgttcacagacaagtgaatgcctgccctgccgctagccccacctcacaaatatgaggctcactgttcgcaggggagcattttggaaccagctgggatgaagacagttttctgcaggtagcttttgtagccagatgcacagtagtgggttcccatcactccatgaggtcactgtagacctggaccattccagagaatcctttgtaatcagtctttaggtgtctcccagtccttcccagttcaacacgggtggcagcagatggcccagcccagggaaagtccacctgaccattagaaggactcatcctccagccaccaaagcaaggctgcagaggaagaggagcttgtcacaaacattaaccggctcagggctgggtaactgcattgacaaatttggaagcagcagggccagagagccaaggcccccgggtatccccattggccactggtggaggtgcactggaaggtcagggccttgacaccacagagccaagcaacacacacctccttgggcccaggccccagcacggtggccctccagtgctggcaggtggcctcacccacagcaggggaggcgtgggtcctccaatgaccttcctgcccctgccagatgattttcacaactacctaactttggtgtttacttctaggtcctttggccaaatgcgttttcttctaagagttgttggcaaaatactgttacaagcttcttatgggacttttgtcctactgtggcctggttaaaggctttgtcctcctgtttaatccacttccgtggttttgctgtcatttctcttgatgccatattttcaggtccctcgtgggagggggcataaggtctccatcgtgatgccctctctgcagctgtccagccagcagtgagtgggcccacacatgtgcattcctgtgcttgaattgccaaataaacagtgtccctttcattgctgcccaaacagactggaagcctgctcctgccagcactcagggagggagtgtgtgcttcccaagagcctgcccccttggcccatgcaaactttctccatggcaggtgtccgtgaaggtctcccaggccctatgggctgtccagctctttgcacacattcttcccgcttgcaggaatggaatccaaacacctgatacggaatgatgacttggcagtggggagtggggcagcttgtctccgctaacttaggaccaaaactaggaaactcaccatgagcatgtgttggagatcagctgtggcctccagcccctgtacacacagaggcaagccccacctctgacagagccagtcaccgttcagtaggagcttgtcttccctgggcccccaggtgggaaaggctgggctcttagtcctacaagtaaaggcgctgttaggagcaaggagcaggcttagctgggtccacagagggactaagctccttagtgacctgttactgcctcatctacggagtttgaactccattcaccatcacctttgagaatttggccttgttttaactaaggattgttgaagttaattataacaagggaccatcctcaccctgtgtttgctttgttccattaaacgtgcgtttggcctaatgaagtcagtgaatgttcctcttttttcttttttggtttctttgactgatttttggatgatatatgttgctttatttctcccattttctttgattactgtggacaaaggaaaacactgaggcaaaagtaggtcgtcaatcacattactttgacccagttgtgcagaacccctttctacctgcaggtgttaattccaattcaatgcaaatatccttttcaatccggtccattcttggagaagaaacccattgtaagagctgtcttctgtggttgggatattactttgtaaagtattaaagcactaaaccagtttttgcaatatgtagtaaatcttgctttcattttggaaaacttccagtaatgactactgcactttttatagaagaattgtatttaatttctttcttttatgaaagattatttcaagtaaaaatagctctgtaatctgtgtgacatggcttctccattacctgacacagagagaagctttgatgcctactcaataaaattaacatgtttgtaaagta

SEQ ID NO: 162946 - DNA, 3431 bp, Homo sapiens
  Payload ID: 12109
  Gene Symbol: OTUD7A
  Gene Name: OTU deubiquitinase 7A
  ENST ID: ENST00000560536
  CDS Start-End: 349-690
agaggagggcgcgcgcccggaggcagcaggcggagccgggaggcgggcgttcgagagaaaatggaagtcgggtagcggcgactgcggcgctgcgggctggcggagcggagcggcgcggcgcggcagagttctcaggcgctgtggtctcaccttccactggggcaacaatgggccatttccagcagggacggcgcagtgttggcctgcatgcctgactgccacacacctccagaatcaggtgtctgaaaagtggcagtgacgaaagaagagactctcccggccgaggccccagtgcatggagagaaggaagaaatcaatttcctaattggtaccatatacatcagatggatggtttctagtgtgcttccaaaccccacctcggctgagtgttgggcagcacttctacatgatcctatgactcttgatatggacgcagtcctgtcagactttgttcggtccacgggggcagaacctggtctggccagagacctgctggaagcacctccaactgtgatccaccttcctgagcccggtcgctgctgcctgcacgctgtccaggggtcccggctgcacccagtgggacagagggtggcagtggtgagtgctcactcacctcacccactgctgggtcctgcctttggctttcacaggcaaaaactgggacctgacagccgctctgagcgactatgagcagctccgccaggtgcacacagccaatctgccacatgtgttcaatgaagggcggggtcccaagcagccagagcgagagccacagcccgggcacaaggtggagcgaccctgcctgcagaggcaggacgacattgcccaagaaaagcggctttcccgggggatttcccacgccagctcagccatcgtctccctggcccggtcccacgtggcaagtgaatgcaacaacgagcagttccccctggagatgccaatctacacattccagttgccagacctgagcgtgtacagcgaggatttcaggagcttcatcgagcgggacttgatcgagcaggcaacaatggtggctttggagcaggcagtgtttcctcaccaccctaacatcccaatgaagaaagcgttcaagaagcaagacaaactctcttctttggaatgtttaaggagaaaataatgagtccaaaacaaatgtctaaaacagatttaggttcttcctgagacaaagcaatgccagtttcactcataatcattcacattataaacattgcaaaatcacatatctgggggtttctcaggcacgcatgtggaagatgttatggctgtctcctcaggcccaccacgcccctcccagtgggagccccgcctgcctgcacgggctgacagtgcacatggagcatgtcctcagccagtgggaagccctgctcctgctggggtggggaagcatcgccttccagtgctgacccagccttcagccagctcttcatgtccactgtggagtggagcctccacttccaaggcttggtccgtggagacgtccccagatgtgtcatcccaggagtttagggctgcagccagcaatgcactgttagggagtagagcttttctcggtgctcggcgaagacccaataaaattaccaagcactttctagagttccagaagaagacaggagagaagtacctgtaggttggtatgattctgatattggtggatggaccaatcaggaccctggtaggaaagaaaaggcagcacaaaactgtgagataaaggactccataaagggactgctttccaaggagtgggcaggatttaaggacactagtgaaggatactaccgttcctgggactaccctcaggcctggcaaaaagacaagggatgagagtggctgatggagatagccacgggcagtaggtgtggcatccgggagagagaagatgctggggaaataaatactctgaccacactcttcctccaccatccaggttctgaccagtgcctcttaatggcagaagggcagattgcggggagctcactgatgtggtccacgcaggtcaccctctgcatacagagcagcatggagaaggatagacggtagatctgtggggccaatgggaaacatccagaaagtcaatgtgccgggaagttttaccagacctggcttctgtgtacacgtgtacacctgctttcatgccattgcttgtcattgtttgcccagggctgtcgtcatccaccactttcaagagggaaggcacaagatgcgtttagacaaaggacgagatgtgcctagtggggcttatttgtgttgggcaggcttgcagtcaggtcgtagccacaggactcatagaagcctcaccaatggcatgcttgacattagaacaggctctacattcccaacagctggatctcatgttgtgactgtggagaaattctcatctcagctgcttcgcagccatcaagagcaatccaatgactggcacccacagccttgctctgtcttacctcagcaagactcaacaaacaaaacaattcagctagattagcaataatctaaaccactcactgtgggggctggctattttaaagacgcttctatatgactaattcagataagatattttcaatagaaaaagctcactattcatagagaagcggaaattagtatttgttaagaaagaaacaagtttcatgggttactctctgttgaatgctacggcggtgtagacctttatacagctcagcactgacgattgctaatagcttgggtgatcatagcagctgcctgagtgctgtgtttcgtgtgaagcacagtctcatgcaaggttgtaggtagaccccaccatgttaccttctccttgagccctaccatgcttagcaaaagccttcacttcttttgaacgtcttttctgttatttttttccatattttgcattttaatttttatcacttatattttaccttccagactagcattttaagatgggactctggcttcatccagtcttgaaaaataccttttaaaaacccaaacttagtgagttaagatgttaaattatgaatagctcattgtttatgttgggcaccacgaagagaaccaactggaagcagagatcagtgaaggcaggaagctcaggctcccacccagtggtggagaagccatctggtctacactcgcaggaggccttgaggaagtgggtctcactcttcagggagtggtcaaaggtgcttgtggtgcaattcgcgcctgaagatcagggatctgcctgggacaggagtcctagtagccaacatgtcttcctcgtccctcacgctgaaaaataataaaagtggccaaacgcgatggctcacgcctataatcctagcactttgggaggccaaggcaggagaatcacttgagctcagaagtccgagaccagcttgagcaacatagtaagaccccatctctacaaataataaacaaattagccaagc

SEQ ID NO: 162947 - DNA, 724 bp, Homo sapiens
  Payload ID: 12109
  Gene Symbol: OTUD7A
  Gene Name: OTU deubiquitinase 7A
  ENST ID: ENST00000560598
  CDS Start-End: 394-724
ggggaggagaggccaccgggaccgcgagcggcagctggggagggggccgcggagcccgagcgggagcaaaacagctgatctggttttcctttaaagcgagagaaaatggaagtcgggtagcggcgactgcggcgctgcgggctggcggagcggagcggcgcggcgcggcagagttctcaggcgctgtggtctcaccttccactggggcaacaatgggccatttccagcagggacggcgcagtgttggcctgcatgcctgactgccacacacctccagaatcaggtgtctgaaaagtggcagtgacgaaagaagagactctcccggccgaggccccagtgcatggagagaaggaagaaatcaatttcctaattggtaccatatacatcagatggatggtttctagtgtgcttccaaaccccacctcggctgagtgttgggcagcacttctacatgatcctatgactcttgatatggacgcagtcctgtcagactttgttcggtccacgggggcagaacctggtctggccagagacctgctggaaggcaaaaactgggacctgacagccgctctgagcgactatgagcagctccgccaggtgcacacagccaatctgccacatgtgttcaatgaagggcggggtcccaagcagccagagcgagagccacagcccgggcacaaggtggagcgaccctgcctgcagaggcaggacgacattgcccaag

SEQ ID NO: 162948 - DNA, 1425 bp, Homo sapiens
  Payload ID: 12110
  Gene Symbol: OTUD7B
  Gene Name: OTU deubiquitinase 7B
  ENST ID: ENST00000417191
  CDS Start-End: 143-1425
ggcaaaaagccactgggggaggccagtcccgatcagtcctttctggctccagctccagatcccgtgcggagcaacagctgcggcctgaattttgatctatgttctacctacatccagctggctgaaagtacttgaggatcacatgaccctggacatggatgctgttctgtcagattttgtccgttccacaggagcagagccagggctagcgcgagatctcctagaaggaaagaattgggatgtgaatgccgccctcagtgattttgaacagctacgtcaagtccatgctggaaacctacccccatcctttagtgaggggagtggtggctccaggacccctgaaaaagggttttctgacagagagcctactcgccctccccgacccatcctccagcggcaggatgacatcgttcaagaaaaacgcctgtctaggggcatctcccacgccagctccagcattgtttccctggcccggtcccatgtctcctccaatggtgggggtggggggagcaatgagcaccccctggaaatgcccatctgtgccttccagcttccagatctcactgtatacaatgaagacttccgcagcttcatagagagagacctcattgagcagtccatgctggttgccttggaacaggcagggcgtttgaactggtgggtgagtgtggatcccacctctcagaggctgcttcctttggcaactactggagatgggaactgcctcctgcatgcagcctcccttggaatgtggggtttccatgatcgggacttgatgctgcggaaagctttgtatgcactgatggagaagggagttgagaaggaagcgttgaaaaggcgctggaggtggcagcagacacagcagaataaagagtcagggctggtatacacagaagatgaatggcagaaggagtggaatgaactgatcaagcttgcctcaagtgaaccccgaatgcatctaggtaccaatggagccaactgtggtggggtggagagttctgaggagcctgtatatgagagccttgaagagtttcacgtctttgtccttgctcatgtgcttaggaggcccatagtcgtcgtggcagacaccatgctgagggactccggaggggaagcatttgcccctattccctttggaggaatctatctgcctttggaggtcccagccagccagtgtcaccgctcccctctggtgctcgcctatgatcaggcccacttttctgcactcgtgtccatggagcagaaggagaataccaaggaacaagctgtgatcccacttacagattcagagtataagctgctgcccttgcactttgctgtggaccctggaaagggctgggagtggggcaaagatgatagtgacaatgtccgattggccagtgtaattctgtccctagaggtcaaattgcatctgctgcatagcta

SEQ ID NO: 162949 - DNA, 8872 bp, Homo sapiens
  Payload ID: 12110
  Gene Symbol: OTUD7B
  Gene Name: OTU deubiquitinase 7B
  Uniprot ID: Q6GQQ9
  ENST ID: ENST00000581312
  CDS Start-End: 296-2827
gggcaaaaagccactgggggaggccagtcccgatcagtcctttctggctccagctccagatcccgtgcggagcaacagctgcggtcgcagtctccaccaccgcctccacctccatcgccgtcgggggaggggccggccggaccccggggtcactgccgaggaatgaagagaggcggccgggccccgcgctccgccccggcctagggccttgccccgggagcccgcgagggtggaggcctgaattttgatctatgttctacctacatccagctggctgaaagtacttgaggatcacatgaccctggacatggatgctgttctgtcagattttgtccgttccacaggagcagagccagggctagcgcgagatctcctagaaggaaagaattgggatgtgaatgccgccctcagtgattttgaacagctacgtcaagtccatgctggaaacctacccccatcctttagtgaggggagtggtggctccaggacccctgaaaaagggttttctgacagagagcctactcgccctccccgacccatcctccagcggcaggatgacatcgttcaagaaaaacgcctgtctaggggcatctcccacgccagctccagcattgtttccctggcccggtcccatgtctcctccaatggtgggggtggggggagcaatgagcaccccctggaaatgcccatctgtgccttccagcttccagatctcactgtatacaatgaagacttccgcagcttcatagagagagacctcattgagcagtccatgctggttgccttggaacaggcagggcgtttgaactggtgggtgagtgtggatcccacctctcagaggctgcttcctttggcaactactggagatgggaactgcctcctgcatgcagcctcccttggaatgtggggtttccatgatcgggacttgatgctgcggaaagctttgtatgcactgatggagaagggagttgagaaggaagcgttgaaaaggcgctggaggtggcagcagacacagcagaataaagagtcagggctggtatacacagaagatgaatggcagaaggagtggaatgaactgatcaagcttgcctcaagtgaaccccgaatgcatctaggtaccaatggagccaactgtggtggggtggagagttctgaggagcctgtatatgagagccttgaagagtttcacgtctttgtccttgctcatgtgcttaggaggcccatagtcgtcgtggcagacaccatgctgagggactccggaggggaagcatttgcccctattccctttggaggaatctatctgcctttggaggtcccagccagccagtgtcaccgctcccctctggtgctcgcctatgatcaggcccacttttctgcactcgtgtccatggagcagaaggagaataccaaggaacaagctgtgatcccacttacagattcagagtataagctgctgcccttgcactttgctgtggaccctggaaagggctgggagtggggcaaagatgatagtgacaatgtccgattggccagtgtaattctgtccctagaggtcaaattgcatctgctgcatagctacatgaatgtgaagtggatcccactgtcctctgatgcacaggctcctctggcccagcctgagtcccccaccgcctcagctggagatgagccccggtccactcctgagtctggagactcagacaaggagtcagttggcagcagttccaccagcaacgagggcggccggcggaaggagaagtcaaagcgagatcgggagaaggacaagaagagagcagattctgtggctaacaaactgggcagctttggcaaaaccttgggcagcaagctcaagaagaacatggggggcctgatgcacagcaagggttcaaagcctggaggggtggggacagggttgggaggaagcagcggcactgagacactggagaagaagaagaaaaactcactgaagagctggaagggtggcaaggaggaggcagctggggatgggcctgtgtctgagaagcccccagctgagtctgttggtaacggagggagcaagtatagccaggaggtgatgcagagcctgagcattctgaggactgccatgcaaggggaggggaagtttatttttgttggaaccctgaagatgggtcaccgtcaccagtatcaggaggaaatgatccagcgctacctttctgatgctgaggagagattcctggcagaacagaagcagaaggaggcagagaggaagatcatgaatggaggaatagggggtggccctcctccagccaaaaagccagagccagatgctagggaagagcagccgaccggtcccccagcagagtccagggcaatggcattttccactggctaccctggggactttactatccctcggccgtctgggggcggagtccactgccaggaaccccggaggcagttggcagggggtccatgtgtcgggggcctaccaccatatgccaccttccccagacagtgccctcctgggcgaccctacccccaccaggacagcatcccttctctggagccaggcagccactctaaggatggacttcacaggggtgccttgttaccacccccctaccgagtggctgattcctatagcaatggctacagagagccccctgagccagatggatgggctggaggtctccggggccttcccccaactcagaccaaatgcaaacaaccgaactgcagcttctatggacaccctgagacaaacaacttctgttcctgttgttacagggaagaactgaggaggagggagcgggaaccggatggggagctcctggtgcacaggttctgaacgggtggaacactgaagggcaaggaggctaaacaaagttaagctcaactaattggctcatcaagaacacagtccccatgttgagggggaaaatgcagtaatgtttgtgggagcctggctggaaacttttaagtgtgtgcacacaggagtgctgccaggctggcaagagcaggtcggggctggatggcacctcaggggctgtactattcctctgcagagcttgacttgatgaggtttgaggtacaaggggaaaagatggcgattctgtcttataacctcctgggtcccatccagggacctaagagaaagtagcaggggaaggtttggtgtgtgggggtgggaggtgggcagaagtcttggggaggaatgggcaaaggaggttctcagtcaataaaaccaaagttctttaggttgggaaaaagcacatggtggagtgagaagtgtggaggggaagtgggaaattggacacatttgctattgatttgaattaagctagaaattaaggttggataaattcttccccttgaaggatctggaaagacaaggcagtaatgtgtcctcatgggtgcctgttaggaggtgggggtagtttaaatccgtttgtttagatgggaaagggaggaacttaagagggaaatccttttcctcttaaggtttatttccttccaagcagtcatatgtcatctgttacagtttgagaagagattgctgattaccccctgtcttttcctcatctaagtctttaattgtatttgtttaaagggaagagtgtggtgagaacagccgtcatgtgtgttgcattttctccaggtgaattggggcagagctgatctattttttaaccacagcaataaccatacgttggggtttgagtgcaccttgggaggggtgggaggacagacattttagccagaggctgtttcaaacaaaaccaaaaacctaagtagagcattacaggcctctgtggctgctgcgtttctgtagaaagcaacttattttattgacttttttttttaaggaaaagaaataaaaagaccccagcaagcaaaaacatttaaaaaatgattttttttcctcctacttaagtggttctttctccctttgctctacttttggagaatgaacttaacatcccggcttcttttgttaagccatagctgaccttaatctgtggttagtttattaaaataattaaaaatactttctaagaagagatatttttgatattaggactgatgttgaaacatataggggcaatttataaaaaggtagttagagaaatatattttagtgaactataaccacagagcacagatgactcccaatgagctgatctgtctttaggtttctccctttccctgacccttccctgttctctaggggctgggagtggggatgcggacacagtagggggagctccttcgcattttgcacaaagcacaagtctgaacagcctatgctctggccagagccatttctaagagctttaaaccggaagacctatcctgggccaattttcctttttctttatatttttttccgggaaaaaaagtcaactatgcaattgtatacactcccgggtgcatgtgaagaaggggaataagtgtacttatgtgtccagagtattaactggggctgtttttctgtgtttggatttctcttttgaggtatgtactcataacccatcccttggaacgtaatccccacatttgatctaaagcacttgagcgtgcatgcatgtgcgtgcgtgcatatgtgtgtgtgttttcctcctcggtagccagtcaagattgtccttgttggaaatgctcacggtttataaaggttattttctcctcaacaaactcagaagtcacctattttccaaatctgatttaataatttcctatggctattaattcttagggttttctttgaaaatagatttgtgttaaggaagcagtgagattccaaaggaagggatgtgtatatgtctaggcaggtctggaacctggtatgagatgagcactcccctaagttgcaaaatttaagggttactataaaactcattaatcaagatactataaaaaatgcagtatttaaaaaaattaatgcaaaaaatttatgttggataaaatagcgaaatcttacaggatctgacaggactgagattaggaggagggaagtgaggctgaattgaataagtatggggatgaatccttcttatttaaatttttgatacattgtccatcatagactttttacattaattgtgattttttaaaaatgttgcattaaaatagtatttatcttggttactgggttttttggcactccttaaattttgtgcccaaggtgagtgctttgctcacctcaccctagttacgtccctgtttctgtgatttgaacactagcgagaacaccactgtgtgcgcctccacccccatcacacaccaaacaacaggtggctcagacaccctgaatttgcacagctcacctagctttcctaatttaggccttcatatcatagaatggtggcctggaccaataggaatgaaaacagaccaggggttttcccagagaataaagccggaaaagttttgattctccactggactgctgtgtttggatttgatctgttgttagattctagttaacacttttgtttttaaaaactaaggacaaatgaacaaaaaaccttgtatcatgtttgtttttatttataagttagccaatcccaattccgtttgctttattttcaaataaaaaaagatggaaattttgaggggtggtctaggggtgaatatggtaaaatggggctttaggccttatagctttttattaagaaataaattattttttttatttgggagggtaactatttattgaggcattgaaaaacctctccattctaaggatgagagaccctgagacaatggatattttttataggagatagtgaagtttgttttgcttcattctttcggggagggtcttggtgggatggggggaggtgaaggaataatgcctgggaaattaatatagattcagcttggtttgtggtattttgggaagatgagggaatagaagaggcaagcccatgtcgttactgggttggggagaaggaaagaaggggcatatggcctgcactcgaaatgggcagaaaaattccttagttaaggaggggtgtgtgagtgaagggggaaggtagaccctttaaccccaagtgagggatgatatcatctctcaggcttaaatttaagtgcacttagttcctttaatccagggcaactggggtacctactgaagtttttaatggagaggggagattttcagggttcttgtttttccctttttgatgttagacagtgctactccctccctgctgtgctctctgccccatctccaatggagtaagtattactgtaggataggcctccgcttctcccttaacctatgctgcatttattgaaagttacaagatttaaccagaagtttttcctccatactggtttttatcaacaaaataaaaagattatatccaaagattttttaaagattcagtctttttaaggagtggagatggtgttaaactcagtgctgtagagggcagtggaagggaagtaccttccctctattagctcagtttttttttttctatcaagcgaaactaaggcccacagacaaacaagaattagcagtgacttcgtgttgtatatctgcggggtgatactgagcccaaaagaataaagctggttttgaatgtgttctgagaacctagcttttgccattcttaactccttttagccatgtgtccaaggttccagtcacatttttttttctcaataaagagtatttcagagatgattgtctctgaattactcagacacctctggactctgagtcttctttctttttcctttttctttctttcttttttttttggtttgagacggagtctcgctcagctgcccaggctggagtgcagtggtgcaatctcggctcactccaaccaccgtctcctgggttcaagtgattctcctgtctcagcctcccaggtggctgggattacaggcacccgcaatcatgcccggctaatttttgtattttagtagagatggggtttcaccatgttggccaggctgatcttgaactcctgacctcaggtgatccgccagcctcggcctcccaaagtgctgggattacaggcatgagccaccgcgactggcctctgtgtcttccttctccaatgagtcagtgccccagacatatagccacaggtgagaagacagaattagaagccccttcccggcctggaatcacctgcactccagatttttctaatttccttctttccctccaggcctttcaactatagatctggatgagtcatgcaggcattctgtctcttctactttgcagacagccagtctgcaaatcacagggtattttgccaccatacatcagttgggtaacaaaatattacgatgtccccatgtagactttctctgtgccatctcttgcattggccaagtgggtaaggggcagtacaaaagagcaacggaagctggctggcagcagttaagaggagtaggggtgggaaggaccttggcctctttctgtgcttataactggatctgtgactcatcttgtgagtcactcagctccacctccctcctccggctgcccctcccagcagcctttactcctggcacaaacctgcagccagaacaggattctgaaaatggaaaaatctgatatagccccttgcctctccacccttcccttcatctagtgcttctactgggggtgtgtggggtggtgagaggcagccttaaccctcagctcctgcccactccattcctggttaagtattgatccaaatcgcccaattcttttctcctcctgatttccccccaccccgcttttttttttttttttttttgagacagagtttcgctcttgtcgcccaggatggagtgcaatggcgcgatcccggctcactgcaaccttcgtctcctgggttcaagcgattctcctgcctcaggctcccgagtagctgggattacaggagcctaccaccatgcctggcttaatttttttttttttttttttttttagttagagtcgggggtttcgccatgttggccaggctggtcttgaattcctaacctcaggtgatccgtgatccacccacctcagccttccaaagtgctgggattacaggcatgagccaccacacccctaccccccgattttttttctccgtgttcctccactgtctccacacctcaaagtgctaaagaatagaatgaggctcttgaatgaaggatggtggtgagaaggaaagtggataatgggatttaaaagttatggtacacacctcttcctatgtctttttttttttttttttttttgcgatggagtcttgctctgttgcccaggctggagcgtagtcattagatcttggctcactgcaacctctgcttcctgggttcaagcgattctcctgcctcagcctcccaagtagctgggattataggtgtgagccaccacgcctggctaatttttgtattttcagtagagatggggcttcatcatgttggccaggtggtcctgaactcctgacctcaagtaatctgcctgccttggccttccaaaatgcttgggattacaggcgtgagccactgcgcctggtccctattttctttttacaacagaccttgggaaatattttcttcccccaagaggttgaggcccatggaatgcattaggggcaggtggggtggtggtgctctgtagcctttaggacttctagaatcaggcttctgggccaccttcttagcaggtgtatacctctttgttccagactgactttctgtctcacaatatcttcactatttccacagttgcagccaagacaggaaactgaaagctgaggccagaagggtggtgtactggggggaggggaaaattgagtgtcactttggaaaactggggcccccatctaaggattgctgcctctgtagattcaaaagcaataaaacagcagctcattaactctta

SEQ ID NO: 162950 - DNA, 7800 bp, Homo sapiens
  Payload ID: 12111
  Gene Symbol: OTULIN
  Gene Name: OTU deubiquitinase with linear linkage specificity
  Uniprot ID: Q96BN8
  ENST ID: ENST00000284274
  CDS Start-End: 79-1137
gccactgcctggcaccccgacgggaggggctccggatcgttcggagccggctgaaccccttcggccgcgagcgaccgcatgagtcgggggactatgccccagcccgaagcgtggccaggcgcgagctgcgccgagacgccggcgcgggaggcggcggccacggcgcgggacggcgggaaggcggcggccagcgggcagccgcggcccgagatgcagtgcccggccgagcatgaggaggacatgtaccgtgctgcagatgaaatagaaaaggagaaagaattgcttatacatgaaagaggggcatcagaaccgagattaagcgtagctcctgaaatggatatcatggactactgcaaaaaagaatggagaggaaatacacagaaagcaacgtgtatgaaaatgggctatgaagaggtttctcagaagttcacctccatacggcgagtccgtggtgataattactgtgcactgagggccacgctgttccaggccatgagccaggctgtggggctgccgccctggctgcaggacccggagctcatgctgttaccagaaaaactcataagcaaatacaactggatcaagcaatggaaacttggactgaaatttgatgggaagaatgaggacctggttgataaaattaaagagtcccttactctgctgaggaagaagtgggcaggcttggctgaaatgagaactgctgaagcaagacagatagcttgtgatgaactattcacaaatgaggcggaggaatatagcctctatgaagctgtaaaatttctaatgctaaacagagccattgaactatataatgataaagagaaaggaaaggaagtaccatttttctctgtgcttctgtttgctcgggacacatcaaatgacccaggacagcttctgaggaaccacctcaaccaggtgggacacactggtggtcttgaacaggttgaaatgttccttcttgcctatgctgtgcgccacaccatccaggtgtaccggctctccaagtacaacacggaagaattcatcacagtctaccccaccgacccacccaaggactggccagtggtaacgctcattgctgaggacgatcggcactataacatccccgtcagagtgtgtgaggagaccagtctatgagagacgcatgctcctgacagcctggcgacgtggcgaagatgcacaggtggctcctgggcttgggctgcaggtttgggggtctctaagaacaatctctgagaagaacccttgggcccctgggagccaagttggacaggatgtcctgaagactagcttttgataagagaaattaaccaagtctttcccctcatctatgatgcaatatatttcagtgggggccttcagagcacacctgttggacggtgcaaaccatatcttctccagaaggcaaatacttttgtatcagaggaaactcagttttggagaggaatatgttctttatgtctcaaatcaaaactctctctaatggtaaactggcttctaatttttttaagtacagtatttttttttcccctttagtagtaacgggtttctatagatcttcctatacagtctgctttaactcaggaccttgagattatgagactgacgtgctgcccactgcactgagggggcttctaacagtctgctttaagtggtataattctgggatagatctgttactggcatagtcatgacaacctctggtaatcttaccttctcctttttatgaagggaagagcaatggtttggacttacatcttaattaaggctattttaagcagattgttttgcaacagattaagaattgggtcccaaagtgggttatttcaaggcatttttgaagactggaggagcgtaggagggagtggtgagggaacctagaacttcttgctccttgtgactatgacagatgtctgatgcccccagcgcactggagtctggggcttggtgcaggtggtgccccatcagtgtggacagacactacttgcctttgtggtttagtgttggaagctttaattattctacagttccatagattcacaattttatagccaaacagtttgtatccacctgctttcagaggaggaaccaaaggccaaattactttgaggtagggcttagctggacctgggttttcctatgctcttttcatgctgtgttggagggtgtgtccactgccagatctgtgtaacccgtctgggtcaggggatgagtgacagcaaaccatcttaaaatttttcatgagtacatttaagcggaagcatacgggaatatgagtgcaaaagtgtggctgagccgcgtatgcccttgattggttttgggaagcctgagggaggcagccttcctggctatgagccatcgcctgcccaatcaggctaagggtggtgactggggtggtgaaggggcagctctgctgagcatggtctgccttatggcctgaattgtcctcaaggggtgtggactgcagatggtgttcacatgaaccggagacatcactctttaggattctactggcagcccctgaattggctcaacgtttgtggaggtggtatttccctgaagtactgagctttgttttataataattaaaatccttatttggtccaatttaatatagtttagaagctattttttttgaggcaaaccgtttttgaaaatgtaaattttgtttttaattaaaaataaagtcttagttaagaaaactcaggatgcacaaaactattcagactgttactttagctttctcccattacctcatcagtaatattcaccacattttgctaaatatttattgattagagtgttgaaatcaaattctgctctaaatgtgtgtgaatatgttggagaggctttgtgttcttcactgtgaaatgcaattgtgccttgaataagaaggtacctagaagccaaattaaagtaataatgacttcttattggctttgatttttcattgcagtatatgggattgtacagcaggaaatgcttatcattaatttctgatgttttttaaagcacaactcgaaacatttcgatcatacatacatagcagtagagatctgtgcccttcaggtacattgaatctgaccatcagtttatatatgtcattgaattttaagaatactcatgttaataatagtcatctatccttgcattttgaaactgttctaatcttagtgaacttgaattggatttctgggtaaaagaatgtgtttcttttatgttgcttatgtccgaaggccttgtcagaatctgtcagactcttgtttaggtttagtgtgatcatggcgtcagagaagcaaagctttcaaataaatagtacttcaggaaatagaaatgattgaccaactttaaaaataatttttttttaattgcaatatgcagcttcagttgcccagaatcttagttccgtttctcattcttggtcttgagctggtcaggtgacatcagcagattagaagttgaatggagattaagtggattcaggaggatgttccacttagagcagtcttcaaaatgataaggtgttctagaagaaaggaatgtagtaggaactatactatgcctaactttctatcccagagtgtcttgcaagagtttaggagttttggaccctgtgtattggcagaaaagttatctccatcttaagcaggcatgacttttatacctgtgagctcatttaaggtgcatttaaacctaaaataatttccctgtattatgcttcatgggattaacactgcttttccagaacattttcagattcccctccttacatcctgagctccttctgtatatacatctgttgattttatccatccacaaggaacaatgatagtcacattagagaacaagaaaccagtaatacatggtctctaactgatgattcgggcctggatttgattgaaagtgtttgcagttcctcttccgtagaatacagagtggatgaaaatgttttcaatgcacagaacaggatgaatccttttttctttatttagcgatttacacttttgttactctattatatattcagttagtgtctgataagattttctttgcttaaggagaacggacattgccttggtatgtttttttttttttttccctccacttttggagcttatcaggtaaaaatctcaagccacatgaattgttaacacctctgttgggaaaagcctttgtgagtttttatgtacttggtctttgtttttgttattcatcctgtgtcctccctcttcccgatgtgctgttttacctaggagttagtctgctttctgaggatcttttagagagaggctgtgaagtgctgaatcacctttaatgatacagcacttctgccatctcagcatctacataggacttacatagacttcctgaatgtgtcttcttcagatactaaagtacagttggatcattttcttatctccttttcttaagcagtactttgcaggtactcccctttgaaagccagaagcataaaccattggggaatcttaacttgtagacatgcagtaaaagaaatgcatttatgtaagatctgtgagtacttaaaaagaaagccctcagtgtgtgtgaagtgaatgtgaaatgtgtgtgaaatacatagaattcccaaatagtttagcaaaggcagggcgcaatatcaagtaatttaaaaatggtccaaggaactgtaagaaggaggaactaattctagaataaatgttaaaatgccattcaagaacaaaaccacagatgccatacagacctcctgtgcttaagttatagaagaataaaaatctgaatgaatggaaggccttacgtgtatacagtttacaaattcctatttctaaaatttaagtcccttatttaacagaagtatgtattttaatgcttaactgtctcgggaaacctcatttgtgacatcatctaaggggatgggaagactagggagccagtgccacgttgaacagaacagtggtttagtgaatgtgtgaggaaagacatgggcaactgattattaatgtttttgtaattcagtttataacttggaaccaatgaaaagcaacaaaactaaactggtttgacagcctgccacttctggcatttcctgtaagtcactagcagtaggtgtgaggtgggcttgcccatgaccaggaggggtgtgtgtgtgtgtgtgcatgtgtgtatatgcgtgttggtctgcagtcacagcatacctttatgtgcatgtgtcctcgcagcttgggactcagcagtattctgggagggtggaggtgaactgtcccatgtattgtattatatattttttgagatggggtcttgctctgttgcccaggctggagtgcagtggtgcgatctcagctcactgcaacttttgcctcctggttcaagcagttctcctgcctcagcctgccaaatagctgggattacaggtgtgtaccaccactcccagctaatttttgtatttttagtagagatggggttttaccatgttggccaggctggtctcgagctcctggcctcaggtgatccacctgctttggcctcccaaagtgctgagattacaggcgtgaactaccgcgcctggccccatgtattgtatttttttcaggttatattgaaatctactaccaggaatgtcggaatgggttttggtatgtataatggaaatagatagagtggttaagtctagaaacacatacattaattgtattgaaatgttatatcaatacatcatttatgatgtgtgtgtggtcccagacctcatggccaccagtttgtttaagcattgtgaatgctttttaatagcattcattagcattaatggaggaggacactgtgttttctcaattaatctcattgatttgtttggtataagtttgggtcagaaatgaaactgccaaaacatcgatcagtacaaggaagggacacagggcttaaaatgtccacagtcttggcagtggacttggcagttctcccagtaagcagaagtacttgagcttaattctgaacttcaaagtaatattttatacttaattttaggagttttcatttacatattgaaaaatgccttgactgtattcacataaatggtgctaaaacattgtaccccttataagaactgcagcaatccacagtaatgttggttacttctgagtatttgataaaggaacaaagtcaaaatgaatgtatttaataagcttctttctcatttccattgtttttataaaaatattttggtattgttgcctgcattttagccacttctaactttttgtattatgaatttggagaggataacaagccaactttagaccctctgccagtggcgatggtgtttttcttccatgggtaagccattgtgaatggaggctggtggagcagcacactgtgtgaacctggcagcgctcatcttggcttgtttagcagtgcctctgtttacaccataagatgttccgcatgtgtccaaaatttcgcctgctctgaaaaacatgcccccgaggctctgtgcagtttggggccttggttcccacctgcagatgcggtcagttgcctggctcctggggccagagtttcctctgttacttgttgagtctcttgtcttcactgtcagaagctgaactgacttgggggctttgctgttgatccactttagcaaaccctgctgcagaggactgtaaaaacaaataactaaaaataaacttagaaaatacaactcagaagcctggctctgttgctgtggtcaaatgcttgcctttgaggactttggcagattgtgctattacattgggctctaactttctggcacccgcaaggcagacctatgatgtccacatggctgactcttgacccctggccattgtgagcagaggaatcaagggtttagggaggcagtattgggcagtgtggaagagttagatgagatgaagcagttagcacagtgcttaacccatactaagtgcccccaaccctgccagccaaattaggtgcatagttttcagcttgggtctggattcaacagcattcccgctgcccactaaaagggtgggcttggacagttcctgaacctccctaaatctgtttcttcatctttaccacacacagtctgtctcagtggtggtgtggattaagtgaggtgctagcacttattaggggaagatcctccagacctgcaaagcagggctgcagccccaattctgacccagccctgctgtgtgtttgccgcaaagaggtttggtgtgtgcgagacatttctttatgaaccatttacactgctggaaatgtacccactaatgtgatggcaagaacttcaacaaattgcttatgaatcaggctctcaatggaagaagttaatcctctgaagagggggaagactggactttcagaagtatgttggggatagagaatgaagtttgagtcagcagagctctgccttcctgtttgtcaaagaactagagtctgggagtcttgcaagatggagctgggcttctgaagaacccagtgggtaggtactgggcatccattagacggcagtgctaagtcggtcatgtgcagcagaaagacctccccactgtgaacaacaaaccactttcctcctccagtggcccattcatttggattgatacactttttcagtgtcagaaatgcactttctccctctacttgtctgaattacgatgctctgctcaactctgtggacagtgtttcttgaatttccttttccaccgccttttcccactcaagaaagtggagagaaaaacagggatgcaggctgtgggtcttgtggaagccctttacaaccattaaataaagaacaccagctgc

SEQ ID NO: 162951 - DNA, 420 bp, Homo sapiens
  Payload ID: 12111
  Gene Symbol: OTULIN
  Gene Name: OTU deubiquitinase with linear linkage specificity
  ENST ID: ENST00000514913
  CDS Start-End: 1-200
aagcaacgtgtatgaaaatgggctatgaagaggtttctcagaagttcacctccatacggcgagtccgtggtgataattactgtgcactgagggccacgctgttccaggccatgagccaggctgtggggctgccgccctggctgcaggacccggagctcatgctggtacgctgctgctgcagttaccagaaaaactcataagcaaatacaactggatcaagcaatggaaacttggactgaaatttgatgggaagaatgaggacctggttgataaaattaaagagtcccttactctgctgaggaagaagtgggcaggcttggctgaaatgagaactgctgaagcaagacagatagcttgtgatgaactattcacaaatgaggcggaggaatatagcctctatgaagctgtaaaatttctaat

SEQ ID NO: 162952 - DNA, 605 bp, Homo sapiens
  Payload ID: 12111
  Gene Symbol: OTULIN
  Gene Name: OTU deubiquitinase with linear linkage specificity
  ENST ID: ENST00000506417
  CDS Start-End: 1-253
ggccatgagccaggctgtggggctgccgccctggctgcaggacccggagctcatgctggttgaaatgttccttcttgcctatgctgtgcgccacaccatccaggtgtaccggctctccaagtacaacacggaagaattcatcacagtctaccccaccgacccacccaaggactggccagtggtaacgctcattgctgaggacgatcggcactataacatccccgtcagagtgtgtgaggagaccagtctatgagagacgcatgctcctgacagcctggcgacgtggcgaagatgcacaggtggctcctgggcttgggctgcaggtttgggggtctctaagaacaatctctgagaagaacccttgggcccctgggagccaagttggacaggatgtcctgaagactagcttttgataagagaaattaaccaagtctttcccctcatctatgatgcaatatatttcagtgggggccttcagagcacacctgttggacggtgcaaaccatatcttctccagaaggcaaatacttttgtatcagaggaaactcagttttggagaggaatatgttctttatgtctcaaatcaaaactctctctaatggtaa

SEQ ID NO: 162953 - DNA, 911 bp, Homo sapiens
  Payload ID: 12111
  Gene Symbol: OTULIN
  Gene Name: OTU deubiquitinase with linear linkage specificity
  ENST ID: ENST00000503023
  CDS Start-End: 163-339
agaggccgtggggcgggccacggtgacgcgcgcggaagcgctctgcgggccctcggaaaccgccccggcggctgagaggctgcggccactgcctggcaccccgacgggaggggctccggatcgttcggagccggctgaaccccttcggccgcgagcgaccgcatgagtcgggggactatgccccagcccgaagcgtggccaggcgcgagctgcgccgagacgccggcgcgggaggcggcggccacggcgcgggacggcgggaaggcggcggccagcgggcagccgcggcccgagatgcagtgcccggccgagcaaaccgagattaagcgtagctcctgaaatggatatcatggactactgcaaaaaagaatggagaggaaatacacagaaagcaacgtgtatgaaaatgggctatgaagaggtttctcagaagttcacctccatacggcgagtccgtggtgataattactgtgcactgagggccacgctgttccaggccatgagccaggctgtggggctgccgccctggctgcaggacccggagctcatgctgttaccagaaaaactcataagcaaatacaactggatcaagcaatggaaacttggactgaaatttgatgggaagaatgaggacctggttgataaaattaaagagtcccttactctgctgaggaagaagtgggcaggcttggctgaaatgagaactgctgaagcaagacagatagcttgtgatgaactattcacaaatgaggcggaggaatatagcctctatgaagctgtaaaatttctaatgctaaacagagccattgaactatataatgataaagagaaaggaaaggaagtaccatttttctctgtgcttctgtttgctcgggacacatcaaatgacccaggacagcttctgaggaacc

SEQ ID NO: 162954 - DNA, 1296 bp, Homo sapiens
  Payload ID: 12112
  Gene Symbol: OTUB1
  Gene Name: OTU deubiquitinase, ubiquitin aldehyde binding 1
  Uniprot ID: Q96FW1
  ENST ID: ENST00000428192
  CDS Start-End: 324-1139
gctgctccgcactgcagctatggtcgcatgcagtgcctgccgaagcccgcagcaggaatgctgccttcggtgattttaatttcacttttctacttctctcaataacaaaatccgcgtttcaaactccagggaaaagaaaacggaattggctccaggaggatctgcaatcaccaccgggaactttgggaggctgggaagatggagccaaaccaatgtgtggggtggagggctgttgccaaggcggggcaacgaggaggggctcgcttccgggaggacggcaattggcaacccggaagcggtcggtagtgcggcgctgtttaaagatggcggcggaggaacctcagcagcagaagcaggagccgctgggcagcgactccgaaggtgttaactgtctggcctatgatgaagccatcatggctcagcaggaccgaattcagcaagagattgctgtgcagaaccctctggtgtcagagcggctggagctctcggtcctatacaaggagtatgctgaagatgacaacatctatcaacagaagatcaaggacctccacaaaaagtactcgtacatccgcaagaccaggcctgacggcaactgtttctatcgggctttcggattctcccacttggaggcactgctggatgacagcaaggagttgcagcggttcaaggctgtgtctgccaagagcaaggaagacctggtgtcccagggcttcactgaattcacaattgaggatttccacaacacgttcatggacctgattgagcaggtggagaagcagacctctgtcgccgacctgctggcctccttcaatgaccagagcacctccgactaccttgtggtctacctgcggctgctcacctcgggctacctgcagcgcgagagcaagttcttcgagcacttcatcgagggtggacggactgtcaaggagttctgccagcaggaggtggagcccatgtgcaaggagagcgaccacatccacatcattgcgctggcccaggccctcagcgtgtccatccaggtggagtacatggaccgcggcgagggcggcaccaccaatccgcacatcttccctgagggctccgagcccaaggtctaccttctctaccggcctggacactacgatatcctctacaaatagggctggctccagcccgctgctgccctgctgcccccctctgccaggcgctagacatgtacagaggtttttctgtggttgtaaatggtcctatttcacccccttcttcctgtcacatgacccccccccatgttttattaaagggggtgctggtggtgag

SEQ ID NO: 162955 - DNA, 2297 bp, Homo sapiens
  Payload ID: 12112
  Gene Symbol: OTUB1
  Gene Name: OTU deubiquitinase, ubiquitin aldehyde binding 1
  ENST ID: ENST00000422031
  CDS Start-End: 605-1423
agttaggtcatgaggctttggccttgacaccaagggatgctgtctccttgccggaagcagctcaccaaagccggcagagaacccaggttccgtggggccacgatgtggggctccgcgggcgccccggcgctggccgacttcctgtctcctgggtcagatgctgctccgcactgcagctatggtcgcatgcagtgcctgccgaagcccgcagcaggaatgctgccttcggtgattttaatttcacttttctacttctctcaataacaaaatccgcgtttcaaactccagggaaaagaaaacggaattggctccaggaggatctgcaatcaccaccgggaactttgggaggctgggaagatggagccaaaccaatgtgtggggtggaggtgcggatctggggcggccggcctctcctacaggtctcaggtccgcaggcctggcgtgccagcacctgccacgggactggaagcccattccttgacaacgcctaaggggatcccgttgctagggctgttgccaaggcggggcaacgaggaggggctcgcttccgggaggacggcaattggcaacccggaagcggtcggtagtgcggcgctgtttaaagatggcggcggaggaacctcagcagcagaagcaggagccgctgggcagcgactccgaaggtgttaactgtctggcctatgatgaagccatcatggctcagcaggaccgaattcagcaagagattgctgtgcagaaccctctggtgtcagagcggctggagctctcggtcctatacaaggagtatgctgaagatgacaacatctatcaacagaagatcaaggacctccacaaaaagtactcgtacatccgcaagaccaggcctgacggcaactgtttctatcgggctttcggattctcccacttggaggcactgctggatgacagcaaggagttgcagcgcaggttcaaggctgtgtctgccaagagcaaggaagacctggtgtcccagggcttcactgaattcacaattgaggatttccacaacacgttcatggacctgattgagcaggtggagaagcagacctctgtcgccgacctgctggcctccttcaatgaccagagcacctccgactaccttgtggtctacctgcggctgctcacctcgggctacctgcagcgcgagagcaagttcttcgagcacttcatcgagggtggacggactgtcaaggagttctgccagcaggaggtggagcccatgtgcaaggagagcgaccacatccacatcattgcgctggcccaggccctcagcgtgtccatccaggtggagtacatggaccgcggcgagggcggcaccaccaatccgcacatcttccctgagggctccgagcccaaggtctaccttctctaccggcctggacactacgatatcctctacaaatagggctggctccagcccgctgctgccctgctgcccccctctgccaggcgctagacatgtacagaggtttttctgtggttgtaaatggtcctatttcacccccttcttcctgtcacatgacccccccccatgttttattaaagggggtgctggtggtgagccgtgtgtgcgtgtccctgctctgctgcccgcctggctgctctgtctgctgccccctccccccaggtgggtccccctgcttttcacctatctactcctgagcttccccaacaggagcaggtttgaggggccaggcctcttggaggcccctcctgcttcgttgggttctgcttccttcccttcttagctggctcaggggcttctatgggatcctggaagttccttagggacttgcccagggtcccagggccacccacacttcatctgctccctcataggccccacctccacgtcccggctgggccccagaccccagcttcctgccctccaccgggagtctgcatggttgggagtcctgggtggaggggcctttgtgaggctggacccggctcagggcaggtggaggagctgggcctcccacagggtgcccgggcagtgccatcctggtgggggagggcagccttcaaacgtgtggggtctacagtcctcaggtctaggcagggctgccggttctccacctccccatccgccccaggccccctgcctgtgcctgccttgcaccccctctgcttgggccacggtgtctctgcattgcctgcctttttgccttcacctcttttcttccccgccccctgcacattcggggtctcagcccccaggctgtgagctccttgggggcaggccctcaataaatgtgaactgctgctgccgcctctgc

SEQ ID NO: 162956 - DNA, 1647 bp, Homo sapiens
  Payload ID: 12112
  Gene Symbol: OTUB1
  Gene Name: OTU deubiquitinase, ubiquitin aldehyde binding 1
  ENST ID: ENST00000543004
  CDS Start-End: 12-854
gctgtttaaagatggcggcggaggaacctcagcagcagaagcaggagccgctgggcagcgactccgaaggtgttaactgtctggcctatgatgaagccatcatggctcagcaggaccgaattcagcaagaggacatgacagatccctgcctcctccagattgctgtgcagaaccctctggtgtcagagcggctggagctctcggtcctatacaaggagtatgctgaagatgacaacatctatcaacagaagatcaaggacctccacaaaaagtactcgtacatccgcaagaccaggcctgacggcaactgtttctatcgggctttcggattctcccacttggaggcactgctggatgacagcaaggagttgcagcggttcaaggctgtgtctgccaagagcaaggaagacctggtgtcccagggcttcactgaattcacaattgaggatttccacaacacgttcatggacctgattgagcaggtggagaagcagacctctgtcgccgacctgctggcctccttcaatgaccagagcacctccgactaccttgtggtctacctgcggctgctcacctcgggctacctgcagcgcgagagcaagttcttcgagcacttcatcgagggtggacggactgtcaaggagttctgccagcaggaggtggagcccatgtgcaaggagagcgaccacatccacatcattgcgctggcccaggccctcagcgtgtccatccaggtggagtacatggaccgcggcgagggcggcaccaccaatccgcacatcttccctgagggctccgagcccaaggtctaccttctctaccggcctggacactacgatatcctctacaaatagggctggctccagcccgctgctgccctgctgcccccctctgccaggcgctagacatgtacagaggtttttctgtggttgtaaatggtcctatttcacccccttcttcctgtcacatgacccccccccatgttttattaaagggggtgctggtggtgagccgtgtgtgcgtgtccctgctctgctgcccgcctggctgctctgtctgctgccccctccccccaggtgggtccccctgcttttcacctatctactcctgagcttccccaacaggagcaggtttgaggggccaggcctcttggaggcccctcctgcttcgttgggttctgcttccttcccttcttagctggctcaggggcttctatgggatcctggaagttccttagggacttgcccagggtcccagggccacccacacttcatctgctccctcataggccccacctccacgtcccggctgggccccagaccccagcttcctgccctccaccgggagtctgcatggttgggagtcctgggtggaggggcctttgtgaggctggacccggctcagggcaggtggaggagctgggcctcccacagggtgcccgggcagtgccatcctggtgggggagggcagccttcaaacgtgtggggtctacagtcctcaggtctaggcagggctgccggttctccacctccccatccgccccaggccccctgcctgtgcctgccttgcaccccctctgcttgggccacggtgtctctgcattgcctgcctttttgccttcacctcttttcttccccgccccctgca

SEQ ID NO: 162957 - DNA, 1803 bp, Homo sapiens
  Payload ID: 12112
  Gene Symbol: OTUB1
  Gene Name: OTU deubiquitinase, ubiquitin aldehyde binding 1
  ENST ID: ENST00000541478
  CDS Start-End: 461-973
tctcctgggtcagatgctgctccgcactgcagctatggtcgcatgcagtgcctgccgaagcccgcagcaggaatgctgccttcggtgattttaatttcacttttctacttctctcaataacaaaatccgcgtttcaaactccagggaaaagaaaacggaattggctccaggaggatctgcaatcaccaccgggaactttgggaggctgggaagatggagccaaaccaatgtgtggggtggaggtgcggatctggggcggccggcctctcctacaggtctcaggtccgcaggcctggcgtgccagcacctgccacgggactggaagcccattccttgacaacgcctaaggggatcccgttgctagggctgttgccaaggcggggcaacgaggaggggctcgcttccgggaggacggcaattggcaacccggaagcggtcggtagtgcggcgctgtttaaagatggcggcggaggaacctcagcagcagaagcaggagccgctgggcagcgactccgaaggtgttaactgtctggcctatgatgaagccatcatggctcagcaggaccgaattcagcaagagttcatggacctgattgagcaggtggagaagcagacctctgtcgccgacctgctggcctccttcaatgaccagagcacctccgactaccttgtggtctacctgcggctgctcacctcgggctacctgcagcgcgagagcaagttcttcgagcacttcatcgagggtggacggactgtcaaggagttctgccagcaggaggtggagcccatgtgcaaggagagcgaccacatccacatcattgcgctggcccaggccctcagcgtgtccatccaggtggagtacatggaccgcggcgagggcggcaccaccaatccgcacatcttccctgagggctccgagcccaaggtctaccttctctaccggcctggacactacgatatcctctacaaatagggctggctccagcccgctgctgccctgctgcccccctctgccaggcgctagacatgtacagaggtttttctgtggttgtaaatggtcctatttcacccccttcttcctgtcacatgacccccccccatgttttattaaagggggtgctggtggtgagccgtgtgtgcgtgtccctgctctgctgcccgcctggctgctctgtctgctgccccctccccccaggtgggtccccctgcttttcacctatctactcctgagcttccccaacaggagcaggtttgaggggccaggcctcttggaggcccctcctgcttcgttgggttctgcttccttcccttcttagctggctcaggggcttctatgggatcctggaagttccttagggacttgcccagggtcccagggccacccacacttcatctgctccctcataggccccacctccacgtcccggctgggccccagaccccagcttcctgccctccaccgggagtctgcatggttgggagtcctgggtggaggggcctttgtgaggctggacccggctcagggcaggtggaggagctgggcctcccacagggtgcccgggcagtgccatcctggtgggggagggcagccttcaaacgtgtggggtctacagtcctcaggtctaggcagggctgccggttctccacctccccatccgccccaggccccctgcctgtgcctgccttgcaccccctctgcttgggccacggtgtctctgcattgcctgcctttttgccttcacctcttttcttccccgccccctgcacattcggggtctcagcccccaggctgtgagctccttg

SEQ ID NO: 162958 - DNA, 1391 bp, Homo sapiens
  Payload ID: 12112
  Gene Symbol: OTUB1
  Gene Name: OTU deubiquitinase, ubiquitin aldehyde binding 1
  ENST ID: ENST00000535715
  CDS Start-End: 453-1313
gtcagatgctgctccgcactgcagctatggtcgcatgcagtgcctgccgaagcccgcagcaggaatgctgccttcggtgattttaatttcacttttctacttctctcaataacaaaatccgcgtttcaaactccagggaaaagaaaacggaattggctccaggaggatctgcaatcaccaccgggaactttgggaggctgggaagatggagccaaaccaatgtgtggggtggaggtgcggatctggggcggccggcctctcctacaggtctcaggtccgcaggcctggcgtgccagcacctgccacgggactggaagcccattccttgacaacgcctaaggggatcccgttgctagggctgttgccaaggcggggcaacgaggaggggctcgcttccgggaggacggcaattggcaacccggaagcggtcggtagtgcggcgctgtttaaagatggcggcggaggaacctcagcagcagaagcaggagccgctgggcagcgactccgaaggtgttaactgtctggcctatgatgaagccatcatggctcagcaggaccgaattcagcaagagattgctgtgcagaaccctctggtgtcagagcggctggagctctcggtcctatacaaggagtatgctgaagatgacaacatctatcaacagaagatcaaggacctccacaaaaagtactcgtacatccgcaagaccaggcctgacggcaactgtttctatcgggctttcggattctcccacttggaggcactgctggatgacagcaaggagttgcagcggttcaaggctgtgtctgccaagagcaaggaagacctggtgtcccagggcttcactgaattcacaattgaggatttccacaacacgttcatggacctgattgagcaggtggagaagcagacctctgtcgccgacctgctggcctccttcaatgaccagagcacctccgactaccttgtggtctacctgcggctgctcacctcgggctacctgcagcgcgagagcaagttcttcgagcacttcatcgagggtggacggactgtcaaggagttctgccagcaggaggtggagcccatgtgcaaggagagcgaccacatccacatcattgcgctggcccaggccctcagcgtgtccatccagggggtgctggtggtgagccgtgtgtgcgtgtccctgctctgctgcccgcctggctgctctgtctgctgccccctccccccagatggacaaaccaaggccaccttctccttcatcacctcagtctcggcacagttccagggatgccagggagaaaggcagctgtagcccagggcgaggctgagatggagcaagaaggcagggcccagagcgggcgtccaggctggagctcccagtgctgggaag

SEQ ID NO: 162959 - DNA, 1259 bp, Homo sapiens
  Payload ID: 12112
  Gene Symbol: OTUB1
  Gene Name: OTU deubiquitinase, ubiquitin aldehyde binding 1
  ENST ID: ENST00000543988
  CDS Start-End: 230-955
ccttgcagtcaggcagagaggcctacgccagggccgagccccccggcctgctccagcggcggcccgcgccgtgagggcctcgagtttcgctgggctacggagcacaaaggtccgggcgggccattcgggatgtcgtaggcggccctgggatgtgaggggcctgcgggatctgtccctgaggcctgcgactttttctggtgttaactgtctggcctatgatgaagccatcatggctcagcaggaccgaattcagcaagagattgctgtgcagaaccctctggtgtcagagcggctggagctctcggtcctatacaaggagtatgctgaagatgacaacatctatcaacagaagatcaaggacctccacaaaaagtactcgtacatccgcaagaccaggcctgacggcaactgtttctatcgggctttcggattctcccacttggaggcactgctggatgacagcaaggagttgcagcggttcaaggctgtgtctgccaagagcaaggaagacctggtgtcccagggcttcactgaattcacaattgaggatttccacaacacgttcatggacctgattgagcaggtggagaagcagacctctgtcgccgacctgctggcctccttcaatgaccagagcacctccgactaccttgtggtctacctgcggctgctcacctcgggctacctgcagcgcgagagcaagttcttcgagcacttcatcgagggtggacggactgtcaaggagttctgccagcaggaggtggagcccatgtgcaaggagagcgaccacatccacatcattgcgctggcccaggccctcagcgtgtccatccaggtggagtacatggaccgcggcgagggcggcaccaccaatccgcacatcttccctgagggctccgagcccaaggtctaccttctctaccggcctggacactacgatatcctctacaaatagggctggctccagcccgctgctgccctgctgcccccctctgccaggcgctagacatgtacagaggtttttctgtggttgtaaatggtcctatttcacccccttcttcctgtcacatgacccccccccatgttttattaaagggggtgctggtggtgagccgtgtgtgcgtgtccctgctctgctgcccgcctggctgctctgtctgctgccccctccccccaggtgggtccccctgcttttcacctatctactcctgagcttccccaacaggagcaggtttgaggggccaggcctcttggaggcc

SEQ ID NO: 162960 - DNA, 1729 bp, Homo sapiens
  Payload ID: 12112
  Gene Symbol: OTUB1
  Gene Name: OTU deubiquitinase, ubiquitin aldehyde binding 1
  Uniprot ID: Q96FW1
  ENST ID: ENST00000538426
  CDS Start-End: 45-860
aattggcaacccggaagcggtcggtagtgcggcgctgtttaaagatggcggcggaggaacctcagcagcagaagcaggagccgctgggcagcgactccgaaggtgttaactgtctggcctatgatgaagccatcatggctcagcaggaccgaattcagcaagagattgctgtgcagaaccctctggtgtcagagcggctggagctctcggtcctatacaaggagtatgctgaagatgacaacatctatcaacagaagatcaaggacctccacaaaaagtactcgtacatccgcaagaccaggcctgacggcaactgtttctatcgggctttcggattctcccacttggaggcactgctggatgacagcaaggagttgcagcggttcaaggctgtgtctgccaagagcaaggaagacctggtgtcccagggcttcactgaattcacaattgaggatttccacaacacgttcatggacctgattgagcaggtggagaagcagacctctgtcgccgacctgctggcctccttcaatgaccagagcacctccgactaccttgtggtctacctgcggctgctcacctcgggctacctgcagcgcgagagcaagttcttcgagcacttcatcgagggtggacggactgtcaaggagttctgccagcaggaggtggagcccatgtgcaaggagagcgaccacatccacatcattgcgctggcccaggccctcagcgtgtccatccaggtggagtacatggaccgcggcgagggcggcaccaccaatccgcacatcttccctgagggctccgagcccaaggtctaccttctctaccggcctggacactacgatatcctctacaaatagggctggctccagcccgctgctgccctgctgcccccctctgccaggcgctagacatgtacagaggtttttctgtggttgtaaatggtcctatttcacccccttcttcctgtcacatgacccccccccatgttttattaaagggggtgctggtggtgagccgtgtgtgcgtgtccctgctctgctgcccgcctggctgctctgtctgctgccccctccccccaggtgggtccccctgcttttcacctatctactcctgagcttccccaacaggagcaggtttgaggggccaggcctcttggaggcccctcctgcttcgttgggttctgcttccttcccttcttagctggctcaggggcttctatgggatcctggaagttccttagggacttgcccagggtcccagggccacccacacttcatctgctccctcataggccccacctccacgtcccggctgggccccagaccccagcttcctgccctccaccgggagtctgcatggttgggagtcctgggtggaggggcctttgtgaggctggacccggctcagggcaggtggaggagctgggcctcccacagggtgcccgggcagtgccatcctggtgggggagggcagccttcaaacgtgtggggtctacagtcctcaggtctaggcagggctgccggttctccacctccccatccgccccaggccccctgcctgtgcctgccttgcaccccctctgcttgggccacggtgtctctgcattgcctgcctttttgccttcacctcttttcttccccgccccctgcacattcggggtctcagcccccaggctgtgagctccttgggggcaggccctcaataaatgtgaactgctgctgccgcc

SEQ ID NO: 162961 - DNA, 638 bp, Homo sapiens
  Payload ID: 12112
  Gene Symbol: OTUB1
  Gene Name: OTU deubiquitinase, ubiquitin aldehyde binding 1
  ENST ID: ENST00000535140
  CDS Start-End: 126-434
ttgcagtcaggcagagaggcctacgccagggccgagccccccggcctgctccagcggcggcccgcgccgtgagggcctcgagtttcgctgggctacggagcacaaaggtgttaactgtctggcctatgatgaagccatcatggctcagcaggaccgaattcagcaagagattgctgtgcagaaccctctggtgtcagagcggctggagctctcggtcctatacaaggagtatgctgaagatgacaacatctatcaacagaagatcaaggacctccacaaaaagtactcgtacatccgcaagaccaggcctgacggcaactgtttctatcgggctttcggattctcccacttggaggcactgctggatgacagcaaggagttgcagcggtggagaagcagacctctgtcgccgacctgctggcctccttcaatgaccagagcacctccgactaccttgtggtctacctgcggctgctcacctcgggctacctgcagcgcgagagcaagttcttcgagcacttcatcgagggtggacggactgtcaaggagttctgccagcaggaggtggagcccatgtgcaaggagagcgaccacatccacatcattgcgctggcccaggccctcagcgtgtccatcca

SEQ ID NO: 162962 - DNA, 3922 bp, Homo sapiens
  Payload ID: 12113
  Gene Symbol: OTUB2
  Gene Name: OTU deubiquitinase, ubiquitin aldehyde binding 2
  Uniprot ID: Q96DC9
  ENST ID: ENST00000203664
  CDS Start-End: 210-914
acgtcaatcgcagggcgtgtgtcttgctgggacacagtggaggtctaacctttggtttgcggagcggtcgggtgtattctccgccgcccccacgccctcgaggtccccgccaccgaaccagcggcggagcccgcccgcgcctcccgcggcattcccgcaccggatcgctcctcgctggggcgggacctggcctggcggctctggtcactatgagtgaaacatctttcaacctaatatcagaaaaatgtgacattctatccattcttcgggaccatcctgaaaacaggatttaccggaggaaaatcgaggaactcagcaaaaggttcaccgccatccgcaagaccaaaggggatgggaactgcttctacagggccttgggctattcctacctggagtccctgctggggaagagcagggagatcttcaagttcaaagaacgcgtactgcagaccccaaatgaccttctggctgctggctttgaggagcacaagttcagaaacttcttcaatgctttttacagtgtggtggaactggtagagaaggatggctcagtgtccagcctgctgaaggtgttcaacgaccagagtgcctcggaccacatcgtgcagttcctgcgcctgctcacgtcggccttcatcaggaaccgagcagacttcttccggcacttcattgatgaggagatggacatcaaagacttctgcactcacgaagtagagcccatggccacggagtgtgaccacatccagatcacggcgttgtcgcaggccctgagcattgccctgcaagtggagtacgtggacgagatggataccgccctgaaccaccacgtgttccctgaggccgccaccccttccgtttacctgctctataaaacatcccactacaacatcctttatgcagccgataaacattgattaattttaggccatgcagtggaacctgtcacctaatgggactgcattctgaatggaacattccggctcttcaattttttaagcaatttagactgtagcaagaaaatgtgcagccttttgggcaaagcccctgggaacgaggcctatccactatggactatggtaacttggtaggatttttagtatttattttaatggagggacaaatgctttctaactgggcccccgactccgcaccccagttcgcagtgaggccctgggtgggtcacctgccctctctggacttgtttcttcaactggaggaggtccctgcctatgctgacattccattgtagaaaaatggggcctctggtgtctctttaccaggggcagtgcctctctgcgggggaggaaaagctcaaggttagctgtcttaacccaagtgacttaccaggcctacaaaagagtccagtccagtcacttgttggactgggctctgacagatggcctattgaggtcaacttgaatgtgagggctacggtgtggtttcaaacattcatgatggatgtattttcctacccctaacttaaggagaaaaaaaaaaagacttcctttttttgccaaagtccagaaaggggcctttagcctttagtaggagctcaaattgttggggcccctctacctctctcagggctagaactgcctgactcttggtggacgagcccttcagggttctgctttcagccccacctggacagaggcttacaagactagggtctggaccagaatctgtgtatttctgtctgggaccaggaagccgcagctgtcccatcatccccagcaaatcctagaagtggagtctggatacttcaaggatagaagtgttggcacgcacagccatggacccagctgagcagagcagacgctttgcaggctgcccctggcttcttcctccctttcccgcttctgctctctttatggactggtcagagggtaggtgggaaagaacagacaagccatgggaagttggcagtggggagatttccactgtggaaaccgcctgggaattccggccagcagcttcctccttcagccacctggccataccccttaaataagcccctcaccttgctgcctcaggaccttcaagattccatctgtgggctggccggcaagatggcaccagtggggacccacaccctggctgggcagaggtgctgctagcaacctctcttcctctataagaggaaatggaaaatgcagggtgtggaattgccctttggggtccttccttaattgaaggccaccttctcacaggtttcattctgcagggatttactggaatctattggtgctgctgcatgagtctgctgacaacctgactgcacaaggactgggtagcagactcctcagagtcctcttgacacaaatgtcagatttgtgtcactcttctgccttcgtgaaaagccaatagcactctcagatatcaggggattttagttccaagcagggaccctggtttccatactgccctcagctggagtttggatccaaaggctctggctaagtcattatgtcactttttcacaggaatgtaaatttgactgtcacctctgaatttgttcagtgtcccaccatggtctatgagaagtacactggaagcgtggggggaacacatgacatgatttgtgaatatcatcatctttgccagacaagtctccaggggatccctgtttcccaactgaaaggtgtgaacggacacacacacagcctggatgacgccttggctgttctaaggggctgtaaggtgggctctgggccttccagctaggctctcaagcacagcagaagcctcactgggctgctatgtctctgtatttgtggcttgtgtggtagcctcagaagcagagctgtttggcagactggctggagaaattccctctaggagacttgcctgtgctgtgcttccaggtcacagagccccccggaaactcacaggggccctcttcccagaaaagaatctattctatcacttcagaatcaggacactcaagctctggcagaggaaggccaagttactttcatggtcttaccctctgcttttcccctttttgcaaaaaaccactggccaaatccgaaccattgcccttgtttcccccacgttctctctcagatctttgtctcgaagggaaaacatagtggatgaaaaggtgtggcaggctttggcaccttgttaaaatttctagtcatctgtggatgttaccttgcttgtccacagcagccagtcaccctggccagtcccacttcctggataattctctaccctcaccccacagagccatctctctccagaccaaaagctggaaggagagttgctttgagagcttgtttttacaactgcatgtttattatgatactttctctccaaaggaaacttttaaatcaatgggaacaattagcaacagaaagagcacagtccctgcttttgactgggttcctattttaagcacaaatgagagctctggagccagaatgccagggttctaacttcagcattcacttactagctgtatgatcttggccaagtcacttcacctccctgagccccaattcccaagtttgtgaaatggcaacaatacctatgtgtcactggattattggttaaaacagaatgagattccttgtgtgaaaatagctattatacctgacacactcatcgtatgggctctgcaaagggatattccccaacctgtccttcctgacaggaagcatagggcactgcagatggggaagcatgtcaccttggcagtgactcggtggcttcccaagcaggagtgtcaggggaaccatgagagagagtctaggagcaaacacatcaccaccctgagcagatacaggagtggggagggggctgtaactcagtgagtggcttccaggggccccaggccctgctggatgtgggccaagccctacagcttccctaggcagtaagtaaaaacattctcctagcattaaaatggtttccataa

SEQ ID NO: 162963 - DNA, 708 bp, Homo sapiens
  Payload ID: 12113
  Gene Symbol: OTUB2
  Gene Name: OTU deubiquitinase, ubiquitin aldehyde binding 2
  Uniprot ID: Q96DC9
  ENST ID: ENST00000553723
  CDS Start-End: 161-382
ctttggtttgcggagcggtcgggtgtattctccgccgcccccacgccctcgaggtccccgccaccgaaccagcggcggagcccgcccgcgcctcccgcggcattcccgcaccggatcgctcctcgctggggcgggacctggcctggcggctctggtcactatgagtgaaacatctttcaacctaatatcagaaaaatgtgacattctatccattcttcgggaccatcctgaaaacaggatttaccggaggaaaatcgaggaactcagcaaaaggttcaccgccatccgcaagaccaaaggggatgggaactgcttctacagggccttgggctattcctacctggagtccctgctggggaagagcagggagatcttcaagtgagtgccggggccccttggcctgtcagggctgtgttctctgtgctaggtcagcctcaagtctctcggaggttttcgttacactcaggctggttaacccagagaatgagctgaagagctgcctggcagaggcgtttgatgttgggggtgcccagctgcctgctgtggtgaagttgggggcagccaaggggtggaggatggaatctgtgacctcccagatgctttccagcctctgcttccaccacaggcctgggtcagcccaggtgagtcgcagggagcaggtacttcgtgacccactctgaaaagaaaagaaaagacaaacaaaaagaa

SEQ ID NO: 162964 - DNA, 4616 bp, Homo sapiens
  Payload ID: 12113
  Gene Symbol: OTUB2
  Gene Name: OTU deubiquitinase, ubiquitin aldehyde binding 2
  Uniprot ID: Q96DC9
  ENST ID: ENST00000617748
  CDS Start-End: 210-914
acgtcaatcgcagggcgtgtgtcttgctgggacacagtggaggtctaacctttggtttgcggagcggtcgggtgtattctccgccgcccccacgccctcgaggtccccgccaccgaaccagcggcggagcccgcccgcgcctcccgcggcattcccgcaccggatcgctcctcgctggggcgggacctggcctggcggctctggtcactatgagtgaaacatctttcaacctaatatcagaaaaatgtgacattctatccattcttcgggaccatcctgaaaacaggatttaccggaggaaaatcgaggaactcagcaaaaggttcaccgccatccgcaagaccaaaggggatgggaactgcttctacagggccttgggctattcctacctggagtccctgctggggaagagcagggagatcttcaagttcaaagaacgcgtactgcagaccccaaatgaccttctggctgctggctttgaggagcacaagttcagaaacttcttcaatgctttttacagtgtggtggaactggtagagaaggatggctcagtgtccagcctgctgaaggtgttcaacgaccagagtgcctcggaccacatcgtgcagttcctgcgcctgctcacgtcggccttcatcaggaaccgagcagacttcttccggcacttcattgatgaggagatggacatcaaagacttctgcactcacgaagtagagcccatggccacggagtgtgaccacatccagatcacggcgttgtcgcaggccctgagcattgccctgcaagtggagtacgtggacgagatggataccgccctgaaccaccacgtgttccctgaggccgccaccccttccgtttacctgctctataaaacatcccactacaacatcctttatgcagccgataaacattgattaattttaggccatgcagtggaacctgtcacctaatgggactgcattctgaatggaacattccggctcttcaattttttaagcaatttagactgtagcaagaaaatgtgcagccttttgggcaaagcccctgggaacgaggcctatccactatggactatggtaacttggtaggatttttagtatttattttaatggagggacaaatgctttctaactgggcccccgactccgcaccccagttcgcagtgaggccctgggtgggtcacctgccctctctggacttgtttcttcaactggaggaggtccctgcctatgctgacattccattgtagaaaaatggggcctctggtgtctctttaccaggggcagtgcctctctgcgggggaggaaaagctcaaggttagctgtcttaacccaagtgacttaccaggcctacaaaagagtccagtccagtcacttgttggactgggctctgacagatggcctattgaggtcaacttgaatgtgagggctacggtgtggtttcaaacattcatgatggatgtattttcctacccctaacttaaggagaaaaaaaaaaagacttcctttttttgccaaagtccagaaaggggcctttagcctttagtaggagctcaaattgttggggcccctctacctctctcagggctagaactgcctgactcttggtggacgagcccttcagggttctgctttcagccccacctggacagaggcttacaagactagggtctggaccagaatctgtgtatttctgtctgggaccaggaagccgcagctgtcccatcatccccagcaaatcctagaagtggagtctggatacttcaaggatagaagtgttggcacgcacagccatggacccagctgagcagagcagacgctttgcaggctgcccctggcttcttcctccctttcccgcttctgctctctttatggactggtcagagggtaggtgggaaagaacagacaagccatgggaagttggcagtggggagatttccactgtggaaaccgcctgggaattccggccagcagcttcctccttcagccacctggccataccccttaaataagcccctcaccttgctgcctcaggaccttcaagattccatctgtgggctggccggcaagatggcaccagtggggacccacaccctggctgggcagaggtgctgctagcaacctctcttcctctataagaggaaatggaaaatgcagggtgtggaattgccctttggggtccttccttaattgaaggccaccttctcacaggtttcattctgcagggatttactggaatctattggtgctgctgcatgagtctgctgacaacctgactgcacaaggactgggtagcagactcctcagagtcctcttgacacaaatgtcagatttgtgtcactcttctgccttcgtgaaaagccaatagcactctcagatatcaggggattttagttccaagcagggaccctggtttccatactgccctcagctggagtttggatccaaaggctctggctaagtcattatgtcactttttcacaggaatgtaaatttgactgtcacctctgaatttgttcagtgtcccaccatggtctatgagaagtacactggaagcgtggggggaacacatgacatgatttgtgaatatcatcatctttgccagacaagtctccaggggatccctgtttcccaactgaaaggtgtgaacggacacacacacagcctggatgacgccttggctgttctaaggggctgtaaggtgggctctgggccttccagctaggctctcaagcacagcagaagcctcactgggctgctatgtctctgtatttgtggcttgtgtggtagcctcagaagcagagctgtttggcagactggctggagaaattccctctaggagacttgcctgtgctgtgcttccaggtcacagagccccccggaaactcacaggggccctcttcccagaaaagaatctattctatcacttcagaatcaggacactcaagctctggcagaggaaggccaagttactttcatggtcttaccctctgcttttcccctttttgcaaaaaaccactggccaaatccgaaccattgcccttgtttcccccacgttctctctcagatctttgtctcgaagggaaaacatagtggatgaaaaggtgtggcaggctttggcaccttgttaaaatttctagtcatctgtggatgttaccttgcttgtccacagcagccagtcaccctggccagtcccacttcctggataattctctaccctcaccccacagagccatctctctccagaccaaaagctggaaggagagttgctttgagagcttgtttttacaactgcatgtttattatgatactttctctccaaaggaaacttttaaatcaatgggaacaattagcaacagaaagagcacagtccctgcttttgactgggttcctattttaagcacaaatgagagctctggagccagaatgccagggttctaacttcagcattcacttactagctgtatgatcttggccaagtcacttcacctccctgagccccaattcccaagtttgtgaaatggcaacaatacctatgtgtcactggattattggttaaaacagaatgagattccttgtgtgaaaatagctattatacctgacacactcatcgtatgggctctgcaaagggatattccccaacctgtccttcctgacaggaagcatagggcactgcagatggggaagcatgtcaccttggcagtgactcggtggcttcccaagcaggagtgtcaggggaaccatgagagagagtctaggagcaaacacatcaccaccctgagcagatacaggagtggggagggggctgtaactcagtgagtggcttccaggggccccaggccctgctggatgtgggccaagccctacagcttccctaggcagtaagtaaaaacattctcctagcattaaaatggtttccataactacttttgtcctggcttcttaatactgggtacctggcatgcagccaagaactctgcttttccgtggtgcttatgtattaagtagattagctggggagggatattccttgtttaatggcagatccaggacactccggaagctctgcccaccaacttcaccttaccaggcgagagtagcactgcttggaaggctgctcctgccttttaaagcctgtctacgtattagctcctccaccaaggaaaagaatttgctgttagatggctagggcaggacacggacagtcatcaggggatctatgtttggcttatggcaagtggcttcactcccacggctcaggtgccattaggggatattaagcccgcttactaaccccactgaccaccactgcatcatttggaaaatggagagtctccctgccattctctgatagctgtcagtcaggagctgacctcacagacgggcaatttcccctcctattccggtcactggtgacactgggggatgggaggccattccttggcaacacttctgagactgaagtagttttctgaacttgtcctgggcccagaaggaagatactaatcccacctctgctacttggctgctgtgtggccctgggcaagtctcaatcactgggtgtctatatgctcaagtacaaaaaacactaataaagacttatagatgggcacagtg

SEQ ID NO: 162965 - DNA, 708 bp, Homo sapiens; identical to SEQ ID NO: 162963
  Payload ID: 12113
  Gene Symbol: OTUB2
  Gene Name: OTU deubiquitinase, ubiquitin aldehyde binding 2
  Uniprot ID: Q96DC9
  ENST ID: ENST00000628711
  CDS Start-End: 161-382

SEQ ID NO: 162966 - DNA, 3298 bp, Homo sapiens
  Payload ID: 12114
  Gene Symbol: OTUD6B
  Gene Name: OTU domain containing 6B
  ENST ID: ENST00000285420
  CDS Start-End: 100-1071
gcgcacgcgcagcaccccatttaagtttctcgtctttgcagtggctttgcttagatccggtgccgccttgaaggcggggctgggtcccagccgtagccaatggagccccgggtgagggttgaggggtggaaggtgcctactagccggtgcaggtttcttctagcgcgtgtgctggggtacctggtcgtcatggaggcggtattgaccgaagagcttgatgaggaagagcagctgctgagaaggcatcgcaaagagaagaaggagttgcaagccaaaattcagggcatgaagaatgctgttcccaagaatgacaagaagaggaggaagcaactcaccgaagatgtggccaagttggaaaaagaaatggaacagaaacatagagaggaactggagcaattgaagctgactactaaggagaataagatagattctgttgctgttaacatttcaaacttggtgcttgagaatcagccacctcggatatcaaaagcacaaaagagacgggaaaagaaagctgcattggaaaaggagcgagaagaacggatagctgaagctgaaattgaaaacttaacaggagccagacatatggaaagtgagaaacttgctcaaatattggcagctagacagttagaaattaaacagattccatctgatggccactgtatgtataaagccattgaagatcaactgaaagaaaaggattgtgctctgactgtggttgccttgagaagtcagaccgctgagtatatgcaaagccatgtggaagactttctgccatttttaacaaaccctaatacaggagatatgtatactccagaagaatttcagaagtactgtgaagatattgtaaacacagctgcatggggaggtcagcttgagctaagagctctgtctcacattttacaaacaccaatagagataatacaggcagattctcctcccattatagttggtgaagaatattcaaaaaaaccactaatacttgtatatatgagacatgcatatggcttaggagaacattataattcggttacacggttggtaaacatagttactgaaaattgcagctaatttatacaatgttgtacaattatgttttaatacagtgtgctgaactgagtatttctaccaagtgttgggttgttctaaatgctactgaaaaacacaactaccttatatcagttttatggcaaagctactaacaggtgtttttagaaatatgtcagagataaactttaaccagtgtcttcttagtggaattttaaaaatttgttaagttcattgtagagaacaccattcatagaccaagatggtcccctattagctgatattttcatttatgtaagatcctggacattctgttttgtgttggaacaaattttcaatgtttttaattctcccttttctgcctgttcctaaaaactttcaaaataaccatttcaatgtaatttgtcttgaagaagtttacccaatatctttgtcattgcaataatgtagtatggtgatggtcaatttaattattgcttataaaatgaacttgattgcagtaaccatggtatcgatgagactaatgcagtgaagctttattactaatatatatagccttatcaaagcaagctaagaagcttgctttaataattaataatttaaaaatatttatttagatgggattcagttgtttaaagaagtgagataaattcaaaggtaaataggtattctctgtcaaatttaaatctctaaagaattagagattagttttttatttgtgtataatttaaaaaagacctaataggttactgtctttttaatgcatttgttattctttcgtattttttaagcatcggactggagttagtaccatcatctcttgagtctttcataactacacatttttatatttccttttgtgttttctactttgctttccttgaaggaacaagcattttgtggcctttaccttgtgcaattttagggagtagcagtgtaaaaggtccaagaccacatttacttgaaattcttcctcttttctgatttgtcttaccagatatttcccttcttgcctcattctctaggatttgaataaaacctttgccacttattttattagccttattaatgtcacctttccttcaactcaaatatttgagaaattttatgttacatatatgaatgaagttgaaagctactgtttggaagctaagacttgtatagagtagttttgtatatgaatggttgttctagctcagatttcaggttactcacaacagtattctttctaagaggatatatacaaatgtctctcataatttatgtaaggaaatattatgaaaatgagacttttttagtttgatgtgtgtttcccaaactagagataaaactagtaagatttagtatcgtttataacatttgaatttttgctccatgagtacaactaatttttataagtaaatattgggtttatatgaaaaatggggtgtcagtcttttcacacgcccagcaggtaacaatgtgggaagctggcagggtcattgatagcaagtaagtacttcctgaaggctttccagttcaaaagattacaagccattctgcctgccaaacaaattatattctgaagatgcctgttttgtaacccttgatgtgaattttttggtgtctgaaatttacaaaagaatgaaattgaaattgtaaaacactaaatgctttgggtttattttgaagtaatctgttactttaaaatgtcaacattaggaagccataaaacaagatattatgaaacccagtattataaatgttatctacatctaaagtattttaaaataacttattggcagctttattctttttttccttacaagatttagaatctttttggttatatgtctatttttcaattttgttatatttttaatttaagtggccaatgtggttatgaacaagatttgtatggtcagcttctgttctttcctaaaacttcagataaatatcattttagctataacctaaaaaagtgtttaaataaaatgacagatgttaatttaaaagcagcatatgctaatttactttttcatatgatgatggtctaatggaagttacatatgctttcttttgtcctaactctgaaaagtatatgtcagagttctggaatatgtctttagccaagaattttattcacttaaatttgtttacaacttgtataaagcaaaaaagaatgtgtgtaactatagtgaacgcatagttttgcttatattatgtgatgtttgccaaaaaaagaataaaaaatgaatgaattaaatcaaca

SEQ ID NO: 162967 - DNA, 1089 bp, Homo sapiens
  Payload ID: 12114
  Gene Symbol: OTUD6B
  Gene Name: OTU domain containing 6B
  Uniprot ID: Q8N6M0
  ENST ID: ENST00000404789
  CDS Start-End: 22-903
gtgctggggtacctggtcgtcatggaggcggtattgaccgaagagcttgatgaggaagagcagctgctgagaaggcatcgcaaagagaagaaggagttgcaagccaaaattcagggcatgaagaatgctgttcccaagaatgacaagaagaggaggaagcaactcaccgaagatgtggccaagttggaaaaagaaatggaacagaaacatagagaggaactggagcaattgaagctgactactaaggagaataagatagattctgttgctgttaacatttcaaacttggtgcttgagaatcagccacctcggatatcaaaagcacaaaagagacgggaaaagaaagctgcattggaaaaggagcgagaagaacggatagctgaagctgaaattgaaaacttaacaggagccagacatatggaaagtgagaaacttgctcaaatattggcagctagacagttagaaattaaacagattccatctgatggccactgtatgtataaagccattgaagatcaactgaaagaaaaggattgtgctctgactgtggttgccttgagaagtcagaccgctgagtatatgcaaagccatgtggaagactttctgccatttttaacaaaccctaatacaggagatatgtatactccagaagaatttcagaagtactgtgaagatattgtaaacacagctgcatggggaggtcagcttgagctaagagctctgtctcacattttacaaacaccaatagagataatacaggcagattctcctcccattatagttggtgaagaatattcaaaaaaaccactaatacttgtatatatgagacatgcatatggcttaggagaacattataattcggttacacggttggtaaacatagttactgaaaattgcagctaatttatacaatgttgtacaattatgttttaatacagtgtgctgaactgagtatttctaccaagtgttgggttgttctaaatgctactgaaaaacacaactaccttatatcagttttatggcaaagctactaacaggtgtttttagaaatatgtcagagataaactttaaccagtgtcttcttagtgg

SEQ ID NO: 162968 - DNA, 1631 bp, Homo sapiens
  Payload ID: 12114
  Gene Symbol: OTUD6B
  Gene Name: OTU domain containing 6B
  ENST ID: ENST00000522894
  CDS Start-End: 61-387
aaggtgcctactagccggtgcaggtttcttctagcgcgtgtgctggggtacctggtcgtcatggaggcggtattgaccgaagagcttgatgaggaagagcagctgctgagaaggcatcgcaaagagaagaaggagttgcaagccaaaattcagggcatgaagaatgctgttcccaagaatgacaagaagaggaggaagcaactcaccgaagatgtggccaagttggaaaaagaaatggaacagaaacatagagaggaactggagcaattgaagctgactactaaggagaataagatagattctgttgctgttaacatttcaaacttggtgcttgagaatcagccacctcggatatcaaaagcacaaaagagacgggtgcctggatagaaggagctctctgtgttgtccttggtccctgctctgctcttaccagctgtatggcctttggaaatctttctgcgtgctgtttcctcagaagaggaaaatgaggggttttggattagatgatatctaaggaaaagaaagctgcattggaaaaggagcgagaagaacggatagctgaagctgaaattgaaaacttaacaggagccagacatatggaaagtgagaaacttgctcaaatattggcagctagacagttagaaattaaacagattccatctgatggccactgtatgtataaagccattgaagatcaactgaaagaaaaggattgtgctctgactgtggttgccttgagaagtcagaccgctgagtatatgcaaagccatgtggaagactttctgccatttttaacaaaccctaatacaggagatatgtatactccagaagaatttcagaagtactgtgaagatattgtaaacacagctgcatggggaggtcagcttgagctaagagctctgtctcacattttacaaacaccaatagagataatacaggcagattctcctcccattatagttggtgaagaatattcaaaaaaaccactaatacttgtatatatgagacatgcatatggcttaggagaacattataattcggttacacggttggtaaacatagttactgaaaattgcagctaatttatacaatgttgtacaattatgttttaatacagtgtgctgaactgagtatttctaccaagtgttgggttgttctaaatgctactgaaaaacacaactaccttatatcagttttatggcaaagctactaacaggtgtttttagaaatatgtcagagataaactttaaccagtgtcttcttagtggaattttaaaaatttgttaagttcattgtagagaacaccattcatagaccaagatggtcccctattagctgatattttcatttatgtaagatcctggacattctgttttgtgttggaacaaattttcaatgtttttaattctcccttttctgcctgttcctaaaaactttcaaaataaccatttcaatgtaatttgtcttgaagaagtttacccaatatctttgtcattgcaataatgtagtatggtgatggtcaatttaattattgcttataaaatgaacttgattgcagtaaccatggtatcgatgagactaatgcagtgaagctttattactaatatatatagccttatcaaagcaagcta

SEQ ID NO: 162969 - DNA, 3434 bp, Homo sapiens
  Payload ID: 12114
  Gene Symbol: OTUD6B
  Gene Name: OTU domain containing 6B
  Uniprot ID: Q8N6M0
  ENST ID: ENST00000615618
  CDS Start-End: 633-1211
gcgcacgcgcagcaccccatttaagtttctcgtctttgcagtggctttgcttagatccggtgccgccttgaaggcggggctgggtcccagccgtagccaatggagccccgggtgagggttgaggggtggaaggtgcctactagccggtgcaggtttcttctagcgcgtgtgctggggtacctggtcgtcatggaggcggtattgaccgaagagcttgatgaggaagagcagctgctgagaaggcatcgcaaagagaagaaggagttgcaagccaaaattcagggcatgaagaatgctgttcccaagaatgacaagaagaggaggaagcaactcaccgaagatgtggccaagttggaaaaagaaatggaacagaaacatagagaggaactggagcaattgaagctgactactaaggagaataagatagattctgttgctgttaacatttcaaacttggtgcttgagaatcagccacctcggatatcaaaagcacaaaagagacgggtgcctggatagaaggagctctctgtgttgtccttggtccctgctctgctcttaccagctgtatggcctttggaaatctttctgcgtgctgtttcctcagaagaggaaaatgaggggttttggattagatgatatctaaggaaaagaaagctgcattggaaaaggagcgagaagaacggatagctgaagctgaaattgaaaacttaacaggagccagacatatggaaagtgagaaacttgctcaaatattggcagctagacagttagaaattaaacagattccatctgatggccactgtatgtataaagccattgaagatcaactgaaagaaaaggattgtgctctgactgtggttgccttgagaagtcagaccgctgagtatatgcaaagccatgtggaagactttctgccatttttaacaaaccctaatacaggagatatgtatactccagaagaatttcagaagtactgtgaagatattgtaaacacagctgcatggggaggtcagcttgagctaagagctctgtctcacattttacaaacaccaatagagataatacaggcagattctcctcccattatagttggtgaagaatattcaaaaaaaccactaatacttgtatatatgagacatgcatatggcttaggagaacattataattcggttacacggttggtaaacatagttactgaaaattgcagctaatttatacaatgttgtacaattatgttttaatacagtgtgctgaactgagtatttctaccaagtgttgggttgttctaaatgctactgaaaaacacaactaccttatatcagttttatggcaaagctactaacaggtgtttttagaaatatgtcagagataaactttaaccagtgtcttcttagtggaattttaaaaatttgttaagttcattgtagagaacaccattcatagaccaagatggtcccctattagctgatattttcatttatgtaagatcctggacattctgttttgtgttggaacaaattttcaatgtttttaattctcccttttctgcctgttcctaaaaactttcaaaataaccatttcaatgtaatttgtcttgaagaagtttacccaatatctttgtcattgcaataatgtagtatggtgatggtcaatttaattattgcttataaaatgaacttgattgcagtaaccatggtatcgatgagactaatgcagtgaagctttattactaatatatatagccttatcaaagcaagctaagaagcttgctttaataattaataatttaaaaatatttatttagatgggattcagttgtttaaagaagtgagataaattcaaaggtaaataggtattctctgtcaaatttaaatctctaaagaattagagattagttttttatttgtgtataatttaaaaaagacctaataggttactgtctttttaatgcatttgttattctttcgtattttttaagcatcggactggagttagtaccatcatctcttgagtctttcataactacacatttttatatttccttttgtgttttctactttgctttccttgaaggaacaagcattttgtggcctttaccttgtgcaattttagggagtagcagtgtaaaaggtccaagaccacatttacttgaaattcttcctcttttctgatttgtcttaccagatatttcccttcttgcctcattctctaggatttgaataaaacctttgccacttattttattagccttattaatgtcacctttccttcaactcaaatatttgagaaattttatgttacatatatgaatgaagttgaaagctactgtttggaagctaagacttgtatagagtagttttgtatatgaatggttgttctagctcagatttcaggttactcacaacagtattctttctaagaggatatatacaaatgtctctcataatttatgtaaggaaatattatgaaaatgagacttttttagtttgatgtgtgtttcccaaactagagataaaactagtaagatttagtatcgtttataacatttgaatttttgctccatgagtacaactaatttttataagtaaatattgggtttatatgaaaaatggggtgtcagtcttttcacacgcccagcaggtaacaatgtgggaagctggcagggtcattgatagcaagtaagtacttcctgaaggctttccagttcaaaagattacaagccattctgcctgccaaacaaattatattctgaagatgcctgttttgtaacccttgatgtgaattttttggtgtctgaaatttacaaaagaatgaaattgaaattgtaaaacactaaatgctttgggtttattttgaagtaatctgttactttaaaatgtcaacattaggaagccataaaacaagatattatgaaacccagtattataaatgttatctacatctaaagtattttaaaataacttattggcagctttattctttttttccttacaagatttagaatctttttggttatatgtctatttttcaattttgttatatttttaatttaagtggccaatgtggttatgaacaagatttgtatggtcagcttctgttctttcctaaaacttcagataaatatcattttagctataacctaaaaaagtgtttaaataaaatgacagatgttaatttaaaagcagcatatgctaatttactttttcatatgatgatggtctaatggaagttacatatgctttcttttgtcctaactctgaaaagtatatgtcagagttctggaatatgtctttagccaagaattttattcacttaaatttgtttacaacttgtataaagcaaaaaagaatgtgtgtaactatagtgaacgcatagttttgcttatattatgtgatgtttgccaaaaaaagaataaaaaatgaatgaattaaatc

SEQ ID NO: 162970 - DNA, 3294 bp, Homo sapiens
  Payload ID: 12114
  Gene Symbol: OTUD6B
  Gene Name: OTU domain containing 6B
  ENST ID: ENST00000617869
  CDS Start-End: 100-1071
gcgcacgcgcagcaccccatttaagtttctcgtctttgcagtggctttgcttagatccggtgccgccttgaaggcggggctgggtcccagccgtagccaatggagccccgggtgagggttgaggggtggaaggtgcctactagccggtgcaggtttcttctagcgcgtgtgctggggtacctggtcgtcatggaggcggtattgaccgaagagcttgatgaggaagagcagctgctgagaaggcatcgcaaagagaagaaggagttgcaagccaaaattcagggcatgaagaatgctgttcccaagaatgacaagaagaggaggaagcaactcaccgaagatgtggccaagttggaaaaagaaatggaacagaaacatagagaggaactggagcaattgaagctgactactaaggagaataagatagattctgttgctgttaacatttcaaacttggtgcttgagaatcagccacctcggatatcaaaagcacaaaagagacgggaaaagaaagctgcattggaaaaggagcgagaagaacggatagctgaagctgaaattgaaaacttaacaggagccagacatatggaaagtgagaaacttgctcaaatattggcagctagacagttagaaattaaacagattccatctgatggccactgtatgtataaagccattgaagatcaactgaaagaaaaggattgtgctctgactgtggttgccttgagaagtcagaccgctgagtatatgcaaagccatgtggaagactttctgccatttttaacaaaccctaatacaggagatatgtatactccagaagaatttcagaagtactgtgaagatattgtaaacacagctgcatggggaggtcagcttgagctaagagctctgtctcacattttacaaacaccaatagagataatacaggcagattctcctcccattatagttggtgaagaatattcaaaaaaaccactaatacttgtatatatgagacatgcatatggcttaggagaacattataattcggttacacggttggtaaacatagttactgaaaattgcagctaatttatacaatgttgtacaattatgttttaatacagtgtgctgaactgagtatttctaccaagtgttgggttgttctaaatgctactgaaaaacacaactaccttatatcagttttatggcaaagctactaacaggtgtttttagaaatatgtcagagataaactttaaccagtgtcttcttagtggaattttaaaaatttgttaagttcattgtagagaacaccattcatagaccaagatggtcccctattagctgatattttcatttatgtaagatcctggacattctgttttgtgttggaacaaattttcaatgtttttaattctcccttttctgcctgttcctaaaaactttcaaaataaccatttcaatgtaatttgtcttgaagaagtttacccaatatctttgtcattgcaataatgtagtatggtgatggtcaatttaattattgcttataaaatgaacttgattgcagtaaccatggtatcgatgagactaatgcagtgaagctttattactaatatatatagccttatcaaagcaagctaagaagcttgctttaataattaataatttaaaaatatttatttagatgggattcagttgtttaaagaagtgagataaattcaaaggtaaataggtattctctgtcaaatttaaatctctaaagaattagagattagttttttatttgtgtataatttaaaaaagacctaataggttactgtctttttaatgcatttgttattctttcgtattttttaagcatcggactggagttagtaccatcatctcttgagtctttcataactacacatttttatatttccttttgtgttttctactttgctttccttgaaggaacaagcattttgtggcctttaccttgtgcaattttagggagtagcagtgtaaaaggtccaagaccacatttacttgaaattcttcctcttttctgatttgtcttaccagatatttcccttcttgcctcattctctaggatttgaataaaacctttgccacttattttattagccttattaatgtcacctttccttcaactcaaatatttgagaaattttatgttacatatatgaatgaagttgaaagctactgtttggaagctaagacttgtatagagtagttttgtatatgaatggttgttctagctcagatttcaggttactcacaacagtattctttctaagaggatatatacaaatgtctctcataatttatgtaaggaaatattatgaaaatgagacttttttagtttgatgtgtgtttcccaaactagagataaaactagtaagatttagtatcgtttataacatttgaatttttgctccatgagtacaactaatttttataagtaaatattgggtttatatgaaaaatggggtgtcagtcttttcacacgcccagcaggtaacaatgtgggaagctggcagggtcattgatagcaagtaagtacttcctgaaggctttccagttcaaaagattacaagccattctgcctgccaaacaaattatattctgaagatgcctgttttgtaacccttgatgtgaattttttggtgtctgaaatttacaaaagaatgaaattgaaattgtaaaacactaaatgctttgggtttattttgaagtaatctgttactttaaaatgtcaacattaggaagccataaaacaagatattatgaaacccagtattataaatgttatctacatctaaagtattttaaaataacttattggcagctttattctttttttccttacaagatttagaatctttttggttatatgtctatttttcaattttgttatatttttaatttaagtggccaatgtggttatgaacaagatttgtatggtcagcttctgttctttcctaaaacttcagataaatatcattttagctataacctaaaaaagtgtttaaataaaatgacagatgttaatttaaaagcagcatatgctaatttactttttcatatgatgatggtctaatggaagttacatatgctttcttttgtcctaactctgaaaagtatatgtcagagttctggaatatgtctttagccaagaattttattcacttaaatttgtttacaacttgtataaagcaaaaaagaatgtgtgtaactatagtgaacgcatagttttgcttatattatgtgatgtttgccaaaaaaagaataaaaaatgaatgaattaaatc

SEQ ID NO: 162971 - DNA, 2525 bp, Homo sapiens
  Payload ID: 12115
  Gene Symbol: OAF
  Gene Name: out at first homolog
  Uniprot ID: Q86UD1
  ENST ID: ENST00000328965
  CDS Start-End: 514-1335
aaacttctgactccgcctgggtcgctgactccgcgcggccgggcgggagggaggtcgaggaggccgctcgcacaaagccgcggagccgctgccccctctccccgccccctgcccggccaacgccgaagtgcggagagcagccgcgggccctttaagggccgcgaggtgcgcggtctctttaaggcgggtcctggtggtttctgttttctgaaggaagtgacggggggtgggattgaatgaaaagtgcaaaacacaggctcgcagcgctggagcccggggccgcggagccgggccggggcagcgccgtctccgcctcggggccgccgggggcgccctgctgagcgctacccacgtgcgtccgcgccacctcgcgggcgaccccgcggccaaggcccccggcggagcggctcccgggcgccccgaactagcccccaactttgggcgaagtttgcctgcgcctctccccgcccccacgcggcgcgccggggccgcggacggcagcggcccccggggatgcgccttcccggggtacccctggcgcgccctgcgctgctgctgctgctgccgctgctcgcgccgctgctgggaacgggtgcgccggccgagctgcgggtccgcgtgcggctgccggacggccaggtgaccgaggagagcctgcaggcggacagcgacgcggacagcatcagcctcgagctgcgcaagcccgacggcaccctcgtctccttcaccgccgacttcaagaaggatgtgaaggtcttccgggccctgatcctgggggagctggagaaggggcagagtcagttccaggccctctgctttgtcacccagctgcagcacaatgagatcatccccagtgaggccatggccaagctccggcagaaaaatccccgggcagtgcggcaggcggaggaggttcggggtctggagcatctgcacatggatgtcgctgtcaacttcagccagggggccctgctgagcccccatctccacaacgtgtgtgccgaggccgtggatgccatctacacccgccaggaggatgtccggttctggctggagcaaggtgtggacagttctgtgttcgaggctctgcccaaggcctcagagcaggcggagctgcctcgctgcaggcaggtgggggaccacgggaagccctgcgtctgccgctatggcctgagcctggcctggtacccctgcatgctcaagtactgccacagccgcgaccggcccacgccctacaagtgtggcatccgcagctgccagaagagctacagcttcgacttctacgtgccccagaggcagctgtgtctctgggatgaggatccctacccaggctagggtgggagcaacctggcgggtggctgctctgggcccactgctcttcaccagccactagagggggtggcaacccccacctgaggccttatttccctccctccccactcccctggccctagagcctgggcccctctggccccatctcacatgactgtgaagggggtgtggcatggcagggggtctcatgaaggcacccccattcccaccctgtgccttccttgcgggcagagagggagagaagggctccccagatctacacccctccctcctgcatctcccctggagtgttcacttgcaagctgccaaaacatgatggcctctggttgttctgttgaactccttgaacgtttagaccctaaaaggagtctatacctggacacccacctccccagacacaactcccttccccatgcacacatctggaaggagctggcccctcagtcccttcctactccccaacaaggggctcactatccccaaagaaggagctgttggggacccacgacgcagcccctgtactggattacagcatattctcatctctggccccgaggctgcctgtggggcgagtggagacctcccatcactgagacagatcacagaccacgagtgcctttcccggacctggacgttgcctccagagcaggcaccagctctttccctctctacacagaaatatttttgtaaggttctggggcagggagggagcatgaagtacgaggaaaacttgaattccagatttttagtgcaaagtatttatcatttctaccagaaataaacgttttaagtttttacttgactaatgagacccagagtttggagaaaacttttggccaatgctgccacctgatgtcagaaagtgtccccacaccctagcagtggcctatcttggaacaagaacttcgaaagcacctactgtgtgctcagccatttgaggaaggaaggaggagaaggaagatgttactagggaaggatgagataaaacttctgcacccaagacaatgagacagacatagctgcaaccgtagtaagccagtcagaaatagccagcgcgaaggcaagagatggggtggagattggaaccccgcttcagatctgggctcggctacttacctgctgtgcagccatgggtcaagttgcttgacctctctgtgcctccactcccttagctataaaatgagcttacttaa

SEQ ID NO: 162972 - DNA, 815 bp, Homo sapiens
  Payload ID: 12115
  Gene Symbol: OAF
  Gene Name: out at first homolog
  ENST ID: ENST00000531220
  CDS Start-End: 244-717
ctggcgcgccctgcgctgctgctgctgctgccgctgctcgcgccgctgctgggaacgggtgcgccggccgagctgcgggtccgcgtgcggctgccggacggccaggtgaccgaggagagcctgcaggcggacagcgacgcggacagcatcagcctcgagctgcgcaagcccgacggcaccctcgtctccttcaccgccgacttcaagaagctgcagcacaatgagatcatccccagtgaggccatggccaagctccggcagaaaaatccccgggcagtgcggcaggcggaggaggttcggggtctggagcatctgcacatggatgtcgctgtcaacttcagccagggggccctgctgagcccccatctccacaacgtgtgtgccgaggccgtggatgccatctacacccgccaggaggatgtccggttctggctggagcaaggtgtggacagttctgtgttcgaggctctgcccaaggcctcagagcaggcggagctgcctcgctgcaggcaggtgggggaccacgggaagccctgcgtctgccgctatggcctgagcctggcctggtacccctgcatgctcaagtactgccacagccgcgaccggcccacgccctacaagtgtggcatccgcagctgccagaagagctacagcttcgacttctacgtgccccagaggcagctgtgtctctgggatgaggatccctacccaggctagggtgggagcaacctggcgggtggctgctctgggcccactgctcttcaccagccactagagggggtggcaacccccacctgaggccttatttccctccc

SEQ ID NO: 162973 - DNA, 1013 bp, Homo sapiens
  Payload ID: 12116
  Gene Symbol: ODF1
  Gene Name: outer dense fiber of sperm tails 1
  Uniprot ID: Q14990
  ENST ID: ENST00000285402
  CDS Start-End: 157-909
gaaggtggtgaggtcatagaacacaagctttaaagtaagtgaatcatgtgtgcctcatttatttttaaaagcaacttctgagaagggcttagaacaaattttttcccggagtgccatttcccaaaggtactcacagaacaatcaggtgtgaccataatggctgcactgagttgtctcttggacagtgtcagaagggacataaagaaggtggacagagaactaaggcaactgagatgcatcgacgaatttagcacacggtgcctgtgcgacttgtatatgcacccctattgctgctgtgacttgcacccatatccgtactgcttgtgctattccaagcgatcacgctcttgcggcctgtgtgatctctacccatgttgcctgtgtgattataagctttactgtctgcgaccatctctcagaagtttggagaggaaagccatcagagccatagaagatgagaagcgagagcttgccaaactgagaagaacaacaaatagaattctggcttcctcctgctgtagcagtaacattttaggatcggtgaatgtatgcggttttgaacccgatcaagtcaaagttcgagtgaaggatggaaaggtatgtgtgtcggctgagcgggagaacaggtacgactgccttggatcgaaaaagtacagctacatgaacatctgcaaagagttcagcttgccgccctgtgtggatgagaaggatgtaacatactcctatgggctcggcagctgtgtcaagatcgagtctccttgctacccttgcacttctccttgcagcccctgcagcccctgcagcccctgcaacccctgcagcccctgcaacccgtgcagcccatatgatccttgcaacccgtgttatccctgtggaagccgattttcctgtaggaagatgattttgtaaagtgcgcataggaacccattacttaatagaagtcagttactccagccaggcagctctcccaatgtttctcctctccttcccatggcccctgttgttgaagtacg

SEQ ID NO: 162974 - DNA, 368 bp, Homo sapiens
  Payload ID: 12116
  Gene Symbol: ODF1
  Gene Name: outer dense fiber of sperm tails 1
  ENST ID: ENST00000518835
  CDS Start-End: 104-235
acaacaaatagaattctggcttcctcctgctgtagcagtaacattttaggatcggtgaatgtatgcggttttgaacccgatcaagtcaaagttcgagtgaaggatggaaagcccctgcagcccctgcagcccctgcaacccctgcagcccctgcaacccgtgcagcccatatgatccttgcaacccgtgttatccctgtggaagccgattttcctgtaggaagatgattttgtaaagtgcgcataggaacccattacttaatagaagtcagttactccagccaggcagctctcccaatgtttctcctctccttcccatggcccctgttgttgaagtacgtaggaaactgaatacataactgcaatctg

SEQ ID NO: 162975 - DNA, 3899 bp, Homo sapiens
  Payload ID: 12117
  Gene Symbol: ODF2
  Gene Name: outer dense fiber of sperm tails 2
  Uniprot ID: Q5BJF6
  ENST ID: ENST00000351030
  CDS Start-End: 388-2862
tggcggggcggggcatctctgtgacgctaggggctgggcctcgatggcgaaacccaagcggctcccgggggggtttgaactggccaatgggcgagctgccgaccgggtgtcggaaaaggaggcggaagcggggaggagccgctgccagagccagactgcatccgccgcggcgtctccatggcacgaccctggcctccgacttcaacgacttcataaggcggcgtttctgggcgcagccgtgtcgctcctggtttccatcgtgtgggaagaacggagtaacgagtctcacgcagaaaaaggtcttgagagcaccttgtggcgcacccagtgtaactgtgacgatcaaccatttttgtgttgtcctcccccacctgccagaagccaaccatgaaggaccgctcttcaactccccccttacatgttcacgtggatgagaacacccctgtccacgtccacataaaaaaactcccgaaaccatcagcgaccagcagccagaaatctcacaagcgaggaatgaaaggggacactgtgaatgtgcggcggagtgtccgggtgaaaaccaaggtaccttggatgccccctggaaaatcatctgcccggcctgtgggatgcaagtgggagaatccacctcattgcctggagatcacgccaccatcttcagaaaagctggtctcagtgatgcggttaagtgacctctctacagaagatgatgactcaggtcactgtaaaatgaaccgttatgataagaagattgatagtctaatgaatgcggttggttgtctgaagtctgaggtcaagatgcaaaaaggtgagcgccagatggccaaaaggttcctggaggaacggaaggaagagctggaggaggtggcccacgaactggctgagactgagcacgagaacacggtgttgaggcacaacatcgagcgcatgaaggaggagaaggacttcaccatacttcagaagaaacacctacaacaggagaaggagtgcctcatgtccaagctggtggaggcggaaatggatggggctgcggctgccaagcaggtcatggccttgaaggataccatcgggaagctgaaaacagagaaacaaatgacctgcacggacatcaacaccctgacaaggcagaaggaacttctcctgcagaagctgagcacatttgaggagaccaaccgcaccctccgagacctcctgagggaacagcactgcaaagaggattctgaaagactaatggagcaacaaggagcactgctgaaacggctggcggaggccgactcagagaaagcgcgcctgctgttactgctgcaagacaaggacaaggaggtggaagagctccttcaggaaatacaatgtgagaaggctcaagcaaagacagcctctgagctttctaaatccatggagtccatgcgtgggcatttgcaggcacagcttcggtccaaagaggctgagaacagtcgcctgtgcatgcagattaagaatctggagcgcagcgggaatcagcataaggcagaagtggaggccatcatggagcagctgaaggagttgaagcagaagggagaccgagacaaagagagcttgaagaaggccatccgagcccagaaggagcgagccgagaagagcgaggagtatgctgagcagctacacgtgcaactcgctgacaaggatctttatgtcgctgaagctttatccactctggaatcctggaggagccgctacaaccaagttgtaaaagaaaagggagaccttgagctggaaattattgtcctgaatgaccgggtaacagatcttgtaaaccaacaacaaaccctggaggagaagatgcgggaagaccgggatagcctggtggagagactacaccgtcagactgctgagtattccgcattcaagctggagaatgagaggctgaaggccagctttgctccaatggaggacaaactcaaccaggcacacctcgaggtccagcagctgaaggcctcagtgaagaactatgaggggatgattgacaactataagagtcaggtgatgaagaccagattggaggctgatgaagtagctgcccagctagaacgctgtgacaaagagaacaagatccttaaagatgagatgaacaaagagattgaggcggcacgaaggcagttccagtctcagctggctgacctgcagcagctccctgacatcctgaagatcacggaggcgaagctggctgagtgccaagaccaactgcagggctatgagcggaagaacatcgacctcacagccatcatatcagacctgcgcagccggatcgaacaccagggggacaagctggagatggcgagagagaaacatcaggcttcccagaaggaaaataaacagctgagtctgaaggtggatgaactggagaggaaactggaggcgaccagtgcccagaatatcgagttcctacaggtgattgccaagagggaggaggcaatccaccagtcccagctgcggctggaggagaaaacacgggaatgtgggaccctggcaaggcagttggagagtgccattgaagatgcgaggaggcaggtggaacaaaccaaggagcacgcactctccaaggagcgagcagcccagaacaaaatcctggaccttgagacccagctgagcagaaccaaaacggaattgagccagctgcggcggagccgtgatgatgcggaccgccgctaccagagccggctgcaagacctgaaagatcgcctggagcagtccgagagcaccaaccgcagcatgcagaactacgtccagttcctcaaatcatcatacgccaacgtgtttggggatggtccctattccaccttcctgactagctctcccatccgctcccgatctcctcctgcctgaggccacttatcagggcctggagccctgatggaagccataggaactccagagttgccaagccatagctgagaagcctggtggttttcctctcccagtgaaaaaatgggttcagggtcttgtccttagctactagctctagaaaagtcccaaaagcagcagaaggtgaagcaggaagcacttggttttctccttcctgatatagtcacctgttggaagtgttaaaatttcctcgacaggccttaaatttactactacattagggtaccacattttaacttaccatgactttgctccttcctttcctgagaaaatatttccactggattttttccaccagtccccttacagccctcattgttttaggaatctctctcaggttttttctgacctaaaccagcaggaagtcgtcctgggctgtaagcaccatcacttgctttttttttttttctgatttcacaagtgtggtgttttcccaaggctcccttcccaagctcagtgcaaacctctcactcccaagtttctttgaggccacttgcccccaagcacttcacaatagaccctcgagggcttgtgtccatttggccttttacaagtgtaatgccaatttcattgatttttgtttcttttggcctgatttgtatctctggaatgcatttattcttgaaatatttgtgtgattttacaaaaagcttttgtaatcagttatttaaggctccatttgatgatttcctttacccaaccagtcctcatccctcctctaaaaaatgattaagtaaaatgctgcaggacagccagtagacatttttaaagtacttggtgcctgaaacatcaggcttctcatttcattttagctcaggttggtgctttcacattgtaatcaatgaactgtcaggagggaacaaactgtaagaaggattgcttggtgttttagggtagatcactttagctattaggaagaggatggggtagtgtacagtatatatttttaaaatgtgaattggtttctgaataagaatctgggccatttttgttcacca

SEQ ID NO: 162976 - DNA, 2375 bp, Homo sapiens
  Payload ID: 12117
  Gene Symbol: ODF2
  Gene Name: outer dense fiber of sperm tails 2
  Uniprot ID: Q5BJF6
  ENST ID: ENST00000372791
  CDS Start-End: 354-2270
cccttctcctaggagacagttgtccggccccgccccagcatccccgcggctccctgcgcggttctggccctctggggcccacttggggccgagcggttctcacccgccctctccgcacgtccgccggcgcctcaggtttcccccggacagttgctgtgcgacttggacagtagaggagcgcctcccaagttttcatccaactgccaaccccaaagcttccacccttctcccctcagagaggacgtttgatgccgggccccttgagaggctcattgacaagcctgcccctctgggtccccctgagcagagcctgctgacccaattgcccacctttgcggctttgatgcctagccatgtctgcctcatcctcaggcggctcccccaggtttccatcgtgtgggaagaacggagtaacgagtctcacgcagaaaaaggtcttgagagcaccttgtggcgcacccagtgtaactgtgacgaaatctcacaagcgaggaatgaaaggggacactgtgaatgtgcggcggagtgtccgggtgaaaaccaagaatccacctcattgcctggagatcacgccaccatcttcagaaaagctggtctcagtgatgcggttaagtgacctctctacagaagatgatgactcaggtcactgtaaaatgaaccgttatgataagaagattgatagtctaatgaatgcggttggttgtctgaagtctgaggtcaagatgcaaaaaggtgagcgccagatggccaaaaggttcctggaggaacggaaggaagagctggaggaggtggcccacgaactggctgagactgagcacgagaacacggtgttgaggcacaacatcgagcgcatgaaggaggagaaggacttcaccatacttcagaagaaacacctacaacaggagaaggagtgcctcatgtccaagctggtggaggcggaaatggatggggctgcggctgccaagcaggtcatggccttgaaggataccatcgggaagctgaaaacagagaaacaaatgacctgcacggacatcaacaccctgacaaggcagaaggaacttctcctgcagaagctgagcacatttgaggagaccaaccgcaccctccgagacctcctgagggaacagcactgcaaagaggattctgaaagactaatggagcaacaaggagcactgctgaaacggctggcggaggccgactcagagaaagcgcgcctgctgttactgctgcaagacaaggacaaggaggtggaagagctccttcaggaaatacaatgtgagaaggctcaagcaaagacagcctctgagctttctaaatccatggagtccatgcgtgggcatttgcaggcacagcttcggtccaaagaggctgagaacagtcgcctgtgcatgcagattaagaatctggagcgcagcgggaatcagcataaggcagaagtggaggccatcatggagcagctgaaggagttgaagcagaagggagaccgagacaaagagagcttgaagaaggccatccgagcccagaaggagcgagccgagaagagcgaggagtatgctgagcagctacacgtgcaactcgctgacaaggatctttatgtcgctgaagctttatccactctggaatcctggaggagccgctacaaccaagttgtaaaagaaaagggagaccttgagctggaaattattgtcctgaatgaccgggtaacagatcttgtaaaccaacaacaaaccctggaggagaagatgcgggaagaccgggatagcctggtggagagactacaccgtcagactgctgagtattccgcattcaagctggagaatgagaggctgaaggccagctttgctccaatggaggacaaactcaaccaggcacacctcgaggtccagcagctgaaggcctcagtgaagaactatgaggggatgattgacaactataagagtcaggtgatgaagaccagattggaggctgatgaagtagctgcccagctagaacgctgtgacaaagagaacaagatccttaaagatgagatgaacaaagagattgaggcggcacgaaggcagttccagtctcagctggctgacctgcagcagctccctgacatcctgaagatcacggaggcgaagctggctgagtgccaagaccaactgcagggctatgagcggaagaacatcgacctcacagccatcatatcagacctgcgcagccgggtaagggactggcagaaagggtcccacgaactgacccgagcaggggcccgcataccaagatgagctgcacgccccccaagggaggactacttcctttttcttggctgctgctttttaaaaggagtgagctatcatcagtgctgtgaaataaaagtctggtgtgccaaa

SEQ ID NO: 162977 - DNA, 2475 bp, Homo sapiens
  Payload ID: 12117
  Gene Symbol: ODF2
  Gene Name: outer dense fiber of sperm tails 2
  Uniprot ID: Q5BJF6
  ENST ID: ENST00000372807
  CDS Start-End: 1-2475
atgaaggaccgctcttcaactccccccttacatgttcacgtggatgagaacacccctgtccacgtccacataaaaaaactcccgaaaccatcagcgaccagcagccagaaatctcacaagcgaggaatgaaaggggacactgtgaatgtgcggcggagtgtccgggtgaaaaccaaggtaccttggatgccccctggaaaatcatctgcccggcctgtgggatgcaagtgggagaatccacctcattgcctggagatcacgccaccatcttcagaaaagctggtctcagtgatgcggttaagtgacctctctacagaagatgatgactcaggtcactgtaaaatgaaccgttatgataagaagattgatagtctaatgaatgcggttggttgtctgaagtctgaggtcaagatgcaaaaaggtgagcgccagatggccaaaaggttcctggaggaacggaaggaagagctggaggaggtggcccacgaactggctgagactgagcacgagaacacggtgttgaggcacaacatcgagcgcatgaaggaggagaaggacttcaccatacttcagaagaaacacctacaacaggagaaggagtgcctcatgtccaagctggtggaggcggaaatggatggggctgcggctgccaagcaggtcatggccttgaaggataccatcgggaagctgaaaacagagaaacaaatgacctgcacggacatcaacaccctgacaaggcagaaggaacttctcctgcagaagctgagcacatttgaggagaccaaccgcaccctccgagacctcctgagggaacagcactgcaaagaggattctgaaagactaatggagcaacaaggagcactgctgaaacggctggcggaggccgactcagagaaagcgcgcctgctgttactgctgcaagacaaggacaaggaggtggaagagctccttcaggaaatacaatgtgagaaggctcaagcaaagacagcctctgagctttctaaatccatggagtccatgcgtgggcatttgcaggcacagcttcggtccaaagaggctgagaacagtcgcctgtgcatgcagattaagaatctggagcgcagcgggaatcagcataaggcagaagtggaggccatcatggagcagctgaaggagttgaagcagaagggagaccgagacaaagagagcttgaagaaggccatccgagcccagaaggagcgagccgagaagagcgaggagtatgctgagcagctacacgtgcaactcgctgacaaggatctttatgtcgctgaagctttatccactctggaatcctggaggagccgctacaaccaagttgtaaaagaaaagggagaccttgagctggaaattattgtcctgaatgaccgggtaacagatcttgtaaaccaacaacaaaccctggaggagaagatgcgggaagaccgggatagcctggtggagagactacaccgtcagactgctgagtattccgcattcaagctggagaatgagaggctgaaggccagctttgctccaatggaggacaaactcaaccaggcacacctcgaggtccagcagctgaaggcctcagtgaagaactatgaggggatgattgacaactataagagtcaggtgatgaagaccagattggaggctgatgaagtagctgcccagctagaacgctgtgacaaagagaacaagatccttaaagatgagatgaacaaagagattgaggcggcacgaaggcagttccagtctcagctggctgacctgcagcagctccctgacatcctgaagatcacggaggcgaagctggctgagtgccaagaccaactgcagggctatgagcggaagaacatcgacctcacagccatcatatcagacctgcgcagccggatcgaacaccagggggacaagctggagatggcgagagagaaacatcaggcttcccagaaggaaaataaacagctgagtctgaaggtggatgaactggagaggaaactggaggcgaccagtgcccagaatatcgagttcctacaggtgattgccaagagggaggaggcaatccaccagtcccagctgcggctggaggagaaaacacgggaatgtgggaccctggcaaggcagttggagagtgccattgaagatgcgaggaggcaggtggaacaaaccaaggagcacgcactctccaaggagcgagcagcccagaacaaaatcctggaccttgagacccagctgagcagaaccaaaacggaattgagccagctgcggcggagccgtgatgatgcggaccgccgctaccagagccggctgcaagacctgaaagatcgcctggagcagtccgagagcaccaaccgcagcatgcagaactacgtccagttcctcaaatcatcatacgccaacgtgtttggggatggtccctattccaccttcctgactagctctcccatccgctcccgatctcctcctgcctga

SEQ ID NO: 162978 - DNA, 2249 bp, Homo sapiens
  Payload ID: 12117
  Gene Symbol: ODF2
  Gene Name: outer dense fiber of sperm tails 2
  Uniprot ID: Q5BJF6
  ENST ID: ENST00000372814
  CDS Start-End: 36-2141
acccaagcggctcccgggggggtttgaactggccaatgggcgagctgccgaccgggtgtcggaaaaggaggcggaagcggggaggagccgctgccagagccagactgcatccgccgcggcgtctccatggcacgaccctggcctccgacttcaacgacttcataaggcggcgtttctgggcgcagccgtgtcgctcctggtttccatcgtgtgggaagaacggagtaacgagtctcacgcagaaaaaggtcttgagagcaccttgtggcgcacccagtgtaactgtgacgaaatctcacaagcgaggaatgaaaggggacactgtgaatgtgcggcggagtgtccgggtgaaaaccaaggtaccttggatgccccctggaaaatcatctgcccggcctgtgggatgcaagtgggagaatccacctcattgcctggagatcacgccaccatcttcagaaaagctggtctcagtgatgcggttaagtgacctctctacagaagatgatgactcaggtcactgtaaaatgaaccgttatgataagaagattgatagtctaatgaatgcggttggttgtctgaagtctgaggtcaagatgcaaaaaggtgagcgccagatggccaaaaggttcctggaggaacggaaggaagagctggaggaggtggcccacgaactggctgagactgagcacgagaacacggtgttgaggcacaacatcgagcgcatgaaggaggagaaggacttcaccatacttcagaagaaacacctacaacaggagaaggagtgcctcatgtccaagctggtggaggcggaaatggatggggctgcggctgccaagcaggtcatggccttgaaggataccatcgggaagctgaaaacagagaaacaaatgacctgcacggacatcaacaccctgacaaggcagaaggaacttctcctgcagaagctgagcacatttgaggagaccaaccgcaccctccgagacctcctgagggaacagcactgcaaagaggattctgaaagactaatggagcaacaaggagcactgctgaaacggctggcggaggccgactcagagaaagcgcgcctgctgttactgctgcaagacaaggacaaggaggtggaagagctccttcaggaaatacaatgtgagaaggctcaagcaaagacagcctctgagctttctaaatccatggagtccatgcgtgggcatttgcaggcacagcttcggtccaaagaggctgagaacagtcgcctgtgcatgcagattaagaatctggagcgcagcgggaatcagcataaggcagaagtggaggccatcatggagcagctgaaggagttgaagcagaagggagaccgagacaaagagagcttgaagaaggccatccgagcccagaaggagcgagccgagaagagcgaggagtatgctgagcagctacacgtgcaactcgctgacaaggatctttatgtcgctgaagctttatccactctggaatcctggaggagccgctacaaccaagttgtaaaagaaaagggagaccttgagctggaaattattgtcctgaatgaccgggtaacagatcttgtaaaccaacaacaaaccctggaggagaagatgcgggaagaccgggatagcctggtggagagactacaccgtcagactgctgagtattccgcattcaagctggagaatgagaggctgaaggccagctttgctccaatggaggacaaactcaaccaggcacacctcgaggtccagcagctgaaggcctcagtgaagaactatgaggggatgattgacaactataagagtcaggtgatgaagaccagattggaggctgatgaagtagctgcccagctagaacgctgtgacaaagagaacaagatccttaaagatgagatgaacaaagagattgaggcggcacgaaggcagttccagtctcagctggctgacctgcagcagctccctgacatcctgaagatcacggaggcgaagctggctgagtgccaagaccaactgcagggctatgagcggaagaacatcgacctcacagccatcatatcagacctgcgcagccgggtaagggactggcagaaagggtcccacgaactgacccgagcaggggcccgcataccaagatgagctgcacgccccccaagggaggactacttcctttttcttggctgctgctttttaaaaggagtgagctatcatcagtgctgtgaaataaaagtctggtgtgccaaatgc

SEQ ID NO: 162979 - DNA, 3653 bp, Homo sapiens
  Payload ID: 12117
  Gene Symbol: ODF2
  Gene Name: outer dense fiber of sperm tails 2
  Uniprot ID: Q5BJF6
  ENST ID: ENST00000393527
  CDS Start-End: 531-2948
caacgacttcataaggcggcgtttctgggcgcagccgtgtcgctcctggacagttgctgtgcgacttggacagtagaggagcgcctcccaagttttcatccaactgccaaccccaaagcttccacccttctcccctcagagaggacgtttgatgccgggccccttgagaggctcattgacaagcctgcccctctgggtccccctgagcagagcctgctgacccaattgcccacctttgcggctttgatgcctagccatgtctgcctcatcctcaggcggctcccccaggtttccatcgtgtgggaagaacggagtaacgagtctcacgcagaaaaaggtcttgagagcaccttgtggcgcacccagtgtaactgtgacgttgagatcactgtgtagaaggatccgcctgctttccgctgtgcttcactaaatccaaggaggagctgtgcattccagcaggtttagaggagatccagccctaagaaccctggggccggcgtctgggatctgttctggaacggaagccaaccatgaaggaccgctcttcaactccccccttacatgttcacgtggatgagaacacccctgtccacgtccacataaaaaaactcccgaaaccatcagcgaccagcagccagaaatctcacaagcgaggaatgaaaggggacactgtgaatgtgcggcggagtgtccgggtgaaaaccaagaatccacctcattgcctggagatcacgccaccatcttcagaaaagctggtctcagtgatgcggttaagtgacctctctacagaagatgatgactcaggtcactgtaaaatgaaccgttatgataagaagattgatagtctaatgaatgcggttggttgtctgaagtctgaggtcaagatgcaaaaaggtgagcgccagatggccaaaaggttcctggaggaacggaaggaagagctggaggaggtggcccacgaactggctgagactgagcacgagaacacggtgttgaggcacaacatcgagcgcatgaaggaggagaaggacttcaccatacttcagaagaaacacctacaacaggagaaggagtgcctcatgtccaagctggtggaggcggaaatggatggggctgcggctgccaagcaggtcatggccttgaaggataccatcgggaagctgaaaacagagaaacaaatgacctgcacggacatcaacaccctgacaaggcagaaggaacttctcctgcagaagctgagcacatttgaggagaccaaccgcaccctccgagacctcctgagggaacagcactgcaaagaggattctgaaagactaatggagcaacaaggagcactgctgaaacggctggcggaggccgactcagagaaagcgcgcctgctgttactgctgcaagacaaggacaaggaggtggaagagctccttcaggaaatacaatgtgagaaggctcaagcaaagacagcctctgagctttctaaatccatggagtccatgcgtgggcatttgcaggcacagcttcggtccaaagaggctgagaacagtcgcctgtgcatgcagattaagaatctggagcgcagcgggaatcagcataaggcagaagtggaggccatcatggagcagctgaaggagttgaagcagaagggagaccgagacaaagagagcttgaagaaggccatccgagcccagaaggagcgagccgagaagagcgaggagtatgctgagcagctacacgtgcaactcgctgacaaggatctttatgtcgctgaagctttatccactctggaatcctggaggagccgctacaaccaagttgtaaaagaaaagggagaccttgagctggaaattattgtcctgaatgaccgggtaacagatcttgtaaaccaacaacaaaccctggaggagaagatgcgggaagaccgggatagcctggtggagagactacaccgtcagactgctgagtattccgcattcaagctggagaatgagaggctgaaggccagctttgctccaatggaggacaaactcaaccaggcacacctcgaggtccagcagctgaaggcctcagtgaagaactatgaggggatgattgacaactataagagtcaggtgatgaagaccagattggaggctgatgaagtagctgcccagctagaacgctgtgacaaagagaacaagatccttaaagatgagatgaacaaagagattgaggcggcacgaaggcagttccagtctcagctggctgacctgcagcagctccctgacatcctgaagatcacggaggcgaagctggctgagtgccaagaccaactgcagggctatgagcggaagaacatcgacctcacagccatcatatcagacctgcgcagccggatcgaacaccagggggacaagctggagatggcgagagagaaacatcaggcttcccagaaggaaaataaacagctgagtctgaaggtggatgaactggagaggaaactggaggcgaccagtgcccagaatatcgagttcctacaggtgattgccaagagggaggaggcaatccaccagtcccagctgcggctggaggagaaaacacgggaatgtgggaccctggcaaggcagttggagagtgccattgaagatgcgaggaggcaggtggaacaaaccaaggagcacgcactctccaaggagcgagcagcccagaacaaaatcctggaccttgagacccagctgagcagaaccaaaacggaattgagccagctgcggcggagccgtgatgatgcggaccgccgctaccagagccggctgcaagacctgaaagatcgcctggagcagtccgagagcaccaaccgcagcatgcagaactacgtccagttcctcaaatcatcatacgccaacgtgtttggggatggtccctattccaccttcctgactagctctcccatccgctcccgatctcctcctgcctgaggccacttatcagggcctggagccctgatggaagccataggaactccagagttgccaagccatagctgagaagcctggtggttttcctctcccagtgaaaaaatgggttcagggtcttgtccttagctactagctctagaaaagtcccaaaagcagcagaaggtgaagcaggaagcacttggttttctccttcctgatatagtcacctgttggaagtgttaaaatttcctcgacaggccttaaatttactactacattagggtaccacattttaacttaccatgactttgctccttcctttcctgagaaaatatttccactggattttttccaccagtccccttacagccctcattgttttaggaatctctctcaggttttttctgacctaaaccagcaggaagtcgtcctgggctgtaagcaccatcacttgctttttttttttttctgatttcacaagtgtggtgttttcccaaggctcccttcccaagctcagtgcaaacctctcactcccaagtttctttgaggccacttgcccccaagcacttcacaatagaccctcgagggcttgtgtccatttggccttttacaagtgtaatgccaatttcattgatttttgtttcttttggcctgatttgtatctctggaatgcatttattcttgaaatatttgtgtgattttacaaaaagcttttgtaatcagtta

SEQ ID NO: 162980 - DNA, 2086 bp, Homo sapiens
  Payload ID: 12117
  Gene Symbol: ODF2
  Gene Name: outer dense fiber of sperm tails 2
  Uniprot ID: Q5BJF6
  ENST ID: ENST00000393533
  CDS Start-End: 11-1984
aattgagaagatggcggaccagcaaggacctcatcagaataggtttccatcgtgtgggaagaacggagtaacgagtctcacgcagaaaaaggtcttgagagcaccttgtggcgcacccagtgtaactgtgacgaaatctcacaagcgaggaatgaaaggggacactgtgaatgtgcggcggagtgtccgggtgaaaaccaaggtaccttggatgccccctggaaaatcatctgcccggcctgtgggatgcaagtgggagaatccacctcattgcctggagatcacgccaccatcttcagaaaagctggtctcagtgatgcggttaagtgacctctctacagaagatgatgactcaggtcactgtaaaatgaaccgttatgataagaagattgatagtctaatgaatgcggttggttgtctgaagtctgaggtcaagatgcaaaaaggtgagcgccagatggccaaaaggttcctggaggaacggaaggaagagctggaggaggtggcccacgaactggctgagactgagcacgagaacacggtgttgaggcacaacatcgagcgcatgaaggaggagaaggacttcaccatacttcagaagaaacacctacaacaggagaaggagtgcctcatgtccaagctggtggaggcggaaatggatggggctgcggctgccaagcaggtcatggccttgaaggataccatcgggaagctgaaaacagagaaacaaatgacctgcacggacatcaacaccctgacaaggcagaaggaacttctcctgcagaagctgagcacatttgaggagaccaaccgcaccctccgagacctcctgagggaacagcactgcaaagaggattctgaaagactaatggagcaacaaggagcactgctgaaacggctggcggaggccgactcagagaaagcgcgcctgctgttactgctgcaagacaaggacaaggaggtggaagagctccttcaggaaatacaatgtgagaaggctcaagcaaagacagcctctgagctttctaaatccatggagtccatgcgtgggcatttgcaggcacagcttcggtccaaagaggctgagaacagtcgcctgtgcatgcagattaagaatctggagcgcagcgggaatcagcataaggcagaagtggaggccatcatggagcagctgaaggagttgaagcagaagggagaccgagacaaagagagcttgaagaaggccatccgagcccagaaggagcgagccgagaagagcgaggagtatgctgagcagctacacgtgcaactcgctgacaaggatctttatgtcgctgaagctttatccactctggaatcctggaggagccgctacaaccaagttgtaaaagaaaagggagaccttgagctggaaattattgtcctgaatgaccgggtaacagatcttgtaaaccaacaacaaaccctggaggagaagatgcgggaagaccgggatagcctggtggagagactacaccgtcagactgctgagtattccgcattcaagctggagaatgagaggctgaaggccagctttgctccaatggaggacaaactcaaccaggcacacctcgaggtccagcagctgaaggcctcagtgaagaactatgaggggatgattgacaactataagagtcaggtgatgaagaccagattggaggctgatgaagtagctgcccagctagaacgctgtgacaaagagaacaagatccttaaagatgagatgaacaaagagattgaggcggcacgaaggcagttccagtctcagctggctgacctgcagcagctccctgacatcctgaagatcacggaggcgaagctggctgagtgccaagaccaactgcagggctatgagcggaagaacatcgacctcacagccatcatatcagacctgcgcagccgggtaagggactggcagaaagggtcccacgaactgacccgagcaggggcccgcataccaagatgagctgcacgccccccaagggaggactacttcctttttcttggctgctgctttttaaaaggagtgagctatcatcagtgctgtgaaataaaagtctggtgtgcc

SEQ ID NO: 162981 - DNA, 2418 bp, Homo sapiens
  Payload ID: 12117
  Gene Symbol: ODF2
  Gene Name: outer dense fiber of sperm tails 2
  Uniprot ID: Q5BJF6
  ENST ID: ENST00000444119
  CDS Start-End: 1-2418
atgaaggaccgctcttcaactccccccttacatgttcacgtggatgagaacacccctgtccacgtccacataaaaaaactcccgaaaccatcagcgaccagcagccagaaatctcacaagcgaggaatgaaaggggacactgtgaatgtgcggcggagtgtccgggtgaaaaccaagaatccacctcattgcctggagatcacgccaccatcttcagaaaagctggtctcagtgatgcggttaagtgacctctctacagaagatgatgactcaggtcactgtaaaatgaaccgttatgataagaagattgatagtctaatgaatgcggttggttgtctgaagtctgaggtcaagatgcaaaaaggtgagcgccagatggccaaaaggttcctggaggaacggaaggaagagctggaggaggtggcccacgaactggctgagactgagcacgagaacacggtgttgaggcacaacatcgagcgcatgaaggaggagaaggacttcaccatacttcagaagaaacacctacaacaggagaaggagtgcctcatgtccaagctggtggaggcggaaatggatggggctgcggctgccaagcaggtcatggccttgaaggataccatcgggaagctgaaaacagagaaacaaatgacctgcacggacatcaacaccctgacaaggcagaaggaacttctcctgcagaagctgagcacatttgaggagaccaaccgcaccctccgagacctcctgagggaacagcactgcaaagaggattctgaaagactaatggagcaacaaggagcactgctgaaacggctggcggaggccgactcagagaaagcgcgcctgctgttactgctgcaagacaaggacaaggaggtggaagagctccttcaggaaatacaatgtgagaaggctcaagcaaagacagcctctgagctttctaaatccatggagtccatgcgtgggcatttgcaggcacagcttcggtccaaagaggctgagaacagtcgcctgtgcatgcagattaagaatctggagcgcagcgggaatcagcataaggcagaagtggaggccatcatggagcagctgaaggagttgaagcagaagggagaccgagacaaagagagcttgaagaaggccatccgagcccagaaggagcgagccgagaagagcgaggagtatgctgagcagctacacgtgcaactcgctgacaaggatctttatgtcgctgaagctttatccactctggaatcctggaggagccgctacaaccaagttgtaaaagaaaagggagaccttgagctggaaattattgtcctgaatgaccgggtaacagatcttgtaaaccaacaacaaaccctggaggagaagatgcgggaagaccgggatagcctggtggagagactacaccgtcagactgctgagtattccgcattcaagctggagaatgagaggctgaaggccagctttgctccaatggaggacaaactcaaccaggcacacctcgaggtccagcagctgaaggcctcagtgaagaactatgaggggatgattgacaactataagagtcaggtgatgaagaccagattggaggctgatgaagtagctgcccagctagaacgctgtgacaaagagaacaagatccttaaagatgagatgaacaaagagattgaggcggcacgaaggcagttccagtctcagctggctgacctgcagcagctccctgacatcctgaagatcacggaggcgaagctggctgagtgccaagaccaactgcagggctatgagcggaagaacatcgacctcacagccatcatatcagacctgcgcagccggatcgaacaccagggggacaagctggagatggcgagagagaaacatcaggcttcccagaaggaaaataaacagctgagtctgaaggtggatgaactggagaggaaactggaggcgaccagtgcccagaatatcgagttcctacaggtgattgccaagagggaggaggcaatccaccagtcccagctgcggctggaggagaaaacacgggaatgtgggaccctggcaaggcagttggagagtgccattgaagatgcgaggaggcaggtggaacaaaccaaggagcacgcactctccaaggagcgagcagcccagaacaaaatcctggaccttgagacccagctgagcagaaccaaaacggaattgagccagctgcggcggagccgtgatgatgcggaccgccgctaccagagccggctgcaagacctgaaagatcgcctggagcagtccgagagcaccaaccgcagcatgcagaactacgtccagttcctcaaatcatcatacgccaacgtgtttggggatggtccctattccaccttcctgactagctctcccatccgctcccgatctcctcctgcctga

SEQ ID NO: 162982 - DNA, 1254 bp, Homo sapiens
  Payload ID: 12117
  Gene Symbol: ODF2
  Gene Name: outer dense fiber of sperm tails 2
  ENST ID: ENST00000421776
  CDS Start-End: 96-1254
gctaacgggcggtcggccgcctccttcctctcttggctaccacggggctctgcccctcctctgccgcccgcgggcagggcttcacctttctctctatgggcagaaaccggtaccctcctgcctgctggtttccatcgtgtgggaagaacggagtaacgagtctcacgcagaaaaaggtcttgagagcaccttgtggcgcacccagtgtaactgtgacgaaatctcacaagcgaggaatgaaaggggacactgtgaatgtgcggcggagtgtccgggtgaaaaccaaggtaccttggatgccccctggaaaatcatctgcccggcctgtgggatgcaagtgggaggtcaagatgcaaaaaggtgagcgccagatggccaaaaggttcctggaggaacggaaggaagagctggaggaggtggcccacgaactggctgagactgagcacgagaacacggtgttgaggcacaacatcgagcgcatgaaggaggagaaggacttcaccatacttcagaagaaacacctacaacaggagaaggagtgcctcatgtccaagctggtggaggcggaaatggatggggctgcggctgccaagcaggtcatggccttgaaggataccatcgggaagctgaaaacagagaaacaaatgacctgcacggacatcaacaccctgacaaggcagaaggaacttctcctgcagaagctgagcacatttgaggagaccaaccgcaccctccgagacctcctgagggaacagcactgcaaagaggattctgaaagactaatggagcaacaaggagcactgctgaaacggctggcggaggccgactcagagaaagcgcgcctgctgttactgctgcaagacaaggacaaggaggtggaagagctccttcaggaaatacaatgtgagaaggctcaagcaaagacagcctctgagctttctaaatccatggagtccatgcgtgggcatttgcaggcacagcttcggtccaaagaggctgagaacagtcgcctgtgcatgcagattaagaatctggagcgcagcgggaatcagcataaggcagaagtggaggccatcatggagcagctgaaggagttgaagcagaagggagaccgagacaaagagagcttgaagaaggccatccgagcccagaaggagcgagccgagaagagcgaggagtatgctgagcagctacacgtgcaactcgctgacaaggatctttatgtcgctgaagctttatccactctggaatcct

SEQ ID NO: 162983 - DNA, 2059 bp, Homo sapiens
  Payload ID: 12117
  Gene Symbol: ODF2
  Gene Name: outer dense fiber of sperm tails 2
  Uniprot ID: Q5BJF6
  ENST ID: ENST00000448249
  CDS Start-End: 227-1957
ccgccgcggcgtctccatggcacgaccctggcctccgacttcaacgacttcataaggcggcgtttctgggcgcagccgtgtcgctcctggtttccatcgtgtgggaagaacggagtaacgagtctcacgcagaaaaaggtcttgagagcaccttgtggcgcacccagtgtaactgtgacgatcaaccatttttgtgttgtcctcccccacctgccagaagccaaccatgaaggaccgctcttcaactccccccttacatgttcacgtggatgagaacacccctgtccacgtccacataaaaaaactcccgaaaccatcagcgaccagcagccagaaatctcacaagcgaggaatgaaaggggacactgtgaatgtgcggcggagtgtccgggtgaaaaccaaggtcaagatgcaaaaaggtgagcgccagatggccaaaaggttcctggaggaacggaaggaagagctggaggaggtggcccacgaactggctgagactgagcacgagaacacggtgttgaggcacaacatcgagcgcatgaaggaggagaaggacttcaccatacttcagaagaaacacctacaacaggagaaggagtgcctcatgtccaagctggtggaggcggaaatggatggggctgcggctgccaagcaggtcatggccttgaaggataccatcgggaagctgaaaacagagaaacaaatgacctgcacggacatcaacaccctgacaaggcagaaggaacttctcctgcagaagctgagcacatttgaggagaccaaccgcaccctccgagacctcctgagggaacagcactgcaaagaggattctgaaagactaatggagcaacaaggagcactgctgaaacggctggcggaggccgactcagagaaagcgcgcctgctgttactgctgcaagacaaggacaaggaggtggaagagctccttcaggaaatacaatgtgagaaggctcaagcaaagacagcctctgagctttctaaatccatggagtccatgcgtgggcatttgcaggcacagcttcggtccaaagaggctgagaacagtcgcctgtgcatgcagattaagaatctggagcgcagcgggaatcagcataaggcagaagtggaggccatcatggagcagctgaaggagttgaagcagaagggagaccgagacaaagagagcttgaagaaggccatccgagcccagaaggagcgagccgagaagagcgaggagtatgctgagcagctacacgtgcaactcgctgacaaggatctttatgtcgctgaagctttatccactctggaatcctggaggagccgctacaaccaagttgtaaaagaaaagggagaccttgagctggaaattattgtcctgaatgaccgggtaacagatcttgtaaaccaacaacaaaccctggaggagaagatgcgggaagaccgggatagcctggtggagagactacaccgtcagactgctgagtattccgcattcaagctggagaatgagaggctgaaggccagctttgctccaatggaggacaaactcaaccaggcacacctcgaggtccagcagctgaaggcctcagtgaagaactatgaggggatgattgacaactataagagtcaggtgatgaagaccagattggaggctgatgaagtagctgcccagctagaacgctgtgacaaagagaacaagatccttaaagatgagatgaacaaagagattgaggcggcacgaaggcagttccagtctcagctggctgacctgcagcagctccctgacatcctgaagatcacggaggcgaagctggctgagtgccaagaccaactgcagggctatgagcggaagaacatcgacctcacagccatcatatcagacctgcgcagccgggtaagggactggcagaaagggtcccacgaactgacccgagcaggggcccgcataccaagatgagctgcacgccccccaagggaggactacttcctttttcttggctgctgctttttaaaaggagtgagctatcatcagtgctgtgaaataaaagtctggtgtgcc

SEQ ID NO: 162984 - DNA, 3890 bp, Homo sapiens
  Payload ID: 12117
  Gene Symbol: ODF2
  Gene Name: outer dense fiber of sperm tails 2
  Uniprot ID: Q5BJF6
  ENST ID: ENST00000434106
  CDS Start-End: 364-2853
ccaccggcgcggggcctctcctcctcccgctaacgggcggtcggccgcctccttcctctcttggctaccacggggctctgcccctcctctgccgcccgcgggcagggcttcacctttctctctatgggcagaaaccggtaccctcctgcctgctggacagttgctgtgcgacttggacagtagaggagcgcctcccaagttttcatccaactgccaaccccaaagcttccacccttctcccctcagagaggacgtttgatgccgggccccttgagaggctcattgacaagcctgcccctctgggtccccctgagcagagcctgctgacccaattgcccacctttgcggctttgatgcctagccatgtctgcctcatcctcaggcggctcccccaggtttccatcgtgtgggaagaacggagtaacgagtctcacgcagaaaaaggtcttgagagcaccttgtggcgcacccagtgtaactgtgacgaaatctcacaagcgaggaatgaaaggggacactgtgaatgtgcggcggagtgtccgggtgaaaaccaaggtaccttggatgccccctggaaaatcatctgcccggcctgtgggatgcaagtgggagaatccacctcattgcctggagatcacgccaccatcttcagaaaagctggtctcagtgatgcggttaagtgacctctctacagaagatgatgactcaggtcactgtaaaatgaaccgttatgataagaagattgatagtctaatgaatgcggttggttgtctgaagtctgaggtcaagatgcaaaaaggtgagcgccagatggccaaaaggttcctggaggaacggaaggaagagctggaggaggtggcccacgaactggctgagactgagcacgagaacacggtgttgaggcacaacatcgagcgcatgaaggaggagaaggacttcaccatacttcagaagaaacacctacaacaggagaaggagtgcctcatgtccaagctggtggaggcggaaatggatggggctgcggctgccaagcaggtcatggccttgaaggataccatcgggaagctgaaaacagagaaacaaatgacctgcacggacatcaacaccctgacaaggcagaaggaacttctcctgcagaagctgagcacatttgaggagaccaaccgcaccctccgagacctcctgagggaacagcactgcaaagaggattctgaaagactaatggagcaacaaggagcactgctgaaacggctggcggaggccgactcagagaaagcgcgcctgctgttactgctgcaagacaaggacaaggaggtggaagagctccttcaggaaatacaatgtgagaaggctcaagcaaagacagcctctgagctttctaaatccatggagtccatgcgtgggcatttgcaggcacagcttcggtccaaagaggctgagaacagtcgcctgtgcatgcagattaagaatctggagcgcagcgggaatcagcataaggcagaagtggaggccatcatggagcagctgaaggagttgaagcagaagggagaccgagacaaagagagcttgaagaaggccatccgagcccagaaggagcgagccgagaagagcgaggagtatgctgagcagctacacgtgcaactcgctgacaaggatctttatgtcgctgaagctttatccactctggaatcctggaggagccgctacaaccaagttgtaaaagaaaagggagaccttgagctggaaattattgtcctgaatgaccgggtaacagatcttgtaaaccaacaacaaaccctggaggagaagatgcgggaagaccgggatagcctggtggagagactacaccgtcagactgctgagtattccgcattcaagctggagaatgagaggctgaaggccagctttgctccaatggaggacaaactcaaccaggcacacctcgaggtccagcagctgaaggcctcagtgaagaactatgaggggatgattgacaactataagagtcaggtgatgaagaccagattggaggctgatgaagtagctgcccagctagaacgctgtgacaaagagaacaagatccttaaagatgagatgaacaaagagattgaggcggcacgaaggcagttccagtctcagctggctgacctgcagcagctccctgacatcctgaagatcacggaggcgaagctggctgagtgccaagaccaactgcagggctatgagcggaagaacatcgacctcacagccatcatatcagacctgcgcagccggatcgaacaccagggggacaagctggagatggcgagagagaaacatcaggcttcccagaaggaaaataaacagctgagtctgaaggtggatgaactggagaggaaactggaggcgaccagtgcccagaatatcgagttcctacaggtgattgccaagagggaggaggcaatccaccagtcccagctgcggctggaggagaaaacacgggaatgtgggaccctggcaaggcagttggagagtgccattgaagatgcgaggaggcaggtggaacaaaccaaggagcacgcactctccaaggagcgagcagcccagaacaaaatcctggaccttgagacccagctgagcagaaccaaaacggaattgagccagctgcggcggagccgtgatgatgcggaccgccgctaccagagccggctgcaagacctgaaagatcgcctggagcagtccgagagcaccaaccgcagcatgcagaactacgtccagttcctcaaatcatcatacgccaacgtgtttggggatggtccctattccaccttcctgactagctctcccatccgctcccgatctcctcctgcctgaggccacttatcagggcctggagccctgatggaagccataggaactccagagttgccaagccatagctgagaagcctggtggttttcctctcccagtgaaaaaatgggttcagggtcttgtccttagctactagctctagaaaagtcccaaaagcagcagaaggtgaagcaggaagcacttggttttctccttcctgatatagtcacctgttggaagtgttaaaatttcctcgacaggccttaaatttactactacattagggtaccacattttaacttaccatgactttgctccttcctttcctgagaaaatatttccactggattttttccaccagtccccttacagccctcattgttttaggaatctctctcaggttttttctgacctaaaccagcaggaagtcgtcctgggctgtaagcaccatcacttgctttttttttttttctgatttcacaagtgtggtgttttcccaaggctcccttcccaagctcagtgcaaacctctcactcccaagtttctttgaggccacttgcccccaagcacttcacaatagaccctcgagggcttgtgtccatttggccttttacaagtgtaatgccaatttcattgatttttgtttcttttggcctgatttgtatctctggaatgcatttattcttgaaatatttgtgtgattttacaaaaagcttttgtaatcagttatttaaggctccatttgatgatttcctttacccaaccagtcctcatccctcctctaaaaaatgattaagtaaaatgctgcaggacagccagtagacatttttaaagtacttggtgcctgaaacatcaggcttctcatttcattttagctcaggttggtgctttcacattgtaatcaatgaactgtcaggagggaacaaactgtaagaaggattgcttggtgttttagggtagatcactttagctattaggaagaggatggggtagtgtacagtatatatttttaaaatgtgaattggtttctgaataagaatctgggccatttttgttcacca

SEQ ID NO: 162985 - DNA, 934 bp, Homo sapiens
  Payload ID: 12117
  Gene Symbol: ODF2
  Gene Name: outer dense fiber of sperm tails 2
  ENST ID: ENST00000432065
  CDS Start-End: 320-934
ccgcctccttcctctcttggctaccacggggctctgcccctcctctgccgcccgcgggcagggcttcacctttctctctatgggcagaaaccggtaccctcctgcctgctggacagttgctgtgcgacttggacagtagaggagcgcctcccaagttttcatccaactgccaaccccaaagcttccacccttctcccctcagagaggacgtttgatgccgggccccttgagaggctcattgacaagcctgcccctctgggtccccctgagcagagcctgctgacccaattgcccacctttgcggctttgatgcctagccatgtctgcctcatcctcaggcggctcccccaggtttccatcgtgtgggaagaacggagtaacgagtctcacgcagaaaaaggtcttgagagcaccttgtggcgcacccagtgtaactgtgacgaaatctcacaagcgaggaatgaaaggggacactgtgaatgtgcggcggagtgtccgggtgaaaaccaaggtcaagatgcaaaaaggtgagcgccagatggccaaaaggttcctggaggaacggaaggaagagctggaggaggtggcccacgaactggctgagactgagcacgagaacacggtgttgaggcacaacatcgagcgcatgaaggaggagaaggacttcaccatacttcagaagaaacacctacaacaggagaaggagtgcctcatgtccaagctggtggaggcggaaatggatggggctgcggctgccaagcaggtcatggccttgaaggataccatcgggaagctgaaaacagagaaacaaatgacctgcacggacatcaacaccctgacaaggcagaaggaacttctcctgcagaagctgagcacatttgaggagaccaaccgcaccctccgagacctcctgagggaacagcactgcaaagag

SEQ ID NO: 162986 - DNA, 822 bp, Homo sapiens
  Payload ID: 12117
  Gene Symbol: ODF2
  Gene Name: outer dense fiber of sperm tails 2
  ENST ID: ENST00000446274
  CDS Start-End: 353-822
gggcctctcctcctcccgctaacgggcggtcggccgcctccttcctctcttggctaccacggggctctgcccctcctctgccgcccgcgggcagggcttcacctttctctctatgggcagaaaccggtaccctcctgcctgctggacagttgctgtgcgacttggacagtagaggagcgcctcccaagttttcatccaactgccaaccccaaagcttccacccttctcccctcagagaggacgtttgatgccgggccccttgagaggctcattgacaagcctgcccctctgggtccccctgagcagagcctgctgacccaattgcccacctttgcggctttgatgcctagccatgtctgcctcatcctcaggcggctcccccaggtttccatcgtgtgggaagaacggagtaacgagtctcacgcagaaaaaggtcttgagagcaccttgtggcgcacccagtgtaactgtgacgaaatctcacaagcgaggaatgaaaggggacactgtgaatgtgcggcggagtgtccgggtgaaaaccaagaatccacctcattgcctggagatcacgccaccatcttcagaaaagctggtctcagtgatgcggttaagtgacctctctacagaagatgatgactcaggtcactgtaaaatgaaccgttatgataagaagattgatagtctaatgaatgcggttggttgtctgaagtctgaggtcaagatgcaaaaaggtgagcgccagatggccaaaaggttcctggaggaacggaaggaagagctggaggaggtggcccacgaactggctgagactgagcacgagaa

SEQ ID NO: 162987 - DNA, 2140 bp, Homo sapiens
  Payload ID: 12117
  Gene Symbol: ODF2
  Gene Name: outer dense fiber of sperm tails 2
  Uniprot ID: Q5BJF6
  ENST ID: ENST00000546203
  CDS Start-End: 122-2038
accggcgcggggcctctcctcctcccgctaacgggcggtcggccgcctccttcctctcttggctaccacggggctctgcccctcctctgccgcccgcgggcagggcttcacctttctctctatgggcagaaaccggtaccctcctgcctgctggtttccatcgtgtgggaagaacggagtaacgagtctcacgcagaaaaaggtcttgagagcaccttgtggcgcacccagtgtaactgtgacgaaatctcacaagcgaggaatgaaaggggacactgtgaatgtgcggcggagtgtccgggtgaaaaccaagaatccacctcattgcctggagatcacgccaccatcttcagaaaagctggtctcagtgatgcggttaagtgacctctctacagaagatgatgactcaggtcactgtaaaatgaaccgttatgataagaagattgatagtctaatgaatgcggttggttgtctgaagtctgaggtcaagatgcaaaaaggtgagcgccagatggccaaaaggttcctggaggaacggaaggaagagctggaggaggtggcccacgaactggctgagactgagcacgagaacacggtgttgaggcacaacatcgagcgcatgaaggaggagaaggacttcaccatacttcagaagaaacacctacaacaggagaaggagtgcctcatgtccaagctggtggaggcggaaatggatggggctgcggctgccaagcaggtcatggccttgaaggataccatcgggaagctgaaaacagagaaacaaatgacctgcacggacatcaacaccctgacaaggcagaaggaacttctcctgcagaagctgagcacatttgaggagaccaaccgcaccctccgagacctcctgagggaacagcactgcaaagaggattctgaaagactaatggagcaacaaggagcactgctgaaacggctggcggaggccgactcagagaaagcgcgcctgctgttactgctgcaagacaaggacaaggaggtggaagagctccttcaggaaatacaatgtgagaaggctcaagcaaagacagcctctgagctttctaaatccatggagtccatgcgtgggcatttgcaggcacagcttcggtccaaagaggctgagaacagtcgcctgtgcatgcagattaagaatctggagcgcagcgggaatcagcataaggcagaagtggaggccatcatggagcagctgaaggagttgaagcagaagggagaccgagacaaagagagcttgaagaaggccatccgagcccagaaggagcgagccgagaagagcgaggagtatgctgagcagctacacgtgcaactcgctgacaaggatctttatgtcgctgaagctttatccactctggaatcctggaggagccgctacaaccaagttgtaaaagaaaagggagaccttgagctggaaattattgtcctgaatgaccgggtaacagatcttgtaaaccaacaacaaaccctggaggagaagatgcgggaagaccgggatagcctggtggagagactacaccgtcagactgctgagtattccgcattcaagctggagaatgagaggctgaaggccagctttgctccaatggaggacaaactcaaccaggcacacctcgaggtccagcagctgaaggcctcagtgaagaactatgaggggatgattgacaactataagagtcaggtgatgaagaccagattggaggctgatgaagtagctgcccagctagaacgctgtgacaaagagaacaagatccttaaagatgagatgaacaaagagattgaggcggcacgaaggcagttccagtctcagctggctgacctgcagcagctccctgacatcctgaagatcacggaggcgaagctggctgagtgccaagaccaactgcagggctatgagcggaagaacatcgacctcacagccatcatatcagacctgcgcagccgggtaagggactggcagaaagggtcccacgaactgacccgagcaggggcccgcataccaagatgagctgcacgccccccaagggaggactacttcctttttcttggctgctgctttttaaaaggagtgagctatcatcagtgctgtgaaataaaagtctggtgtgcc

SEQ ID NO: 162988 - DNA, 3030 bp, Homo sapiens
  Payload ID: 12117
  Gene Symbol: ODF2
  Gene Name: outer dense fiber of sperm tails 2
  Uniprot ID: Q5BJF6
  ENST ID: ENST00000604420
  CDS Start-End: 313-2802
agagccagactgcatccgccgcggcgtctccatggcacgaccctggcctccgacttcaacgacttcataaggcggcgtttctgggcgcagccgtgtcgctcctggacagttgctgtgcgacttggacagtagaggagcgcctcccaagttttcatccaactgccaaccccaaagcttccacccttctcccctcagagaggacgtttgatgccgggccccttgagaggctcattgacaagcctgcccctctgggtccccctgagcagagcctgctgacccaattgcccacctttgcggctttgatgcctagccatgtctgcctcatcctcaggcggctcccccaggtttccatcgtgtgggaagaacggagtaacgagtctcacgcagaaaaaggtcttgagagcaccttgtggcgcacccagtgtaactgtgacgaaatctcacaagcgaggaatgaaaggggacactgtgaatgtgcggcggagtgtccgggtgaaaaccaaggtaccttggatgccccctggaaaatcatctgcccggcctgtgggatgcaagtgggagaatccacctcattgcctggagatcacgccaccatcttcagaaaagctggtctcagtgatgcggttaagtgacctctctacagaagatgatgactcaggtcactgtaaaatgaaccgttatgataagaagattgatagtctaatgaatgcggttggttgtctgaagtctgaggtcaagatgcaaaaaggtgagcgccagatggccaaaaggttcctggaggaacggaaggaagagctggaggaggtggcccacgaactggctgagactgagcacgagaacacggtgttgaggcacaacatcgagcgcatgaaggaggagaaggacttcaccatacttcagaagaaacacctacaacaggagaaggagtgcctcatgtccaagctggtggaggcggaaatggatggggctgcggctgccaagcaggtcatggccttgaaggataccatcgggaagctgaaaacagagaaacaaatgacctgcacggacatcaacaccctgacaaggcagaaggaacttctcctgcagaagctgagcacatttgaggagaccaaccgcaccctccgagacctcctgagggaacagcactgcaaagaggattctgaaagactaatggagcaacaaggagcactgctgaaacggctggcggaggccgactcagagaaagcgcgcctgctgttactgctgcaagacaaggacaaggaggtggaagagctccttcaggaaatacaatgtgagaaggctcaagcaaagacagcctctgagctttctaaatccatggagtccatgcgtgggcatttgcaggcacagcttcggtccaaagaggctgagaacagtcgcctgtgcatgcagattaagaatctggagcgcagcgggaatcagcataaggcagaagtggaggccatcatggagcagctgaaggagttgaagcagaagggagaccgagacaaagagagcttgaagaaggccatccgagcccagaaggagcgagccgagaagagcgaggagtatgctgagcagctacacgtgcaactcgctgacaaggatctttatgtcgctgaagctttatccactctggaatcctggaggagccgctacaaccaagttgtaaaagaaaagggagaccttgagctggaaattattgtcctgaatgaccgggtaacagatcttgtaaaccaacaacaaaccctggaggagaagatgcgggaagaccgggatagcctggtggagagactacaccgtcagactgctgagtattccgcattcaagctggagaatgagaggctgaaggccagctttgctccaatggaggacaaactcaaccaggcacacctcgaggtccagcagctgaaggcctcagtgaagaactatgaggggatgattgacaactataagagtcaggtgatgaagaccagattggaggctgatgaagtagctgcccagctagaacgctgtgacaaagagaacaagatccttaaagatgagatgaacaaagagattgaggcggcacgaaggcagttccagtctcagctggctgacctgcagcagctccctgacatcctgaagatcacggaggcgaagctggctgagtgccaagaccaactgcagggctatgagcggaagaacatcgacctcacagccatcatatcagacctgcgcagccggatcgaacaccagggggacaagctggagatggcgagagagaaacatcaggcttcccagaaggaaaataaacagctgagtctgaaggtggatgaactggagaggaaactggaggcgaccagtgcccagaatatcgagttcctacaggtgattgccaagagggaggaggcaatccaccagtcccagctgcggctggaggagaaaacacgggaatgtgggaccctggcaaggcagttggagagtgccattgaagatgcgaggaggcaggtggaacaaaccaaggagcacgcactctccaaggagcgagcagcccagaacaaaatcctggaccttgagacccagctgagcagaaccaaaacggaattgagccagctgcggcggagccgtgatgatgcggaccgccgctaccagagccggctgcaagacctgaaagatcgcctggagcagtccgagagcaccaaccgcagcatgcagaactacgtccagttcctcaaatcatcatacgccaacgtgtttggggatggtccctattccaccttcctgactagctctcccatccgctcccgatctcctcctgcctgaggccacttatcagggcctggagccctgatggaagccataggaactccagagttgccaagccatagctgagaagcctggtggttttcctctcccagtgaaaaaatgggttcagggtcttgtccttagctactagctctagaaaagtcccaaaagcagcagaaggtgaagcaggaagcacttggttttctccttcctgatatagtcacctgttggaagtgttaaaatttc

SEQ ID NO: 162989 - DNA, 723 bp, Homo sapiens
  Payload ID: 12117
  Gene Symbol: ODF2
  Gene Name: outer dense fiber of sperm tails 2
  ENST ID: ENST00000483070
  CDS Start-End: 1-723
gagattgaggcggcacgaaggcagttccagtctcagctggctgacctgcagcagctccctgacatcctgaagatcacggaggcgaagctggctgagtgccaagaccaactgcagggctatgagcggaagaacatcgacctcacagccatcatatcagacctgcgcagccggatcgaacaccagggggacaagctggagatggcgagagagaaacatcaggcttcccagaaggaaaataaacagctgagtctgaaggtggatgaactggagaggttagaggcacttggtcccatctctgtcctcttcctaggacctgagactttcagccacttagctgttttttgcttagtgtgcggaagtgttgagggactcgaggccctggaaggtactaggcagacctcagaggaaaagctgcttccatttcagtggaaactggaggcgaccagtgcccagaatatcgagttcctacaggtgattgccaagagggaggaggcaatccaccagtcccagctgcggctggaggagaaaacacgggaatgtgggaccctggcaaggcagttggagagtgccattgaagatgcgaggaggcaggtggaacaaaccaaggagcacgcactctccaaggagcgagcagcccagaacaaaatcctggaccttgagacccagctgagcagaaccaaaacggaattgagccagctgcggcggagccgtgatgatgcggac

SEQ ID NO: 162990 - DNA, 578 bp, Homo sapiens
  Payload ID: 12117
  Gene Symbol: ODF2
  Gene Name: outer dense fiber of sperm tails 2
  ENST ID: ENST00000497812
  CDS Start-End: 147-578
taattgagaagatggcggaccagcaaggacctcatcagaataggtctgtacacagagcggcatagagagtgcaggagggtagtagaccgggcgcggaggctcaagcctgtaatacaagcactttggaaggccgaggcgggtggatcatgaggtttccatcgtgtgggaagaacggagtaacgagtctcacgcagaaaaaggtcttgagagcaccttgtggcgcacccagtgtaactgtgacgaaatctcacaagcgaggaatgaaaggggacactgtgaatgtgcggcggagtgtccgggtgaaaaccaaggtaccttggatgccccctggaaaatcatctgcccggcctgtgggatgcaagtgggagaatccacctcattgcctggagatcacgccaccatcttcagaaaagctggtctcagtgatgcggttaagtgacctctctacagaagatgatgactcaggtcactgtaaaatgaaccgttatgataagaagattgatagtctaatgaatgcggttggttgtctgaagtctgaggtcaagatgcaaaaaggtgagcgccagatggccaaaagg

SEQ ID NO: 162991 - DNA, 588 bp, Homo sapiens
  Payload ID: 12117
  Gene Symbol: ODF2
  Gene Name: outer dense fiber of sperm tails 2
  ENST ID: ENST00000470061
  CDS Start-End: 288-588
gccctctggggcccacttggggccgagcggttctcacccgccctctccgcacgtccgccggcgcctcaggtttcccccggacagttgctgtgcgacttggacagtagaggagcgcctcccaagttttcatccaactgccaaccccaaagcttccacccttctcccctcagagaggacgtttgatgccgggccccttgagaggctcattgacaagcctgcccctctgggtccccctgagcagagcctgctgacccaattgcccacctttgcggctttgatgcctagccatgtctgcctcatcctcaggcggctcccccaggtttccatcgtgtgggaagaacggagtaacgagtctcacgcagaaaaaggtcttgagagcaccttgtggcgcacccagtgtaactgtgacgaaatctcacaagcgaggaatgaaaggggacactgtgaatgtgcggcggagtgtccgggtgaaaaccaaggtaccttggatgccccctggaaaatcatctgcccggcctgtgggatgcaagtgggagaatccacctcattgcctggagatcacgccaccatcttcagaaaagctggtct

SEQ ID NO: 162992 - DNA, 4267 bp, Homo sapiens
  Payload ID: 12118
  Gene Symbol: ODF2L
  Gene Name: outer dense fiber of sperm tails 2-like
  Uniprot ID: Q9ULJ1
  ENST ID: ENST00000294678
  CDS Start-End: 308-2170
tgagcgggcactcttctgcggcaagcaggtctaggaattcgcctggttcccacctcgcgtcccttgccttccttcctagtctacccactgtagtgccccctgcgtcccgctccctcctagccgactcagagcacaagaaggattgccacggtttccattgcagcagccgtggcgcctctgaccctttttttatatcgcggcgacggcgggctgtcgtcacgacgacgtgcggacgcagcggcgggggcctttcagcttatgtggagaagtcgctgtgaagccacctataaatccatttactgaatttatggagaaggctgtaaatgatggaagtcattcagaagaactcttttgccatcttaaaactatatcagagaaagaagatttaccacggtgtaccagtgaaagtcatctcagctgcctgaagcaggacattctaaatgaaaagactgaattggaagcaacacttaaggaagcggagttggtaactcattctgtagaattgcttttgccactatttaaggacaccattgaaaagattaattttgaaaatgcgaatctttctgcattgaatttgaagatttctgaacagaaggaaatattaataaaagaattagacaccttcaaaagtgtaaaactagctttagaacatcttcttagaaagagagactacaaacaaacaggagacaatttatccagcatgttgctagaaaatctaactgataatgaaagtgaaaatactaatcttaagaagaaggtatttgaaaaggaggcccatatccaagaactttcttgtttgtttcagagtgaaaaggcaaatactttgaaagcaaaccgtttttcccaatcagtaaaagtagtacatgaacgactacagatccaaattcataaaagggaagccgagaacgataagttgaaagaatatgtaaagagcttagaaaccaagatagccaagtggaacctgcaatcaagaatgaataagaatgaggctatagtgatgaaagaagcaagtaggcaaaaaactgtagctttaaaaaaggcatctaaagtttacaaacaaaggcttgaccattttacaggagctattgaaaagcttacttcccaaattagagatcaggaagccaagttgtctgaaacaatttcagcttccaatgcctggaaaagtcattatgagaaaattgtgatagaaaaaaccgaattggaagtacagattgaaacaatgaaaaagcaaatcattaatcttttggaagatctgaagaaaatggaagaccatggaaaaaattcatgtgaagaaattcttagaaaagttcactcaattgaatatgaaaatgaaactctgaatcttgagaatacaaaattaaagactacacttgctgctttgaaggatgaagttgtatctgttgaaaatgaactctcagaattgcaagaagtagaaaaaaaacagaaaacccttattgaaatgtataaaactcaggtacaaaagttgcaagaagcagctgaaatagtaaaaagcagatgtgaaaatttgctacataaaaataaccaaataacaaaaaccaaaaataaaaatgtagagaagatgagaggccagatggagtctcatctgaaggagttagagcgtgtctgcgattccttgacggcggcggaacggaggcttcacgagtgtcaggagagtctgcagtgctgcaaggggaagtgtgcagaccaggaacacaccattagggagcttcagggccagattttgaagcagtgggaagaatattctgtcttggcatgggttgatggaaatcacaatcttctgacaaagctttctctggaagaggaaaactgtcttattcagctgaagtgtgaaaaccttcaacaaaaattagaacagatggacgcagaaaataaagagcttgagaagaagctggcaaaccaagaagaatgtcttaagcacagcaatcttaagtttaaagagaaatctgcagagtatacagcattggccagacaactggaagctgctttagaagaaggaagacaaaaggttgctgaagaaatagagaaaatgtcatctagagagagtgctttacaaattaaaatattagatctggaaactgagcttagaaagaaaaatgaagaacaaaatcaacttgtttgcaaaatgaacagtgatccagagactccatgaaatctatttttttaattcccaagtgtctaaaaagttgaaaacctaaaagattcaagagttaaatgatttttggcatgcacaatttgattttattgccatcaaaagtttcatgacaacttagtcagaacaaaacgtcgatcacctttaatttagcacaggccttccatttatttctaaacttttttttaactcaccatttgactttctgatattgtaaaatgtgtgtgctgtttttttgtgtaattgaagcctctgaaaaaataaatgaggtgggttttgctgtaatgtccctagtacttggctaaagctagtaaaataaatagatcccattcacaattgccacaaagagaataaaatacctaggaatccaaattacaaggaatgtgaaggacctcttcaaggagaactacaaaccactgcttaaggaaataagagaggacacaaacaaatggaaaacattccatgcttatgaataagatgaaacaagatcatgaaaatggctatactccccaaagtaatttatagattcagtgctatccccatcaagctaccattgactttcttcacagaattagaaaaaactacttcaaatttcatatggaaccaaaaaagagctcacataaccaagacaatcctaagcaaaaagaacaaagctgtaggcatcacgctacctgacttcaaactatactacaaggctacagtaaccaaaatagcatggtactggtgccaaaacagatatatagaccaatggaacagaacagaggcctcagaaataactccacacatctacaaccatctgctgtttgacatacctgagaaaaacaagaaatggggaaaggattccctatttaataaatggtgttgggaaaactggctagccatatgcagaaaactgaaactggatcccttccttacaccttatacaaaaattaactcaagatggattaaagacttaagtgtaagacctaaaaccataaaaaccctagaggaaaacctaggcaataccattcaggacataggcatggacgaatacttcatgactaaaacaccaaaagtaatggcaataaaagccaagattgacaaatgggatctaattaaactaaagagcttctgcacagcaaaagaaactatcatcagagtgaacaggaaccgacagaatgggagaaaatttttgcaatctatccatctgacaaagggccaatatccagaatctacaaagaacttaaacaaatttacaagaaaaaaaaccccatcaaaaagtgtgcaaagaatatgaacagacacttctcaagagaagacatttagtcagccaaaaaacatatgaaaaaaagctcatcactggtcattcagagaaatgcaaatcaaaactacagtgagataccatgtcacaccaattagaatggtgatcattaaaaagacaggaaacaacagatgctggagaggatgtggagaaataggatgcttttacactgttggtgggagtgtaaattagttcaaccactgcggaagacagtgtggcgattcctcaaggatctagaaccagaaataccatttgacccagcaatcccattactgggtatatacccaaaggactataaatcatgctgctatagagacacatgcacacgtatatttattgtggcactattcacaatagcaaagacttggagccaacccaaatgcccatcaatgatagactgaataaagaaaatgtggcacatacaccatggaatactatgcagccataaaaaaggatgagttcatgtcctttgcagggacatggatgaagctggaaaccatcattctcagcaaactaacacaagaacagaaaaccaaacaccgcatgttctcactcataagtgggagttgaacaatgagaatacatggatacagggcagggaacatcacacaccagggcctgtcagggcgtggggggctaggggagggataacattagaaattcctaatgtagatgacgggttgatgagtgcagcaaaccaccatggcacgtgtatacctatgtaaccaacctgtacgttctgtacatgtatcccagaacttaaagtataataaaaattaaaaaaaataaagatctga

SEQ ID NO: 162993 - DNA, 4376 bp, Homo sapiens
  Payload ID: 12118
  Gene Symbol: ODF2L
  Gene Name: outer dense fiber of sperm tails 2-like
  Uniprot ID: Q9ULJ1
  ENST ID: ENST00000317336
  CDS Start-End: 370-2280
gggtggggccgccgttgccagagaagccactagccggttactagctgcgcttttgttccacttgagcgggcactcttctgcggcaagcaggtctaggaattcgcctggttcccacctcgcgtcccttgccttccttcctagtctacccactgtagtgccccctgcgtcccgctccctcctagccgactcagagcacaagaaggattgccacggtttccattgcagcagccgtggcgcctctgaccctttttttatatcgcggcgacggcgggctgtcgtcacgacgacgtgcggacgcagcggcgggggcctttcagcttatgtggagaagtcgctgtgaagccacctataaatccatttactgaatttatggagaaggctgtaaatgatggaagtcattcagaagaactcttttgccatcttaaaactatatcagagaaagaagatttaccacggtgtaccagtgaaagtcatctcagctgcctgaagcaggacattctaaatgaaaagactgaattggaagcaacacttaaggaagcggagttggtaactcattctgtagaattgcttttgccactatttaaggacaccattgaaaagattaattttgaaaatgcgaatctttctgcattgaatttgaagatttctgaacagaaggaaatattaataaaagaattagacaccttcaaaagtgtaaaactagctttagaacatcttcttagaaagagagactacaaacaaacaggagacaatttatccagcatgttgctagaaaatctaactgataatgaaagtgaaaatactaatcttaagaagaaggtatttgaaaaggaggcccatatccaagaactttcttgtttgtttcagagtgaaaaggcaaatactttgaaagcaaaccgtttttcccaatcagtaaaagtagtacatgaacgactacagatccaaattcataaaagggaagccgagaacgataagttgaaagaatatgtaaagagcttagaaaccaagatagccaagtggaacctgcaatcaagaatgaataagaatgaggctatagtgatgaaagaagcaagtaggcaaaaaactgtagctttaaaaaaggcatctaaagtttacaaacaaaggcttgaccattttacaggagctattgaaaagcttacttcccaaattagagatcaggaagccaagttgtctgaaacaatttcagcttccaatgcctggaaaagtcattatgagaaaattgtgatagaaaaaaccgaattggaagtacagattgaaacaatgaaaaagcaaatcattaatcttttggaagatctgaagaaaatggaagaccatggaaaaaattcatgtgaagaaattcttagaaaagttcactcaattgaatatgaaaatgaaactctgaatcttgagaatacaaaattaaagcttagattcccatgtagaattactgagtcaaagaatatgaacattttgattgttcttgatatgctttgctacatttcttctgaaaagactacacttgctgctttgaaggatgaagttgtatctgttgaaaatgaactctcagaattgcaagaagtagaaaaaaaacagaaaacccttattgaaatgtataaaactcaggtacaaaagttgcaagaagcagctgaaatagtaaaaagcagatgtgaaaatttgctacataaaaataaccaaataacaaaaaccaaaaataaaaatgtagagaagatgagaggccagatggagtctcatctgaaggagttagagcgtgtctgcgattccttgacggcggcggaacggaggcttcacgagtgtcaggagagtctgcagtgctgcaaggggaagtgtgcagaccaggaacacaccattagggagcttcagggccaggttgatggaaatcacaatcttctgacaaagctttctctggaagaggaaaactgtcttattcagctgaagtgtgaaaaccttcaacaaaaattagaacagatggacgcagaaaataaagagcttgagaagaagctggcaaaccaagaagaatgtcttaagcacagcaatcttaagtttaaagagaaatctgcagagtatacagcattggccagacaactggaagctgctttagaagaaggaagacaaaaggttgctgaagaaatagagaaaatgtcatctagagagagtgctttacaaattaaaatattagatctggaaactgagcttagaaagaaaaatgaagaacaaaatcaacttgtttgcaaaatgaacagtgatccagagactccatgaaatctatttttttaattcccaagtgtctaaaaagttgaaaacctaaaagattcaagagttaaatgatttttggcatgcacaatttgattttattgccatcaaaagtttcatgacaacttagtcagaacaaaacgtcgatcacctttaatttagcacaggccttccatttatttctaaacttttttttaactcaccatttgactttctgatattgtaaaatgtgtgtgctgtttttttgtgtaattgaagcctctgaaaaaataaatgaggtgggttttgctgtaatgtccctagtacttggctaaagctagtaaaataaatagatcccattcacaattgccacaaagagaataaaatacctaggaatccaaattacaaggaatgtgaaggacctcttcaaggagaactacaaaccactgcttaaggaaataagagaggacacaaacaaatggaaaacattccatgcttatgaataagatgaaacaagatcatgaaaatggctatactccccaaagtaatttatagattcagtgctatccccatcaagctaccattgactttcttcacagaattagaaaaaactacttcaaatttcatatggaaccaaaaaagagctcacataaccaagacaatcctaagcaaaaagaacaaagctgtaggcatcacgctacctgacttcaaactatactacaaggctacagtaaccaaaatagcatggtactggtgccaaaacagatatatagaccaatggaacagaacagaggcctcagaaataactccacacatctacaaccatctgctgtttgacatacctgagaaaaacaagaaatggggaaaggattccctatttaataaatggtgttgggaaaactggctagccatatgcagaaaactgaaactggatcccttccttacaccttatacaaaaattaactcaagatggattaaagacttaagtgtaagacctaaaaccataaaaaccctagaggaaaacctaggcaataccattcaggacataggcatggacgaatacttcatgactaaaacaccaaaagtaatggcaataaaagccaagattgacaaatgggatctaattaaactaaagagcttctgcacagcaaaagaaactatcatcagagtgaacaggaaccgacagaatgggagaaaatttttgcaatctatccatctgacaaagggccaatatccagaatctacaaagaacttaaacaaatttacaagaaaaaaaaccccatcaaaaagtgtgcaaagaatatgaacagacacttctcaagagaagacatttagtcagccaaaaaacatatgaaaaaaagctcatcactggtcattcagagaaatgcaaatcaaaactacagtgagataccatgtcacaccaattagaatggtgatcattaaaaagacaggaaacaacagatgctggagaggatgtggagaaataggatgcttttacactgttggtgggagtgtaaattagttcaaccactgcggaagacagtgtggcgattcctcaaggatctagaaccagaaataccatttgacccagcaatcccattactgggtatatacccaaaggactataaatcatgctgctatagagacacatgcacacgtatatttattgtggcactattcacaatagcaaagacttggagccaacccaaatgcccatcaatgatagactgaataaagaaaatgtggcacatacaccatggaatactatgcagccataaaaaaggatgagttcatgtcctttgcagggacatggatgaagctggaaaccatcattctcagcaaactaacacaagaacagaaaaccaaacaccgcatgttctcactcataagtgggagttgaacaatgagaatacatggatacagggcagggaacatcacacaccagggcctgtcagggcgtggggggctaggggagggataacattagaaattcctaatgtagatgacgggttgatgagtgcagcaaaccaccatggcacgtgtatacctatgtaaccaacctgtacgttctgtacatgtatcccagaacttaaagtataataaaaattaaaaaaaataaagatctg

SEQ ID NO: 162994 - DNA, 2155 bp, Homo sapiens
  Payload ID: 12118
  Gene Symbol: ODF2L
  Gene Name: outer dense fiber of sperm tails 2-like
  Uniprot ID: Q9ULJ1
  ENST ID: ENST00000370566
  CDS Start-End: 368-2143
gtggggccgccgttgccagagaagccactagccggttactagctgcgcttttgttccacttgagcgggcactcttctgcggcaagcaggtctaggaattcgcctggttcccacctcgcgtcccttgccttccttcctagtctacccactgtagtgccccctgcgtcccgctccctcctagccgactcagagcacaagaaggattgccacggtttccattgcagcagccgtggcgcctctgaccctttttttatatcgcggcgacggcgggctgtcgtcacgacgacgtgcggacgcagcggcgggggcctttcagcttatgtggagaagtcgctgtgaagccacctataaatccatttactgaatttatggagaaggctgtaaatgatggaagtcattcagaagaactcttttgccatcttaaaactatatcagagaaagaagatttaccacggtgtaccagtgaaagtcatctcagctgcctgaagcaggacattctaaatgaaaagactgaattggaagcaacacttaaggaagcggagttggtaactcattctgtagaattgcttttgccactatttaaggacaccattgaaaagattaattttgaaaatgcgaatctttctgcattgaatttgaagatttctgaacagaaggaaatattaataaaagaattagacaccttcaaaagtgtaaaactagctttagaacatcttcttagaaagagagactacaaacaaacaggagacaatttatccagcatgttgctagaaaatctaactgataatgaaagtgaaaatactaatcttaagaagaaggtatttgaaaaggaggcccatatccaagaactttcttgtttgtttcagagtgaaaaggcaaatactttgaaagcaaaccgtttttcccaatcagtaaaagtagtacatgaacgactacagatccaaattcataaaagggaagccgagaacgataagttgaaagaatatgtaaagagcttagaaaccaagatagccaagtggaacctgcaatcaagaatgaataagaatgaggctatagtgatgaaagaagcaagtaggcaaaaaactgtagctttaaaaaaggcatctaaagtttacaaacaaaggcttgaccattttacaggagctattgaaaagcttacttcccaaattagagatcaggaagccaagttgtctgaaacaatttcagcttccaatgcctggaaaagtcattatgagaaaattgtgatagaaaaaaccgaattggaagtacagattgaaacaatgaaaaagcaaatcattaatcttttggaagatctgaagaaaatggaagaccatggaaaaaattcatgtgaagaaattcttagaaaagttcactcaattgaatatgaaaatgaaactctgaatcttgagaatacaaaattaaagactacacttgctgctttgaaggatgaagttgtatctgttgaaaatgaactctcagaattgcaagaagtagaaaaaaaacagaaaacccttattgaaatgtataaaactcaggtacaaaagttgcaagaagcagctgaaatagtaaaaagcagatgtgaaaatttgctacataaaaataaccaaataacaaaaaccaaaaataaaaatgtagagaaggttgatggaaatcacaatcttctgacaaagctttctctggaagaggaaaactgtcttattcagctgaagtgtgaaaaccttcaacaaaaattagaacagatggacgcagaaaataaagagcttgagaagaagctggcaaaccaagaagaatgtcttaagcacagcaatcttaagtttaaagagaaatctgcagagtatacagcattggccagacaactggaagctgctttagaagaaggaagacaaaaggttgctgaagaaatagagaaaatgtcatctagagagagtgctttacaaattaaaatattagatctggaaactgagcttagaaagaaaaatgaagaacaaaatcaacttgtttgcaaaatgaacagtaaagcacaacatcaggaagtgtgtttgaaagaagtacaaaatagtcttgagaagtcggaaaatcaaaatgagagtattaagaattatttacagtttcttaaaacttcttatgtaacaatgtttgaataaattgtcaaattt

SEQ ID NO: 162995 - DNA, 7560 bp, Homo sapiens
  Payload ID: 12118
  Gene Symbol: ODF2L
  Gene Name: outer dense fiber of sperm tails 2-like
  Uniprot ID: Q9ULJ1
  ENST ID: ENST00000359242
  CDS Start-End: 283-2193
cggcaagcaggtctaggaattcgcctggttcccacctcgcgtcccttgccttccttcctagtctacccactgtagtgccccctgcgtcccgctccctcctagccgactcagagcacaagaaggattgccacggtttccattgcagcagccgtggcgcctctgaccctttttttatatcgcggcgacggcgggctgtcgtcacgacgacgtgcggacgcagcggcgggggccttatgtggagaagtcgctgtgaagccacctataaatccatttactgaatttatggagaaggctgtaaatgatggaagtcattcagaagaactcttttgccatcttaaaactatatcagagaaagaagatttaccacggtgtaccagtgaaagtcatctcagctgcctgaagcaggacattctaaatgaaaagactgaattggaagcaacacttaaggaagcggagttggtaactcattctgtagaattgcttttgccactatttaaggacaccattgaaaagattaattttgaaaatgcgaatctttctgcattgaatttgaagatttctgaacagaaggaaatattaataaaagaattagacaccttcaaaagtgtaaaactagctttagaacatcttcttagaaagagagactacaaacaaacaggagacaatttatccagcatgttgctagaaaatctaactgataatgaaagtgaaaatactaatcttaagaagaaggtatttgaaaaggaggcccatatccaagaactttcttgtttgtttcagagtgaaaaggcaaatactttgaaagcaaaccgtttttcccaatcagtaaaagtagtacatgaacgactacagatccaaattcataaaagggaagccgagaacgataagttgaaagaatatgtaaagagcttagaaaccaagatagccaagtggaacctgcaatcaagaatgaataagaatgaggctatagtgatgaaagaagcaagtaggcaaaaaactgtagctttaaaaaaggcatctaaagtttacaaacaaaggcttgaccattttacaggagctattgaaaagcttacttcccaaattagagatcaggaagccaagttgtctgaaacaatttcagcttccaatgcctggaaaagtcattatgagaaaattgtgatagaaaaaaccgaattggaagtacagattgaaacaatgaaaaagcaaatcattaatcttttggaagatctgaagaaaatggaagaccatggaaaaaattcatgtgaagaaattcttagaaaagttcactcaattgaatatgaaaatgaaactctgaatcttgagaatacaaaattaaagcttagattcccatgtagaattactgagtcaaagaatatgaacattttgattgttcttgatatgctttgctacatttcttctgaaaagactacacttgctgctttgaaggatgaagttgtatctgttgaaaatgaactctcagaattgcaagaagtagaaaaaaaacagaaaacccttattgaaatgtataaaactcaggtacaaaagttgcaagaagcagctgaaatagtaaaaagcagatgtgaaaatttgctacataaaaataaccaaataacaaaaaccaaaaataaaaatgtagagaagatgagaggccagatggagtctcatctgaaggagttagagcgtgtctgcgattccttgacggcggcggaacggaggcttcacgagtgtcaggagagtctgcagtgctgcaaggggaagtgtgcagaccaggaacacaccattagggagcttcagggccaggttgatggaaatcacaatcttctgacaaagctttctctggaagaggaaaactgtcttattcagctgaagtgtgaaaaccttcaacaaaaattagaacagatggacgcagaaaataaagagcttgagaagaagctggcaaaccaagaagaatgtcttaagcacagcaatcttaagtttaaagagaaatctgcagagtatacagcattggccagacaactggaagctgctttagaagaaggaagacaaaaggttgctgaagaaatagagaaaatgtcatctagagagagtgctttacaaattaaaatattagatctggaaactgagcttagaaagaaaaatgaagaacaaaatcaacttgtttgcaaaatgaacagtgatccagagactccatgaaatctatttttttaattcccaagtgtctaaaaagttgaaaacctaaaagattcaagagttaaatgatttttggcatgcacaatttgattttattgccatcaaaagtttcatgacaacttagtcagaacaaaacgtcgatcacctttaatttagcacaggccttccatttatttctaaacttttttttaactcaccatttgactttctgatattgtaaaatgtgtgtgctgtttttttgtgtaattgaagcctctgaaaaaataaatgaggtgggttttgctgtaatgtccctagtacttggctaaagctagtaaaataaatagatcccattcacaattgccacaaagagaataaaatacctaggaatccaaattacaaggaatgtgaaggacctcttcaaggagaactacaaaccactgcttaaggaaataagagaggacacaaacaaatggaaaacattccatgcttatgaataagatgaaacaagatcatgaaaatggctatactccccaaagtaatttatagattcagtgctatccccatcaagctaccattgactttcttcacagaattagaaaaaactacttcaaatttcatatggaaccaaaaaagagctcacataaccaagacaatcctaagcaaaaagaacaaagctgtaggcatcacgctacctgacttcaaactatactacaaggctacagtaaccaaaatagcatggtactggtgccaaaacagatatatagaccaatggaacagaacagaggcctcagaaataactccacacatctacaaccatctgctgtttgacatacctgagaaaaacaagaaatggggaaaggattccctatttaataaatggtgttgggaaaactggctagccatatgcagaaaactgaaactggatcccttccttacaccttatacaaaaattaactcaagatggattaaagacttaagtgtaagacctaaaaccataaaaaccctagaggaaaacctaggcaataccattcaggacataggcatggacgaatacttcatgactaaaacaccaaaagtaatggcaataaaagccaagattgacaaatgggatctaattaaactaaagagcttctgcacagcaaaagaaactatcatcagagtgaacaggaaccgacagaatgggagaaaatttttgcaatctatccatctgacaaagggccaatatccagaatctacaaagaacttaaacaaatttacaagaaaaaaaaccccatcaaaaagtgtgcaaagaatatgaacagacacttctcaagagaagacatttagtcagccaaaaaacatatgaaaaaaagctcatcactggtcattcagagaaatgcaaatcaaaactacagtgagataccatgtcacaccaattagaatggtgatcattaaaaagacaggaaacaacagatgctggagaggatgtggagaaataggatgcttttacactgttggtgggagtgtaaattagttcaaccactgcggaagacagtgtggcgattcctcaaggatctagaaccagaaataccatttgacccagcaatcccattactgggtatatacccaaaggactataaatcatgctgctatagagacacatgcacacgtatatttattgtggcactattcacaatagcaaagacttggagccaacccaaatgcccatcaatgatagactgaataaagaaaatgtggcacatacaccatggaatactatgcagccataaaaaaggatgagttcatgtcctttgcagggacatggatgaagctggaaaccatcattctcagcaaactaacacaagaacagaaaaccaaacaccgcatgttctcactcataagtgggagttgaacaatgagaatacatggatacagggcagggaacatcacacaccagggcctgtcagggcgtggggggctaggggagggataacattagaaattcctaatgtagatgacgggttgatgagtgcagcaaaccaccatggcacgtgtatacctatgtaaccaacctgtacgttctgtacatgtatcccagaacttaaagtataataaaaattaaaaaaaataaagatctgatgttttgttaaacctgataagttttgtactagtaaaattctagaattctaagcatagatttaaacattgctgaaaaatgagtttgtgtgttttatgccttccaggggacagttaagtgggcagtatttatttaatatacctgcttcagccccatttgaattgtaagcactctgaaagcatgtctcatagtcgtctgtatccctggtgtctcccacagtgccctgcttacctgcaggcctttttgtattttctgtccaagtaccctaatagggtggtgcagaatggatgtacagatctgtggatgacctcagcagcttaatccaaggcacccctcgggaagcctgaaatgtctttgaagtcttatgtattatcctaaaatccattgacattttatattctaccctacaaaataagtatgtgttactatttttctttccaaattgttgagtaaaactcattgtattcatcctgtgactttgtactgcccagcctagctcattgttttttacctgcctcatttcctgagctgggcattgctcagtttcagaaggtatcaggtgtcattgaacacctgatatgaaggatgtaaaagttctctcttttctatctaggtgtctatattttaattggaggctagatgatatttgcaacctgtctttatctaaagcattgtcagtgaactcacctacttaggaattcatatgcaccttagttaaaaaaaatgtattgtggttttaaattttttcctcaaccagtgtaatatgaagaattctttttattttttaagagattctaagaaaatgttcacattatcaaaactagaattctatcaacttttaagacatttaattattttggaataaaatgtgaatttttagacagaaaatggcaaaaactagtatgaaaatatatcatgttacatgtgaaattatgacagttgttaacctattaagttaatcatgttaaatatgtaataatttggggctaaatgaatgtatattataaattatatcagtgaagatcaaccatgtgtgtgctttaattattaattttaaagagtgagctctaagaatgaacacatcagatgtgagtattattttaaaaaatcaaaaagaattatctagttattgtatatatgtttttaatattatgactctggtcctttggaatgaatgctattattgcttatctgtatttttttccttttttctttagaaagcacaacatcaggaagtgtgtttgaaagaagtacaaaatagtcttgagaagtcggaaaatcaaaatgagagtattaagaattatttacagtttcttaaaacttcttatgtaacaatgtttgaataaattgtcaaatttattttctctaagtagtagatttttattatgagtctaaaatgtgattgggtaaaaaaataaatatactaccagttacattttatgatttatgagtggtagtattagaggtttttatgtaaagatttttgaaacataatttatctaactgaaactttaaaataggatagttgttactattcctgtttgctggataattcttatttatctttggtttaatttcttttaaaattaaattggttgttagaatatttttctcacacatagacatggaagtcagattcattctttgtgatgtttgtagccaccattcaagtgaatttgtagtaagtcttggtcaatatgattttaaataatatatataattgttttatattatgatatataaatgtaaaatattctgaattttaatttttaataatggtgtaattacatactttctaaagctactaaatgtctcaatatactacacttaatattgtttcaagtatatgctgagttgccattataatttctgttaggttttaagtatacaattttaaatcatcgctattaagtaccaactgctaatgacagatgaaaacgtggtcatgcattatttctttataaagaatagatattcaggctgtcttcaatttgtactctcttttattcgttttatactaatgattatctgatattattattattttagacattctagagccccttagttaaataaaagattaaaggggaacagcttatcccaccctttccatggccaactcatggggatgatcaaaataagcactcttaacatcaagaagctttaaaataaggtctttagtattgggataaagttgtccaagttgaaaaagaacttgtttgctataatctcccactgtgtgtgccaaggcaggatactctaaaaggggatgacgtggtttacaaaggatcaagtaatagtgactcctcttggacaatgacttgagagctgttaattcagaggaacactcaggtcttaaaagatcactaaaaaaggcaggttgtgaactacacagttccagcctatgaacagaaatatctctttaagatgttttatgctttttttctgatcagagatgggggcctggtcccctctgatcccctcacttttaagactgtcatatcattcacagatgcttactttctagtgatccagttggttcgtagtatttttcttaaaatagcaaaatacagagtgtcagaactggccacattttttacccaacaattgctaacaagattagtgtcattttaaaaaaaatcttagtactcatcatactaaaaacatgcttgacccttgcagccctttctttacctcctaatgcaaagggagccttaaatgcccacatgaaaggaaagcaaagctcttgagttttactcactaaactgtaagctccttaagggccgaaatgtatcttagtcatataaatatctgggcactcagttgatgtttgtggatagatggacagatgttgaaagaggcaggtattcgtactcctgttttagatatgaaaaatgtaagcaaaaaggattaattaccatggctgtggtatgaaacttgtttaaagttggcatttaaattcaagtctgcaacattaaagttctgtgtacagagccgttttcccactgtagcagcagcgcagcagcagcgctgctatgattgattaagcacttgctatgtgccagagttaataattgtgataatatattaactcatttaattttcaggaaactaagacatggaaaggttaggtaacttgcccaaggtcgcacagctagtaagtggcagacatccagagtctctgctctgctcttaactctcaccatactacctctgtatccatttcataaataaagatagtagtttcttataacagtaatgcatttgtctta

SEQ ID NO: 162996 - DNA, 648 bp, Homo sapiens
  Payload ID: 12118
  Gene Symbol: ODF2L
  Gene Name: outer dense fiber of sperm tails 2-like
  ENST ID: ENST00000394733
  CDS Start-End: 502-648
ggtctaggaattcgcctggttcccacctcgcgtcccttgccttccttcctagtctacccactgtagtgccccctgcgtcccgctccctcctagccgactcagagcacaagaaggattgccacggtttccattgcagcagccgtggcgcctctgaccctttttttatatcgcggcgacggcgggctgtcgtcacgacgacgtgcggacgcagcggcgggggccctgaagcaggacattctaaatgaaaagactgaattggaagcaacacttaaggaagcggagttggtaactcattctgtagaattgcttttgccactatttaaggacaccattgaaaagattaattttgaaaatgcgaatctttctgcattgaatttgaagatttctgaacagaaggaaatattaataaaagaattagacaccttcaaaagtgtaaaactagctttagaacatcttcttagaaagagagactacaaacaaacaggagacaatttatccagcatgttgctagaaaatctaactgataatgaaagtgaaaatactaatcttaagaagaaggtatttgaaaaggaggcccatatccaagaactttcttgtttgtttcagagtgaaaaggcaaatactttgaaagcaaaccgtttttcccaa

SEQ ID NO: 162997 - DNA, 534 bp, Homo sapiens
  Payload ID: 12118
  Gene Symbol: ODF2L
  Gene Name: outer dense fiber of sperm tails 2-like
  ENST ID: ENST00000531412
  CDS Start-End: 1-164
cggcggcggaacggaggcttcacgagtgtcaggagagtctgcagtgctgcaaggggaagtgtgcagaccaggaacacaccattagggagcttcagggccagaatatggatcatgtagcagattttgaagcagtgggaagaatattctgtcttggcatgggttgatggaaatcacaatcttctgacaaagctttctctggaagaggaaaactgtcttattcagctgaagtgtgaaaaccttcaacaaaaattagaacagatggacgcagaaaataaagagcttgagaagaagctggcaaaccaagaagaatgtcttaagcacagcaatcttaagtttaaagagaaatctgcagagtatacagcattggccagacaactggaagctgctttagaagaaggaagacaaaaggttgctgaagaaatagagaaaatgtcatctagagagagtgctttacaaattaaaatattagatctggaaactgagcttagaaagaaaaatgaagaacaaaatcaacttgtttgcaaaatgaacagt

SEQ ID NO: 162998 - DNA, 311 bp, Homo sapiens
  Payload ID: 12118
  Gene Symbol: ODF2L
  Gene Name: outer dense fiber of sperm tails 2-like
  ENST ID: ENST00000486215
  CDS Start-End: 93-275
gcgtttaccgcgggagcccttagcggtctggagctttcagcttatgtggagaagtcgctgtgaagccacctataaatccatttactgaatttatggagaaggctgtaaatgatggaagtcattcagaagaactcttttgccatcttaaaactatatcagagaaagaagatttaccacggtgtaccagtgaaagtcatctcagctggtattctcatcagtatcaggggaaatctaaatttccgattctaggatttcctgttttgtctataatataaattatttgaatcaaatacagcattcttttaagagta

SEQ ID NO: 162999 - DNA, 1002 bp, Homo sapiens
  Payload ID: 12118
  Gene Symbol: ODF2L
  Gene Name: outer dense fiber of sperm tails 2-like
  ENST ID: ENST00000479890
  CDS Start-End: 273-1002
acttgagcgggcactcttctgcggcaagcaggtctaggaattcgcctggttcccacctcgcgtcccttgccttccttcctagtctacccactgtagtgccccctgcgtcccgctccctcctagccgactcagagcacaagaaggattgccacggtttccattgcagcagccgtggcgcctctgaccctttttttatatcgcggcgacggcgggctgtcgtcacgacgacgtgcggacgcagcggcgggggcacaggagacaatttatccagcatgttgctagaaaatctaactgataatgaaagtgaaaatactaatcttaagaagaaggtatttgaaaaggaggcccatatccaagaactttcttgtttgtttcagagtgaaaagagcttagaaaccaagatagccaagtggaacctgcaatcaagaatgaataagaatgaggctatagtgatgaaagaagcaagtaggcaaaaaactgtagctttaaaaaaggcatctaaagtttacaaacaaaggcttgaccattttacaggagctattgaaaagcttacttcccaaattagagatcaggaagccaagttgtctgaaacaatttcagcttccaatgcctggaaaagtcattatgagaaaattgtgatagaaaaaaccgaattggaagtacagattgaaacaatgaaaaagcaaatcattaatcttttggaagatctgaagaaaatggaagaccatggaaaaaattcatgtgaagaaattcttagaaaagttcactcaattgaatatgaaaatgaaactctgaatcttgagaatacaaaattaaagactacacttgctgctttgaaggatgaagttgtatctgttgaaaatgaactctcagaattgcaagaagtagaaaaaaaacagaaaacccttattgaaatgtataaaactcaggtacaaaagttgcaagaagcagctgaaatagtaaaaagcagatgtgaaaatttgctacataaaaataaccaaa

SEQ ID NO: 163000 - DNA, 1576 bp, Homo sapiens
  Payload ID: 12118
  Gene Symbol: ODF2L
  Gene Name: outer dense fiber of sperm tails 2-like
  ENST ID: ENST00000460698
  CDS Start-End: 1-1563
acaggagacaatttatccagcatgttgctagaaaatctaactgataatgaaagtgaaaatactaatcttaagaagaaggtatttgaaaaggaggcccatatccaagaactttcttgtttgtttcagagtgaaaaggcaaatactttgaaagcaaaccgtttttcccaatcagtaaaagtagtacatgaacgactacagatccaaattcataaaagggaagccgagaacgataagttgaaagaatatgtaaagagcttagaaaccaagatagccaagtggaacctgcaatcaagaatgaataagaatgaggctatagtgatgaaagaagcaagtaggcaaaaaactgtagctttaaaaaaggcatctaaagtttacaaacaaaggcttgaccattttacaggagctattgaaaagcttacttcccaaattagagatcaggaagccaagttgtctgaaacaatttcagcttccaatgcctggaaaagtcattatgagaaaattgtgatagaaaaaaccgaattggaagtacagattgaaacaatgaaaaagcaaatcattaatcttttggaagatctgaagaaaatggaagaccatggaaaaaattcatgtgaagaaattcttagaaaagttcactcaattgaatatgaaaatgaaactctgaatcttgagaatacaaaattaaagactacacttgctgctttgaaggatgaagttgtatctgttgaaaatgaactctcagaattgcaagaagtagaaaaaaaacagaaaacccttattgaaatgtataaaactcaggtacaaaagttgcaagaagcagctgaaatagtaaaaagcagatgtgaaaatttgctacataaaaataaccaaataacaaaaaccaaaaataaaaatgtagagaagatgagaggccagatggagtctcatctgaaggagttagagcgtgtctgcgattccttgacggcggcggaacggaggcttcacgagtgtcaggagagtctgcagtgctgcaaggggaagtgtgcagaccaggaacacaccattagggagcttcagggccaggttgatggaaatcacaatcttctgacaaagctttctctggaagaggaaaactgtcttattcagctgaagtgtgaaaaccttcaacaaaaattagaacagatggacgcagaaaataaagagcttgagaagaagctggcaaaccaagaagaatgtcttaagcacagcaatcttaagtttaaagagaaatctgcagagtatacagcattggccagacaactggaagctgctttagaagaaggaagacaaaaggttgctgaagaaatagagaaaatgtcatctagagagagtgctttacaaattaaaatattagatctggaaactgagcttagaaagaaaaatgaagaacaaaatcaacttgtttgcaaaatgaacagtaaagcacaacatcaggaagtgtgtttgaaagaagtacaaaatagtcttgagaagtcggaaaatcaaaatgagagtattaagaattatttacagtttcttaaaacttcttatgtaacaatgtttgaataaattgtcaaattta

SEQ ID NO: 163001 - DNA, 1422 bp, Homo sapiens
  Payload ID: 12118
  Gene Symbol: ODF2L
  Gene Name: outer dense fiber of sperm tails 2-like
  ENST ID: ENST00000488879
  CDS Start-End: 314-445
tccacttgagcgggcactcttctgcggcaagcaggtctaggaattcgcctggttcccacctcgcgtcccttgccttccttcctagtctacccactgtagtgccccctgcgtcccgctccctcctagccgactcagagcacaagaaggattgccacggtttccattgcagcagccgtggcgcctctgaccctttttttatatcgcggcgacggcgggctgtcgtcacgacgacgtgcggacgcagcggcgggggcctttcagcttatgtggagaagtcgctgtgaagccacctataaatccatttactgaatttatggagaaggctgtaaatgatggaagtcattcagaagaactcttttgccatcttaaaactatatcagagaaagaagatttaccacggtgtaccagtgaaagtcatctcagctggcgaatctttctgcattgaatttgaagatttctgaacagaaggaaatattaataaaagaattagacaccttcaaaagtgtaaaactagctttagaacatcttcttagaaagagagactacaaacaaacaggagacaatttatccagcatgttgctagaaaatctaactgataatgaaagtgaaaatactaatcttaagaagaaggtatttgaaaaggaggcccatatccaagaactttcttgtttgtttcagagtgaaaaggcaaatactttgaaagcaaaccgtttttcccaatcagtaaaagtagtacatgaacgactacagatccaaattcataaaagggaagccgagaacgataagttgaaagaatatgtaaagagcttagaaaccaagatagccaagtggaacctgcaatcaagaatgaataagaatgaggctatagtgatgaaagaagcaagtaggcaaaaaactgtagctttaaaaaaggcatctaaagtttacaaacaaaggcttgaccattttacaggagctattgaaaagcttacttcccaaattagagatcaggaagccaagttgtctgaaacaatttcagcttccaatgcctggaaaagtcattatgagaaaattgtgatagaaaaaaccgaattggaagtacagattgaaacaatgaaaaagcaaatcattaatcttttggaagatctgaagaaaatggaagaccatggaaaaaattcatgtgaagaaattcttagaaaagttcactcaattgaatatgaaaatgaaactctgaatcttgagaatacaaaattaaagactacacttgctgctttgaaggatgaagttgtatctgttgaaaatgaactctcagaattgcaagaagtagaaaaaaaacagaaaacccttattgaaatgtataaaactcaggtacaaaagttgcaagaagcagctgaaatagtaaaaagcagatgtgaaaatttgctacataaaaataaccaaata

SEQ ID NO: 163002 - DNA, 461 bp, Homo sapiens
  Payload ID: 12118
  Gene Symbol: ODF2L
  Gene Name: outer dense fiber of sperm tails 2-like
  ENST ID: ENST00000462648
  CDS Start-End: 1-461
attttgaagcagtgggaagaatattctgtcttggcatgggttgatggaaatcacaatcttctgacaaagctttctctggaagaggaaaactgtcttattcagctgaagtgtgaaaaccttcaacaaaaattagaacagatggacgcagaaaataaagagcttgagaagaagctggcaaaccaagaagaatgtcttaagcacagcaatcttaagtttaaagagaaatctgcagagtatacagcattggccagacaactggaagctgctttagaagaaggaagacaaaaggttgctgaagaaatagagaaaatgtcatctagagagagtgctttacaaattaaaatattagatctggaaactgagcttagaaagaaaaatgaagaacaaaatcaacttgtttgcaaaatgaacagtaaagcacaacatcaggaagtgtgtttgaaagaagtacaaaatagtct

SEQ ID NO: 163003 - DNA, 1650 bp, Homo sapiens
  Payload ID: 12118
  Gene Symbol: ODF2L
  Gene Name: outer dense fiber of sperm tails 2-like
  ENST ID: ENST00000478286
  CDS Start-End: 351-533
agagaagccactagccggttactagctgcgcttttgttccacttgagcgggcactcttctgcggcaagcaggtctaggaattcgcctggttcccacctcgcgtcccttgccttccttcctagtctacccactgtagtgccccctgcgtcccgctccctcctagccgactcagagcacaagaaggattgccacggtttccattgcagcagccgtggcgcctctgaccctttttttatatcgcggcgacggcgggctgtcgtcacgacgacgtgcggacgcagcggcgggggcctttcagcttatgtggagaagtcgctgtgaagccacctataaatccatttactgaatttatggagaaggctgtaaatgatggaagtcattcagaagaactcttttgccatcttaaaactatatcagagaaagaagatttaccacggtgtaccagtgaaagtcatctcagctggtattctcatcagtatcaggggaaatctaaatttccgattctaggatttcctgttttgtctataatataaattatttgaatcaaatacagcattcttttaagagtatcttttccaaatctagtatttatttattaaaatatatttaatctgattacaagtgtactcatctagcagaattcaactagtttttttgaatcttaatgaaagcaattaaaaatgaaaacctggccgggcgcaatggatcatgcctgtaatcccagcactttgggaggatgaggcaggtggatcacttgaggtcaggagttcaagatcagcctggccaacatggtgaaaccccatctctactgaaaaaatgcaaaaattagccagatgtggtagcgtgtgcctgttgtcccagctacttggaaggctgtggtagaagaatcacttgaacctgggaggcgaaggtcacagtgagccgagataatgccactgcactcctgggtgacagagcctgggtgacagagcgagactccatctcaaaaaagaaaaagacaaaaaaaatgaaaacctcatctgttaagaatttgtaaaataaagctatttaagataaatgaaaatataatatgtgatatcagaaatgtagttaatgaatgtgaaatcactgtcatttggtatattactatatagcaaatacttgtcatacttctttagagtggggaatacacttgttatttacatgaaatattgccccccgtcaaatggcaatcttagtatataccattactgtcagtatggatagcttagtccagcttctggttgaatttgttatgaatgaaaataatattttatcatctataatcacacttgactttctgcccatggtttttaataagggacaggtgtcgtttatagatagaatgttcttaggctcattactttaagccagttgtgcttaagaacacacagatttttgacatagcctctaagatgccatcagttgttaatgagccgttatgttttacaaagaaagagaaaagctgccaattaaagagtttccatatcacttggaattttatttataaatattgaaaatgctccttcaaacttaactatacgtacatctttaatccaaataacttttgtgattacgtacaagtaaaatataagtaaaataaagtattcttaaaatttgcttacactcaaa

SEQ ID NO: 163004 - DNA, 1307 bp, Homo sapiens
  Payload ID: 12119
  Gene Symbol: ODF3
  Gene Name: outer dense fiber of sperm tails 3
  Uniprot ID: Q96PU9
  ENST ID: ENST00000325113
  CDS Start-End: 318-1082
attctagagtttagagtgggggacctctccccaattctgtaagcccatgaggagagaggaaggcctttctctccatgctccttttgcgggaactccctggcaccaaggccaggggggaaaggacagtctctgatgaggatgggtctctaggctgctctgagtgctgtccctgcactgaagaagttatagttccctcccaggcggccccctccctgcccctcagctcagcctcaatcaagaagttccccatctttgaccactccaagtaggagaaaccggcccagggctcccttagagccgagaacagtgagctggccatgacggaggaggtatggatgggtacctggaggccccatcgcccccggggacccatcatggccctctacagcagccctggacccaagtacctgattccaccaacaacaggcttcatgaagcacacgcccaccaagctgcgtgcaccggcctacagcttccgtggggcccccatgctcctggcagagaactgctccccagggccccgttacaatgtaaaccccaagatactgaggactggcaaggaccttggccctgcctactccatcctggggcgctaccaaaccaagaccatgctgactcctggtccaggtgactactttccagagaaatccaccaagtacgtgttcgactcagcacccagccactccatctctgcccggacaaaggcattccgagtggacagcaccccaggccccgctgcgtacatgctgcccatggtaatggggcccaataccgtcggcaaggcctcccagccctccttttccatcaagggccgcagcaagctgggcggcttcagcgacgacctacacaagaccccaggtcccgcagcctaccgccaaactgatgtgcgggtgaccaagttcaaggctccgcagtacaccatggctgcccgtgtggagcccccaggggacaagaccctcaagccaggaccaggcgcccacagccctgagaaggtgaccctgaccaagccctgcgccccagttgtcaccttcggcatcaaacactctgattacatgactcccctgctggttgatgtggaataacgccagccctgctgtgccccatcacacccggcatctacacaagatccgccgggccacagagctcgaggctgtcttcaccagctgggctgggccagcctggccctgcagggcagagcacgcttgtttgggcaattgtaatcagttactttttttctatgctattttaccattttttaatcttgttttctgctgtgcccaaattattaataaatcagattgcattaa

SEQ ID NO: 163005 - DNA, 386 bp, Homo sapiens
  Payload ID: 12119
  Gene Symbol: ODF3
  Gene Name: outer dense fiber of sperm tails 3
  ENST ID: ENST00000342593
  CDS Start-End: 3-386
ccatgacggaggaggtatggatgggtacctggaggccccatcgcccccggggacccatcatggccctctacagcagccctggacccaagtacctgattccaccaacaacaggcttcatgaagcacacgcccaccaagctgcgtgcaccggcctacagcttccgtggggcccccatgctcctggcagagaactgctccccagggccccgttacaataccgtcggcaaggcctcccagccctccttttccatcaagggccgcagcaagctgggcggcttcagcgacgacctacacaaggtgaccctgaccaagccctgcgccccagttgtcaccttcggcatcaaacactctgattacatgactcccctgctggttgatgtggaataa

SEQ ID NO: 163006 - DNA, 764 bp, Homo sapiens
  Payload ID: 12119
  Gene Symbol: ODF3
  Gene Name: outer dense fiber of sperm tails 3
  Uniprot ID: Q96PU9
  ENST ID: ENST00000525282
  CDS Start-End: 103-726
cccctcagctcagcctcaatcaagaagttccccatctttgaccactccaagtaggagaaaccggcccagggctcccttagagccgagaacagtgagctggccatgacggaggaggtatggatgggtacctggaggccccatcgcccccggggacccatcatggccctctacagcagccctggacccaagtacctgattccaccaacaacaggcttcatgaagcacacgcccaccaagctgcgtgcaccggcctacagcttccgtggggcccccatgctcctggcagagaactgctccccagggccccgttacaatgtaaaccccaagatactgaggactggcaaggaccttggccctgcctactccatcctggggcgctaccaaaccaagaccatgctgactcctggtccaggtgactactttccagagaaatccaccaagtacgtgttcgactcagcacccagccactccatctctgcccggacaaaggcattccgagtggacagcaccccaggccccgctgcgtacatgctgcccatggtaatggggcccaataccgtcggcaaggcctcccagccctccttttccatcaagggccgcagcaagctgggcggcttcagcgacgacctacacaaggtgaccctgaccaagccctgcgccccagttgtcaccttcggcatcaaacactctgattacatgactcccctgctggttgatgtggaataacgccagccctgctgtgccccatcacacccggcatctac

SEQ ID NO: 163007 - DNA, 970 bp, Homo sapiens
  Payload ID: 12120
  Gene Symbol: ODF3B
  Gene Name: outer dense fiber of sperm tails 3B
  Uniprot ID: A8MYP8
  ENST ID: ENST00000329363
  CDS Start-End: 138-899
gaagcgggaaagggccacaatggggtctgggaggtgggcggggcggagcggggatgtccagccacgtcgctttgttttcccacgctaggagctaccacaacaggtgctgcgagccgtaagcgccccccacccgcgctatgggctcggacgcctgggtgggcctttggcggccacaccggccccgcggccccatcgcggcgcactacggaggccccgggcccaaatacaagctgccgcccaacaccggctacgccctgcatgacccgtcgcggccgcgcgcccccgccttcaccttcggcgcgcgcttccccacgcagcagacgacgtgcggccccgggccaggccacctggtgcccgctcgcatgaccgtgcgcggcaccgacggcgcccccgcctactccatctacggccgcccacgccgctcagcgcccttcctcactccgggacctggcaggtacttcccggagcgagcggggaacgcgacgtaccccagtgcgcctcggcacaccattgctccccgaaactggggtgtccaggcggaacagcagagcccaggtcccgcggcctatacggtgccctcgctcttgggtccgcgcgtcatcggcaaagtctccgccccaacttgctccatctacggccgcagagcggctggcagtttcttcgaggacctcagcaagaccccgggcccctgcgcctatcaggtcgtgagtccaggggtctacaagtcccgggccccccagttcacgattctggcgcggacttcgctcccccaagacaacactcggaagccagggcccgcggcctacaacgtggatcagcaccggaagccccgcggctggagtttcgggatccggcactcggactacctggccccgctggtgaccgacgcggacaactgacccgccaggcgggagcggccccacacgtgtttgcttaaagtctgcgagtccgcatcgtgtccgcctctctc

SEQ ID NO: 163008 - DNA, 917 bp, Homo sapiens
  Payload ID: 12120
  Gene Symbol: ODF3B
  Gene Name: outer dense fiber of sperm tails 3B
  ENST ID: ENST00000405135
  CDS Start-End: 71-916
ggtgcaggggccgcggccaccgccttctgtccgcaggtgctgcgagccgtaagcgccccccacccgcgctatgggctcggacgcctgggtgggcctttggcggccacaccggccccgcggccccatcgcggcgcactacggaggccccgggcccaaatacaagctgccgcccaacaccggctacgccctgcatgacccgtcgcggccgcgcgcccccgccttcaccttcggcgcgcgcttccccacgcagcagacgacgtgcggccccgggccaggccacctggtgcccgctcgcatgaccgtgcgcggcaccgacggcgcccccgcctactccatctacggccgcccacgccgctcagcgcccttcctcactccgggacctggctcccacgcagttctagccccccacacccttgatccgccccgcaggcaggtacttcccggagcgagcggggaacgcgacgtaccccagtgcgcctcggcacaccattgctccccgaaactggggtgtccaggcggaacagcagagcccaggtcccgcggcctatacggtgccctcgctcttgggtccgcgcgtcatcggcaaagtctccgccccaacttgctccatctacggccgcagagcggctggcagtttcttcgaggacctcagcaagaccccgggcccctgcgcctatcaggtcgtgagtccaggggtctacaagtcccgggccccccagttcacgattctggcgcggacttcgctcccccaagacaacactcggaagccagggcccgcggcctacaacgtggatcagcaccggaagccccgcggctggagtttcgggatccggcactcggactacctggccccgctggtgaccgacgcggacaactgacccgccaggcgggagcggccccacacgtgtttgcttaaa

SEQ ID NO: 163009 - DNA, 869 bp, Homo sapiens
  Payload ID: 12120
  Gene Symbol: ODF3B
  Gene Name: outer dense fiber of sperm tails 3B
  ENST ID: ENST00000401779
  CDS Start-End: 108-836
ccagggtagtgggaaagtgcgctccccaagaatttgcggtgcaggggccgcggccaccgccttctgtccgcaggtgctgcgagccgtaagcgccccccacccgcgctatgggctcggacgcctgggtgggcctttggcggccacaccggccccgcggccccatcgcggcgcactacggaggccccgggcccaaatacaagctgccgcccaacaccgcagacgacgtgcggccccgggccaggccacctggtgcccgctcgcatgaccgtgcgcggcaccgacggcgcccccgcctactccatctacggccgcccacgccgctcagcgcccttcctcactccgggacctggcaggtacttcccggagcgagcggggaacgcgacgtaccccagtgcgcctcggcacaccattgctccccgaaactggggtgtccaggcggaacagcagagcccaggtcccgcggcctatacggtgccctcgctcttgggtccgcgcgtcatcggcaaagtctccgccccaacttgctccatctacggccgcagagcggctggcagtttcttcgaggacctcagcaagaccccgggcccctgcgcctatcaggtcgtgagtccaggggtctacaagtcccgggccccccagttcacgattctggcgcggacttcgctcccccaagacaacactcggaagccagggcccgcggcctacaacgtggatcagcaccggaagccccgcggctggagtttcgggatccggcactcggactacctggccccgctggtgaccgacgcggacaactgacccgccaggcgggagcggccccacacgtgtttgcttaaagtctgcgagtccgcatcgtgtccgcctctctc

SEQ ID NO: 163010 - DNA, 643 bp, Homo sapiens
  Payload ID: 12120
  Gene Symbol: ODF3B
  Gene Name: outer dense fiber of sperm tails 3B
  ENST ID: ENST00000403326
  CDS Start-End: 32-589
ctgcgagccgtaagcgccccccacccgcgctatgggctcggacgcctgggtgggcctttggcggccacaccggccccgcggccccatcgcggcgcactacggaggccccgggcccaaatacaagctgccgcccaacaccggcaggtacttcccggagcgagcggggaacgcgacgtaccccagtgcgcctcggcacaccattgctccccgaaactggggtgtccaggcggaacagcagagcccaggtcccgcggcctatacggtgccctcgctcttgggtccgcgcgtcatcggcaaagtctccgccccaacttgctccatctacggccgcagagcggctggcagtttcttcgaggacctcagcaagaccccgggcccctgcgcctatcaggtcgtgagtccaggggtctacaagtcccgggccccccagttcacgattctggcgcggacttcgctcccccaagacaacactcggaagccagggcccgcggcctacaacgtggatcagcaccggaagccccgcggctggagtttcgggatccggcactcggactacctggccccgctggtgaccgacgcggacaactgacccgccaggcgggagcggccccacacgtgtttgcttaaagtctgcgagtccgca

SEQ ID NO: 163011 - DNA, 762 bp, Homo sapiens
  Payload ID: 12120
  Gene Symbol: ODF3B
  Gene Name: outer dense fiber of sperm tails 3B
  Uniprot ID: A8MYP8
  ENST ID: ENST00000428989
  CDS Start-End: 1-762
atgggctcggacgcctgggtgggcctttggcggccacaccggccccgcggccccatcgcggcgcactacggaggccccgggcccaaatacaagctgccgcccaacaccggctacgccctgcatgacccgtcgcggccgcgcgcccccgccttcaccttcggcgcgcgcttccccacgcagcagacgacgtgcggccccgggccaggccacctggtgcccgctcgcatgaccgtgcgcggcaccgacggcgcccccgcctactccatctacggccgcccacgccgctcagcgcccttcctcactccgggacctggcaggtacttcccggagcgagcggggaacgcgacgtaccccagtgcgcctcggcacaccattgctccccgaaactggggtgtccaggcggaacagcagagcccaggtcccgcggcctatacggtgccctcgctcttgggtccgcgcgtcatcggcaaagtctccgccccaacttgctccatctacggccgcagagcggctggcagtttcttcgaggacctcagcaagaccccgggcccctgcgcctatcaggtcgtgagtccaggggtctacaagtcccgggccccccagttcacgattctggcgcggacttcgctcccccaagacaacactcggaagccagggcccgcggcctacaacgtggatcagcaccggaagccccgcggctggagtttcgggatccggcactcggactacctggccccgctggtgaccgacgcggacaactga

SEQ ID NO: 163012 - DNA, 276 bp, Homo sapiens
  Payload ID: 12120
  Gene Symbol: ODF3B
  Gene Name: outer dense fiber of sperm tails 3B
  ENST ID: ENST00000437588
  CDS Start-End: 139-276
ggaagcgggaaagggccacaatggggtctgggaggtgggcggggcggagcggggatgtccagccacgtcgctttgttttcccacgctaggagctaccacaacaggtgctgcgagccgtaagcgccccccacccgcgctatgggctcggacgcctgggtgggcctttggcggccacaccggccccgcggccccatcgcggcgcactacggaggccccgggcccaaatacaagctgccgcccaacaccggctacgccctgcatgacccgtcgcggccg

SEQ ID NO: 163013 - DNA, 1196 bp, Homo sapiens
  Payload ID: 12121
  Gene Symbol: ODF3L1
  Gene Name: outer dense fiber of sperm tails 3-like 1
  Uniprot ID: Q8IXM7
  ENST ID: ENST00000332145
  CDS Start-End: 224-1048
tccaagctctgccgtgacgtcatctccagctccagcctgctggggcctgtgctgactgtgccccagacagccttagctgctcaagctggagaactgtcttccttcccagcttcctccgtgtctggggtgggggatgggggggtctcaggcagggatactctagccccttgactgctgtttagaccctgctgtagctgctgctgctccctgcccagccccagccatgaaactgcccaaggggaccaggagctctgtgtactttgcacagcacccagaaaaggagccattgccctcaaggcaggaggtcaagcagacccctgtcatcatggccaagatcaaaggtccggggcccgccaagtacctccggccatcctgcacgggctacatagatcatgacatctccatgttcaaggcaccagcttataccctgcatagccggcactcagagaagcggatggtgtgccacagcagccctgggccttgctatctcttggatcccaaaataactcggtttggaatgtccagctgcccgcaggtccccatggaggagcgcatctccaacctgcgcctgaaccccaccctcgcatcctgccagtactactttgagaagatccacccaccgggggaacgcagggctccccagtacacgtttggctaccggcgcccatacagagtgatggacctcaacccggctcccaaccagtaccagatgccactcttgctggggcccaacacccctgtcagccgagctgctccctgctacagtctggcctccagggacaagaactggttctacaaggaggatgtggcaggaggccctggacctaccacgtacgcccgacctgagccatccatctatcagaaccgcagccctacttacagcatggccaagcgcttcgcctaccctctggacctcacgccacggcctggccccggctcccacgaggtccagcaggtcactgtgcacaagccccacatccctgctttcaccatgggcatcaagcactcactccacctgtgcccactggtcatcgacattcgtgactgaggcccctcttggggcactcactgcccctcatccccagaaattatttttctacaccaaattgagcaatttgaccaagatttctagtagcagagccggtacctgctgagtgtccggcacacagaagacattagagatacattttcatgta

SEQ ID NO: 163014 - DNA, 1604 bp, Homo sapiens
  Payload ID: 12122
  Gene Symbol: ODF3L2
  Gene Name: outer dense fiber of sperm tails 3-like 2
  Uniprot ID: Q3SX64
  ENST ID: ENST00000315489
  CDS Start-End: 237-1106
actcgatcccggccccacttccaggccagtgtccggccgaccagcctgccttgggccagggccccacgactccctgctgcgggacaagaggccgtctgtgcggctgtggtcgtgggagggtgtggtgaggccgtgaaggtggggacggtgcctgggcctgtggccgccagagctgctgcggctcagaaggtagcaccaggccccgtgggtgctgtgggggccatcgcctgcccaccatggggaccctcagctgcgactccaccccacggctggccacagccccccttggccggcgagtgacggagggccagattccggagaccggcctgaggaagtcctgtgggacggccaccctggagaacggctcggggccaggcttgtatgtcctgccgtccaccgtgggcttcatcaaccacgactgcaccagggtggccagtcccgcctactcgctcgtccggaggcccagtgaggcaccacctcaggacaccagcccgggccccatctacttcttggaccccaaagtcacacgctttggccgcagctgcacccctgcctactccatgcagggccgggccaagtctcggggtccggaggtgacgccaggccctggggcctacagcccagagaaggtgccccctgtgcgccatcggacaccgccggctttcaccctgggctgccgcctccccctgaagcccctggacacctcagcccctgcccctaatgcctacaccatgccccctctgtggggctcacagatcttcaccaagcccagcagccccagctacacggtggtgggccgcaccccccccgcccgccccccgcaggatcctgctgagataccaggcccgggccagtacgacagcccggacgcaaacacctaccgccagcgcctgcctgccttcaccatgctggggcggccccgggccccgcgacccctggaggagacccccggccctggcgcccactgcccagagcaggtcaccgtgaacaaagccagggctccagcgttctctatgggcatccgccactcgaaacgggccagcaccatggccgccaccacgccctcccggcctgcggggcacaggctgcccggccgctgctgctaggccaggcctgtttcccacacagtgaacggggggctggcgggcctctcctggggcctggctttggctggaggggctagaaggcgagaggggctgggaaaggagtcttccctcccctttcctgaactgtccaggtccttctaggacacctgatccttccagtccctgggggctgtgacccatggccctgtgcagggtgcagggtgagtctccttccagtgccccagtttcttccaggtcacgccaggccaggccaggccaggtggggaaagggacaccttccggccctccccagtagctggctggagatggagcttcctgtgtcccagaactcggcgtccagctccactagggcctggatccccatcacagcttgggttagccccggtcccagcccaaactcaggctggaggcagccccgaggcctgtgcctttcccactccaccttctacagttgcttagccaataaacctttcctgggctggagagctgtcagcatca

SEQ ID NO: 163015 - DNA, 1393 bp, Homo sapiens
  Payload ID: 12122
  Gene Symbol: ODF3L2
  Gene Name: outer dense fiber of sperm tails 3-like 2
  Uniprot ID: Q3SX64
  ENST ID: ENST00000382696
  CDS Start-End: 134-895
ctgtggtcgtgggagggtgtggtgaggccgtgaaggtggggacggtgcctgggcctgtggccgccagagctgctgcggctcagaaggtagcaccaggccccgtgggtgctgtgggggccatcgcctgcccaccatggggaccctcagctgcgactccaccccacggctggccacagccccccttggccggcgagtgacggagggccagattccggagaccggcctgaggaagtcctgtgggacggccaccctggagaacgcaccacctcaggacaccagcccgggccccatctacttcttggaccccaaagtcacacgctttggccgcagctgcacccctgcctactccatgcagggccgggccaagtctcggggtccggaggtgacgccaggccctggggcctacagcccagagaaggtgccccctgtgcgccatcggacaccgccggctttcaccctgggctgccgcctccccctgaagcccctggacacctcagcccctgcccctaatgcctacaccatgccccctctgtggggctcacagatcttcaccaagcccagcagccccagctacacggtggtgggccgcaccccccccgcccgccccccgcaggatcctgctgagataccaggcccgggccagtacgacagcccggacgcaaacacctaccgccagcgcctgcctgccttcaccatgctggggcggccccgggccccgcgacccctggaggagacccccggccctggcgcccactgcccagagcaggtcaccgtgaacaaagccagggctccagcgttctctatgggcatccgccactcgaaacgggccagcaccatggccgccaccacgccctcccggcctgcggggcacaggctgcccggccgctgctgctaggccaggcctgtttcccacacagtgaacggggggctggcgggcctctcctggggcctggctttggctggaggggctagaaggcgagaggggctgggaaaggagtcttccctcccctttcctgaactgtccaggtccttctaggacacctgatccttccagtccctgggggctgtgacccatggccctgtgcagggtgcagggtgagtctccttccagtgccccagtttcttccaggtcacgccaggccaggccaggccaggtggggaaagggacaccttccggccctccccagtagctggctggagatggagcttcctgtgtcccagaactcggcgtccagctccactagggcctggatccccatcacagcttgggttagccccggtcccagcccaaactcaggctggaggcagccccgaggcctgtgcctttcccactccaccttctacagttgcttagccaataaacctttcctgggctggagagctgtcagcatca

SEQ ID NO: 163016 - DNA, 1156 bp, Homo sapiens
  Payload ID: 12123
  Gene Symbol: ODF4
  Gene Name: outer dense fiber of sperm tails 4
  Uniprot ID: Q2M2E3
  ENST ID: ENST00000328248
  CDS Start-End: 189-962
ctgaatgggttggggccttctcttggatcaagagtctcttatttgatcgaggtctgttattagacttcctcattctttctcagacctcaggctgcatggtggcagctgatgaaaatatccaaaagatgagaagagacaattgagtctggtgagggaaaggggagacagagggtgaagtggtgctcaagatggatgcagagtactctgggaatgagttccccaggtcagaaggagaaagagaccaacatcagagacctggaaaggaaaggaagagtggggaggcaggatggggcacaggtgagctgggacaagatgggagactgctgtcctccaccctctccctcagtagtaacaggtccttgggccagcgccagaactctccgctgccctttcaatggagaatcacacacagcttccgctggatggcccaggtgttggcctctgagctcagcctggttgcctttatcctactattggtcgtggccttctccaagaaatggctggacctctctaggagcctcttctaccagcgctggcccgtggatgtcagcaacagaatccacacatcagcccacgttatgtccatggggctcctgcacttttacaaatccaggagctgttctgacttagagaatgggaaagtcaccttcatcttctccaccctcatgctattccccattaacatctggatcttcgagttggaaaggaatgtatccatccccataggctggagctatttcattggttggctggtgcttatcctatacttcacctgcgcgatcctttgctacttcaaccataaaagtttctggagtctgattctgagccaccccagtggtgccgtgtcctgcagcagcagtttcggctcagtagaagaatctccaagggcacagacgatcacagacacccccatcacccaggagggagtcctggatcctgagcagaaggatacacatgtgtaatcttttctgaactcctggcaccaagttctgtccattcatctgaccccatctcctcatcctcccccagcccttgaataggttggtcctcatcattgcaaggaatgagaaagggaggattttgcactcctctgctttctccctgccttgattgagcttgagtgatgtggaataaattgtccgtctcttctttctca

SEQ ID NO: 163017 - DNA, 804 bp, Homo sapiens
  Payload ID: 12123
  Gene Symbol: ODF4
  Gene Name: outer dense fiber of sperm tails 4
  ENST ID: ENST00000584943
  CDS Start-End: 183-611
gggttggggccttctcttggatcaagagtctcttatttgatcgaggtctgttattagacttcctcattctttctcagacctcaggctgcatggtggcagctgatgaaaatatccaaaagatgagaagagacaattgagtctggtgagggaaaggggagacagagggtgaagtggtgctcaagatggatgcagagtactctgggaatgagttccccaggtcagaaggagaaagagaccaacatcagagacctggaaaggaaaggaagagtggggaggcaggatggggcacagtcaccttcatcttctccaccctcatgctattccccattaacatctggatcttcgagttggaaaggaatgtatccatccccataggctggagctatttcattggttggctggtgcttatcctatacttcacctgcgcgatcctttgctacttcaaccataaaagtttctggagtctgattctgagccaccccagtggtgccgtgtcctgcagcagcagtttcggctcagtagaagaatctccaagggcacagacgatcacagacacccccatcacccaggagggagtcctggatcctgagcagaaggatacacatgtgtaatcttttctgaactcctggcaccaagttctgtccattcatctgaccccatctcctcatcctcccccagcccttgaataggttggtcctcatcattgcaaggaatgagaaagggaggattttgcactcctctgctttctccctgccttgattgagcttgagtgatgtggaataaattgtccgtctcttctttctc

SEQ ID NO: 163018 - DNA, 1122 bp, Homo sapiens
  Payload ID: 12124
  Gene Symbol: OVCA2
  Gene Name: ovarian tumor suppressor candidate 2
  Uniprot ID: Q8WZ82
  ENST ID: ENST00000572195
  CDS Start-End: 113-796
gctccgaggcccgccctcggggcggtgctgacgttcggttccgccccgtgcattgtgcttccgctcggggaaagaccgcttccggtgcttccgtcgctccttgccgggcataatggccgcgcagcgacccctgcgggtcctgtgcctggcgggcttccggcagagcgagcggggcttccgtgagaagaccggggcgctgaggaaggcgctgcggggtcgcgccgagctcgtgtgcctcagcggcccgcacccggtccccgaccccccgggccccgagggcgccagatcagacttcgggtcctgccctccggaggagcagcctcgaggctggtggttttcagagcaggaggccgacgttttctccgcattggaagagcccgccgtctgcaggggcctggaggaatcactggggatggtggcacaggcactgaacaggctggggccttttgacggccttcttggtttcagccaaggggctgcgctagcagcccttgtgtgtgccctgggccaggcaggcgatccccgcttccccttgccacggtttatcctcttggtgtctggtttctgtccccggggcattgggttcaaggaatccatcctgcaaaggcccttgtcattgccttcgctccatgtttttggggacactgacaaagtcatcccctctcaggagagtgtgcaactggccagccaatttcccggagccatcaccctcacccactctggtggccacttcattccagcagctgcaccccagcgtcaggcctacctcaagttcttggaccagtttgcagagtgaaagatcaagaaatgtctctgctcctacatccagctcctctaggggcagcctccgtcatccatgccctcccaggaccctccactcactgctgtgagtgcgcctcaccagaaccagttaagagacaactatcaattcttgagacccaaattataagggccctgccctgtactgaagaaaaggggagcacaaggccttaatggacattgacttgtgaaaacgcaaacatgaatatggttggagagccctggattaggagggtgacatggggaaggcagaggctggcaccatggtgactgccacataataaagtggtgatttggattttg

SEQ ID NO: 163019 - DNA, 2243 bp, Homo sapiens
  Payload ID: 12125
  Gene Symbol: OVGP1
  Gene Name: oviductal glycoprotein 1, 120kDa
  Uniprot ID: Q12889
  ENST ID: ENST00000369732
  CDS Start-End: 57-2093
agggaagctcctataaagggctgcatctctggactcacagctatcagaccattgagatgtggaagctgttgctgtgggttgggctggttcttgtgctgaaacaccacgatggtgctgcccataaactcgtgtgttatttcaccaactgggcacacagtcggccaggccctgcctcgatcttgccccatgacctggacccctttctctgcacccacctgatatttgcctttgcctcaatgaacaacaatcagattgttgctaaggatctccaggatgagaaaattctctacccagagttcaacaaactaaaggagaggaacagagagctgaaaacactactgtccatcggcgggtggaactttggcacctcaagattcaccactatgttgtccacatttgccaaccgtgaaaagtttattgcttcagttatatcccttctgaggacacatgactttgatggtcttgaccttttcttcttatatcctggactaagaggcagccccatgcatgaccggtggacttttctcttcttaattgaagagctcctgtttgccttccggaaggaggcactgctcaccatgcgcccgaggctgctgctgtctgctgctgtttctggggtcccacacatcgtccaaacatcctatgatgtgcgctttctaggaagactcctggatttcatcaatgtcttgtcttatgacttacatggaagttgggaaaggttcacaggacataatagccccctcttctctctgcctgaagaccccaaatcttcggcatatgctatgaattattggagaaagcttggggcaccctcagagaagctcatcatggggatccccacctatggacgtacctttcgcctcctcaaagcctctaagaatgggttgcaggccagagcgatcggaccagcatctccagggaagtacaccaagcaagaaggcttcttggcttattttgagatttgttcctttgtctggggagcgaagaagcactggattgattaccagtatgtcccgtatgccaacaaggggaaagagtgggttggctatgacaatgccatcagcttcagttacaaggcatggtttataaggcgagagcattttgggggggccatggtgtggacattggacatggatgacgtcaggggcacgttctgtggcactggccctttcccccttgtctacgtattgaatgatatcctggtgcgggctgagttcagttcaacttctttaccacaattttggctgtcatctgctgtgaattcttcaagcactgaccctgaaaggctggctgtgaccacggcatggaccactgatagtaagattttgcccccaggaggagaggctggggtcactgagatccacggaaagtgtgaaaatatgactataacccctagaggtacaactgtgacccctacaaaggaaactgtatcccttggaaagcacactgtagctctaggagagaagactgagatcactggggcaatgaccatgacttctgtgggtcatcagtccatgacccctggagagaaggccctgacccctgtgggtcatcaatctgtgaccactggacagaagaccctgacctctgtgggttatcagtctgtgacccctggggaaaagaccctgacccctgtgggtcatcagtctgtgacccctgtgagtcatcagtctgtgagccctggaggaacgactatgacccctgtccattttcagactgagacccttagacagaatacagtggcccctagaaggaaggctgtggcccgtgaaaaggtgactgtcccctccagaaacatatcagtcacccctgaagggcagactatgcctttaagaggggagaatttgacttctgaggtgggcactcaccccaggatgggtaacttgggtcttcagatggaagctgaaaacaggatgatgctgtcctccagccccgtcatccagctcccggaacaaactcctctagcttttgacaaccgctttgttcccatctatggaaaccattcctctgtcaactcagtaacccctcaaacaagtcctctttctctaaaaaaagaaatcccagaaaactctgctgtggatgaagaagcctaagcccctctggtgtcagaaaccagggaaaacccttgtcttttcttctaagtgacatgttggaagccttctcatcccggggcaaagcaggcatcaaaaccagaataggccaatctcttttccattaaataaactgtaaacacaagaacccac

SEQ ID NO: 163020 - DNA, 3405 bp, Homo sapiens
  Payload ID: 12126
  Gene Symbol: OVCH1
  Gene Name: ovochymase 1
  Uniprot ID: Q7RTY7
  ENST ID: ENST00000318184
  CDS Start-End: 1-3405
atgggcctgctggccagtgctggtttgttgctgttgctggtcatcggccaccccagaagcctaggactgaagtgtggaattcgcatggtcaacatgaaaagtaaggaacctgccgtgggatctagattcttctctagaattagtagttggagaaattcaacagtgactggacatccatggcaggtctccctaaaatcagatgagcaccacttctgtggaggaagcttgattcaagaagatcgggttgttacagcagcacactgcctggacagcctcagtgagaagcagctgaagaatataactgtgacttctggggagtacagcctctttcagaaggataagcaagaacagaatattcctgtctcaaaaattattacccatcctgaatacaacagccgtgaatatatgagtcctgatattgcactgctgtatctaaaacacaaagtcaagtttggaaatgctgttcagccaatctgtcttcctgacagcgatgataaagttgaaccaggaattctttgcttatccagtggatggggcaagatttccaaaacatcagaatattcaaatgtcctacaagaaatggaacttcccatcatggatgacagagcgtgtaatactgtgctcaagagcatgaacctccctcccctgggaaggaccatgctgtgtgctggcttccctgattggggaatggacgcctgccagggggactctggaggaccactggtttgtagaagaggtggtggaatctggattcttgctgggataacttcctgggtagctggttgtgctggaggttcagttcccgtaagaaacaaccatgtgaaggcatcacttggcattttctccaaagtgtctgagttgatggattttatcactcaaaacctgttcacaggtttggatcggggccaacccctctcaaaagtgggctcaaggtatataacaaaggccctgagttctgtccaagaagtgaatggaagccagagaggaaagggtattttagacatggaaaagcaagttggatgtgatcatgactatgtatctttacgatcaagcagtggagtgctttttaatcagagatctctcatggaagacgatggaaaacaaaacaaacgtgtctgtggaaaaatattgccttcaccattgctggcagagaccagtgaggccatggttccatttgtttctgatacagaagacagtggcagtggctttgagcttaccgttactgctgtacagaagtcagaagcagggtcaggttgtgggagtctggctatattggtagaagaagggacaaatcactctgccaagtatcctgatttgtatcccagtaacacaaggtgtcattggttcatttgtgctccagagaagcacattataaagttgacatttgaggactttgctgtcaaatttagtccaaactgtatttatgatgctgttgtgatttacggtgattctgaagaaaagcacaagttagctaaactttgtggaatgttgaccatcacttcaatattcagttctagtaacatgacggtgatatactttaaaagtgatggtaaaaatcgtttacaaggcttcaaggccagatttaccattttgccctcagagtctttaaacaaatttgaaccaaagttacctccccaaaacaatcctgtatctaccgtaaaagctattctgcatgatgtctgtggcatccctccatttagtccccagtggctttccagaagaatcgcaggaggggaagaagcctgcccccactgttggccatggcaggtgggtctgaggtttctaggcgattaccaatgtggaggtgccatcatcaacccagtgtggattctgaccgcagcccactgtgtgcaattgaagaataatccactctcctggactattattgctggggaccatgacagaaacctgaaggaatcaacagagcaggtgagaagggccaaacacataatagtgcatgaagactttaacacactaagttatgactctgacattgccctaatacaactaagctctcctctggagtacaactcggtggtgaggccagtatgtctcccacacagcgcagagcctctattttcctcggagatctgtgctgtgaccggatggggaagcatcagtgcagatggtggcctagcaagtcgcctacagcagattcaagtgcatgtgttagaaagagaggtctgtgaacacacttactattctgcccatccaggagggatcacagagaagatgatctgtgctggctttgcagcatctggagagaaagatttctgccagggagactctggtgggccactagtatgtagacatgaaaatggtccctttgtcctctatggcattgtcagctggggagctggctgtgtccagccatggaagccgggtgtatttgccagagtgatgatcttcttggactggatccaatcaaaaatcaatggtcctgcttcacttcagacaaataataaatgcaaaaccttaaaacaacaattgccaccacccacaccttcaccagacagtgcatcttggccaggttgttgctctgaagcagagctagaaaagcctagaggcttttttcccacaccacggtatctactggattatagaggaagactggaatgttcttgggtgctcagagtttcagcaagcagtatggcaaaatttaccattgagtatctgtcactcctggggtctcctgtgtgtcaagactcagttctaattatttatgaagaaagacacagtaagagaaagacggcaggtggattacatggaagaagactttactcaatgactttcatgagtcctggaccgctggtgagggtgacattccatgcccttgtacgaggtgcatttggtataagctatattgtcttgaaagtcctaggtccaaaggacagtaaaataaccagactttcccaaagttcaaacagagagcacttggtcccttgtgaggatgttcttctgaccaagccagaagggatcatgcagatcccaagaaattctcacagaactactatgggttgccaatggagattagtagcccctttaaatcacatcattcagcttaatattattaacttcccgatgaagccaacaacttttgtctgtcatggtcatctgcgtgtttacgaaggatttggaccaggaaaaaaattaatagcttcattcgctggaactctggcaatgatactgacaaaagacatattaaaaagagaaaaactgaattttattaacacatatatcatgcatatatgggaaaattcagtgtatgataatgtaagaagtgttggaaaaagaaaacagaagaaatttgcatcaaatttaagttatagtatggaggctgagaagtccaggatccaggtgccagcagatttggtgcctgctaagggctcactttctggttcttag

SEQ ID NO: 163021 - DNA, 603 bp, Homo sapiens
  Payload ID: 12126
  Gene Symbol: OVCH1
  Gene Name: ovochymase 1
  ENST ID: ENST00000539117
  CDS Start-End: 1-365
gtaaaataaccagactttcccaaagttcaaacagagagcacttggtcccttgtgaggatgttcttctgaccaagccagaagggatcatgcagatcccaagaaattctcacagaactactatgggttgccaatggagattagtagcccctttaaatcacatcattcagcttaatattattaacttcccgatgaagccaacaacttttgtctgtcatggtcatctgcgtgtttacgaaggatttggaccaggaaaaaaattaatagctcatttacatggctccaagaaagagtttatcttgatatccagtgctgcttacctgactgtgcattttaagactgatgagtctgagagaaagaggttttaagcttattttagaagagatgattcaggagcaatcacagaagagcaatattgagacccaatttcctatcagtggagagttttcactactaatctggtgccagaggaagatgataaaataaattgactttacatgtatgactgctggatggggaacaactgaacttcacatttttctctatttttaatacgaataatggtgggaaaagtcttttaaaataatggatctaaaggtgacttcc

SEQ ID NO: 163022 - DNA, 446 bp, Homo sapiens
  Payload ID: 12126
  Gene Symbol: OVCH1
  Gene Name: ovochymase 1
  ENST ID: ENST00000537054
  CDS Start-End: 1-243
agagagcacttggtcccttgtgaggatgttcttctgaccaagccagaagggatcatgcagatcccaagaaattctcacagaactactatgggttgccaatggagattagtagcccctttaaatcacatcattcagcttaatattattaacttcccgatgaagccaacaacttttgtctgtcatggtcatctgcgtgtttacgaaggatttggaccaggaaaaaaattaataggagaatgttgatgagcactgagctttcttggttcctaagccaattcagcaccaagaagaccacagcttcttgtggggagactgcagtatctatgaaaatgatgtatacttctatctttcttgccctacagaacacctgttaccatgcactgcctcatgaggttgttttgagaattaaataagagaaggcatgttaatcaatactaagaaaccaa

SEQ ID NO: 163023 - DNA, 1921 bp, Homo sapiens
  Payload ID: 12127
  Gene Symbol: OVCH2
  Gene Name: ovochymase 2 (gene/pseudogene)
  ENST ID: ENST00000533663
  CDS Start-End: 28-1725
tttcagggaaaaactatgagtctcaaaatgcttataagcaggaacaagctgattttactactaggaatagtcttttttgaacgaggtaaatctgcaactctttcgctccccaaagctcccagttgtgggcagagtctggttaaggtacagccttggaattattttaacattttcagtcgcattcttggaggaagccaagtggagaagggttcctatccctggcaggtatctctgaaacaaaggcagaagcatatttgtggaggaagcatcgtctcaccacagtgggtgatcacggcggctcactgcattgcaaacagaaacattgtgtctactttgaatgttactgctggagagtatgacttaagccagacagacccaggagagcaaactctcactattgaaactgtcatcatacatccacatttctccaccaagaaaccaatggactatgatattgcccttttgaagatggctggagccttccaatttggccactttgtggggcccatatgtcttccagagctgcgggagcaatttgaggctggttttatttgtacaactgcaggctggggccgcttaactgaaggtggcgtcctctcacaagtcttgcaggaagtgaatctgcctattttgacctgggaagagtgtgtggcagctctgttaacactaaagaggcccatcagtgggaagacctttctttgcacaggttttcctgatggagggagagacgcatgtcagggagattcaggaggttcactcatgtgccggaataagaaaggggcctggactctggctggtgtgacttcctggggtttgggctgtggtcgaggctggagaaacaatgtgaggaaaagtgatcaaggatcccctgggatcttcacagacattagtaaagtgcttccctggatccacgaacacatccaaactggtaatcggagaaagagctccagagcctggtgcagtgagcaggatgtcatagtcagcggggctgaggggaagctgcacttcccagaaagcctccacctatattatgagagcaagcaacggtgtgtctggaccctgctggtaccagaggaaatgcatgtgttgctcagtttttcccacctagatgttgagtcttgtcaccacagttacctgtcaatgtattctttagaagacagacccattggaaaattttgtggagaaagcctcccttcatccattcttattggctctaattctctaaggctgaaattcgtctctgatgccacagataatgcagctgggtttaatcttacctataaagctcttaaaccaaactacattcctgattcaggttgcagttacttaactgtcctttttgaagaaggtctcatacagagtctaaactatcctgaaaactacagtgacaaggctaactgtgactggatttttcaagcctccaaacatcacctaattaagctttcatttcagagtctggaaatagaagaaagtggagactgcacttccgactatgtgacagtgcacagcgatgtagaaaggaagaaggaaatagctcggctgtgtggctatgatgtccccacccctgtgctgagcccctccagcatcatgctcatcagcttccaatcagatgaaaacgggacctgcaggggctttcaggctacagtctccttcattcctaaagcagtatacccagatttaaacatctccatatcagaggatgaatcaatgtttctggagacatgagatgtgccaaatggagaaaccaatgtttctggccaaggggcaccagtgactgtcagtaaaccaccagaagctagaggagaggcttggggcagactcctcgtcacagccctcagacagagccatccctgctgacacgttgatcttggacttctagcctccagaactatgagacaataaatttctgttgttctaagcc

SEQ ID NO: 163024 - DNA, 1730 bp, Homo sapiens
  Payload ID: 12127
  Gene Symbol: OVCH2
  Gene Name: ovochymase 2 (gene/pseudogene)
  ENST ID: ENST00000612000
  CDS Start-End: 1-1698
atgcttataagcaggaacaagctgattttactactaggaatagtcttttttgaacgaggtaaatctgcaactctttcgctccccaaagctcccagttgtgggcagagtctggttaaggtacagccttggaattattttaacattttcagtcgcattcttggaggaagccaagtggagaagggttcctatccctggcaggtatctctgaaacaaaggcagaagcatatttgtggaggaagcatcgtctcaccacagtgggtgatcacggcggctcactgcattgcaaacagaaacattgtgtctactttgaatgttactgctggagagtatgacttaagccagacagacccaggagagcaaactctcactattgaaactgtcatcatacatccacatttctccaccaagaaaccaatggactatgatattgcccttttgaagatggctggagccttccaatttggccactttgtggggcccatatgtcttccagagctgcgggagcaatttgaggctggttttatttgtacaactgcaggctggggccgcttaactgaaggtggcgtcctctcacaagtcttgcaggaagtgaatctgcctattttgacctgggaagagtgtgtggcagctctgttaacactaaagaggcccatcagtgggaagacctttctttgcacaggttttcctgatggagggagagacgcatgtcagggagattcaggaggttcactcatgtgccggaataagaaaggggcctggactctggctggtgtgacttcctggggtttgggctgtggtcgaggctggagaaacaatgtgaggaaaagtgatcaaggatcccctgggatcttcacagacattagtaaagtgcttccctggatccacgaacacatccaaactggtaatcggagaaagagctccagagcctggtgcagtgagcaggatgtcatagtcagcggggctgaggggaagctgcacttcccagaaagcctccacctatattatgagagcaagcaacggtgtgtctggaccctgctggtaccagaggaaatgcatgtgttgctcagtttttcccacctagatgttgagtcttgtcaccacagttacctgtcaatgtattctttagaagacagacccattggaaaattttgtggagaaagcctcccttcatccattcttattggctctaattctctaaggctgaaattcgtctctgatgccacagataatgcagctgggtttaatcttacctataaagctcttaaaccaaactacattcctgattcaggttgcagttacttaactgtcctttttgaagaaggtctcatacagagtctaaactatcctgaaaactacagtgacaaggctaactgtgactggatttttcaagcctccaaacatcacctaattaagctttcatttcagagtctggaaatagaagaaagtggagactgcacttccgactatgtgacagtgcacagcgatgtagaaaggaagaaggaaatagctcggctgtgtggctatgatgtccccacccctgtgctgagcccctccagcatcatgctcatcagcttccaatcagatgaaaacgggacctgcaggggctttcaggctacagtctccttcattcctaaagcagtatacccagatttaaacatctccatatcagaggatgaatcaatgtttctggagacatgagatgtgccaaatggagaaaccaatgtttctgg

SEQ ID NO: 163025 - DNA, 3034 bp, Homo sapiens
  Payload ID: 12128
  Gene Symbol: OVOL1
  Gene Name: ovo-like zinc finger 1
  Uniprot ID: O14753
  ENST ID: ENST00000335987
  CDS Start-End: 353-1156
ccgccgcgagccaataaagcgtgaacccgtccgtccggctcgcactttaagacttcccgagcggcggcggggacgccagtcgagccgggagacgcttacctgccgcttccccgcgccgcccggtgcacctggccgcaagggacctcgttctcagggaagacggcgacattccgcggaggtggaaccgccgcgcgccgtccgggctcggaccttccccggaacgtgggggcgccttagcgactccttccctgttgtgcccccgttcccggcgttcagcccggccccgcaaaggtgggacggctcccggcttcagttacggaagcggcccgtgtccagcgacgagggttcgaaaatgccccgcgcgttcctggtgaagaagccgtgcgtctccacgtgcaagaggaactggagcgagctccccgacgaggagcgcggcgagatctacgtgccagtcagcctgggcttctgcccaccacagccctaccgggagccggaaccctctgtggccgaacccccttcctgcccgctggctttgaacatgagccttcgagactctagctacagcatggcccccgggccctgtgtggtggcccagctgccctctgaagacatgggccacttgacagacccccagagcagagaccatggcttcctgcgcaccaagatgaaggtgacccttggggacagtcccagtggagacctgttcacctgccgtgtctgccagaaggccttcacctaccagcgcatgctgaaccgccacatgaagtgtcacaacgacgtcaagaggcacctctgcacgtactgcgggaagggcttcaatgacaccttcgacctcaagagacacgtccgaactcacactggcgtgcggccctacaagtgcagcctgtgtgacaaggccttcacgcagcgctgctctctggagtctcacctcaagaagatccatggtgtgcagcagaagtacgcgtacaaggagcggcgggccaagctgtacgtgtgtgaggagtgcggctgcacatctgagagccaggagggccacgtcctgcacctgaaggagcaccaccctgacagcccgctgctgcgcaagacctccaagaaggtggccgtggcactacagaacactgtcacttccctgctgcagggcagcccccacctgtgagtggctcgagccctgggggtgctcctggaagccccaagagcatccaggattgcctcccagctgcctggccagcccaccctcctgcaacctctcacccgaacaccagtgatcaggactggagcccccgtgccttggtctcccccctgggcacacgtgctcactcaggcccagcaatgacctctgctcatttttgcatttttgacttatgggccgaggctgttctgagcctgggaagatgtacctatgtcaagagaagggatgaggccaaggctgccttcaattagaagcagccgcccacagagacaggcactgtgtgcctggcagcaggacttcctacccagaggaggttcgagctaggatcccactgcccccgcctctcagcacagggcaggggctgcaggtccccagtggacatcagagtcaaaagcactggcaaagggtacccctgcaaacaactgtggtgggggctggcagcagaccccccacctggcagggcttctaatgctcagggttctggagggctctgtccttccggcaaggagaggcacacatgtgtgcccagccgtgtgtgtgcgtgtgcttgtgtgtgtgcactgctgtgtgtgtgtgcacgcacaggaagcctttccacatatcacctcatttctaagaaataaactacaaggtgccaagaaggttttatttccttttattttttaaagatgacaaatgtacagatgttaatatatttttggtgccaatggcgatgtttttaagagtgggatggagctggcttttctccattcccgtgcgcttctatttatcctggacatttcaaacctcctctgtgccttggctctgggcgggggctgccccaacccacccccgttctttgtacgtgctgagacagccactagaagatcttcctccagcggcgccctggacggctgctcctgcgaacagcccatggcatcttctgctcttccctcccggctctgccctgcacatcctgttgagccaagccccagtgacccggagagctggcctgatgctgagagtgtgtcctcctggggctttagggggcaggaaggtgggacgaatgacgatgcccatccactacctgaagcactaggacactcttgcagggccaggctggaagaccggcccttttcttggttgagtcaaaagccttagcacagtggcaaaaaatgggacagaatgatgaccagcacctcagaaacttccagagggaggagaggatttgatggctaccaaattgtatctgttgccttttttctgactttttcacctgaccaggctggggtttggagtggctgtggggagacccgtcctggctggctggctggctcccttgctcccttgctgcagctgggaaaggggttctgggtgtaaagaggtgtgcgtcttgtgggccaaagggaaaaacaggcaggggtcagagccagcctgccagaggcaaatgcaaaagaggtccccagaacacagccagctgggcagccccttaaagccaaaccccacctgaagcagaaccactttggcctcccctgcccaaaatgggtagtgtctacacgtccccgggctcaggctcaggcccagccctgggctgacctgagaggaaggctccttcctggactgccctctgaaatgtgtatagattgattctaaaatctcttgtttcacttgactttagagtgtctgggacgctgctgtattctgaaagtcacatagcacacagtaatgttatctggaagctctgtttttgtttacatttctgtatccctgggttgactgccaatccgaggccgtcatgaagctctgtgttgtctgttttattttataaccttcctctcaactattaaaattagagatctaatgttt

SEQ ID NO: 163026 - DNA, 1774 bp, Homo sapiens
  Payload ID: 12128
  Gene Symbol: OVOL1
  Gene Name: ovo-like zinc finger 1
  ENST ID: ENST00000532448
  CDS Start-End: 409-1026
gaattcagagggaccagcccaggtggggcaggcagaaaactccggagggataattggcagggcagttcggtcctcccagttccgctaagacacaaattactcagcgggcagtggcgcttggctggcatcacctgcaattaccttaatagggcgggaaggcggtgcagcagtggtggtcggggcagccccgctctgctgcatgcctgcgatgggagggacggagtctccaggttccagccgtctcatggctagggaagtttccagaaacccgctggaccctctcttctccaccaagcctctcacctgtctgttctctccccagtcagcctgggcttctgcccaccacagccctaccgggagccggaaccctctgtggccgaacccccttcctgcccgctggctttgaacatgagccttcgagactctagctacagcatggcccccgggccctgtgtggtggcccagctgccctctgaagacatgggccacttgacagacccccagagcagagaccatggcttcctgcgcaccaagatgaaggtgacccttggggacagtcccagtggagacctgttcacctgccgtgtctgccagaaggccttcacctaccagcgcatgctgaaccgccacatgaagtgtcacaacgacgtcaagaggcacctctgcacgtactgcgggaagggcttcaatgacaccttcgacctcaagagacacgtccgaactcacactggcgtgcggccctacaagtgcagcctgtgtgacaaggccttcacgcagcgctgctctctggagtctcacctcaagaagatccatggtgtgcagcagaagtacgcgtacaaggagcggcgggccaagctgtacgtgtgtgaggagtgcggctgcacatctgagagccaggagggccacgtcctgcacctgaaggagcaccaccctgacagcccgctgctgcgcaagacctccaagaaggtggccgtggcactacagaacactgtcacttccctgctgcagggcagcccccacctgtgagtggctcgagccctgggggtgctcctggaagccccaagagcatccaggattgcctcccagctgcctggccagcccaccctcctgcaacctctcacccgaacaccagtgatcaggactggagcccccgtgccttggtctcccccctgggcacacgtgctcactcaggcccagcaatgacctctgctcatttttgcatttttgacttatgggccgaggctgttctgagcctgggaagatgtacctatgtcaagagaagggatgaggccaaggctgccttcaattagaagcagccgcccacagagacaggcactgtgtgcctggcagcaggacttcctacccagaggaggttcgagctaggatcccactgcccccgcctctcagcacagggcaggggctgcaggtccccagtggacatcagagtcaaaagcactggcaaagggtacccctgcaaacaactgtggtgggggctggcagcagaccccccacctggcagggcttctaatgctcagggttctggagggctctgtccttccggcaaggagaggcacacatgtgtgcccagccgtgtgtgtgcgtgtgcttgtgtgtgtgcactgctgtgtgtgtgtgcacgcacaggaagcctttccacatatcacctcatttctaagaaataaactacaaggtgccaagaaggttttatttccttttattttttaaagatgacaaatgtacagatgttaatatatttttggtgccaatggcgatg

SEQ ID NO: 163027 - DNA, 1555 bp, Homo sapiens
  Payload ID: 12129
  Gene Symbol: OVOL2
  Gene Name: ovo-like zinc finger 2
  Uniprot ID: Q9BRP0
  ENST ID: ENST00000278780
  CDS Start-End: 244-1071
ttttccccggcgtggtctcactcgcgatttaaggcataggtgtcgccgagccgggaggctgggagtcgccaggcgtgcgggggagaggcctgggccgcgccgcggcggggggtggaggaagagggcaggcgaggcgggaaggtgggctctggccgccgggagccggggacggagccgccgccgttgcccctagcggggagcagccgggaggagggggccgcagtcgggagaggggaccccaccatgcccaaagtcttcctggtgaagaggaggagcctgggggtctcggtccgcagctgggatgagctcccggatgagaaaagggcagacacctacatcccagtgggcctaggccgcctgctccacgacccccccgaggactgccgcagcgacggcggcagcagcagcggcagcggcagcagcagcgcgggggagcctggaggagcagagagcagctcgtccccgcacgcccccgagagcgaaacccccgagcccggcgacgccgagggccccgatggacacctggcgaccaagcagcgcccggtcgccagatcgaaaatcaagttcaccacaggcacgtgcagcgactcggtggttcacagctgtgacctgtgtggcaagggcttccgtctgcagcgcatgctgaaccgtcacctcaagtgccacaaccaggtgaaaagacacctgtgcaccttctgcggcaagggcttcaacgacaccttcgacctgaagaggcacgtccgcacacacacaggcattcgtccctacaaatgcaacgtctgcaataaagccttcacccagcgctgctctctggagtcccacctgaagaaaatccatggggtgcagcagcagtatgcctataagcagcggcgggacaagctctacgtctgcgaggattgcggctacacgggccccacccaggaggacctgtacctgcacgtgaacagtgcccatccgggcagctcgtttctcaaaaagacatctaaaaaactggcagcccttctgcagggcaagctgacatccgcacaccaggagaataccagcctgagtgaggaggaggagaggaagtgaggagaaggaaggggaggacagacgttcacactgccacgtatgtctacgtggatttttggttttcagcttcccccaccccactggctcttcttaattagaagtgaccagttcacctctgtgtccttttgaaacatcagcagtagggtccattccaagattgtcagttgccgttagtgacgtcaggccctgtaacctgtgtcctgtctggcgcagttgctcacattcaccaaagtttgttttcatgatcctgatggccaagaacaccgtgtgggatttttttttcccccaaggattttcacacacggaaggagaggtatttcttagagagatcatcattttatggtgccttgaaataaaaatacttctacttgaaatgctgtttaagcaaggcaagtgaattttgttattctgaaagagtttacagaaactattttaataaatgaaatgttcttgtgaagcttttaaaagcaaaatggaacattga

SEQ ID NO: 163028 - DNA, 695 bp, Homo sapiens
  Payload ID: 12130
  Gene Symbol: OVOL3
  Gene Name: ovo-like zinc finger 3
  Uniprot ID: O00110
  ENST ID: ENST00000585332
  CDS Start-End: 1-645
atgccccgcgccttcctggtcaggagtcggcgtccacagccccccaactggggccatctgcctgaccagctccggggagatgcctatatcccaggtgggcccctcactgtgcctggaggtaaggggcaggagagacgcagtgtcaccatctggcttttctcctcagactgcagcagcctgggggggccaccggcacaacagtcgtccagtgtcagggatccgtggacagcgcagcccacacagggcaacctgacctctgctcccaggggccctgggacgctgggctgcccgctctgccctaaggccttccctctgcagcgcatgctgacaaggcacctcaagtgccacagccccgtgcgccgccacctgtgccgctgttgtggcaagggctttcatgacgccttcgatctcaagcgccacatgaggactcacactgggatccggcccttccgctgcagtgcttgcgggaaagcgtttacgcagcgctgctccctggaagctcaccttgctaaggtgcatggacagccggccagctacgcttaccgtgagcgccgcgagaagctgcacgtgtgcgaggactgcggcttcaccagctcccggcccgacacctacgcacagcaccgcgccctgcaccgcgcagcctgatacggtgtgccagcgtcctccccacgaggcaaataaacacagaaaactca

SEQ ID NO: 163029 - DNA, 675 bp, Homo sapiens
  Payload ID: 12130
  Gene Symbol: OVOL3
  Gene Name: ovo-like zinc finger 3
  ENST ID: ENST00000633214
  CDS Start-End: 53-625
gtctgacagcaggtggaagcagcccctgtgtgtggagagccttccggagggcatgccccgcgccttcctggtcaggagtcggcgtccacagccccccaactggggccatctgcctgaccagctccggggagatgcctatatcccagactgcagcagcctgggggggccaccggcacaacagtcgtccagtgtcagggatccgtggacagcgcagcccacacagggcaacctgacctctgctcccaggggccctgggacgctgggctgcccgctctgccctaaggccttccctctgcagcgcatgctgacaaggcacctcaagtgccacagccccgtgcgccgccacctgtgccgctgttgtggcaagggctttcatgacgccttcgatctcaagcgccacatgaggactcacactgggatccggcccttccgctgcagtgcttgcgggaaagcgtttacgcagcgctgctccctggaagctcaccttgctaaggtgcatggacagccggccagctacgcttaccgtgagcgccgcgagaagctgcacgtgtgcgaggactgcggcttcaccagctcccggcccgacacctacgcacagcaccgcgccctgcaccgcgcagcctgatacggtgtgccagcgtcctccccacgaggcaaataaacacagaaaactca

SEQ ID NO: 163030 - DNA, 4426 bp, Homo sapiens
  Payload ID: 12131
  Gene Symbol:
  Gene Name: OVOS2
  ENST ID: ENST00000621609
  CDS Start-End: 1-4302
atgacgggttcccatttgtcccatgactcatggcagtatgttctgctgattccttctgttctacaagaaggctctttggataaagcttgtgcccagctttttaatctcactgaatctgttgttttgacggtctccctcaactatggtgaggtccagaccaaaatatttgaagaaaatgttactggagaaaatttcttcaaatgcatcagctttgaggttcctcaggccagatctgacccactggcatttattacattttctgctaaaggagccactctcaacctggaagagaggagatctgtggcaatcagatccagagagaatgtggtctttgtacagactgataaacccacctacaagcctggacagaaagatgtaaatggcatcgctcagtttttcttggacacatatacgtttacatacccaaatatcactttgaaagatcctcaaaacaatcggatttttcaatggcaaaatgtgacttctttccgaaatattacccaactctcgttccaactgatttcagaaccaatgtttggagattactggattgttgtgaaaagaaactcaaggaagacagtgacacaccaatttgctgttaaaagatatgtgctgcccaagtttgaagttacggtcaatgcaccacaaacagtaactatttcagatgatgaattccaagtggatgtatgtgctaagtacacctttggccaacctgtgcaagggaaaacccaaatccgggtgtgcagagagtatttttcttcaagcaattgtgagaaaaatgacaatgaaatatgtgagcaatttattgcacagttggaaaatggttgtgtttctcaaattgtaaatacaaaagtcttccaactctaccgttcgggattgttcatgacatttcatgtcgctgtaattgttacagaatttgggacaggaaattactgtatgcagatcagtgagaagacctcagtttttatcactcaattgcttggaactgtaaactttgagaacatggatactttctacagaagagggatttcttattttggaactcttaaattttcggatcccaataatgtacctatggtgaacaagttgttgcaactggagctcaatgatgaatttataggaaattatactacggacgagaatggcgaagctcaattttccattgacacttcagacatatttgatccagagttcaacctaaaagccacatatgttcgacctaagagctgctatcttcccagctggttgacgcctcagtacttggatgctcacttcttagtctcacgcttttactcccgaacgaacagcttcctgaagattgttccagaaccaaagcagcttgaatgtaatcaccagaaggttgttactgtgcattactccctaaacagtgaagcatatgaggatgattccaatgtaaagttcttctatttggtaagtctcagtcatgattcaggaaactttcagcatcgtatctcttcgtctcctatttacacagcctggaatggaaacttctcgttcccactcagcatcagtgctgatctggctcctgcagccgtcctgtttgtctacacccttcaccccagtggggaaattgtggctgacagtgtcagattccaggttgacaagtgctttaaacacaaggttaacataaagttctctaacgagcagggcttacctggttccaatgctagtctctatcttcaagcggcgcctgtcttattctgtgccctcggggctgtggatgggaacgtccttctactgaaatctgaacaacagctgtcagctgaaagtgtgtataacatggttccaagtatagagccgtatggttatttctaccatggcctcaatcttgatgatggcaaggaagacccttgcattcctcagagggatatgttctacaatggtttatattacacacctgtaagcaactatggggatggagatatctataatattgtcaggaacatgggtctcaaagtctttaccaatctccattaccgaaaaccagaagtatgtgtgatggagagaaggctgccactccctaagccgctttatctagaaacagaaaattatggtccaatgcatagtgttccgtctagaattgcatgtagaggggagaatgctgactatgtagaacaggctataattcaaacagtaagaacaaacttcccagagacatggatgtgggacctcgtcagtgtcgattcctcaggctctgccaatctttcgttcctcattcctgatacgataacccaatgggaggcaagtggcttttgtgtgaatggcgacgttggatttggcatttcctctacaaccactctagaagtctcccaacctttctttattgaaattgcctcacccttttcggttgttcaaaatgaacaatttgatttgattgtcaatgccttcagctacctgaatacatgtgtagagatttctgttcaagtggaggagtctcagaattatgaagcaaatattaatacctggaaaatcaatggcagtgaggttattcaagctggagggaggaaaacaaacatctggactattatacctaagaaattgggtaaagtgaatatcactgtagttgctgagtccaaacaaagcagtgcttgcccaaatgaaggaatggagcagcaaaagctaaactggaaagacactgtggtcaaaagcttcttagtagagcctgaaggtattgaaaaggaaaggacccagagtttccttatctgtacagaaggtgccaaagcctccaagcagggagttttggacttgccaaatgatgtagtagaagggtcagccagaggctttttcactgttgtgggggatattctaggacttgccatgcagaatctggttgttctccaaatgccctatggaggtggagagcagaatgctgccctactagcatctgatacttatgttctggactatctgaaatctactgagcaactgacagaggaagttcaatctaaggctttctttctcttatctaatggttatcaaaggcaattatctttcaaaaactctgatggttcctatagtgtgttttggcagcagaatcagaaaggaagcatatggctcagtgctcttacttttaagacattggagagaatgaaaaaatttgtattcattgatgaaaatgttcaaaaacagaccttaatctggctttcaagccaacagaaaacaagcggctgctttaagaatgatggccagcttttcaaccacgcctgggagggtggagatgaagaggacatttcactcactgcatatgttgttgggatgttctttgaagctgggctcaattccacttttcctgctctacgaaacgcactcttttgccttgaagcggcattggacagtggtgtcactaatggctacaatcatgcaattctagcttatgcttttgccttagctggaaaagagaagcaagtggaatctttactccaaaccctggatcaatctgccacaaaactaaataatgtcatctactgggaaagagaaaggaaacccaagacagaagaatttccatcctttattccctgggcaccttctgctcagactgagaagagttgctatgtgctgttggctgtcatttcccggaaaattcctgacctcacctatgctagtaagattgtgcagtggcttgcccaacagatgaattcccatggaggcttttcttccaaccaggtgattaatgtaggcctgatattaatagcaatattgggggaagaggggctcttctctaagaatcaaaacactgtcacctttagcagtgaaggatccagtgagattttccaggttaacggtcataaccgcctactggtccaacgttcagaagtaacacaggcacctggacaatacacagtagatgtggaaggacgcggttgtacatttatccaggccacccttaagtacaatgttctcctacctaagaaggcatctggattttctctttccttggaaatagtaaagaactactctttgactgtttttgacctcacagtgaacctcaaatacactggaattcgcaataaatccagtatggtggttatagatgtaaaaatgctatcaggatttactccaaccatgtcatccattgaagagcttgaaaacaagggccaagtgatgaagactgaagtcaagaatgaccatgttcttttctacttggaaaatgtttttggtcgagcagacagtttcactttttctgttgagcagagcaaccttgtgttcaacattcagccagccccaggcatggtctacgattactacgaaaaagatggagaagcatttcttttaacaaactgattcttctgtatcaaacctggaaaaaaatcatgaaccatctgacatcgtgaacagtctgcagtgggctatggtttcttgacaagtcttatttccttatcatcccattaaatgttgtcattttgca

SEQ ID NO: 163031 - DNA, 4299 bp, Homo sapiens
  Payload ID: 12131
  Gene Symbol:
  Gene Name: OVOS2
  ENST ID: ENST00000632817
  CDS Start-End: 1-4299
atgacgggttcccatttgtcccatgactcatggcagtatgttctgctgattccttctgttctacaagaaggctctttggataaagcttgtgcccagctttttaatctcactgaatctgttgttttgacggtctccctcaactatggtgaggtccagaccaaaatatttgaagaaaatgttactggagaaaatttcttcaaatgcatcagctttgaggttcctcaggccagatctgacccactggcatttattacattttctgctaaaggagccactctcaacctggaagagaggagatctgtggcaatcagatccagagagaatgtggtctttgtacagactgataaacccacctacaagcctggacagaaagatgtaaatggcatcgctcagtttttcttggacacatatacgtttacatacccaaatatcactttgaaagatcctcaaaacaatcggatttttcaatggcaaaatgtgacttctttccgaaatattacccaactctcgttccaactgatttcagaaccaatgtttggagattactggattgttgtgaaaagaaactcaaggaagacagtgacacaccaatttgctgttaaaagatatgtgctgcccaagtttgaagttacggtcaatgcaccacaaacagtaactatttcagatgatgaattccaagtggatgtatgtgctaagtacacctttggccaacctgtgcaagggaaaacccaaatccgggtgtgcagagagtatttttcttcaagcaattgtgagaaaaatgacaatgaaatatgtgagcaatttattgcacagttggaaaatggttgtgtttctcaaattgtaaatacaaaagtcttccaactctaccgttcgggattgttcatgacatttcatgtcgctgtaattgttacagaatttgggacaggaaattactgtatgcagatcagtgagaagacctcagtttttatcactcaattgcttggaactgtaaactttgagaacatggatactttctacagaagagggatttcttattttggaactcttaaattttcggatcccaataatgtacctatggtgaacaagttgttgcaactggagctcaatgatgaatttataggaaattatactacggacgagaatggcgaagctcaattttccattgacacttcagacatatttgatccagagttcaacctaaaagccacatatgttcgacctaagagctgctatcttcccagctggttgacgcctcagtacttggatgctcacttcttagtctcacgcttttactcccgaacgaacagcttcctgaagattgttccagaaccaaagcagcttgaatgtaatcaccagaaggttgttactgtgcattactccctaaacagtgaagcatatgaggatgattccaatgtaaagttcttctatttggtaagtctcagtcatgattcaggaaactttcagcatcgtatctcttcgtctcctatttacacagcctggaatggaaacttctcgttcccactcagcatcagtgctgatctggctcctgcagccgtcctgtttgtctacacccttcaccccagtggggaaattgtggctgacagtgtcagattccaggttgacaagtgctttaaacacaaggttaacataaagttctctaacgagcagggcttacctggttccaatgctagtctctatcttcaagcggcgcctgtcttattctgtgccctcggggctgtggatgggaacgtccttctactgaaatctgaacaacagctgtcagctgaaagtgtgtataacatggttccaagtatagagccgtatggttatttctaccatggcctcaatcttgatgatggcaaggaagacccttgcattcctcagagggatatgttctacaatggtttatattacacacctgtaagcaactatggggatggagatatctataatattgtcaggaacatgggtctcaaagtctttaccaatctccattaccgaaaaccagaagtatgtgtgatggagagaaggctgccactccctaagccgctttatctagaaacagaaaattatggtccaatgcatagtgttccgtctagaattgcatgtagaggggagaatgctgactatgtagaacaggctataattcaaacagtaagaacaaacttcccagagacatggatgtgggacctcgtcagtgtcgattcctcaggctctgccaatctttcgttcctcattcctgatacgataacccaatgggaggcaagtggcttttgtgtgaatggcgacgttggatttggcatttcctctacaaccactctagaagtctcccaacctttctttattgaaattgcctcacccttttcggttgttcaaaatgaacaatttgatttgattgtcaatgccttcagctacctgaatacatgtgtagagatttctgttcaagtggaggagtctcagaattatgaagcaaatattaatacctggaaaatcaatggcagtgaggttattcaagctggagggaggaaaacaaacatctggactattatacctaagaaattgggtaaagtgaatatcactgtagttgctgagtccaaacaaagcagtgcttgcccaaatgaaggaatggagcagcaaaagctaaactggaaagacactgtggtcaaaagcttcttagtagagcctgaaggtattgaaaaggaaaggacccagagtttccttatctgtacagaaggtgccaaagcctccaagcagggagttttggacttgccaaatgatgtagtagaagggtcagccagaggctttttcactgttgtgggggatattctaggacttgccatgcagaatctggttgttctccaaatgccctatggaggtggagagcagaatgctgccctactagcatctgatacttatgttctggactatctgaaatctactgagcaactgacagaggaagttcaatctaaggctttctttctcttatctaatggttatcaaaggcaattatctttcaaaaactctgatggttcctatagtgtgttttggcagcagaatcagaaaggaagcatatggctcagtgctcttacttttaagacattggagagaatgaaaaaatttgtattcattgatgaaaatgttcaaaaacagaccttaatctggctttcaagccaacagaaaacaagcggctgctttaagaatgatggccagcttttcaaccacgcctgggagggtggagatgaagaggacatttcactcactgcatatgttgttgggatgttctttgaagctgggctcaattccacttttcctgctctacgaaacgcactcttttgccttgaagcggcattggacagtggtgtcactaatggctacaatcatgcaattctagcttatgcttttgccttagctggaaaagagaagcaagtggaatctttactccaaaccctggatcaatctgccacaaaactaaataatgtcatctactgggaaagagaaaggaaacccaagacagaagaatttccatcctttattccctgggcaccttctgctcagactgagaagagttgctatgtgctgttggctgtcatttcccggaaaattcctgacctcacctatgctagtaagattgtgcagtggcttgcccaacagatgaattcccatggaggcttttcttccaaccaggtgattaatgtaggcctgatattaatagcaatatgcggggaagaggggctcttctctaagaatcaaaacactgtcacctttagcagtgaaggatccagtgagatccagtttaacggtcataaccgcctactggtccaacgttcagaagtaacacaggcacctggacaatacacagtagatgtggaaggacgcggttgtacatttatccaggccacccttaagtacaatgttctcctacctaagaaggcatctggattttctctttccttggaaatagtaaagaactactctttgactgtttttgacctcacagtgaacctcaaatacactggaattcgcaataaatccagtatggtggttatagatgtaaaaatgctatcaggatttactccaaccatgtcatccattgaagagcttgaaaacaagggccaagtgatgaagactgaagtcaagaatgaccatgttcttttctacttggaaaatgtttttggtcgagcagacagtttcactttttctgctgagcagagcaaccttgtgttcaacattcagccagccccaggcatggtctacgattattattggaagggtggagaagcatttcttttaacaaactga

SEQ ID NO: 163032 - DNA, 4423 bp, Homo sapiens
  Payload ID: 12131
  Gene Symbol:
  Gene Name: OVOS2
  ENST ID: ENST00000398963
  CDS Start-End: 1-4260
atgacgggttcccatttgtcccatgactcatggcagtatgttctgctgattccttctgttctacaagaaggctctttggataaagcttgtgcccagctttttaatctcactgaatctgttgttttgacggtctccctcaactatggtgaggtccagaccaaaatatttgaagaaaatgttactggagaaaatttcttcaaatgcatcagctttgaggttcctcaggccagatctgacccactggcatttattacattttctgctaaaggagccactctcaacctggaagagaggagatctgtggcaatcagatccagagagaatgtggtctttgtacagactgataaacccacctacaagcctggacagaaagatgtaaatggcatcgctcagtttttcttggacacatatacgtttacatacccaaatatcactttgaaagatcctcaaaacaatcggatttttcaatggcaaaatgtgacttctttccgaaatattacccaactctcgttccaactgatttcagaaccaatgtttggagattactggattgttgtgaaaagaaactcaaggaagacagtgacacaccaatttgctgttaaaagatatgtgctgcccaagtttgaagttacggtcaatgcaccacaaacagtaactatttcagatgatgaattccaagtggatgtatgtgctaagtacacctttggccaacctgtgcaagggaaaacccaaatccgggtgtgcagagagtatttttcttcaagcaattgtgagaaaaatgacaatgaaatatgtgagcaatttattgcacagttggaaaatggttgtgtttctcaaattgtaaatacaaaagtcttccaactctaccgttcgggattgttcatgacatttcatgtcgctgtaattgttacagaatttgggacaggaaattactgtatgcagatcagtgagaagacctcagtttttatcactcaattgcttggaactgtaaactttgagaacatggatactttctacagaagagggatttcttattttggaactcttaaattttcggatcccaataatgtacctatggtgaacaagttgttgcaactggagctcaatgatgaatttataggaaattatactacggacgagaatggcgaagctcaattttccattgacacttcagacatatttgatccagagttcaacctaaaagccacatatgttcgacctaagagctgctatcttcccagctggttgacgcctcagtacttggatgctcacttcttagtctcacgcttttactcccgaacgaacagcttcctgaagattgttccagaaccaaagcagcttgaatgtaatcaccagaaggttgttactgtgcattactccctaaacagtgaagcatatgaggatgattccaatgtaaagttcttctatttggtaagtctcagtcatgattcaggaaactttcagcatcgtatctcttcgtctcctatttacacagcctggaatggaaacttctcgttcccactcagcatcagtgctgatctggctcctgcagccgtcctgtttgtctacacccttcaccccagtggggaaattgtggctgacagtgtcagattccaggttgacaagtgctttaaacacaaggttaacataaagttctctaacgagcagggcttacctggttccaatgctagtctctatcttcaagcggcgcctgtcttattctgtgccctcggggctgtggatgggaacgtccttctactgaaatctgaacaacagctgtcagctgaaagtgtgtataacatggttccaagtatagagccgtatggttatttctaccatggcctcaatcttgatgatggcaaggaagacccttgcattcctcagagggatatgttctacaatggtttatattacacacctgtaagcaactatggggatggagatatctataatattgtcaggaacatgggtctcaaagtctttaccaatctccattaccgaaaaccagaagtatgtgtgatggagagaaggctgccactccctaagccgctttatctagaaacagaaaattatggtccaatgcatagtgttccgtctagaattgcatgtagaggggagaatgctgactatgtagaacaggctataattcaaacagtaagaacaaacttcccagagacatggatgtgggacctcgtcagtgtcgattcctcaggctctgccaatctttcgttcctcattcctgatacgataacccaatgggaggcaagtggcttttgtgtgaatggcgacgttggatttggcatttcctctacaaccactctagaagtctcccaacctttctttattgaaattgcctcacccttttcggttgttcaaaatgaacaatttgatttgattgtcaatgccttcagctacctgaatacatgtgtagagatttctgttcaagtggaggagtctcagaattatgaagcaaatattaatacctggaaaatcaatggcagtgaggttattcaagctggagggaggaaaacaaacatctggactattatacctaagaaattgggtaaagtgaatatcactgtagttgctgagtccaaacaaagcagtgcttgcccaaatgaaggaatggagcagcaaaagctaaactggaaagacactgtggtcaaaagcttcttagtagagcctgaaggtattgaaaaggaaaggacccagagtttccttatctgtacagaaggtgccaaagcctccaagcagggagttttggacttgccaaatgatgtagtagaagggtcagccagaggctttttcactgttgtgggggatattctaggacttgccatgcagaatctggttgttctccaaatgccctatggaggtggagagcagaatgctgccctactagcatctgatacttatgttctggactatctgaaatctactgagcaactgacagaggaagttcaatctaaggctttctttctcttatctaatggttatcaaaggcaattatctttcaaaaactctgatggttcctatagtgtgttttggcagcagaatcagaaaggaagcatatggctcagtgctcttacttttaagacattggagagaatgaaaaaatttgtattcattgatgaaaatgttcaaaaacagaccttaatctggctttcaagccaacagaaaacaagcggctgctttaagaatgatggccagcttttcaaccacgcctgggagggtggagatgaagaggacatttcactcactgcatatgttgttgggatgttctttgaagctgggctcaattccacttttcctgctctacgaaacgcactcttttgccttgaagcggcattggacagtggtgtcactaatggctacaatcatgcaattctagcttatgcttttgccttagctggaaaagagaagcaagtggaatctttactccaaaccctggatcaatctgccacaaaactaaataatgtcatctactgggaaagagaaaggaaacccaagacagaagaatttccatcctttattccctgggcaccttctgctcagactgagaagagttgctatgtgctgttggctgtcatttcccggaaaattcctgacctcacctatgctagtaagattgtgcagtggcttgcccaacagatgaattcccatggaggcttttcttccaaccaggtgattaatgtaggcctgatattaatagcaatatgcggggaagaggggctcttctctaagaatcaaaacactgtcacctttagcagtgaaggatccagtgagatccagtttaacggtcataaccgcctactggtccaacgttcagaagtaacacaggcacctggacaatacacagtagatgtggaaggacgcggttgtacatttatccaggccacccttaagtacaatgttctcctacctaagaaggcatctggattttctctttccttggaaatagtaaagaactactctttgactgtttttgacctcacagtgaacctcaaatacactggaattcgcaataaatccagtatggtggttatagatgtaaaaatgctatcaggatttactccaaccatgtcatccattgaagagcttgaaaacaagggccaagtgatgaagactgaagtcaagaatgaccatgttcttttctacttggaaaatgtttttggtcgagcagacagtttcactttttctgctgagcagagcaaccttgtgttcaacattcagccagccccaggcatggtctacgattagtacgaaaaaggtggagaagcatttcttttaacaaactgattcttctgtatcaaacctggaaaaaaatcatgaaccatctgacatcgtgaacagtctgcagtgggctatggtttcttgacaagtcttatttccttatcatcccattaaatgttgtcattttgca

SEQ ID NO: 163033 - DNA, 1719 bp, Homo sapiens
  Payload ID: 12132
  Gene Symbol: OXA1L
  Gene Name: oxidase (cytochrome c) assembly 1-like
  ENST ID: ENST00000285848
  CDS Start-End: 1-1488
atggtaacgtggctttacagatttttacccacttcaaatatggccgccaagctccgttctcttttaccgcctgatctgcggctacaattctggcttcatgcccgcctccaaaagtgcttcctctcgaggggttgtggttcttactgcgcaggcgcaaaagcaagtcctcttccgggcaaaatggcgatgggactaatgtgcggacgccgggagcttctgcgcttgctacagtccgggcgtcgggtccacagcgtcgcagggccctcgcaatggcttgggaaaccgctgaccacacggctcctattcccagcagccccgtgctgctgtcgcccacactacctcttccttgcggcttccggcccccgcagcctcagtacctctgctatctcttttgcagaagtccaggttcaggcccctcctgttgttgctgcaactccctcacccacagcagtacctgaggtggcttctggagagactgcagatgtagtccaaactgctgcagagcagagcttcgctgaactggggctggggtcatacaccccagtgggactgatccagaatttactggaatttatgcatgttgatctgggcctaccttggtggggggccattgctgcatgtacagtctttgcccgctgcctgatttttcctctcatcgtgacgggccagcgagaggcagccaggatccacaatcacttgccagagatccagaagttttccagtcgaatcagagaggccaagttagcaggagaccatattgagtattacaaggcttcctcggagatggcactttaccagaaaaaacatggtattaaactctataaacctctcattctccctgtgactcaggccccaatcttcatctccttcttcattgctttgagagagatggccaaccttcctgtgcccagcctgcagacaggtggcctctggtggttccaggatctcacggtatccgatcccatctacatattaccactggcagtcactgctacaatgtgggctgttcttgagctaggtgctgagacaggtgtgcaaagttctgaccttcagtggatgagaaatgtcatcagaatgatgcccctgataaccttgcccataaccatgcatttccccacggcagtgtttatgtactggctctcctccaatttgttttccctggtccaagtatcctgtctccggattccagcagtacgcactgtacttaaaatcccccagcgtgttgtacatgacctggacaaattacctccacgggaaggcttcctagagagcttcaaaaaaggctggaaaaatgctgaaatgacgcgtcagctgcgagagcgtgaacaacgcatgcggaatcagttggagctagcagccaggggtcctttacgacagacctttacccacaaccctctcctacaacctggaaaggataaccctcccaatatccctagcagcagcagcaaaccaaagtcaaagtatccctggcacgacacacttggctgacttatgttctgtgcgcattctggcaggaattctgtctcttcagagactcatcctcaaaacaagacttgacactgtgtccttgccccagtcctaggaactgtggcacacagagatgttcattttaaaaacggatttcatgaaacactcttgtacttatgtttataagagagcactgggtagccaagtgatcttcccattcacagagttagtaaacctctgtactacatgctg

SEQ ID NO: 163034 - DNA, 1750 bp, Homo sapiens
  Payload ID: 12132
  Gene Symbol: OXA1L
  Gene Name: oxidase (cytochrome c) assembly 1-like
  Uniprot ID: Q15070
  ENST ID: ENST00000358043
  CDS Start-End: 319-1578
gtgcggacgccgggagcttctgcgcttgctacagtccgggcgtcgggtaaggatgccccggggcagagcaccgggatgctgccctgacccagtgaaccaggccccaggacagctcgtgctaggggtatcagcagacgctgacctgctcaccgggacctgaatgtcatgacctcgggtcatgtgaggacgcgctagggttagtccccgacactatgggcccagcagcccggtgtcagcttctggaattggcttggctcctggcgagagcacctcggcctcgttctcagggccctccgatgtgggtctgcgataactgagatgcggggaacccaggtccacagcgtcgcagggccctcgcaatggcttgggaaaccgctgaccacacggctcctattcccagcagccccgtgctgctgtcgcccacactacctcttccttgcggcttccggcccccgcagcctcagtacctctgctatctcttttgcagaagtccaggttcaggcccctcctgttgttgctgcaactccctcacccacagcagtacctgaggtggcttctggagagactgcagatgtagtccaaactgctgcagagcagagcttcgctgaactggggctggggtcatacaccccagtgggactgatccagaatttactggaatttatgcatgttgatctgggcctaccttggtggggggccattgctgcatgtacagtctttgcccgctgcctgatttttcctctcatcgtgacgggccagcgagaggcagccaggatccacaatcacttgccagagatccagaagttttccagtcgaatcagagaggccaagttagcaggagaccatattgagtattacaaggcttcctcggagatggcactttaccagaaaaaacatggtattaaactctataaacctctcattctccctgtgactcaggccccaatcttcatctccttcttcattgctttgagagagatggccaaccttcctgtgcccagcctgcagacaggtggcctctggtggttccaggatctcacggtatccgatcccatctacatattaccactggcagtcactgctacaatgtgggctgttcttgagctaggtgctgagacaggtgtgcaaagttctgaccttcagtggatgagaaatgtcatcagaatgatgcccctgataaccttgcccataaccatgcatttccccacggcagtgtttatgtactggctctcctccaatttgttttccctggtccaagtatcctgtctccggattccagcagtacgcactgtacttaaaatcccccagcgtgttgtacatgacctggacaaattacctccacgggaaggcttcctagagagcttcaaaaaaggctggaaaaatgctgaaatgacgcgtcagctgcgagagcgtgaacaacgcatgcggaatcagttggagctagcagccaggggtcctttacgacagacctttacccacaaccctctcctacaacctggaaaggataaccctcccaatatccctagcagcagcagcaaaccaaagtcaaagtatccctggcacgacacacttggctgacttatgttctgtgcgcattctggcaggaattctgtctcttcagagactcatcctcaaaacaagacttgacactgtgtccttgccccagtcctaggaactgtggcacacagagatgttcattttaaaaacggatttcatgaaacactcttgtacttatgtttataagagagca

SEQ ID NO: 163035 - DNA, 1440 bp, Homo sapiens
  Payload ID: 12132
  Gene Symbol: OXA1L
  Gene Name: oxidase (cytochrome c) assembly 1-like
  ENST ID: ENST00000412791
  CDS Start-End: 1-1227
atggcgatgggactaatgtgcggacgccgggagcttctgcgcttgctacagtccgggcgtcgggtccacagcgtcgcagggccctcgcaatggcttgggaaaccgctgaccacacggctcctattcccagcagccccgtgctgctgtcgcccacactacctcttccttgcggcttccggcccccgcagcctcagtacctctgctatctcttttgcagaagtccaggttcaggcccctcctgttgttgctgcaactccctcacccacagcagtacctgaggtggcttctggagagactgcagatgtagtccaaactgctgcagagcagagcttcgctgaactggggctggggtcatacaccccagtgggactgatccagaatttactggaatttatgcatgttgatctgggcctaccttggtggggggccattgctgcatgtacagtctttgcccgctgcctgatttttcctctcatcgtgacgggccagcgagaggcagccaggatccacaatcacttgccagagatccagaagttttccagtcgaatcagagaggccaagttagcaggagaccatattgagtattacaaggcttcctcggagatggcactttaccagaaaaaacatggtattaaactctataaacctctcattctccctgtgactcaggccccaatcttcatctccttcttcattgctttgagagagatggccaaccttcctgtgcccagcctgcagacaggtggcctctggtggttccaggatctcacggtatccgatcccatctacatattaccactggcagtcactgctacaatgtgggctgttcttgagctaggtgctgagacaggtgtgcaaagttctgaccttcagtggatgagaaatgtcatcagaatgatgcccctgataaccttgcccataaccatgcatttccccacggcagtgtttatgtactggctctcctccaatttgttttccctggtccaagtatcctgtctccggattccagcagtacgcactgtacttaaaatcccccagcgtgttgtacatgacctggacaaattacctccacgggaaggcttcctagagagcttcaaaaaaggtcctttacgacagacctttacccacaaccctctcctacaacctggaaaggataaccctcccaatatccctagcagcagcagcaaaccaaagtcaaagtatccctggcacgacacacttggctgacttatgttctgtgcgcattctggcaggaattctgtctcttcagagactcatcctcaaaacaagacttgacactgtgtccttgccccagtcctaggaactgtggcacacagagatgttcattttaaaaacggatttcatgaaacactcttgtacttatgtttataagagagcactgggtagccaagtgatcttcccattcacagagttagtaaa

SEQ ID NO: 163036 - DNA, 691 bp, Homo sapiens
  Payload ID: 12132
  Gene Symbol: OXA1L
  Gene Name: oxidase (cytochrome c) assembly 1-like
  ENST ID: ENST00000442110
  CDS Start-End: 1-249
cttccgggcaaaatggcgatgggactaatgtgcggacgccgggagcttctgcgcttgctacagtccgggcgtcggccccgtgctgctgtcgcccacactacctcttccttgcggcttccggcccccgcagcctcagtacctctgctatctcttttgcagaagtccaggttcaggcccctcctgttgttgctgcaactccctcacccacagcagtacctgaggtggcttctggagagactgcagatgtagtccaaactgctgcagagcagagcttcgctgaactggggctggggtcatacaccccagtgggactgatccagaatttactggaatttatgcatgttgatctgggcctaccttggtggggggccattgctgcatgtacagtctttgcccgctgcctgatttttcctctcatcgtgacgggccagcgagaggcagccaggatccacaatcacttgccagagatccagaagttttccagtcgaatcagagaggccaagttagcaggagaccatattgagtattacaaggcttcctcggagatggcactttaccagaaaaaacatggtattaaactctataaacctctcattctccctgtgactcaggccccaatcttcatctccttcttcattgctttgagagagatggccaaccttcctgtgcccagcctgcagacaggtggcct

SEQ ID NO: 163037 - DNA, 889 bp, Homo sapiens
  Payload ID: 12132
  Gene Symbol: OXA1L
  Gene Name: oxidase (cytochrome c) assembly 1-like
  ENST ID: ENST00000431881
  CDS Start-End: 554-889
tccgggcaaaatggcgatgggactaatgtgcggacgccgggagcttctgcgcttgctacagtccgggcgtcgggtaaggatgccccggggcagagcaccgggatgctgccctgacccagtgaaccaggccccaggacagctcgtgctaggggtatcagcagacgctgacctgctcaccgggacctgaatgtcatgacctcgggtcatgtgaggacgcgctagggtccacagcgtcgcagggccctcgcaatggcttgggaaaccgctgaccacacggctcctattcccagcagccccgtgctgctgtcgcccacactacctcttccttgcggcttccggcccccgcagcctcagtacctctgctatctcttttgcagaagtccaggttcaggcccctcctgttgttgctgcaactccctcacccacagcagtacctgaggtggcttctggagagactgcagatgtagtccaaactgctgcagagcagagcttcgctgaactggggctggggtcatacaccccagtgggactgatccagaatttactggaatttatgcatgttgatctgggcctaccttggtggggggccattgctgcatgtacagtctttgcccgctgcctgatttttcctctcatcgtgacgggccagcgagaggcagccaggatccacaatcacttgccagagatccagaagttttccagtcgaatcagagaggccaagttagcaggagaccatattgagtattacaaggcttcctcggagatggcactttaccagaaaaaacatggtattaaactctataaacctctcattctccctgtgactcaggccccaatcttcatctccttcttcattgctttgagagagatggccaaccttcctgtgccc

SEQ ID NO: 163038 - DNA, 1571 bp, Homo sapiens
  Payload ID: 12132
  Gene Symbol: OXA1L
  Gene Name: oxidase (cytochrome c) assembly 1-like
  ENST ID: ENST00000604262
  CDS Start-End: 24-1331
aagcaagtcctcttccgggcaaaatggcgatgggactaatgtgcggacgccgggagcttctgcgcttgctacagtccgggcgtcgggtccacagcgtcgcagggccctcgcaatggcttgggaaaccgctgaccacacggctcctattcccagcagccccgtgctgctgtcgcccacactacctcttccttgcggcttccggcccccgcagcctcagtacctctgctatctcttttgcagaagtccaggttcaggcccctcctgttgttgctgcaactccctcacccacagcagtacctgaggtggcttctggagagactgcagatgtagtccaaactgctgcagagcagagcttcgctgaactggggctggggtcatacaccccagtgggactgatccagaatttactggaatttatgcatgttgatctgggcctaccttggtggggggccattgctgcatgtacagtctttgcccgctgcctgatttttcctctcatcgtgacgggccagcgagaggcagccaggatccacaatcacttgccagagatccagaagttttccagtcgaatcagagaggccaagttagcaggagaccatattgagtattacaaggcttcctcggagatggcactttaccagaaaaaacatggtattaaactctataaacctctcattctccctgtgactcaggccccaatcttcatctccttcttcattgctttgagagagatggccaaccttcctgtgcccagcctgcagacaggtggcctctggtggttccaggatctcacggtatccgatcccatctacatattaccactggcagtcactgctacaatgtgggctgttcttgagctaggtgctgagacaggtgtgcaaagttctgaccttcagtggatgagaaatgtcatcagaatgatgcccctgataaccttgcccataaccatgcatttccccacggcagtgtttatgtactggctctcctccaatttgttttccctggtccaagtatcctgtctccggattccagcagtacgcactgtacttaaaatcccccagcgtgttgtacatgacctggacaaattacctccacgggaaggcttcctagagagcttcaaaaaaggctggaaaaatgctgaaatgacgcgtcagctgcgagagcgtgaacaacgcatgcggaatcagttggagctagcagccaggggtcctttacgacagacctttacccacaaccctctcctacaacctggaaaggataaccctcccaatatccctagcagcagcagcaaaccaaagtcaaagtatccctggcacgacacacttggctgacttatgttctgtgcgcattctggcaggaattctgtctcttcagagactcatcctcaaaacaagacttgacactgtgtccttgccccagtcctaggaactgtggcacacagagatgttcattttaaaaacggatttcatgaaacactcttgtacttatgtttataagagagcactgggtagccaagtgatcttcccattcacagagttagtaaacctctgtactacatgctgcttcctgat

SEQ ID NO: 163039 - DNA, 2971 bp, Homo sapiens
  Payload ID: 12132
  Gene Symbol: OXA1L
  Gene Name: oxidase (cytochrome c) assembly 1-like
  ENST ID: ENST00000612549
  CDS Start-End: 1-1488
atggtaacgtggctttacagatttttacccacttcaaatatggccgccaagctccgttctcttttaccgcctgatctgcggctacaattctggcttcatgcccgcctccaaaagtgcttcctctcgaggggttgtggttcttactgcgcaggcgcaaaagcaagtcctcttccgggcaaaatggcgatgggactaatgtgcggacgccgggagcttctgcgcttgctacagtccgggcgtcgggtccacagcgtcgcagggccctcgcaatggcttgggaaaccgctgaccacacggctcctattcccagcagccccgtgctgctgtcgcccacactacctcttccttgcggcttccggcccccgcagcctcagtacctctgctatctcttttgcagaagtccaggttcaggcccctcctgttgttgctgcaactccctcacccacagcagtacctgaggtggcttctggagagactgcagatgtagtccaaactgctgcagagcagagcttcgctgaactggggctggggtcatacaccccagtgggactgatccagaatttactggaatttatgcatgttgatctgggcctaccttggtggggggccattgctgcatgtacagtctttgcccgctgcctgatttttcctctcatcgtgacgggccagcgagaggcagccaggatccacaatcacttgccagagatccagaagttttccagtcgaatcagagaggccaagttagcaggagaccatattgagtattacaaggcttcctcggagatggcactttaccagaaaaaacatggtattaaactctataaacctctcattctccctgtgactcaggccccaatcttcatctccttcttcattgctttgagagagatggccaaccttcctgtgcccagcctgcagacaggtggcctctggtggttccaggatctcacggtatccgatcccatctacatattaccactggcagtcactgctacaatgtgggctgttcttgagctaggtgctgagacaggtgtgcaaagttctgaccttcagtggatgagaaatgtcatcagaatgatgcccctgataaccttgcccataaccatgcatttccccacggcagtgtttatgtactggctctcctccaatttgttttccctggtccaagtatcctgtctccggattccagcagtacgcactgtacttaaaatcccccagcgtgttgtacatgacctggacaaattacctccacgggaaggcttcctagagagcttcaaaaaaggctggaaaaatgctgaaatgacgcgtcagctgcgagagcgtgaacaacgcatgcggaatcagttggagctagcagccaggggtcctttacgacagacctttacccacaaccctctcctacaacctggaaaggataaccctcccaatatccctagcagcagcagcaaaccaaagtcaaagtatccctggcacgacacacttggctgacttatgttctgtgcgcattctggcaggaattctgtctcttcagagactcatcctcaaaacaagacttgacactgtgtccttgccccagtcctaggaactgtggcacacagagatgttcattttaaaaacggatttcatgaaacactcttgtacttatgtttataagagagcactgggtagccaagtgatcttcccattcacagagttagtaaacctctgtactacatgctgcttcctgatacttattgaacagggaaatcagtgtgcacttcagaaaactgaagaatacccagcattttgggaggccgaggtgggtggatcacctgagatcaggagtttgagaccagcctggccaacatggggaaacgccatctctgctgttttacaaaaatagccacacgtggtggtgcacacctgtagtcccagctactcgggaggctgaggcaggagaattgcttgaatccgagaggcggaggttgcagtgagccaagatcgcaccaccgcactccagcctgggcaatagagggagactgtctcaaaaaaaaaagaaaactgaagaatagagtgagtcatgattgcttttgctggcccatggccttggaaaatataatgttttaacctggcattaagggtttaaacttccacccaggcgcagtggctcacgccagtaatcccagcacttttgggaggccaaggcgggcggatcacgaagtcagcagatcgagaccatcctggccaacatggtgaaaccccgtctctactaaaaaaaaaaaaaaaaaaattagccgggcatggcggcgggtgcctgtattcccagctacttgggaggctgaggcaggagaatggcgtgaacccaggaggcagagcttgcagtgagccgagattgcgccactgcactccagcctgggcaagagagtgagactccttctcaaaaaaaaaaaaaaaaaaaaaaaaaaaaaaacagtttaaacttccaacccatgcatgtgttgttctatgcacatttggattgcagtctagaggtgtggctgataagttgaatgttgagattgtatctaaatatagtaaccgcacttcttgatcccaagattactttaaaaatttcaagaagtagatgtgtgcaaattcttagtgataattaagaatgaaagttccaggctgggcaaagtggctcacacctataatctcagcactttgggaggctgaggtgggtagatcacttgagtccaggaatttgagaccagcctgggcaacatggcgagaccttgtctctgctaaaaagttagctgagcatggtggtgcttgtccatagtcccagctacctgggaggctgaggtgggaggatagcttaagcccaggaggttgaggctgcagtgatccaagatcatgctgctatactccagccttggctacagagcaagatcctgtctcaaaaaggaagttcatgtcatttttatgtaacaatccaacatttgactagagc

SEQ ID NO: 163040 - DNA, 1944 bp, Homo sapiens
  Payload ID: 12133
  Gene Symbol: OXR1
  Gene Name: oxidation resistance 1
  Uniprot ID: Q8N573
  ENST ID: ENST00000297447
  CDS Start-End: 138-869
aaatctttgtctctagcaaactgttttgtcactgtagtaaggctctagtgctggaaatttatctttgacagaggaagaatgcttttgaaaacagttcttacgtgattttatgtaacttaatttgccctggaaaggaaatgtctcgtctctggtatgggaaaaaagggagaagacatcaaccaattaatcataaatacactctggtagtgtcagtggctgagtatcaccgcaggatcgatgctctaaatactgaagaactgcgcacactctgcagacgcctccagattactacaagggaagacataaattcaaagcaggttgctacagtgaaagcagacctggagtctgaatcttttcgaccaaacctaagtgatcccagtgaacttttactgccagatcaaattgaaaagcttaccaagcatcttccaccaagaacaattggctatccatggactcttgtttatggtactggaaaacatggcacaagcttgaaaactctttatcgaacaatgacaggtttagacaccccagtgctgatggtgattaaagacagtgatggacaggtttttggtgcgttagcatctgagccactgaaagtgagtgatggcttttatggtactggagagacctttgtttttacattctgtccggagtttgaggtctttaagtggacaggagataatatgttttttatcaaaggagacatggattcactagctttcggtggtggaggaggagaatttgcgctttggcttgatggagatctctaccatggaagaagccattcttgtaaaacgtttgggaatcgtacactttctaagaaggaagatttctttatccaagatattgaaatctgggcttttgaataaataaaatgctctctgtcttagcaggagaatggcccaaacctgacatggacaagcattgtttggaaagttcaagaagcaatacagtgtaacatgtcacttgtgctttaaaattagtctgtatcaccatttattacagttataattttggagtttatttttcaaatcatgttcttgtcccagagttctttaggttaacactagggactgcgtccatgtactagtataacagcttgggtttgttagaatttgggcaacattttgattataatgacaacttcattttcacatgttactcagttccctaataggatggtgctcttttgttgaacctgtattgatttttttttttttaactatattgattcgtttactagaacagtctaattggggcattgaggaaatgaagactggatacttctgtatctgtgaagttggcacaggtaacatttggacatgttcatcttattcttaggaaggaaaaaatcacttgccaaaataatacatacttcatagaccactgagttctagtttttattcacactacaacattctctttaacgatgttgcaggtattctcaatttccttttaagaaaaatgaaatgtgaggagaattctggttgtaatagatgacagtacatatgatctgcaggtttgggcatatgctttcatcattaaattatctgataaagttacaagtcacaaaggagaatgagaacttaatgattctattggatttaatatattagcaagaaaacatactatttacatatgtgtagcttagtaaggcattaacataagtacaaaaactatgaaacagatgcatatttcctcaacatactgtgtcaggtatactgttttataatttggttgttttagccttattgcacaccaactcccaaaatataggttactcttgttcaaaaggaaaaaaaaaattgtgattttctttgagtggtatatgttattaattaccattagcatttgctcttataaagggcaatgattatagtagacaatattgtaactcagtagacttgttgaatatgcaaacttactgtcaagtgacctcaaaaa

SEQ ID NO: 163041 - DNA, 4406 bp, Homo sapiens
  Payload ID: 12133
  Gene Symbol: OXR1
  Gene Name: oxidation resistance 1
  Uniprot ID: Q8N573
  ENST ID: ENST00000312046
  CDS Start-End: 134-2653
gcctcttgtgaggcgcgcggagccgcctcccctgggtcaggtctgatgggccggtgggcgcgctagtggtggccgccaccgccgaaaccgtcgacctcctgggccccagttccgcgtccagccccgcggcagcatggactacctgacgacgttcaccgagaagagtgggcgccttctgcggggcacggccaaccgcctgttggggttcgggggcggcggcgaagcccggcaggtgcgcttcgaagattacctgagggagccagcccagggggacctcgggtgcgggtccccgccccaccggcccccggcgccgtccagcccggagggacctgacactggccaaaagaagaccctagacaagaaagatggaagacgaatgtcttttcagaaacctaaagggactattgagtatactgttgaatcaagggattctttgaatagcatagccctgaagtttgatacaacacctaacgaacttgttcaattaaataagttattctcccgagcagttgttactggacaggttctgtatgttcctgatcctgaatatgtctccagtgttgagagctctccatctctaagccccgtaagtcctctgtcaccaacatcatctgaggctgaatttgataagaccactaatcctgatgtccatccaacagaagcaactccctcatctactttcactggtattcgacctgcacgagttgtatcttcaacttctgaggaggaggaagcatttactgagaaatttcttaaaattaattgcaaatatattaccagtggcaagggcacagtcagtggtgtgctgctagttacaccaaataatataatgtttgatccacataaaaatgaccctttggttcaagagaatggctgtgaggaatatggcatcatgtgtccaatggaagaggtgatgtcagctgcaatgtacaaagaaattttggatagcaaaataaaggaatctttacccatagatatagatcagctatcaggaagggacttctgccattcaaagaaaatgacaggaagtaacactgaggaaatagactcaagaatccgagatgcaggtaatgatagtgccagcactgctcctaggagcactgaggagtctctttctgaagatgtgttcacagaatcagaactttcccctatacgagaggagcttgtatcttcagatgaactgcgacaagataaatcttctggtgcgtcatcagaatctgtgcaaactgtcaatcaggctgaagtagaaagtctgacagtcaaatcagaatctactggtactcctggtcacttaagatctgatactgaacattctacaaatgaagttgggactttatgtcataaaactgatttaaataatcttgaaatggccattaaggaagatcagattgcagataactttcaaggaatatcaggtcctaaagaagacagcacaagtataaaaggtaattcagaccaggattcttttcttcatgagaattcgttacaccaagaagagagtcaaaaagaaaatatgccttgtggggaaacagcagaatttaaacaaaagcaaagtgttaacaaaggaaaacaaggaaaggagcaaaatcaggactcacagacagaggcagaagagctacgcaaactttggaaaacccatactatgcaacaaactaaacagcaaagggaaaatattcaacaagtgtcacaaaaagaagctaagcataaaattacatctgctgatggacacatagaaagttctgcacttttaaaagaaaagcaaaggcatcgattacataagttcttgtgtctcagagttggaaaaccaatgaggaaaacgtttgtatctcaagcaagtgctacaatgcaacagtatgcacagagagataagaaacatgaatattggtttgctgtgccacaagaaaggacagatcacttgtatgccttcttcattcagtggagtccagaaatatatgcagaagatactggcgaatataccagagaacctggatttatagtagtaaaaaagattgaggagtctgaaacaattgaggattctagtaatcaagcagcagccagagaatgggagattactacaagggaagacataaattcaaagcaggttgctacagtgaaagcagacctggagtctgaatcttttcgaccaaacctaagtgatcccagtgaacttttactgccagatcaaattgaaaagcttaccaagcatcttccaccaagaacaattggctatccatggactcttgtttatggtactggaaaacatggcacaagcttgaaaactctttatcgaacaatgacaggtttagacaccccagtgctgatggtgattaaagacagtgatggacaggtttttggtgcgttagcatctgagccactgaaagtgagtgatggcttttatggtactggagagacctttgtttttacattctgtccggagtttgaggtctttaagtggacaggagataatatgttttttatcaaaggagacatggattcactagctttcggtggtggaggaggagaatttgcgctttggcttgatggagatctctaccatggaagaagccattcttgtaaaacgtttgggaatcgtacactttctaagaaggaagatttctttatccaagatattgaaatctgggcttttgaataaataaaatgctctctgtcttagcaggagaatggcccaaacctgacatggacaagcattgtttggaaagttcaagaagcaatacagtgtaacatgtcacttgtgctttaaaattagtctgtatcaccatttattacagttataattttggagtttatttttcaaatcatgttcttgtcccagagttctttaggttaacactagggactgcgtccatgtactagtataacagcttgggtttgttagaatttgggcaacattttgattataatgacaacttcattttcacatgttactcagttccctaataggatggtgctcttttgttgaacctgtattgatttttttttttttaactatattgattcgtttactagaacagtctaattggggcattgaggaaatgaagactggatacttctgtatctgtgaagttggcacaggtaacatttggacatgttcatcttattcttaggaaggaaaaaatcacttgccaaaataatacatacttcatagaccactgagttctagtttttattcacactacaacattctctttaacgatgttgcaggtattctcaatttccttttaagaaaaatgaaatgtgaggagaattctggttgtaatagatgacagtacatatgatctgcaggtttgggcatatgctttcatcattaaattatctgataaagttacaagtcacaaaggagaatgagaacttaatgattctattggatttaatatattagcaagaaaacatactatttacatatgtgtagcttagtaaggcattaacataagtacaaaaactatgaaacagatgcatatttcctcaacatactgtgtcaggtatactgttttataatttggttgttttagccttattgcacaccaactcccaaaatataggttactcttgttcaaaaggaaaaaaaaaattgtgattttctttgagtggtatatgttattaattaccattagcatttgctcttataaagggcaatgattatagtagacaatattgtaactcagtagacttgttgaatatgcaaacttactgtcaagtgacctcaaaaaaaaaatgaaaagatagaatacactagtagttcttatcctcttttgtaggaaaccaataatagccattgtggcaataattcatcagttgattttaaagcttcatgttatgcaaaaaagaatcctgctgttatacatgtgacagtgactttgtgctgaaatttcagctattccagataaacattgtatatcttgtaaattaatgtttaaaggtgtagttttgttcttacagaaagtgttgattgccaggttgcttatagcactttaagttattctaaaaatgaaattataagccaaatatttggcttaagtagatttagttgtatagcacttacatatttagttcttttgaaagtttagataattatttaaagaaagcataatgctaatggaaaagaaaatctgatgttctattataatatgctattgctgaatatgaatagaaatacagggcatcatttccttgtctcattataagttagtaacaatatatagattaaatgtttacaatatagggaattgtaaataaatatatcagtttttttccccttcggtcttccacagcagtattattgtctttgtggagttgactaatgataatttaaaaatcctgtaatggatttctactaaaataaggtcatagtggcatataccaaataaaatcaaatacagaaatacaaa

SEQ ID NO: 163042 - DNA, 2023 bp, Homo sapiens
  Payload ID: 12133
  Gene Symbol: OXR1
  Gene Name: oxidation resistance 1
  ENST ID: ENST00000435082
  CDS Start-End: 320-583
tttctgaccccgcatcggttccaggaagaatacacctatgtgacaagctaagttctgcctcattttgcatttagaagccacaagaaaaacttttcgaaaacttttgtccgtcttttgctcccccgacgcgtggtttcctgatggtccgtccccgggcagagagagggacgccccctcctcctccccgcctcttgtgaggcgcgcggagccgcctcccctgggtcaggtctgatgggccggtgggcgcgctagtggtggccgccaccgccgaaaccgtcgacctcctgggccccagttccgcgtccagccccgcggcagcatggactacctgacgacgttcaccgagaagagtgggcgccttctgcggggcacggccaaccgcctgttggggttcgggggcggcggcgaagcccggcaggtgcgcttcgaagattacctgagggagccagcccagggggacctcgggtgcgggtccccgccccaccggcccccggcgccgtccagcccggagggacctgattactacaagggaagacataaattcaaagcaggttgctacagtgaaagcagacctggagtctgaatcttttcgaccaaacctaagtgatcccagtgaacttttactgccagatcaaattgaaaagcttaccaagcatcttccaccaagaacaattggctatccatggactcttgtttatggtactggaaaacatggcacaagcttgaaaactctttatcgaacaatgacaggtttagacaccccagtgctgatggtgattaaagacagtgatggacaggtttttggtgcgttagcatctgagccactgaaagtgagtgatggcttttatggtactggagagacctttgtttttacattctgtccggagtttgaggtctttaagtggacaggagataatatgttttttatcaaaggagacatggattcactagctttcggtggtggaggaggagaatttgcgctttggcttgatggagatctctaccatggaagaagccattcttgtaaaacgtttgggaatcgtacactttctaagaaggaagatttctttatccaagatattgaaatctgggcttttgaataaataaaatgctctctgtcttagcaggagaatggcccaaacctgacatggacaagcattgtttggaaagttcaagaagcaatacagtgtaacatgtcacttgtgctttaaaattagtctgtatcaccatttattacagttataattttggagtttatttttcaaatcatgttcttgtcccagagttctttaggttaacactagggactgcgtccatgtactagtataacagcttgggtttgttagaatttgggcaacattttgattataatgacaacttcattttcacatgttactcagttccctaataggatggtgctcttttgttgaacctgtattgatttttttttttttaactatattgattcgtttactagaacagtctaattggggcattgaggaaatgaagactggatacttctgtatctgtgaagttggcacaggtaacatttggacatgttcatcttattcttaggaaggaaaaaatcacttgccaaaataatacatacttcatagaccactgagttctagtttttattcacactacaacattctctttaacgatgttgcaggtattctcaatttccttttaagaaaaatgaaatgtgaggagaattctggttgtaatagatgacagtacatatgatctgcaggtttgggcatatgctttcatcattaaattatctgataaagttacaagtcacaaaggagaatgagaacttaatgattctattggatttaatatattagcaagaaaacatactatttacatatgtgtagcttagtaaggcattaacataagtacaaaaactatgaaacagatgcatatttcctcaacatactgtgtcaggtatactgttttataatttggttgttttagccttattgcacaccaactcccaaaatataggttactcttgttc

SEQ ID NO: 163043 - DNA, 4698 bp, Homo sapiens
  Payload ID: 12133
  Gene Symbol: OXR1
  Gene Name: oxidation resistance 1
  Uniprot ID: Q8N573
  ENST ID: ENST00000452423
  CDS Start-End: 329-2950
atgtctgcaagcgctcagcggcgccggcagcagcggggctagagctgggctgcgtcaggctgagcccattcacctcgcggccacaggagctcagcgccggcgccgcgccgcccagccccgccgagaggggcgcactcgccgccgcggggcccgccgccgctcaccgcagccccctcctggcgacccgcaagtcctctcaaactgtgagtaactaagtggtttgtgcatcattccagaagcaaagctaaaatttttagcggtgttgtcgacttgacctgctaatttcctgttctggaatcgagagaagactcctcaacaagttgctgcaatgtctgtgtctaatctatcatggctgaagaaaaagtcccagtcggtggatattaatgctccagggttcaaccctttggctggtgcaggaaagcaaacaccacaagccagtaagcccccggcacccaagacccccatcattgaagaagagcagaacaatgcagcaaatactcagaaacatccttccagaaggagcgaactgaagaggttctacacaattgacactggccaaaagaagaccctagacaagaaagatggaagacgaatgtcttttcagaaacctaaagggactattgagtatactgttgaatcaagggattctttgaatagcatagccctgaagtttgatacaacacctaacgaacttgttcaattaaataagttattctcccgagcagttgttactggacaggttctgtatgttcctgatcctgaatatgtctccagtgttgagagctctccatctctaagccccgtaagtcctctgtcaccaacatcatctgaggctgaatttgataagaccactaatcctgatgtccatccaacagaagcaactccctcatctactttcactggtattcgacctgcacgagttgtatcttcaacttctgaggaggaggaagcatttactgagaaatttcttaaaattaattgcaaatatattaccagtggcaagggcacagtcagtggtgtgctgctagttacaccaaataatataatgtttgatccacataaaaatgaccctttggttcaagagaatggctgtgaggaatatggcatcatgtgtccaatggaagaggtgatgtcagctgcaatgtacaaagaaattttggatagcaaaataaaggaatctttacccatagatatagatcagctatcaggaagggacttctgccattcaaagaaaatgacaggaagtaacactgaggaaatagactcaagaatccgagatgcaggtaatgatagtgccagcactgctcctaggagcactgaggagtctctttctgaagatgtgttcacagaatcagaactttcccctatacgagaggagcttgtatcttcagatgaactgcgacaagataaatcttctggtgcgtcatcagaatctgtgcaaactgtcaatcaggctgaagtagaaagtctgacagtcaaatcagaatctactggtactcctggtcacttaagatctgatactgaacattctacaaatgaagttgggactttatgtcataaaactgatttaaataatcttgaaatggccattaaggaagatcagattgcagataactttcaaggaatatcaggtcctaaagaagacagcacaagtataaaaggtaattcagaccaggattcttttcttcatgagaattcgttacaccaagaagagagtcaaaaagaaaatatgccttgtggggaaacagcagaatttaaacaaaagcaaagtgttaacaaaggaaaacaaggaaaggagcaaaatcaggactcacagacagaggcagaagagctacgcaaactttggaaaacccatactatgcaacaaactaaacagcaaagggaaaatattcaacaagtgtcacaaaaagaagctaagcataaaattacatctgctgatggacacatagaaagttctgcacttttaaaagaaaagcaaaggcatcgattacataagttcttgtgtctcagagttggaaaaccaatgaggaaaacgtttgtatctcaagcaagtgctacaatgcaacagtatgcacagagagataagaaacatgaatattggtttgctgtgccacaagaaaggacagatcacttgtatgccttcttcattcagtggagtccagaaatatatgcagaagatactggcgaatataccagagaacctggatttatagtagtaaaaaagattgaggagtctgaaacaattgaggattctagtaatcaagcagcagccagagaatgggaggtagtgtcagtggctgagtatcaccgcaggatcgatgctctaaatactgaagaactgcgcacactctgcagacgcctccagattactacaagggaagacataaattcaaagcaggttgctacagtgaaagcagacctggagtctgaatcttttcgaccaaacctaagtgatcccagtgaacttttactgccagatcaaattgaaaagcttaccaagcatcttccaccaagaacaattggctatccatggactcttgtttatggtactggaaaacatggcacaagcttgaaaactctttatcgaacaatgacaggtttagacaccccagtgctgatggtgattaaagacagtgatggacaggtttttggtgcgttagcatctgagccactgaaagtgagtgatggcttttatggtactggagagacctttgtttttacattctgtccggagtttgaggtctttaagtggacaggagataatatgttttttatcaaaggagacatggattcactagctttcggtggtggaggaggagaatttgcgctttggcttgatggagatctctaccatggaagaagccattcttgtaaaacgtttgggaatcgtacactttctaagaaggaagatttctttatccaagatattgaaatctgggcttttgaataaataaaatgctctctgtcttagcaggagaatggcccaaacctgacatggacaagcattgtttggaaagttcaagaagcaatacagtgtaacatgtcacttgtgctttaaaattagtctgtatcaccatttattacagttataattttggagtttatttttcaaatcatgttcttgtcccagagttctttaggttaacactagggactgcgtccatgtactagtataacagcttgggtttgttagaatttgggcaacattttgattataatgacaacttcattttcacatgttactcagttccctaataggatggtgctcttttgttgaacctgtattgatttttttttttttaactatattgattcgtttactagaacagtctaattggggcattgaggaaatgaagactggatacttctgtatctgtgaagttggcacaggtaacatttggacatgttcatcttattcttaggaaggaaaaaatcacttgccaaaataatacatacttcatagaccactgagttctagtttttattcacactacaacattctctttaacgatgttgcaggtattctcaatttccttttaagaaaaatgaaatgtgaggagaattctggttgtaatagatgacagtacatatgatctgcaggtttgggcatatgctttcatcattaaattatctgataaagttacaagtcacaaaggagaatgagaacttaatgattctattggatttaatatattagcaagaaaacatactatttacatatgtgtagcttagtaaggcattaacataagtacaaaaactatgaaacagatgcatatttcctcaacatactgtgtcaggtatactgttttataatttggttgttttagccttattgcacaccaactcccaaaatataggttactcttgttcaaaaggaaaaaaaaaattgtgattttctttgagtggtatatgttattaattaccattagcatttgctcttataaagggcaatgattatagtagacaatattgtaactcagtagacttgttgaatatgcaaacttactgtcaagtgacctcaaaaaaaaaatgaaaagatagaatacactagtagttcttatcctcttttgtaggaaaccaataatagccattgtggcaataattcatcagttgattttaaagcttcatgttatgcaaaaaagaatcctgctgttatacatgtgacagtgactttgtgctgaaatttcagctattccagataaacattgtatatcttgtaaattaatgtttaaaggtgtagttttgttcttacagaaagtgttgattgccaggttgcttatagcactttaagttattctaaaaatgaaattataagccaaatatttggcttaagtagatttagttgtatagcacttacatatttagttcttttgaaagtttagataattatttaaagaaagcataatgctaatggaaaagaaaatctgatgttctattataatatgctattgctgaatatgaatagaaatacagggcatcatttccttgtctcattataagttagtaacaatatatagattaaatgtttacaatatagggaattgtaaataaatatatcagtttttttccccttcggtcttccacagcagtattattgtctttgtggagttgactaatgataatttaaaaatcctgtaatggatttctactaaaataaggtcatagtggcatataccaaataaaatcaaatacagaaat

SEQ ID NO: 163044 - DNA, 4617 bp, Homo sapiens
  Payload ID: 12133
  Gene Symbol: OXR1
  Gene Name: oxidation resistance 1
  Uniprot ID: Q8N573
  ENST ID: ENST00000445937
  CDS Start-End: 329-2869
atgtctgcaagcgctcagcggcgccggcagcagcggggctagagctgggctgcgtcaggctgagcccattcacctcgcggccacaggagctcagcgccggcgccgcgccgcccagccccgccgagaggggcgcactcgccgccgcggggcccgccgccgctcaccgcagccccctcctggcgacccgcaagtcctctcaaactgtgagtaactaagtggtttgtgcatcattccagaagcaaagctaaaatttttagcggtgttgtcgacttgacctgctaatttcctgttctggaatcgagagaagactcctcaacaagttgctgcaatgtctgtgtctaatctatcatggctgaagaaaaagtcccagtcggtggatattaatgctccagggttcaaccctttggctggtgcaggaaagcaaacaccacaagccagtaagcccccggcacccaagacccccatcattgaagaagagcagaacaatgcagcaaatactcagaaacatccttccagaaggagcgaactgaagaggttctacacaattgacactggccaaaagaagaccctagacaagaaagatggaagacgaatgtcttttcagaaacctaaagggactattgagtatactgttgaatcaagggattctttgaatagcatagccctgaagtttgatacaacacctaacgaacttgttcaattaaataagttattctcccgagcagttgttactggacaggttctgtatgttcctgatcctgaatatgtctccagtgttgagagctctccatctctaagccccgtaagtcctctgtcaccaacatcatctgaggctgaatttgataagaccactaatcctgatgtccatccaacagaagcaactccctcatctactttcactggtattcgacctgcacgagttgtatcttcaacttctgaggaggaggaagcatttactgagaaatttcttaaaattaattgcaaatatattaccagtggcaagggcacagtcagtggtgtgctgctagttacaccaaataatataatgtttgatccacataaaaatgaccctttggttcaagagaatggctgtgaggaatatggcatcatgtgtccaatggaagaggtgatgtcagctgcaatgtacaaagaaattttggatagcaaaataaaggaatctttacccatagatatagatcagctatcaggaagggacttctgccattcaaagaaaatgacaggaagtaacactgaggaaatagactcaagaatccgagatgcaggtaatgatagtgccagcactgctcctaggagcactgaggagtctctttctgaagatgtgttcacagaatcagaactttcccctatacgagaggagcttgtatcttcagatgaactgcgacaagataaatcttctggtgcgtcatcagaatctgtgcaaactgtcaatcaggctgaagtagaaagtctgacagtcaaatcagaatctactggtactcctggtcacttaagatctgatactgaacattctacaaatgaagttgggactttatgtcataaaactgatttaaataatcttgaaatggccattaaggaagatcagattgcagataactttcaaggaatatcaggtcctaaagaagacagcacaagtataaaaggtaattcagaccaggattcttttcttcatgagaattcgttacaccaagaagagagtcaaaaagaaaatatgccttgtggggaaacagcagaatttaaacaaaagcaaagtgttaacaaaggaaaacaaggaaaggagcaaaatcaggactcacagacagaggcagaagagctacgcaaactttggaaaacccatactatgcaacaaactaaacagcaaagggaaaatattcaacaagtgtcacaaaaagaagctaagcataaaattacatctgctgatggacacatagaaagttctgcacttttaaaagaaaagcaaaggcatcgattacataagttcttgtgtctcagagttggaaaaccaatgaggaaaacgtttgtatctcaagcaagtgctacaatgcaacagtatgcacagagagataagaaacatgaatattggtttgctgtgccacaagaaaggacagatcacttgtatgccttcttcattcagtggagtccagaaatatatgcagaagatactggcgaatataccagagaacctggatttatagtagtaaaaaagattgaggagtctgaaacaattgaggattctagtaatcaagcagcagccagagaatgggagattactacaagggaagacataaattcaaagcaggttgctacagtgaaagcagacctggagtctgaatcttttcgaccaaacctaagtgatcccagtgaacttttactgccagatcaaattgaaaagcttaccaagcatcttccaccaagaacaattggctatccatggactcttgtttatggtactggaaaacatggcacaagcttgaaaactctttatcgaacaatgacaggtttagacaccccagtgctgatggtgattaaagacagtgatggacaggtttttggtgcgttagcatctgagccactgaaagtgagtgatggcttttatggtactggagagacctttgtttttacattctgtccggagtttgaggtctttaagtggacaggagataatatgttttttatcaaaggagacatggattcactagctttcggtggtggaggaggagaatttgcgctttggcttgatggagatctctaccatggaagaagccattcttgtaaaacgtttgggaatcgtacactttctaagaaggaagatttctttatccaagatattgaaatctgggcttttgaataaataaaatgctctctgtcttagcaggagaatggcccaaacctgacatggacaagcattgtttggaaagttcaagaagcaatacagtgtaacatgtcacttgtgctttaaaattagtctgtatcaccatttattacagttataattttggagtttatttttcaaatcatgttcttgtcccagagttctttaggttaacactagggactgcgtccatgtactagtataacagcttgggtttgttagaatttgggcaacattttgattataatgacaacttcattttcacatgttactcagttccctaataggatggtgctcttttgttgaacctgtattgatttttttttttttaactatattgattcgtttactagaacagtctaattggggcattgaggaaatgaagactggatacttctgtatctgtgaagttggcacaggtaacatttggacatgttcatcttattcttaggaaggaaaaaatcacttgccaaaataatacatacttcatagaccactgagttctagtttttattcacactacaacattctctttaacgatgttgcaggtattctcaatttccttttaagaaaaatgaaatgtgaggagaattctggttgtaatagatgacagtacatatgatctgcaggtttgggcatatgctttcatcattaaattatctgataaagttacaagtcacaaaggagaatgagaacttaatgattctattggatttaatatattagcaagaaaacatactatttacatatgtgtagcttagtaaggcattaacataagtacaaaaactatgaaacagatgcatatttcctcaacatactgtgtcaggtatactgttttataatttggttgttttagccttattgcacaccaactcccaaaatataggttactcttgttcaaaaggaaaaaaaaaattgtgattttctttgagtggtatatgttattaattaccattagcatttgctcttataaagggcaatgattatagtagacaatattgtaactcagtagacttgttgaatatgcaaacttactgtcaagtgacctcaaaaaaaaaatgaaaagatagaatacactagtagttcttatcctcttttgtaggaaaccaataatagccattgtggcaataattcatcagttgattttaaagcttcatgttatgcaaaaaagaatcctgctgttatacatgtgacagtgactttgtgctgaaatttcagctattccagataaacattgtatatcttgtaaattaatgtttaaaggtgtagttttgttcttacagaaagtgttgattgccaggttgcttatagcactttaagttattctaaaaatgaaattataagccaaatatttggcttaagtagatttagttgtatagcacttacatatttagttcttttgaaagtttagataattatttaaagaaagcataatgctaatggaaaagaaaatctgatgttctattataatatgctattgctgaatatgaatagaaatacagggcatcatttccttgtctcattataagttagtaacaatatatagattaaatgtttacaatatagggaattgtaaataaatatatcagtttttttccccttcggtcttccacagcagtattattgtctttgtggagttgactaatgataatttaaaaatcctgtaatggatttctactaaaataaggtcatagtggcatataccaaataaaatcaaatacagaaat

SEQ ID NO: 163045 - DNA, 2956 bp, Homo sapiens
  Payload ID: 12133
  Gene Symbol: OXR1
  Gene Name: oxidation resistance 1
  Uniprot ID: Q8N573
  ENST ID: ENST00000442977
  CDS Start-End: 100-2724
aacgagacatctagtacggggctcacaggtaacagaactctgatcagatccgccccggctcccacacagctataaggttgcctgcctgcctgcacagaaatgacgaaggacaaaaacagcccagggctgaagaaaaagtcccagtcggtggatattaatgctccagggttcaaccctttggctggtgcaggaaagcaaacaccacaagccagtaagcccccggcacccaagacccccatcattgaagaagagcagaacaatgcagcaaatactcagaaacatccttccagaaggagcgaactgaagaggttctacacaattgacactggccaaaagaagaccctagacaagaaagatggaagacgaatgtcttttcagaaacctaaagggactattgagtatactgttgaatcaagggattctttgaatagcatagccctgaagtttgatacaacacctaacgaacttgttcaattaaataagttattctcccgagcagttgttactggacaggttctgtatgttcctgatcctgaatatgtctccagtgttgagagctctccatctctaagccccgtaagtcctctgtcaccaacatcatctgaggctgaatttgataagaccactaatcctgatgtccatccaacagaagcaactccctcatctactttcactggtattcgacctgcacgagttgtatcttcaacttctgaggaggaggaagcatttactgagaaatttcttaaaattaattgcaaatatattaccagtggcaagggcacagtcagtggtgtgctgctagttacaccaaataatataatgtttgatccacataaaaatgaccctttggttcaagagaatggctgtgaggaatatggcatcatgtgtccaatggaagaggtgatgtcagctgcaatgtacaaagaaattttggatagcaaaataaaggaatctttacccatagatatagatcagctatcaggaagggacttctgccattcaaagaaaatgacaggaagtaacactgaggaaatagactcaagaatccgagatgcaggtaatgatagtgccagcactgctcctaggagcactgaggagtctctttctgaagatgtgttcacagaatcagaactttcccctatacgagaggagcttgtatcttcagatgaactgcgacaagataaatcttctggtgcgtcatcagaatctgtgcaaactgtcaatcaggctgaagtagaaagtctgacagtcaaatcagaatctactggtactcctggtcacttaagatctgatactgaacattctacaaatgaagttgggactttatgtcataaaactgatttaaataatcttgaaatggccattaaggaagatcagattgcagataactttcaaggaatatcaggtcctaaagaagacagcacaagtataaaaggtaattcagaccaggattcttttcttcatgagaattcgttacaccaagaagagagtcaaaaagaaaatatgccttgtggggaaacagcagaatttaaacaaaagcaaagtgttaacaaaggaaaacaaggaaaggagcaaaatcaggactcacagacagaggcagaagagctacgcaaactttggaaaacccatactatgcaacaaactaaacagcaaagggaaaatattcaacaagtgtcacaaaaagaagctaagcataaaattacatctgctgatggacacatagaaagttctgcacttttaaaagaaaagcaaaggcatcgattacataagttcttgtgtctcagagttggaaaaccaatgaggaaaacgtttgtatctcaagcaagtgctacaatgcaacagtatgcacagagagataagaaacatgaatattggtttgctgtgccacaagaaaggacagatcacttgtatgccttcttcattcagtggagtccagaaatatatgcagaagatactggcgaatataccagagaacctggatttatagtagtaaaaaagattgaggagtctgaaacaattgaggattctagtaatcaagcagcagccagagaatgggaggtagtgtcagtggctgagtatcaccgcaggatcgatgctctaaatactgaagaactgcgcacactctgcagacgcctccagattactacaagggaagacataaattcaaagcaggttgctacagtgaaagcagacctggagtctgaatcttttcgaccaaacctaagtgatcccagtgaacttttactgccagatcaaattgaaaagcttaccaagcatcttccaccaagaacaattggctatccatggactcttgtttatggtactggaaaacatggcacaagcttgaaaactctttatcgaacaatgacaggtttagacaccccagtgctgatggtgattaaagacagtgatggacaggtttttggtgcgttagcatctgagccactgaaagtgagtgatggcttttatggtactggagagacctttgtttttacattctgtccggagtttgaggtctttaagtggacaggagataatatgttttttatcaaaggagacatggattcactagctttcggtggtggaggaggagaatttgcgctttggcttgatggagatctctaccatggaagaagccattcttgtaaaacgtttgggaatcgtacactttctaagaaggaagatttctttatccaagatattgaaatctgggcttttgaataaataaaatgctctctgtcttagcaggagaatggcccaaacctgacatggacaagcattgtttggaaagttcaagaagcaatacagtgtaacatgtcacttgtgctttaaaattagtctgtatcaccatttattacagttataattttggagtttatttttcaaatcatgttcttgtcccagagttctttaggttaacactagggactgcgtccatgtactagtataacagctt

SEQ ID NO: 163046 - DNA, 2621 bp, Homo sapiens
  Payload ID: 12133
  Gene Symbol: OXR1
  Gene Name: oxidation resistance 1
  Uniprot ID: Q8N573
  ENST ID: ENST00000449762
  CDS Start-End: 233-883
gaaattctctcttccctccccagctttacagcctccactcaggactatcattgctatggatactacttagtgattagctctctctcttgtcaatcaaatctttgtctctagcaaactgttttgtcactgtagtaaggctctagtgctggaaatttatctttgacagaggaagaatgcttttgaaaacagttcttacgtgattttatgtaacttaatttgccctggaaaggaaatgtctcgtctctggtatgggaaaaaagggagaagacatcaaccaattaatcataaatacactctgattactacaagggaagacataaattcaaagcaggttgctacagtgaaagcagacctggagtctgaatcttttcgaccaaacctaagtgatcccagtgaacttttactgccagatcaaattgaaaagcttaccaagcatcttccaccaagaacaattggctatccatggactcttgtttatggtactggaaaacatggcacaagcttgaaaactctttatcgaacaatgacaggtttagacaccccagtgctgatggtgattaaagacagtgatggacaggtttttggtgcgttagcatctgagccactgaaagtgagtgatggcttttatggtactggagagacctttgtttttacattctgtccggagtttgaggtctttaagtggacaggagataatatgttttttatcaaaggagacatggattcactagctttcggtggtggaggaggagaatttgcgctttggcttgatggagatctctaccatggaagaagccattcttgtaaaacgtttgggaatcgtacactttctaagaaggaagatttctttatccaagatattgaaatctgggcttttgaataaataaaatgctctctgtcttagcaggagaatggcccaaacctgacatggacaagcattgtttggaaagttcaagaagcaatacagtgtaacatgtcacttgtgctttaaaattagtctgtatcaccatttattacagttataattttggagtttatttttcaaatcatgttcttgtcccagagttctttaggttaacactagggactgcgtccatgtactagtataacagcttgggtttgttagaatttgggcaacattttgattataatgacaacttcattttcacatgttactcagttccctaataggatggtgctcttttgttgaacctgtattgatttttttttttttaactatattgattcgtttactagaacagtctaattggggcattgaggaaatgaagactggatacttctgtatctgtgaagttggcacaggtaacatttggacatgttcatcttattcttaggaaggaaaaaatcacttgccaaaataatacatacttcatagaccactgagttctagtttttattcacactacaacattctctttaacgatgttgcaggtattctcaatttccttttaagaaaaatgaaatgtgaggagaattctggttgtaatagatgacagtacatatgatctgcaggtttgggcatatgctttcatcattaaattatctgataaagttacaagtcacaaaggagaatgagaacttaatgattctattggatttaatatattagcaagaaaacatactatttacatatgtgtagcttagtaaggcattaacataagtacaaaaactatgaaacagatgcatatttcctcaacatactgtgtcaggtatactgttttataatttggttgttttagccttattgcacaccaactcccaaaatataggttactcttgttcaaaaggaaaaaaaaaattgtgattttctttgagtggtatatgttattaattaccattagcatttgctcttataaagggcaatgattatagtagacaatattgtaactcagtagacttgttgaatatgcaaacttactgtcaagtgacctcaaaaaaaaaatgaaaagatagaatacactagtagttcttatcctcttttgtaggaaaccaataatagccattgtggcaataattcatcagttgattttaaagcttcatgttatgcaaaaaagaatcctgctgttatacatgtgacagtgactttgtgctgaaatttcagctattccagataaacattgtatatcttgtaaattaatgtttaaaggtgtagttttgttcttacagaaagtgttgattgccaggttgcttatagcactttaagttattctaaaaatgaaattataagccaaatatttggcttaagtagatttagttgtatagcacttacatatttagttcttttgaaagtttagataattatttaaagaaagcataatgctaatggaaaagaaaatctgatgttctattataatatgctattgctgaatatgaatagaaatacagggcatcatttccttgtctcattataagttagtaacaatatatagattaaatgtttacaatatagggaattgtaaataaatatatcagtttttttccccttcggtcttccacagcagtattattgtctttgtggagttgactaatgataatttaaaaatcctgtaatggatttctactaaaataaggtcatagtggcatataccaaataaaatcaa

SEQ ID NO: 163047 - DNA, 1436 bp, Homo sapiens
  Payload ID: 12133
  Gene Symbol: OXR1
  Gene Name: oxidation resistance 1
  ENST ID: ENST00000438229
  CDS Start-End: 97-219
caggtctgatgggccggtgggcgcgctagtggtggccgccaccgccgaaaccgtcgacctcctgggccccagttccgcgtccagccccgcggcagcatggactacctgacgacgttcaccgagaagagtgggcgccttctgcggggcacggccaaccgcctgttggggttcgggggcggcggcgaagcccggcagacactggccaaaagaagaccctagacaagaaagatggaagacgaatgtcttttcagaaacctaaagggactattgagtatactgttgaatcaagggattctttgaatagcatagccctgaagtttgatacaacacctaacgaacttgttcaattaaataagttattctcccgagcagttgttactggacaggttctgtatgttcctgatcctgaatatgtctccagtgttgagagctctccatctctaagccccgtaagtcctctgtcaccaacatcatctgaggctgaatttgataagaccactaatcctgatgtccatccaacagaagcaactccctcatctactttcactggtattcgacctgcacgagttgtatcttcaacttctgaggaggaggaagcatttactgagaaatttcttaaaattaattgcaaatatattaccagtggcaagggcacagtcagtggtgtgctgctagttacaccaaataatataatgtttgatccacataaaaatgaccctttggttcaagagaatggctgtgaggaatatggcatcatgtgtccaatggaagaggtgatgtcagctgcaatgtacaaagaaattttggatagcaaaataaaggaatctttacccatagatatagatcagctatcaggaagggacttctgccattcaaagaaaatgacaggaagtaacactgaggaaatagactcaagaatccgagatgcaggtaatgatagtgccagcactgctcctaggagcactgaggagtctctttctgaagatgtgttcacagaatcagaactttcccctatacgagaggagcttgtatcttcagatgaactgcgacaagataaatcttctggtgcgtcatcagaatctgtgcaaactgtcaatcaggctgaagtagaaagtctgacagtcaaatcagaatctactggtactcctggtcacttaagatctgatactgaacattctacaaatgaagttgggactttatgtcataaaactgatttaaataatcttgaaatggccattaaggaagatcagattgcagataactttcaaggaatatcaggtcctaaagaagacagcacaagtataaaaggtaattcagaccaggattcttttcttcatgagaattcgttacaccaagaagagagtcaaaaagaaaatatgccttgtggggaaacagcagaatttaaacaaaagcaaagtgttaacaaaggaaaacaa

SEQ ID NO: 163048 - DNA, 4501 bp, Homo sapiens
  Payload ID: 12133
  Gene Symbol: OXR1
  Gene Name: oxidation resistance 1
  Uniprot ID: Q8N573
  ENST ID: ENST00000517566
  CDS Start-End: 139-2760
gtcctctcaaactgtgagtaactaagtggtttgtgcatcattccagaagcaaagctaaaatttttagcggtgttgtcgacttgacctgctaatttcctgttctggaatcgagagaagactcctcaacaagttgctgcaatgtctgtgtctaatctatcatggctgaagaaaaagtcccagtcggtggatattaatgctccagggttcaaccctttggctggtgcaggaaagcaaacaccacaagccagtaagcccccggcacccaagacccccatcattgaagaagagcagaacaatgcagcaaatactcagaaacatccttccagaaggagcgaactgaagaggttctacacaattgacactggccaaaagaagaccctagacaagaaagatggaagacgaatgtcttttcagaaacctaaagggactattgagtatactgttgaatcaagggattctttgaatagcatagccctgaagtttgatacaacacctaacgaacttgttcaattaaataagttattctcccgagcagttgttactggacaggttctgtatgttcctgatcctgaatatgtctccagtgttgagagctctccatctctaagccccgtaagtcctctgtcaccaacatcatctgaggctgaatttgataagaccactaatcctgatgtccatccaacagaagcaactccctcatctactttcactggtattcgacctgcacgagttgtatcttcaacttctgaggaggaggaagcatttactgagaaatttcttaaaattaattgcaaatatattaccagtggcaagggcacagtcagtggtgtgctgctagttacaccaaataatataatgtttgatccacataaaaatgaccctttggttcaagagaatggctgtgaggaatatggcatcatgtgtccaatggaagaggtgatgtcagctgcaatgtacaaagaaattttggatagcaaaataaaggaatctttacccatagatatagatcagctatcaggaagggacttctgccattcaaagaaaatgacaggaagtaacactgaggaaatagactcaagaatccgagatgcaggtaatgatagtgccagcactgctcctaggagcactgaggagtctctttctgaagatgtgttcacagaatcagaactttcccctatacgagaggagcttgtatcttcagatgaactgcgacaagataaatcttctggtgcgtcatcagaatctgtgcaaactgtcaatcaggctgaagtagaaagtctgacagtcaaatcagaatctactggtactcctggtcacttaagatctgatactgaacattctacaaatgaagttgggactttatgtcataaaactgatttaaataatcttgaaatggccattaaggaagatcagattgcagataactttcaaggaatatcaggtcctaaagaagacagcacaagtataaaaggtaattcagaccaggattcttttcttcatgagaattcgttacaccaagaagagagtcaaaaagaaaatatgccttgtggggaaacagcagaatttaaacaaaagcaaagtgttaacaaaggaaaacaaggaaaggagcaaaatcaggactcacagacagaggcagaagagctacgcaaactttggaaaacccatactatgcaacaaactaaacagcaaagggaaaatattcaacaagtgtcacaaaaagaagctaagcataaaattacatctgctgatggacacatagaaagttctgcacttttaaaagaaaagcaaaggcatcgattacataagttcttgtgtctcagagttggaaaaccaatgaggaaaacgtttgtatctcaagcaagtgctacaatgcaacagtatgcacagagagataagaaacatgaatattggtttgctgtgccacaagaaaggacagatcacttgtatgccttcttcattcagtggagtccagaaatatatgcagaagatactggcgaatataccagagaacctggatttatagtagtaaaaaagattgaggagtctgaaacaattgaggattctagtaatcaagcagcagccagagaatgggaggtagtgtcagtggctgagtatcaccgcaggatcgatgctctaaatactgaagaactgcgcacactctgcagacgcctccagattactacaagggaagacataaattcaaagcaggttgctacagtgaaagcagacctggagtctgaatcttttcgaccaaacctaagtgatcccagtgaacttttactgccagatcaaattgaaaagcttaccaagcatcttccaccaagaacaattggctatccatggactcttgtttatggtactggaaaacatggcacaagcttgaaaactctttatcgaacaatgacaggtttagacaccccagtgctgatggtgattaaagacagtgatggacaggtttttggtgcgttagcatctgagccactgaaagtgagtgatggcttttatggtactggagagacctttgtttttacattctgtccggagtttgaggtctttaagtggacaggagataatatgttttttatcaaaggagacatggattcactagctttcggtggtggaggaggagaatttgcgctttggcttgatggagatctctaccatggaagaagccattcttgtaaaacgtttgggaatcgtacactttctaagaaggaagatttctttatccaagatattgaaatctgggcttttgaataaataaaatgctctctgtcttagcaggagaatggcccaaacctgacatggacaagcattgtttggaaagttcaagaagcaatacagtgtaacatgtcacttgtgctttaaaattagtctgtatcaccatttattacagttataattttggagtttatttttcaaatcatgttcttgtcccagagttctttaggttaacactagggactgcgtccatgtactagtataacagcttgggtttgttagaatttgggcaacattttgattataatgacaacttcattttcacatgttactcagttccctaataggatggtgctcttttgttgaacctgtattgatttttttttttttaactatattgattcgtttactagaacagtctaattggggcattgaggaaatgaagactggatacttctgtatctgtgaagttggcacaggtaacatttggacatgttcatcttattcttaggaaggaaaaaatcacttgccaaaataatacatacttcatagaccactgagttctagtttttattcacactacaacattctctttaacgatgttgcaggtattctcaatttccttttaagaaaaatgaaatgtgaggagaattctggttgtaatagatgacagtacatatgatctgcaggtttgggcatatgctttcatcattaaattatctgataaagttacaagtcacaaaggagaatgagaacttaatgattctattggatttaatatattagcaagaaaacatactatttacatatgtgtagcttagtaaggcattaacataagtacaaaaactatgaaacagatgcatatttcctcaacatactgtgtcaggtatactgttttataatttggttgttttagccttattgcacaccaactcccaaaatataggttactcttgttcaaaaggaaaaaaaaaattgtgattttctttgagtggtatatgttattaattaccattagcatttgctcttataaagggcaatgattatagtagacaatattgtaactcagtagacttgttgaatatgcaaacttactgtcaagtgacctcaaaaaaaaaatgaaaagatagaatacactagtagttcttatcctcttttgtaggaaaccaataatagccattgtggcaataattcatcagttgattttaaagcttcatgttatgcaaaaaagaatcctgctgttatacatgtgacagtgactttgtgctgaaatttcagctattccagataaacattgtatatcttgtaaattaatgtttaaaggtgtagttttgttcttacagaaagtgttgattgccaggttgcttatagcactttaagttattctaaaaatgaaattataagccaaatatttggcttaagtagatttagttgtatagcacttacatatttagttcttttgaaagtttagataattatttaaagaaagcataatgctaatggaaaagaaaatctgatgttctattataatatgctattgctgaatatgaatagaaatacagggcatcatttccttgtctcattataagttagtaacaatatatagattaaatgtttacaatatagggaattgtaaataaatatatcagtttttttccccttcggtcttccacagcagtattattgtctttgtggagttgactaatgataatttaaaaatcctgtaatggatttctactaaaataaggtcatagtggcatataccaaataaaatcaaata

SEQ ID NO: 163049 - DNA, 564 bp, Homo sapiens
  Payload ID: 12133
  Gene Symbol: OXR1
  Gene Name: oxidation resistance 1
  ENST ID: ENST00000517686
  CDS Start-End: 266-564
attcttgtggctaccactgtcttacccagcactaaaagcttcttaaaattagtcagaggaagacaagtgggaaggtgtagacttctcacttcaatagtctgctaaagatggaggaaaaatatggtgctattcaaagacagtctagacttaaagatttagaattttggatggaaataatccggtgaaatagcaagaacatttgaaagagaacttgacaaaccactgctgcagaaagctgaattccaaggaaatatgcccaatatccatgaagctgagaaacactggccaaaagaagaccctagacaagaaagatggaagacgaatgtcttttcagaaacctaaagggactattgagtatactgttgaatcaagggattctttgaatagcatagccctgaagtttgatacaacacctaacgaacttgttcaattaaataagttattctcccgagcagttgttactggacaggttctgtatgttcctgatcctgaatatgtctccagtgttgagagctctccatctctaagccccgtaagtcctctgtcaccaacatcatctgaggc

SEQ ID NO: 163050 - DNA, 2476 bp, Homo sapiens
  Payload ID: 12133
  Gene Symbol: OXR1
  Gene Name: oxidation resistance 1
  ENST ID: ENST00000519415
  CDS Start-End: 1-1556
gagatatagatcagctatcaggaagggacttctgccattcaaagaaaatgacaggaagtaacactgaggaaatagactcaagaatccgagatgcaggtaatgatagtgccagcactgctcctaggagcactgaggagtctctttctgaagatgtgttcacagaatcagaactttcccctatacgagaggagcttgtatcttcagatgaactgcgacaagataaatcttctggtgcgtcatcagaatctgtgcaaactgtcaatcaggctgaagtagaaagtctgacagtcaaatcagaatctactggtactcctggtcacttaagatctgatactgaacattctacaaatgaagttgggactttatgtcataaaactgatttaaataatcttgaaatggccattaaggaagatcagattgcagataactttcaaggaatatcaggtcctaaagaagacagcacaagtataaaaggtaattcagaccaggattcttttcttcatgagaattcgttacaccaagaagagagtcaaaaagaaaatatgccttgtggggaaacagcagaatttaaacaaaagcaaagtgttaacaaaggaaaacaaggaaaggagcaaaatcaggactcacagacagaggcagaagagctacgcaaactttggaaaacccatactatgcaacaaactaaacagcaaagggaaaatattcaacaagtgtcacaaaaagaagctaagcataaaattacatctgctgatggacacatagaaagttctgcacttttaaaagaaaagcaaaggcatcgattacataagttcttgtgtctcagagttggaaaaccaatgaggaaaacgtttgtatctcaagcaagtgctacaatgcaacagtatgcacagagagataagaaacatgaatattggtttgctgtgccacaagaaaggacagatcacttgtatgccttcttcattcagtggagtccagaaatatatgcagaagatactggcgaatataccagagaacctggatttatagtagtaaaaaagattgaggagtctgaaacaattgaggattctagtaatcaagcagcagccagagaatgggagcttaccaagcatcttccaccaagaacaattggctatccatggactcttgtttatggtactggaaaacatggcacaagcttgaaaactctttatcgaacaatgacaggtttagacaccccagtgctgatggtgattaaagacagtgatggacaggtttttggtgcgttagcatctgagccactgaaagtgagtgatggcttttatggtactggagagacctttgtttttacattctgtccggagtttgaggtctttaagtggacaggagataatatgttttttatcaaaggagacatggattcactagctttcggtggtggaggaggagaatttgcgctttggcttgatggagatctctaccatggaagaagccattcttgtaaaacgtttgggaatcgtacactttctaagaaggaagatttctttatccaagatattgaaatctgggcttttgaataaataaaatgctctctgtcttagcaggagaatggcccaaacctgacatggacaagcattgtttggaaagttcaagaagcaatacagtgtaacatgtcacttgtgctttaaaattagtctgtatcaccatttattacagttataattttggagtttatttttcaaatcatgttcttgtcccagagttctttaggttaacactagggactgcgtccatgtactagtataacagcttgggtttgttagaatttgggcaacattttgattataatgacaacttcattttcacatgttactcagttccctaataggatggtgctcttttgttgaacctgtattgatttttttttttttaactatattgattcgtttactagaacagtctaattggggcattgaggaaatgaagactggatacttctgtatctgtgaagttggcacaggtaacatttggacatgttcatcttattcttaggaaggaaaaaatcacttgccaaaataatacatacttcatagaccactgagttctagtttttattcacactacaacattctctttaacgatgttgcaggtattctcaatttccttttaagaaaaatgaaatgtgaggagaattctggttgtaatagatgacagtacatatgatctgcaggtttgggcatatgctttcatcattaaattatctgataaagttacaagtcacaaaggagaatgagaacttaatgattctattggatttaatatattagcaagaaaacatactatttacatatgtgtagcttagtaaggcattaacataagtacaaaaactatgaaacagatgcatatttcctcaacatactgtgtcaggtatactgttttataatttggttgttttagccttattgcacaccaactcccaaaatataggttactcttgttc

SEQ ID NO: 163051 - DNA, 2007 bp, Homo sapiens
  Payload ID: 12133
  Gene Symbol: OXR1
  Gene Name: oxidation resistance 1
  Uniprot ID: Q8N573
  ENST ID: ENST00000497705
  CDS Start-End: 40-1551
actgctagctgagcaaggttcgaaggaaggacctcagaaatgttctgccagcgcaaagacactggccaaaagaagaccctagacaagaaagatggaagacgaatgtcttttcagaaacctaaagggactattgagtatactgttgaatcaagggattctttgaatagcatagccctgaagtttgatacaacacctaacgaacttgttcaattaaataagttattctcccgagcagttgttactggacaggttctgtatgttcctgatcctgaatatgtctccagtgttgagagctctccatctctaagccccgtaagtcctctgtcaccaacatcatctgaggctgaatttgataagaccactaatcctgatgtccatccaacagaagcaactccctcatctactttcactggtattcgacctgcacgagttgtatcttcaacttctgaggaggaggaagcatttactgagaaatttcttaaaattaattgcaaatatattaccagtggcaagggcacagtcagtggtgtgctgctagttacaccaaataatataatgtttgatccacataaaaatgaccctttggttcaagagaatggctgtgaggaatatggcatcatgtgtccaatggaagaggtgatgtcagctgcaatgtacaaagaaattttggatagcaaaataaaggaatctttacccatagatatagatcagctatcaggaagggacttctgccattcaaagaaaatgacaggaagtaacactgaggaaatagactcaagaatccgagatgcaggtaatgatagtgccagcactgctcctaggagcactgaggagtctctttctgaagatgtgttcacagaatcagaactttcccctatacgagaggagcttgtatcttcagatgaactgcgacaagataaatcttctggtgcgtcatcagaatctgtgcaaactgtcaatcaggctgaagtagaaagtctgacagtcaaatcagaatctactggtactcctggtcacttaagatctgatactgaacattctacaaatgaagttgggactttatgtcataaaactgatttaaataatcttgaaatggccattaaggaagatcagattgcagataactttcaaggaatatcaggtcctaaagaagacagcacaagtataaaaggtaattcagaccaggattcttttcttcatgagaattcgttacaccaagaagagagtcaaaaagaaaatatgccttgtggggaaacagcagaatttaaacaaaagcaaagtgttaacaaaggaaaacaaggaaaggagcaaaatcaggactcacagacagaggcagaagagctacgcaaactttggaaaacccatactatgcaacaaactaaacagcaaagggaaaatattcaacaagtgtcacaaaaagaagctaagcataaaattacatctgctgatggacacatagaaagtaagtgttatagagtaaatgaagttagttcatccaattgtatggtgtctccgtctttcctcactgactcaaaagccgctgtaccttagggcaacctgaaggataagtgagtgacccttgaccggtgattctctggggacaagtatatacagtctccagtgtctactgtcttttcttatcccacaggtggattgtacacataatgagcatcattgctacccaccatgtttaaacattcttggctcactacatcgtatcattaaacaatttatttcttgagaaattgcacaaaagctgtataatacctttgatcactccattttctcttaaaaagtttttggtgtgttaccattaaaaatgtcttttttcatatataacattttaattgccaaagttgtaatcccatcttttataaaatgtacagttaaacctaaaagtgtacttacagaattcttccacgtatcgagaagtttcatcatcatcatctaattattttcttttaaaaacctgccctcaggacaaataaaaacactattttatctgtc

SEQ ID NO: 163052 - DNA, 3599 bp, Homo sapiens
  Payload ID: 12133
  Gene Symbol: OXR1
  Gene Name: oxidation resistance 1
  Uniprot ID: Q8N573
  ENST ID: ENST00000531443
  CDS Start-End: 139-2679
gtcctctcaaactgtgagtaactaagtggtttgtgcatcattccagaagcaaagctaaaatttttagcggtgttgtcgacttgacctgctaatttcctgttctggaatcgagagaagactcctcaacaagttgctgcaatgtctgtgtctaatctatcatggctgaagaaaaagtcccagtcggtggatattaatgctccagggttcaaccctttggctggtgcaggaaagcaaacaccacaagccagtaagcccccggcacccaagacccccatcattgaagaagagcagaacaatgcagcaaatactcagaaacatccttccagaaggagcgaactgaagaggttctacacaattgacactggccaaaagaagaccctagacaagaaagatggaagacgaatgtcttttcagaaacctaaagggactattgagtatactgttgaatcaagggattctttgaatagcatagccctgaagtttgatacaacacctaacgaacttgttcaattaaataagttattctcccgagcagttgttactggacaggttctgtatgttcctgatcctgaatatgtctccagtgttgagagctctccatctctaagccccgtaagtcctctgtcaccaacatcatctgaggctgaatttgataagaccactaatcctgatgtccatccaacagaagcaactccctcatctactttcactggtattcgacctgcacgagttgtatcttcaacttctgaggaggaggaagcatttactgagaaatttcttaaaattaattgcaaatatattaccagtggcaagggcacagtcagtggtgtgctgctagttacaccaaataatataatgtttgatccacataaaaatgaccctttggttcaagagaatggctgtgaggaatatggcatcatgtgtccaatggaagaggtgatgtcagctgcaatgtacaaagaaattttggatagcaaaataaaggaatctttacccatagatatagatcagctatcaggaagggacttctgccattcaaagaaaatgacaggaagtaacactgaggaaatagactcaagaatccgagatgcaggtaatgatagtgccagcactgctcctaggagcactgaggagtctctttctgaagatgtgttcacagaatcagaactttcccctatacgagaggagcttgtatcttcagatgaactgcgacaagataaatcttctggtgcgtcatcagaatctgtgcaaactgtcaatcaggctgaagtagaaagtctgacagtcaaatcagaatctactggtactcctggtcacttaagatctgatactgaacattctacaaatgaagttgggactttatgtcataaaactgatttaaataatcttgaaatggccattaaggaagatcagattgcagataactttcaaggaatatcaggtcctaaagaagacagcacaagtataaaaggtaattcagaccaggattcttttcttcatgagaattcgttacaccaagaagagagtcaaaaagaaaatatgccttgtggggaaacagcagaatttaaacaaaagcaaagtgttaacaaaggaaaacaaggaaaggagcaaaatcaggactcacagacagaggcagaagagctacgcaaactttggaaaacccatactatgcaacaaactaaacagcaaagggaaaatattcaacaagtgtcacaaaaagaagctaagcataaaattacatctgctgatggacacatagaaagttctgcacttttaaaagaaaagcaaaggcatcgattacataagttcttgtgtctcagagttggaaaaccaatgaggaaaacgtttgtatctcaagcaagtgctacaatgcaacagtatgcacagagagataagaaacatgaatattggtttgctgtgccacaagaaaggacagatcacttgtatgccttcttcattcagtggagtccagaaatatatgcagaagatactggcgaatataccagagaacctggatttatagtagtaaaaaagattgaggagtctgaaacaattgaggattctagtaatcaagcagcagccagagaatgggagattactacaagggaagacataaattcaaagcaggttgctacagtgaaagcagacctggagtctgaatcttttcgaccaaacctaagtgatcccagtgaacttttactgccagatcaaattgaaaagcttaccaagcatcttccaccaagaacaattggctatccatggactcttgtttatggtactggaaaacatggcacaagcttgaaaactctttatcgaacaatgacaggtttagacaccccagtgctgatggtgattaaagacagtgatggacaggtttttggtgcgttagcatctgagccactgaaagtgagtgatggcttttatggtactggagagacctttgtttttacattctgtccggagtttgaggtctttaagtggacaggagataatatgttttttatcaaaggagacatggattcactagctttcggtggtggaggaggagaatttgcgctttggcttgatggagatctctaccatggaagaagccattcttgtaaaacgtttgggaatcgtacactttctaagaaggaagatttctttatccaagatattgaaatctgggcttttgaataaataaaatgctctctgtcttagcaggagaatggcccaaacctgacatggacaagcattgtttggaaagttcaagaagcaatacagtgtaacatgtcacttgtgctttaaaattagtctgtatcaccatttattacagttataattttggagtttatttttcaaatcatgttcttgtcccagagttctttaggttaacactagggactgcgtccatgtactagtataacagcttgggtttgttagaatttgggcaacattttgattataatgacaacttcattttcacatgttactcagttccctaataggatggtgctcttttgttgaacctgtattgatttttttttttttaactatattgattcgtttactagaacagtctaattggggcattgaggaaatgaagactggatacttctgtatctgtgaagttggcacaggtaacatttggacatgttcatcttattcttaggaaggaaaaaatcacttgccaaaataatacatacttcatagaccactgagttctagtttttattcacactacaacattctctttaacgatgttgcaggtattctcaatttccttttaagaaaaatgaaatgtgaggagaattctggttgtaatagatgacagtacatatgatctgcaggtttgggcatatgctttcatcattaaattatctgataaagttacaagtcacaaaggagaatgagaacttaatgattctattggatttaatatattagcaagaaaacatactatttacatatgtgtagcttagtaaggcattaacataagtacaaaaactatgaaacagatgcatatttcctcaacatactgtgtcaggtatactgttttataatttggttgttttagccttattgcacaccaactcccaaaatataggttactcttgttc

SEQ ID NO: 163053 - DNA, 993 bp, Homo sapiens
  Payload ID: 12133
  Gene Symbol: OXR1
  Gene Name: oxidation resistance 1
  ENST ID: ENST00000521592
  CDS Start-End: 380-739
atgcttttgaaaacagttcttacgtgattttatgtaacttaatttgccctggaaaggaaatgtctcgtctctggtagtgtcagtggctgagtatcaccgcaggatcgatgctctaaatactgaagaactgcgcacactctgcagacgcctccagattactacaagggaagacataaattcaaagcaggttgctacagtgaaagcagacctggagtctgaatcttttcgaccaaacctaagtgatcccagtgaacttttactgccagatcaaattgaaaagcttaccaagcatcttccaccaagaacaattggctatccatggactcttgtttatggtactggaaaacatggcacaagcttgaaaactctttatcgaacaatgacaggtttagacaccccagtgctgatggtgattaaagacagtgatggacaggtttttggtgcgttagcatctgagccactgaaagtgagtgatggcttttatggtactggagagacctttgtttttacattctgtccggagtttgaggtctttaagtggacaggagataatatgttttttatcaaaggagacatggattcactagctttcggtggtggaggaggagaatttgcgctttggcttgatggagatctctaccatggaagaagccattcttgtaaaacgtttgggaatcgtacactttctaagaaggaagatttctttatccaagatattgaaatctgggcttttgaataaataaaatgctctctgtcttagcaggagaatggcccaaacctgacatggacaagcattgtttggaaagttcaagaagcaatacagtgtaacatgtcacttgtgctttaaaattagtctgtatcaccatttattacagttataattttggagtttatttttcaaatcatgttcttgtcccagagttctttaggttaacactagggactgcgtccatgtactagtataacagcttgggtttgttagaatttgggcaa

SEQ ID NO: 163054 - DNA, 2391 bp, Homo sapiens
  Payload ID: 12134
  Gene Symbol: OSGIN1
  Gene Name: oxidative stress induced growth inhibitor 1
  Uniprot ID: Q9UJX0
  ENST ID: ENST00000343939
  CDS Start-End: 384-2066
ggagcaactcagcaattctgttaccgataatcacctaacaggtaaacaagatggcagggaggaaagtccacgtctcgccccacagttccccatatcagcaaatcttcaaattctagaacaaggtcagggtcagcaggggcagggcaggtttggaggaaggccaggccaagcccaggagaagagacagggtccagggaagcccacctccttcctgggtctcccctccagacccccaagacccccagcctcaggccttctcaagccccagccttaaggagttgagcactccagggtggggggtctctgatcctgggtgcctgtctctctctgcctcagtttacacattcaaaaccactgggaagccacagaccaggcaccgtgggatggggaagtggagaccgagaggctgctgccggggaaatatgcagtgcagacaagaggttcctgctactctcacctcatcagagttgttttctaccaggaaccagccccagccccagccccagcccctgctggcagatgctccggtaccctgggctgtggcttccaggatgtgcctgactccagggcagggctgtggccaccagggccaggacgagggtccgctgccagccccaagccccccaccagccatgagctcctccagaaaggaccacctcggcgccagcagctcagagcccctcccggtcatcattgtgggtaacggcccctctggtatctgcctgtcctacctgctctccggctacacaccctacacgaagccagatgccatccacccacaccccctgctgcagaggaagctcaccgaggccccgggggtctccatcctggaccaggacctggactacctgtccgaaggcctcgaaggccgatcccaaagccccgtggccctgctctttgatgcccttctacgcccagacacagactttgggggaaacatgaagtcggtcctcacctggaagcaccggaaggagcacgccatcccccacgtggttctgggccggaacctccccgggggagcctggcactccatcgaaggctccatggtgatcctgagccaaggccagtggatggggctcccggacctggaggtcaaggactggatgcagaagaagcgaagaggtcttcgcaacagccgggccactgccggggacatcgcccactactacagggactacgtggtcaagaagggtctggggcataactttgtgtccggtgctgtagtcacagccgtggagtgggggacccccgatcccagcagctgtggggcccaggactccagccccctcttccaggtgagcggcttcctgaccaggaaccaggcccagcagcccttctcgctgtgggcccgcaacgtggtcctcgccacaggcacgttcgacagcccggcccggctgggcatccccggggaggccctgcccttcatccaccatgagctgtctgccctggaggccgccacaagggtgggtgcggtgaccccggcctcagaccctgtcctcatcattggcgcggggctgtcagcggccgacgcggtcctctacgcccgccactacaacatcccggtgatccatgccttccgccgggccgtggacgaccctggcctggtgttcaaccagctgcccaagatgctgtaccccgagtaccacaaggtgcaccagatgatgcgggagcagtccatcctgtcgcccagcccctatgagggttaccgcagcctccccaggcaccagctgctgtgcttcaaggaagactgccaggccgtgttccaggacctcgagggtgtcgagaaggtgtttggggtctccctggtgctggtcctcatcggctcccaccccgacctctccttcctgcctggggcaggggctgactttgcagtggatcctgaccagccgctgagcgccaagaggaaccccattgacgtggaccccttcacctaccagagcacccgccaggagggcctgtacgccatggggccgctggccggggacaacttcgtgaggtttgtgcaggggggcgccttggctgtggccagctccctgctaaggaaggagaccaggaagccaccctaacactcggccagacccgctggctcccaggccctgagaggacagagatgaccacatccctgctggatgcaggacccgtccaaagatgccccggggaggggtgtcagcccacgttgctggcctttggggtcaagaggagtagggatcccaggctgccctggacttagaccagtgtctgaggtggtaacagcggccgcaggccagggttggcctagacctgggatttgtggggaaagctgctggtgtgaccagctgagcacccagccaggagacctgcagccctgcgccttccagaagcaggtcccaaataaagccagtgcccacctgc

SEQ ID NO: 163055 - DNA, 2230 bp, Homo sapiens
  Payload ID: 12134
  Gene Symbol: OSGIN1
  Gene Name: oxidative stress induced growth inhibitor 1
  Uniprot ID: Q9UJX0
  ENST ID: ENST00000361711
  CDS Start-End: 473-1906
ggagcaactcagcaattctgttaccgataatcacctaacaggtaaacaagatggcagggaggaaagtccacgtctcgccccacagttccccatatcagcaaatcttcaaattctagaacaaggtcagggtcagcaggggcagggcaggtttggaggaaggccaggccaagcccaggagaagagacagggtccagggaagcccacctccttcctgggtctcccctccagacccccaagacccccagcctcaggccttctcaagccccagccttaaggagttgagcactccagggtggggggtctctgatcctgggtgcctgtctctctctgcctcagtttacacattcaaaaccactgggaagccacagaccaggcaccgtgggatggggaagtggagaccgagaggctgctgccggggaaatatgcagtgcagacaagaggtccgctgccagccccaagccccccaccagccatgagctcctccagaaaggaccacctcggcgccagcagctcagagcccctcccggtcatcattgtgggtaacggcccctctggtatctgcctgtcctacctgctctccggctacacaccctacacgaagccagatgccatccacccacaccccctgctgcagaggaagctcaccgaggccccgggggtctccatcctggaccaggacctggactacctgtccgaaggcctcgaaggccgatcccaaagccccgtggccctgctctttgatgcccttctacgcccagacacagactttgggggaaacatgaagtcggtcctcacctggaagcaccggaaggagcacgccatcccccacgtggttctgggccggaacctccccgggggagcctggcactccatcgaaggctccatggtgatcctgagccaaggccagtggatggggctcccggacctggaggtcaaggactggatgcagaagaagcgaagaggtcttcgcaacagccgggccactgccggggacatcgcccactactacagggactacgtggtcaagaagggtctggggcataactttgtgtccggtgctgtagtcacagccgtggagtgggggacccccgatcccagcagctgtggggcccaggactccagccccctcttccaggtgagcggcttcctgaccaggaaccaggcccagcagcccttctcgctgtgggcccgcaacgtggtcctcgccacaggcacgttcgacagcccggcccggctgggcatccccggggaggccctgcccttcatccaccatgagctgtctgccctggaggccgccacaagggtgggtgcggtgaccccggcctcagaccctgtcctcatcattggcgcggggctgtcagcggccgacgcggtcctctacgcccgccactacaacatcccggtgatccatgccttccgccgggccgtggacgaccctggcctggtgttcaaccagctgcccaagatgctgtaccccgagtaccacaaggtgcaccagatgatgcgggagcagtccatcctgtcgcccagcccctatgagggttaccgcagcctccccaggcaccagctgctgtgcttcaaggaagactgccaggccgtgttccaggacctcgagggtgtcgagaaggtgtttggggtctccctggtgctggtcctcatcggctcccaccccgacctctccttcctgcctggggcaggggctgactttgcagtggatcctgaccagccgctgagcgccaagaggaaccccattgacgtggaccccttcacctaccagagcacccgccaggagggcctgtacgccatggggccgctggccggggacaacttcgtgaggtttgtgcaggggggcgccttggctgtggccagctccctgctaaggaaggagaccaggaagccaccctaacactcggccagacccgctggctcccaggccctgagaggacagagatgaccacatccctgctggatgcaggacccgtccaaagatgccccggggaggggtgtcagcccacgttgctggcctttggggtcaagaggagtagggatcccaggctgccctggacttagaccagtgtctgaggtggtaacagcggccgcaggccagggttggcctagacctgggatttgtggggaaagctgctggtgtgaccagctgagcacccagccaggagacctgcagccctgcgccttccagaagcaggtcccaaataaagccagtgcccacctg

SEQ ID NO: 163056 - DNA, 1940 bp, Homo sapiens
  Payload ID: 12134
  Gene Symbol: OSGIN1
  Gene Name: oxidative stress induced growth inhibitor 1
  Uniprot ID: Q9UJX0
  ENST ID: ENST00000393306
  CDS Start-End: 182-1615
acttccctctggcctctcagagcctcttggatccccacagggtaatgggtgtcccgatctcgcgggggactctgtgatccgtgttcccctgaccctcctagtgcacaacttggccgggctcactgggctcctgcaccactgcctgtcaggtccgctgccagccccaagccccccaccagccatgagctcctccagaaaggaccacctcggcgccagcagctcagagcccctcccggtcatcattgtgggtaacggcccctctggtatctgcctgtcctacctgctctccggctacacaccctacacgaagccagatgccatccacccacaccccctgctgcagaggaagctcaccgaggccccgggggtctccatcctggaccaggacctggactacctgtccgaaggcctcgaaggccgatcccaaagccccgtggccctgctctttgatgcccttctacgcccagacacagactttgggggaaacatgaagtcggtcctcacctggaagcaccggaaggagcacgccatcccccacgtggttctgggccggaacctccccgggggagcctggcactccatcgaaggctccatggtgatcctgagccaaggccagtggatggggctcccggacctggaggtcaaggactggatgcagaagaagcgaagaggtcttcgcaacagccgggccactgccggggacatcgcccactactacagggactacgtggtcaagaagggtctggggcataactttgtgtccggtgctgtagtcacagccgtggagtgggggacccccgatcccagcagctgtggggcccaggactccagccccctcttccaggtgagcggcttcctgaccaggaaccaggcccagcagcccttctcgctgtgggcccgcaacgtggtcctcgccacaggcacgttcgacagcccggcccggctgggcatccccggggaggccctgcccttcatccaccatgagctgtctgccctggaggccgccacaagggtgggtgcggtgaccccggcctcagaccctgtcctcatcattggcgcggggctgtcagcggccgacgcggtcctctacgcccgccactacaacatcccggtgatccatgccttccgccgggccgtggacgaccctggcctggtgttcaaccagctgcccaagatgctgtaccccgagtaccacaaggtgcaccagatgatgcgggagcagtccatcctgtcgcccagcccctatgagggttaccgcagcctccccaggcaccagctgctgtgcttcaaggaagactgccaggccgtgttccaggacctcgagggtgtcgagaaggtgtttggggtctccctggtgctggtcctcatcggctcccaccccgacctctccttcctgcctggggcaggggctgactttgcagtggatcctgaccagccgctgagcgccaagaggaaccccattgacgtggaccccttcacctaccagagcacccgccaggagggcctgtacgccatggggccgctggccggggacaacttcgtgaggtttgtgcaggggggcgccttggctgtggccagctccctgctaaggaaggagaccaggaagccaccctaacactcggccagacccgctggctcccaggccctgagaggacagagatgaccacatccctgctggatgcaggacccgtccaaagatgccccggggaggggtgtcagcccacgttgctggcctttggggtcaagaggagtagggatcccaggctgccctggacttagaccagtgtctgaggtggtaacagcggccgcaggccagggttggcctagacctgggatttgtggggaaagctgctggtgtgaccagctgagcacccagccaggagacctgcagccctgcgccttccagaagcaggtcccaaataaagccagtgcccacctgc

SEQ ID NO: 163057 - DNA, 434 bp, Homo sapiens
  Payload ID: 12134
  Gene Symbol: OSGIN1
  Gene Name: oxidative stress induced growth inhibitor 1
  ENST ID: ENST00000561552
  CDS Start-End: 120-434
cgggttcaagcaattctcctccctcagactcctgagtagctgggattacagaaaccctcttgtgagcacgcctgaatttggaggatcacgtcacaagctctcaatagccacttgaactcatggccttaaagagcacaagtatcggcctttgtcttagtcaagctttcgaggagcaactcagcaattctgttaccgataatcacctaacagtttacacattcaaaaccactgggaagccacagaccaggcaccgtgggatggggaagtggagaccgagaggctgctgccggggaaatatgcagtgcagacaagagggtaatgggtgtcccgatctcgcgggggactctgtgatccgtgttcccctgaccctcctagtgcacaacttggccgggctcactgggctcctgcaccactgcctgtcaggtccgctgcca

SEQ ID NO: 163058 - DNA, 534 bp, Homo sapiens
  Payload ID: 12134
  Gene Symbol: OSGIN1
  Gene Name: oxidative stress induced growth inhibitor 1
  ENST ID: ENST00000567707
  CDS Start-End: 167-534
actgcttccatttccccaagtccatcccagctcctggggcaggccacagcgctggcccattccctgtggcagattcactccaggcaggtgcttcccgtctgtgatcctactgtgtccctcaaccaccctaggaggtccgctgccagccccaagccccccaccagccatgagctcctccagaaaggaccacctcggcgccagcagctcagagcccctcccggtcatcattgtgggtaacggcccctctggtatctgcctgtcctacctgctctccggctacacaccctacacgaagccagatgccatccacccacaccccctgctgcagaggaagctcaccgaggccccgggggtctccatcctggaccaggacctggactacctgtccgaaggcctcgaaggccgatcccaaagccccgtggccctgctctttgatgcccttctacgcccagacacagactttgggggaaacatgaagtcggtcctcacctggaagcaccggaaggagcacgccatcccccacgtggttctggg

SEQ ID NO: 163059 - DNA, 833 bp, Homo sapiens
  Payload ID: 12134
  Gene Symbol: OSGIN1
  Gene Name: oxidative stress induced growth inhibitor 1
  ENST ID: ENST00000565123
  CDS Start-End: 165-656
cagagcctcttggatccccacagggtaatgggtgtcccgatctcgcgggggactctgtgatccgtgttcccctgaccctcctagtgcacaacttggccgggctcactgggctcctgcaccactgcctgtcaggtccgctgccagccccaagccccccaccagccatgagctcctccagaaaggaccacctcggcgccagcagctcagagcccctcccggtcatcattgtgggtaacggcccctctggtatctgcctgtcctacctgctctccggctacacaccctacacgaagccagatgccatccacccacaccccctgctgcagaggaagctcaccgaggccccgggggtctccatcctggaccaggacctggactacctgtccgaaggcctcgaaggccgatcccaaagccccgtggccctgctctttgatgcccttctacgcccagacacagactttgggggaaacatgaagtcggtcctcacctggaagcaccggaaggagcacgccatcccccacgtggttctgggccggaacctccccgggggagcctggcactccatcgaaggctccatggtgatcctgagccaaggccagtggatggggctcccggacctggaggtcaaggactggatgcagaagaagcgaaggtgaggccgccccggaacgccttgggggacacggaaggttgggcctgtgaacccagaaaatctgagacaggtctcagttaatttagaaagtttatttttccaaggttgaggacgcgcccgtgacagcctcaggaagtcctaatgacatgtgcccaaggtgatccggcacagcttggtttta

SEQ ID NO: 163060 - DNA, 4209 bp, Homo sapiens
  Payload ID: 12135
  Gene Symbol: OSGIN2
  Gene Name: oxidative stress induced growth inhibitor family member 2
  Uniprot ID: Q9Y236
  ENST ID: ENST00000297438
  CDS Start-End: 356-1873
ggtgtggtctggggcgggcctgatgagcacctggattttcacccggcgtgctggtaattcctacacttgtgggtgtttgagagacatgaagaggggaggatgacctcttcccggaagcgggacttccataaaagaagcgtggtgggcgggtcccgggcacctgtggtttggtgagtcctccaggtaactgtgatgcgggggtcagcgggagaggcacccggaagctcccggcgtctgcaccccggcagcgcgaggaaatgcccaaagaaactatagtgacactgaaactgaaggagagatttttaattccttagtgcaatactttggtgacaacttggggcgaaaagttaaagcgatgccattagttgaagaaacttctttactggaagattcgtcagtgacttttcctgtggtaataataggaaatggaccctcaggaatatgcctttcttatatgttatcaggctacagaccgtatttatcatcagaagcaatacacccaaatacaatcttaaatagtaaattagaagaagcaagacatctttccattgttgatcaggacttagaatacttgtctgagggccttgagggccgatcatccaatccagttgcagtacttttcgatacacttcttcatccagatgctgactttgggtatgattatccatccgttttgcattggaaattagagcaacatcattatatccctcacgtagttcttggtaaaggtccacctggtggggcttggcataatatggaaggctccatgttgacaatcagctttggaagttggatggaactacctggacttaaatttaaggactgggtatcaagtaaacgaaggagcctaaaaggggatcgagttatgccagaggaaatagctcgctactataaacattatgtaaaagtcatgggtcttcagaagaatttcagagagaatacttacataacttccgtatcaagactctacagagatcaagatgatgatgatattcaagacagagatatttcaacaaagcatttacagatagagaagtcaaactttatcaagagaaactgggaaattaggggttatcagcgaatagctgatggttctcatgttcccttctgcctctttgctgagaatgtagcgctggcaactggaacgctggattctcctgcccatctggaaattgaaggggaagattttccttttgtgtttcattcaatgcctgaatttggagctgctataaacaaaggaaagttgcgtggcaaagtggatccagtgttaattgtaggttctgggcttactgccgctgacgcagtactgtgtgcttacaacagtaatatccctgtgattcatgtgtttcgcagacgagtaactgatccaagcttaattttcaaacagcttcccaaaaagctgtatcctgaatatcataaagtctatcatatgatgtgtactcagtcatattctgtagactcaaatcttttatctgattataccagctttcccgagcaccgtgtgctttcctttaagtcggacatgaaatgtgttctccaaagcgtttctggattgaagaaaatatttaagctgtctgcagcagtagtattgataggttctcatcctaatctgtcttttctgaaggatcaagggtgttacctaggccataagtcaagccagccaatcacatgtaagggtaatcctgtggaaatagatacatatacctatgagtgtattaaagaagccaacctttttgcattgggtcctttggttggagacaattttgttcgatttttaaagggaggggcgctgggtgttacacgctgtttagctacaagacagaagaaaaagcatttgtttgttgaaagaggaggaggagatgggatagcttaaagcaagtttacaagtaattaaaatggacagtttgccattaaagatttttaatagtggttttgcagtgtactggcttgaattttctggacttgagttaactgaaggagagcctcaaactatagtaacttcatttttaaaagttactagaatttggtatcctgatttatattgcagtgtttcaaaggtgtcactgtcagacaaatagaaacactgccaacttggtgtaacttaagctttcatttaactaaaacattcttttcttgcaaaacttatttttcatgatcatttttggttatttattatacttgattccaaaatagtacagccttgaatctataaaactgtgcagtcattatgccagaaattatcttaaatatataatgggtcaccttgctgttcaaagggtggtgcaaggtcctgcagcatcttacatctgtagcttgttagaaatgtaaactctcaggccccacaacttacttcctgcattttaacaagatccccaagggatatgtatgctcataaaaatttgagacactggtttaaatgaaaatggatataaggtatgtataactgggggtggggtgagggtaggaggcatttacaactcagattttatttattttgaaattatcaattgtataaatctaatttattaccaaatagggtcttttaaaaaatatttttatcgttgaaaccttgacaggtacttcatattcttctaataatttaaacagtccaataatgtggtatacactttgacatccaagaactcaccaagatgtttttcagagatttattctcgatttaactatcatagcatttaatgaatctgatttgtagttcaataaattgtgggttgaactacttatccctgtgtgaacattgaattactttctgtcactgaaactgaggtatttgggtgtggtaagtacttcgaaaattgtaatactgtttgggcattgtctaaattattaaaggttaaaatagaaaataaagtcagaatttttcttttccattccaaaggtgtacttagagatctctattagtattcattcgagatgacatagcagctcatatcatggttgtttattggatttatctgttctaattatataagtgtgtttactgtctgtgttttcacacaaactgctagaatttttaatgttaagacgaaaacatctgaagttctccatggcaaattgaatttttcagtcattttcttttctttttttggtacaattacttcatctggaatgtcttcattgaactcgttattctatttttcttagaattaaaagtggattaatgtgggtttttctgttcattttattgcagtattaaatgcttaagcttattaggaccataattcactttaaatataattgtatagaatatatttgcgtcgatcaaataattgcttcagatgaattcttagactcttgataatatcacacctaatttaacttgattttacaagctgtacaatccagttttagttttctattgtgataataacttttttcaaaccagtttcacatcttaatgaaataacattctctgactgcacttgcttcagtactctcttgcctgcctgtttttgacctctgcatgagttggattagatgtttttcttactgtcacttctaaatagaaaatgacagtgttataaaaaagggaaggataaaacctttgacatccccttgtgtctcaaaagtccacagttattcaaacaatggctttttttgtgatgagagtatttgttaaaaaaaaaaaaagacttcaagaaaaataaaagttcagtggagctgcaaataaatctggtgaataatttcatctttggtaatctcccatttcctgagttcttcctcaatccaagctgtcctgtgtagtatataacatttgggcattttctctgatatactatactctcatgttctataaatttctgtcccgtaattctaacactttacattttttctttgctatcagctatagctattcatggaagggaagaatcactaaatacttgtctagttatagcatgatgtgagcatctcctccttatccctcgatgcctggcttggtgtctggcaaacagtccataattagcagatgttgaaagaccgtttacaaagcagaatttggggatttaaagtgcaatgatacaacaaaaagatttaattacagcttccagtgttttgactatgtgaaccatatccaactacttttttgaaaatctagttctatgtaatatatttctgtggcatcaaattttagttgattgtattagtcaataggaagtggtggaaaatttctaaataaattcaactattaaa

SEQ ID NO: 163061 - DNA, 4266 bp, Homo sapiens
  Payload ID: 12135
  Gene Symbol: OSGIN2
  Gene Name: oxidative stress induced growth inhibitor family member 2
  Uniprot ID: Q9Y236
  ENST ID: ENST00000451899
  CDS Start-End: 261-1910
gctccgcccctatcgcggcgccccgagatcacccgcctccggcgcctggctccctgcaggcgaggagcggaagccgctatctggaggcggactccggcgccacagagccggggcagccgcggcaacggcgaggcgcgaggcaggggcgcccggcagaccccgcgaccccgagccagcgggcgccccgagcgggcagcctcgccgggggaggcggaggcggccacggcggccgcgctcgggcgcccctcgcgcagcgctccatgcccgtgtggtgctgccgctgctccctggccggtcatttcagaaactatagtgacactgaaactgaaggagagatttttaattccttagtgcaatactttggtgacaacttggggcgaaaagttaaagcgatgccattagttgaagaaacttctttactggaagattcgtcagtgacttttcctgtggtaataataggaaatggaccctcaggaatatgcctttcttatatgttatcaggctacagaccgtatttatcatcagaagcaatacacccaaatacaatcttaaatagtaaattagaagaagcaagacatctttccattgttgatcaggacttagaatacttgtctgagggccttgagggccgatcatccaatccagttgcagtacttttcgatacacttcttcatccagatgctgactttgggtatgattatccatccgttttgcattggaaattagagcaacatcattatatccctcacgtagttcttggtaaaggtccacctggtggggcttggcataatatggaaggctccatgttgacaatcagctttggaagttggatggaactacctggacttaaatttaaggactgggtatcaagtaaacgaaggagcctaaaaggggatcgagttatgccagaggaaatagctcgctactataaacattatgtaaaagtcatgggtcttcagaagaatttcagagagaatacttacataacttccgtatcaagactctacagagatcaagatgatgatgatattcaagacagagatatttcaacaaagcatttacagatagagaagtcaaactttatcaagagaaactgggaaattaggggttatcagcgaatagctgatggttctcatgttcccttctgcctctttgctgagaatgtagcgctggcaactggaacgctggattctcctgcccatctggaaattgaaggggaagattttccttttgtgtttcattcaatgcctgaatttggagctgctataaacaaaggaaagttgcgtggcaaagtggatccagtgttaattgtaggttctgggcttactgccgctgacgcagtactgtgtgcttacaacagtaatatccctgtgattcatgtgtttcgcagacgagtaactgatccaagcttaattttcaaacagcttcccaaaaagctgtatcctgaatatcataaagtctatcatatgatgtgtactcagtcatattctgtagactcaaatcttttatctgattataccagctttcccgagcaccgtgtgctttcctttaagtcggacatgaaatgtgttctccaaagcgtttctggattgaagaaaatatttaagctgtctgcagcagtagtattgataggttctcatcctaatctgtcttttctgaaggatcaagggtgttacctaggccataagtcaagccagccaatcacatgtaagggtaatcctgtggaaatagatacatatacctatgagtgtattaaagaagccaacctttttgcattgggtcctttggttggagacaattttgttcgatttttaaagggaggggcgctgggtgttacacgctgtttagctacaagacagaagaaaaagcatttgtttgttgaaagaggaggaggagatgggatagcttaaagcaagtttacaagtaattaaaatggacagtttgccattaaagatttttaatagtggttttgcagtgtactggcttgaattttctggacttgagttaactgaaggagagcctcaaactatagtaacttcatttttaaaagttactagaatttggtatcctgatttatattgcagtgtttcaaaggtgtcactgtcagacaaatagaaacactgccaacttggtgtaacttaagctttcatttaactaaaacattcttttcttgcaaaacttatttttcatgatcatttttggttatttattatacttgattccaaaatagtacagccttgaatctataaaactgtgcagtcattatgccagaaattatcttaaatatataatgggtcaccttgctgttcaaagggtggtgcaaggtcctgcagcatcttacatctgtagcttgttagaaatgtaaactctcaggccccacaacttacttcctgcattttaacaagatccccaagggatatgtatgctcataaaaatttgagacactggtttaaatgaaaatggatataaggtatgtataactgggggtggggtgagggtaggaggcatttacaactcagattttatttattttgaaattatcaattgtataaatctaatttattaccaaatagggtcttttaaaaaatatttttatcgttgaaaccttgacaggtacttcatattcttctaataatttaaacagtccaataatgtggtatacactttgacatccaagaactcaccaagatgtttttcagagatttattctcgatttaactatcatagcatttaatgaatctgatttgtagttcaataaattgtgggttgaactacttatccctgtgtgaacattgaattactttctgtcactgaaactgaggtatttgggtgtggtaagtacttcgaaaattgtaatactgtttgggcattgtctaaattattaaaggttaaaatagaaaataaagtcagaatttttcttttccattccaaaggtgtacttagagatctctattagtattcattcgagatgacatagcagctcatatcatggttgtttattggatttatctgttctaattatataagtgtgtttactgtctgtgttttcacacaaactgctagaatttttaatgttaagacgaaaacatctgaagttctccatggcaaattgaatttttcagtcattttcttttctttttttggtacaattacttcatctggaatgtcttcattgaactcgttattctatttttcttagaattaaaagtggattaatgtgggtttttctgttcattttattgcagtattaaatgcttaagcttattaggaccataattcactttaaatataattgtatagaatatatttgcgtcgatcaaataattgcttcagatgaattcttagactcttgataatatcacacctaatttaacttgattttacaagctgtacaatccagttttagttttctattgtgataataacttttttcaaaccagtttcacatcttaatgaaataacattctctgactgcacttgcttcagtactctcttgcctgcctgtttttgacctctgcatgagttggattagatgtttttcttactgtcacttctaaatagaaaatgacagtgttataaaaaagggaaggataaaacctttgacatccccttgtgtctcaaaagtccacagttattcaaacaatggctttttttgtgatgagagtatttgttaaaaaaaaaaaaagacttcaagaaaaataaaagttcagtggagctgcaaataaatctggtgaataatttcatctttggtaatctcccatttcctgagttcttcctcaatccaagctgtcctgtgtagtatataacatttgggcattttctctgatatactatactctcatgttctataaatttctgtcccgtaattctaacactttacattttttctttgctatcagctatagctattcatggaagggaagaatcactaaatacttgtctagttatagcatgatgtgagcatctcctccttatccctcgatgcctggcttggtgtctggcaaacagtccataattagcagatgttgaaagaccgtttacaaagcagaatttggggatttaaagtgcaatgatacaacaaaaagatttaattacagcttccagtgttttgactatgtgaaccatatccaactacttttttgaaaatctagttctatgtaatatatttctgtggcatcaaattttagttgattgtattagtcaataggaagtggtggaaaatttctaaataaattcaactattaaataaatgcaagttccactaaa

SEQ ID NO: 163062 - DNA, 801 bp, Homo sapiens
  Payload ID: 12135
  Gene Symbol: OSGIN2
  Gene Name: oxidative stress induced growth inhibitor family member 2
  ENST ID: ENST00000520659
  CDS Start-End: 34-657
ggccgcgctcgggcgcccctcgcgcagcgctccatgcccgtgtggtgctgccgctgctccctggccggtcatttcagaaactatagtgacactgaaactgaaggagagatttttaattccttagtgcaatactttggtgacaacttggggcgaaaagttaaagcgatgccattagttgaagaaacttctttactggaagattcgtcagtgacttttcctgtggtaataataggaaatggaccctcaggaatatgcctttcttatatgttatcaggctacagaccgtatttatcatcagaagcaatacacccaaatacaatcttaaatagtaaattagaagaagcaagacatctttccattgttgatcaggacttagaatacttgtctgagggccttgagggccgatcatccaatccagttgcagtacttttcgatacacttcttcatccagatgctgactttgggtatgattatccatccgttttgcattggaaattagagcaacatcattatatccctcacgtagttcttggtaaaggtccacctggtggggcttggcataatatggaaggctccatgttgacaatcagctttggaagttggatggaactacctggacttaaatttaaggactgggtatcaagtaaacgaaggtaaagattgaactgtattaaaattctttggtgtacgttgaaaaagagaatgtggaaaaatttcaaaatatttgtgattttgtcatggctgaagaatataaatgtacgtctttcaaataaaaatgtgtccttgaagcagtgattataa

SEQ ID NO: 163063 - DNA, 4553 bp, Homo sapiens
  Payload ID: 12136
  Gene Symbol: OXSR1
  Gene Name: oxidative stress responsive 1
  Uniprot ID: O95747
  ENST ID: ENST00000311806
  CDS Start-End: 373-1956
gtgtcggcaggtggaggaagaggggaaagtttggcccgtgcgtggggctggggtggagggcgggacagaggggctgggcccaggcaaagcttctgtcgctgctgctgcggaggccgaggacaggacgtgggctgggccgggcagtgccggactcggaggagcaggaggcgaggtccgccggagctctgagcccccgctgctctgccgcgcggtgaccccgcgccccggcgccgtccgacccgtggctgttccgagacgattggtgggggcgcggcggcggcggcggcggctgttgggggtggggagacgcgcggcgaggagacgagcgaggtcagcgagtttgagggaggaccgcgagccgctgccgccgtcatgtccgaggactcgagcgccctgccctggtccatcaacagggacgattacgagctgcaggaggtgatcgggagtggagcaactgctgtagtccaagcagcttattgtgcccctaaaaaggagaaagtggcaatcaaacggataaaccttgagaaatgtcaaactagcatggatgaactcctgaaagaaattcaagccatgagtcaatgccatcatcctaatattgtatcttactacacatcttttgtggtaaaagatgagctgtggcttgtcatgaagctgctaagtggaggttctgttctggatattattaagcacattgtggcaaaaggggaacacaaaagtggagtcctagatgaatctaccattgctacgatactccgagaagtactggaagggctggaatatctgcataaaaatggacagatccacagagatgtgaaagctggaaacattcttcttggagaagatggctcagtacagattgcagactttggggttagtgcttttttagcaactggtggtgatattacccgaaataaagtgagaaagacctttgttggcaccccttgttggatggcacctgaagttatggaacaggtccgtggttatgatttcaaagctgatatttggagttttggaattacagcaattgaattggctacaggggcggctccttatcataaatatccaccaatgaaggttttaatgctgacactgcagaacgatcctccttctttggaaactggtgttcaagataaagaaatgctgaaaaaatatggaaaatcatttagaaaaatgatttcattgtgccttcaaaaagatccagaaaaaagaccaacagcagcagaactattaaggcacaaatttttccagaaagcaaagaataaagaatttcttcaagaaaaaacattgcagagagcaccaaccatttctgaaagagcaaaaaaggttcggagagtaccaggttccagtgggcgtcttcataagacagaggatggaggctgggagtggagtgatgatgaatttgatgaagaaagtgaggaagggaaagcagcaatttcacaactcaggtctccccgagtgaaagaatcaatatcaaattctgagctctttccaacaactgatcctgtgggtactttgctccaagttccagaacagatctctgctcatctacctcagccagctgggcagattgctacacagccaactcaagtctctctcccacccaccgcagagccagcaaaaacagctcaggctttgtcttcaggatcaggttcacaagaaaccaagatcccaatcagtctagtactaagattaaggaattccaaaaaagaactaaatgatattcgatttgaatttactcctgggagagatacagcagagggtgtctctcaggaactcatttctgctggcctggtcgacggaagggatttagtaatagtggcagctaatttgcagaaaattgtggaagaacctcagtcaaatcgatctgtcactttcaaactggcatctggtgtcgaaggctcagatattcctgatgatggtaaactgataggatttgcccagctcagcatcagctaaaccacaaccctggaagaggcggcctaaggagattccacacatgcgtatctctgttgcttctattggcctaaacccactactgccaaagaacccagcaacaaacctcccggctaggagctttagaagtctttatgttcttcctgccatcattcctccttttcccacagggaaagaaaagttggatcactagtggccagcatccccagagttccgttagtaaacttacttcatatgtcccctgtcttcctccatctgagaagtggcccatgtgcttcaaggcccaggagggagatctgtcagctcattcttgccttactccaatgatggcccaggtggaaaagtagcagctgtatcgggcttcctcatcctgcctgttcccccacacctgccaggatatggacatcttgggatatctctttaccactgaagtagaattgattgttcagctggagcccagagaatttaatttaatgttttttctttgtacctgatgtgaattctagcaacctttgttaggaaaaagcacagcctcagatggaggcagcctaaactgtgttcttgttttgttcatggtgtttctaagcgttttgctgaagctgctctcaggcacccccttcttcattgctctctccagaaagggttgctagccttaacttcagctggtgcaaaacatctgactgtagccgaacttcagccatcagatccttcaaagtggaactttggattgtttttacagacaacatcgagtaatggcttgtaaatgtgaattttgccagaggtggtttttgaacaggaaaatcataattcatatcattggagaagtatttattttcaaatatcaaattgaagaaaaactcaatcctcccatgaaaatcagttcgcctggcctccaagtcgtgaggaaatgggtatgcaaggctgagatttctacagcaataaaggagacacacactgggccagagaggcctgccttctgcctgctctcctgcactgaccctttggagggggtctctgtgtgctgaagctaactcaagatggaaagtgaaaccacatgtgccgtgacctttaggttttatgagtagacagtgttcatttgattttctacagaaataatataaattattctttaggtttaaaaaagagcactcataatgcaatatgtgaataatcagtgaggttgatttttcttttttcctaccgtttcatagtctttgtctaactgctagtaaccctaccgagttttatatatgagtgggatactcaatctggccttaaaaagatacacaaagatgggctgtgggtccctggaaagggggagagttgccctttacagaatcactcgagccctttccagcactgttggtctgatgaacaaggttgttttaccttattttctcttggaacatatctgaaaaccttccccacaaataacttgtcacaccttttgtttcattctgagtctttagttttagtcatgggctttcttcacctgctctaggtgcaaaggcatgttgggaaagagatggatgttggggaggaagagaggagatggatttcagttgggagttaggaggagagtaggtgagatgatcagacaccggagttcaacgtcccagcagtcttggtaaaaggagggagcctgctgagccaggagggagaaaagaagattgaccagcttgctagaaaaatacttagcttttctttttctttttttgtggaggggggacggagaggaacaaggatggggaggtaggaatgaggtatagaaaagagatagcatcttctttggcacaagactagtggcttaccgcttaccttagagttttgttttttttttttcaaacccatcaaaatctacttatttatgaatccaaggggtggcagcatcactctgttctagcattctttgtggagatggtctggtgcctagctgggagtgagcagcagcccatcccctgttcactttctctagcccatcattacctgtgaactgcagtggggcagtcatggcaaatagaattgggctggggtttctccttcttttcagttcattgtttgccctgctaggaattagaagacagacaccatgtcccaggacagtgttacttcttctgcatgatgtgtggtagactccctttgctggcttgtgcagtgatactgagaaaatacatgaacagaaactgcccaggtggaacagcacgtaacctagtgagtgactgtactcctttctaggaatgctgattcagagtgcacctctttgactaggtcccaggatccccttgtccctggagtagggactaactatagcacaaagtaatatgtgccaatgctatttgtgaaatgtttggtctttctaaacgactaaaggatttgttgggtttttgcttaagttttgaaccaaatcctagagccagctgataatatttaataatctggaggagagaataatgatgtaccaataagtggagattcctccttatgatgtatgctaggttatggaagatgtaaaatattcaactttttcctcctttttttggactttgtattttactgcatgttttcttcatttttaatcaataaagagtaaattgtcctta

SEQ ID NO: 163064 - DNA, 1581 bp, Homo sapiens
  Payload ID: 12136
  Gene Symbol: OXSR1
  Gene Name: oxidative stress responsive 1
  ENST ID: ENST00000426620
  CDS Start-End: 231-572
agtgccggactcggaggagcaggaggcgaggtccgccggagctctgagcccccgctgctctgccgcgcggtgaccccgcgccccggcgccgtccgacccgtggctgttccgagacgattggtgggggcgcggcggcggcggcggcggctgttgggggtggggagacgcgcggcgaggagacgagcgaggtcagcgagtttgagggaggaccgcgagccgctgccgccgtcatgtccgaggactcgagcgccctgccctggtccatcaacagggacgattacgagctgcaggaggtgatcgggagtggagcaactgctgtagtccaagcagcttattgtgcccctaaaaaggagaaagtggcaatcaaacggataaaccttgagaaatgtcaaactagcatggatgaactcctgaaagaaattcaagccatgagtcaatgccatcatcctaatattgtatcttactacacatcttttgtggtaaaagatgagctgtggcttgtcatgaagctgctaagtggagtgacacactggagaaactggattgctttgttaaaggccctgttcatatgatggttggaagctttgctaacaccaaccacctttcaagatggtggtcaagcatggttctttcagtatggagagatatgggagtattaggttctgttctggatattattaagcacattgtggcaaaaggggaacacaaaagtggagtcctagatgaatctaccattgctacgatactccgagaagtactggaagggctggaatatctgcataaaaatggacagatccacagagatgtgaaagctggaaacattcttcttggagaagatggctcagtacagattgcagactttggggttagtgcttttttagcaactggtggtgatattacccgaaataaagtgagaaagacctttgttggcaccccttgttggatggcacctgaagttatggaacaggtccgtggttatgatttcaaagctgatatttggagttttggaattacagcaattgaattggctacaggggcggctccttatcataaatatccaccaatgaaggttttaatgctgacactgcagaacgatcctccttctttggaaactggtgttcaagataaagaaatgctgaaaaaatatggaaaatcatttagaaaaatgatttcattgtgccttcaaaaagatccagaaaaaagaccaacagcagcagaactattaaggcacaaatttttccagaaagcaaagaataaagaatttcttcaagaaaaaacattgcagagagcaccaaccatttctgaaagagcaaaaaaggtaaatcagaatttaactcagttttcctgaagaatttactttatttttgcattttgaaaacatgttaagtaatacattgttaatagtatatgagaattactggttttctgtcgatcctttctaaagcattctttgatacattcattcagcaaatatctttggtctaccatatgccttggtattactctgctatcttttaggatgaaaagggatgctagacagtaattggtaaattaattctaaactctgtttgataactgttt

SEQ ID NO: 163065 - DNA, 1908 bp, Homo sapiens
  Payload ID: 12136
  Gene Symbol: OXSR1
  Gene Name: oxidative stress responsive 1
  ENST ID: ENST00000446845
  CDS Start-End: 373-1779
gtgtcggcaggtggaggaagaggggaaagtttggcccgtgcgtggggctggggtggagggcgggacagaggggctgggcccaggcaaagcttctgtcgctgctgctgcggaggccgaggacaggacgtgggctgggccgggcagtgccggactcggaggagcaggaggcgaggtccgccggagctctgagcccccgctgctctgccgcgcggtgaccccgcgccccggcgccgtccgacccgtggctgttccgagacgattggtgggggcgcggcggcggcggcggcggctgttgggggtggggagacgcgcggcgaggagacgagcgaggtcagcgagtttgagggaggaccgcgagccgctgccgccgtcatgtccgaggactcgagcgccctgccctggtccatcaacagggacgattacgagctgcaggaggtgatcgggagtggagcaactgctgtagtccaagcagcttattgtgcccctaaaaaggagaaagtggcaatcaaacggataaaccttgagaaatgtcaaactagcatggatgaactcctgaaagaaattcaagccatgagtcaatgccatcatcctaatattgtatcttactacacatcttttgtggtaaaagatgagctgtggcttgtcatgaagctgctaagtggaggttctgttctggatattattaagcacattgtggcaaaaggggaacacaaaagtggagtcctagatgaatctaccattgctacgatactccgagaagtactggaagggctggaatatctgcataaaaatggacagatccacagagatgtgaaagctggaaacattcttcttggagaagatggctcagtacagattgcagactttggggttagtgcttttttagcaactggtggtgatattacccgaaataaagtgagaaagacctttgttggcaccccttgttggatggcacctgaagttatggaacaggtccgtggttatgatttcaaagctgatatttggagttttggaattacagcaattgaattggctacaggggcggctccttatcataaatatccaccaatgaaggttttaatgctgacactgcagaacgatcctccttctttggaaactggtgttcaagataaagaaatgctgaaaaaatatggaaaatcatttagaaaaatgatttcattgtgccttcaaaaagatccagaaaaaagaccaacagcagcagaactattaaggcacaaatttttccagaaagcaaagaataaagaatttcttcaagaaaaaacattgcagagagcaccaaccatttctgaaagagcaaaaaaggttcggagagtaccaggttccagtgggcgtcttcataagacagaggatggaggctgggagtggagtgatgatgaatttgatgaagaaagtgaggaagggaaagcagcaatttcacaactcaggtctccccgagtgaaagaatcaatatcaaattctgagctctttccaacaactgatcctgtgggtactttgctccaagttccagaacagatctctgctcatctacctcagccagctgggcagattgctacacagccaactcaagtctctctcccacccaccgcagagccagcaaaaacagctcaggctttgtcttcaggatcaggttcacaagaaaccaagatcccaatcagtctagtactaagattaaggaattccaaaaaagaactaaatgatattcgatttgaatttactcctgggagaggtgaggcatcaaatggattgaaaacaaaatagcttccaatttgtgattcaatgaaatgtgttgtgaagtttctgtcctttgtgaagttttgcttttaaaggataataaaaattttcctggttttggcgagtatatgagtgagataaaaatgcagttcgttg

SEQ ID NO: 163066 - DNA, 1572 bp, Homo sapiens
  Payload ID: 12137
  Gene Symbol: OSER1
  Gene Name: oxidative stress responsive serine-rich 1
  Uniprot ID: Q9NX31
  ENST ID: ENST00000255174
  CDS Start-End: 138-1016
ggctggtttggatccgggtcagtcgggtgccgagatttgggagagacgctctgaactgactgccccgcatcaccggagcgtcccagctgcgaggagtgtaaacaggaacatcgataagtagtgtaaaaacttgcacaatgaaatccgaagccaaggatggagaggaggagagtctacagactgctttcaaaaaattaagagtggatgcatcagggtctgtagcatctctgtctgttggagaaggcacaggtgtcagagcaccagtcagaacagcaacagatgataccaaacctaaaaccacatgtgcatctaaagacagttggcacgggtctacaaggaagtcttcacgaggagcagtgagaactcagcgtcgtcgacgttctaagtctcctgtccttcatcctccaaagtttatacattgcagtacaatagcgtcttcttccagcagtcaactcaagcacaaaagccagactgactcacctgatggcagcagtgggctgggaatttcatcccctaaagagttcagtgcaggagaaagctctacttctctcgatgctaatcacacaggggcagtcgttgagcctttgagaacttctgttccaaggctcccatcagagagtaagaaggaagactcctctgacgctacccaagtcccccaagcaagtctcaaagccagtgatctctctgactttcaatcagtttccaagctaaaccagggcaagccatgcacatgcataggcaaggaatgccagtgtaagagatggcatgatatggaagtgtattccttttcaggcctgcagagtgtccctcccttggctccagaacgaagatccacacttgaggactactctcagtcgctgcacgccagaactctgtctggctctccccgatcctgttctgagcaagctcgagtcttcgtggatgatgtgaccattgaggacctgtcaggctacatggagtattacttgtatattcccaagaaaatgtcccacatggcagaaatgatgtacacctgatagcaagaagctaattcatatgctttaaaccaatgaaggcttgtcaaagagatttagttaatggcagaccttgtggccactttgtgtgagaagacatctctttctgctcactgtgcttgcaataaaaacttttcttggcatctcagttaatcttcattctttcaacttactctcttgagttcttacatacacttcaaggcgagcagatcaaagaaaaatcccccttatttagaaatgttcctgggggatgaagaaaccataattacttgagactggcagcagtgggtatatggtaaaagcctttgtaaaacagtgcatttttcagatttgtttaaggtttgctagccaaggaaagtaaaatgtgattttgtaactgcactaaacatttgtcatgctgtagttgccagcccagaatattagaagttacaagactgatttaaaccgtctctgatttaatgcaagatatattgtgtctataaaggtttctcttgttattgttaagccagagatctaaggtttagattcaatttgaataaactagctggcctgccctcta

SEQ ID NO: 163067 - DNA, 1616 bp, Homo sapiens
  Payload ID: 12137
  Gene Symbol: OSER1
  Gene Name: oxidative stress responsive serine-rich 1
  Uniprot ID: Q9NX31
  ENST ID: ENST00000372970
  CDS Start-End: 182-1060
gaaagaactttgtgctttggctgcagcgctgcgagtataaagggatgagtgggttgcacggagaggctatgaagaaaaacacaaatggaagtatcaaccttactggtttctagaccaactggggagattcccgttaaaaatgtaaacaggaacatcgataagtagtgtaaaaacttgcacaatgaaatccgaagccaaggatggagaggaggagagtctacagactgctttcaaaaaattaagagtggatgcatcagggtctgtagcatctctgtctgttggagaaggcacaggtgtcagagcaccagtcagaacagcaacagatgataccaaacctaaaaccacatgtgcatctaaagacagttggcacgggtctacaaggaagtcttcacgaggagcagtgagaactcagcgtcgtcgacgttctaagtctcctgtccttcatcctccaaagtttatacattgcagtacaatagcgtcttcttccagcagtcaactcaagcacaaaagccagactgactcacctgatggcagcagtgggctgggaatttcatcccctaaagagttcagtgcaggagaaagctctacttctctcgatgctaatcacacaggggcagtcgttgagcctttgagaacttctgttccaaggctcccatcagagagtaagaaggaagactcctctgacgctacccaagtcccccaagcaagtctcaaagccagtgatctctctgactttcaatcagtttccaagctaaaccagggcaagccatgcacatgcataggcaaggaatgccagtgtaagagatggcatgatatggaagtgtattccttttcaggcctgcagagtgtccctcccttggctccagaacgaagatccacacttgaggactactctcagtcgctgcacgccagaactctgtctggctctccccgatcctgttctgagcaagctcgagtcttcgtggatgatgtgaccattgaggacctgtcaggctacatggagtattacttgtatattcccaagaaaatgtcccacatggcagaaatgatgtacacctgatagcaagaagctaattcatatgctttaaaccaatgaaggcttgtcaaagagatttagttaatggcagaccttgtggccactttgtgtgagaagacatctctttctgctcactgtgcttgcaataaaaacttttcttggcatctcagttaatcttcattctttcaacttactctcttgagttcttacatacacttcaaggcgagcagatcaaagaaaaatcccccttatttagaaatgttcctgggggatgaagaaaccataattacttgagactggcagcagtgggtatatggtaaaagcctttgtaaaacagtgcatttttcagatttgtttaaggtttgctagccaaggaaagtaaaatgtgattttgtaactgcactaaacatttgtcatgctgtagttgccagcccagaatattagaagttacaagactgatttaaaccgtctctgatttaatgcaagatatattgtgtctataaaggtttctcttgttattgttaagccagagatctaaggtttagattcaatttgaataaactagctggcctgccctcta

SEQ ID NO: 163068 - DNA, 2462 bp, Homo sapiens
  Payload ID: 12138
  Gene Symbol: OLR1
  Gene Name: oxidized low density lipoprotein (lectin-like) receptor 1
  Uniprot ID: P78380
  ENST ID: ENST00000309539
  CDS Start-End: 62-883
atttttagtttgttgaagttcgtgactgcttcactctctcattcttagcttgaatttggaaatgacttttgatgacctaaagatccagactgtgaaggaccagcctgatgagaagtcaaatggaaaaaaagctaaaggtcttcagtttctttactctccatggtggtgcctggctgctgcgactctaggggtcctttgcctgggattagtagtgaccattatggtgctgggcatgcaattatcccaggtgtctgacctcctaacacaagagcaagcaaacctaactcaccagaaaaagaaactggagggacagatctcagcccggcaacaagcagaagaagcttcacaggagtcagaaaacgaactcaaggaaatgatagaaacccttgctcggaagctgaatgagaaatccaaagagcaaatggaacttcaccaccagaatctgaatctccaagaaacactgaagagagtagcaaattgttcagctccttgtccgcaagactggatctggcatggagaaaactgttacctattttcctcgggctcatttaactgggaaaagagccaagagaagtgcttgtctttggatgccaagttgctgaaaattaatagcacagctgatctggacttcatccagcaagcaatttcctattccagttttccattctggatggggctgtctcggaggaaccccagctacccatggctctgggaggacggttctcctttgatgccccacttatttagagtccgaggcgctgtctcccagacatacccttcaggtacctgtgcatatatacaacgaggagctgtttatgcggaaaactgcattttagctgccttcagtatatgtcagaagaaggcaaacctaagagcacagtgaatttgaaggctctggaagaaaagaaaaaagtctttgagttttattctggaatttaagctattctttgtcacttgggtgccaaacatgagagcccagaaaactgtcatttagctggctgcagaactcctttgcagaaactggggttccaggagcctggcacctttatgtcaacatttttgattctagctacctgtattatttcacctagcttgtcccaagcttccctgccagcctgaagtccattttcccctttttattttaaaatttgactcctcttcaagcttgaaaaccctctgaactcagtcttctttacctcattatcaccttcccctcacactcctaaaattgcatgaaagacagaacatggagaacttgctcaagtgcaggcagagagcaaaaaggggaaatatgtctgggaaaaagtgcacgtgaagaaacaaagaaggacagaggccattccgaaatcaagaaactcatgttcttaactttaaaaaaggtatcaatccttggtttttaaactgtggtccatctccagactctaccacttacggacagacagacagacagacacacacacacacacacacacacattttgggacaagtggggagcccaagaaagtaattagtaagtgagtggtcttttctgtaagctaatccacaacctgttaccacttcctgaatcagttattatttcttcatttttttttctaccagaggacagattaatagatttaacccttcacaacagttcttgttagaatcatgggatgtgtggcccagaggtaagaatagaatttctttccctaaagaacataccttttgtagatgaactcttctcaactctgttttgctatgctataattccgaaacatacaagacaaaaaaaatgaagacactcaatctagaacaaactaagccaggtatgcaaatatcgctgaatagaaacagatggaattagaaatatatcttctatttttaggcttctatttcctttccacccactcttcacaggctattctactttaaaggaagcctttttattttgctgcacacaatctagcaggaatctttttttttttttaagagctgtgtcatccttatgtaggcaagagatgtttgcttttgttaaaagctttattgagatataattaacataaaataaactgaacatatttaaagtgtactatttgataagttttcacaccttgtggagaacatgcatactacaattaagagagtgaacatatccatcatccctcaaagtgtcacaatgctcctcctgatgactcctccccagaaaaccaccaatcggctttcattttgcattttgtagttttatgtgaatggaatcatatagtatgtcttttttttttgtctggcttctttcactttgcataattattttgagattcatatgtctccatcttgatgctcgtatgaattcattcttttaaatgttgaatattcccttgtatggatataccacaattcatttacccatttacttgttgatgacatttgggttgttttagttttgggatattacaaataaagctgctgtgaacatttgtgtacaa

SEQ ID NO: 163069 - DNA, 591 bp, Homo sapiens
  Payload ID: 12138
  Gene Symbol: OLR1
  Gene Name: oxidized low density lipoprotein (lectin-like) receptor 1
  ENST ID: ENST00000339968
  CDS Start-End: 279-591
ctactaatagtcactgagtctgagatggggtttcaccatgttggccaggatggtctctatctcttgacctcgtgatctgcctgcctcggcctcccaaagtgctgggattacagacctgagccaccgtgcctggccaaaatcttgtatcccaggtgtctgacctcctaacacaagagcaagcaaacctaactcaccagaaaaagaaactggagggacagatctcagcccggcaacaagcagaagaagcttcacaggagtcagaaaacgaactcaaggaaatgatagaaacccttgctcggaagctgaatgagaaatccaaagagcaaatggaacttcaccaccagaatctgaatctccaagaaacactgaagagagtagcaaattgttcagctccttgtccgcaagactggatctggcatggagaaaactgttacctattttcctcgggctcatttaactgggaaaagagccaagagaagtgcttgtctttggatgccaagttgctgaaaattaatagcacagctgatctggacttcatccagcaagcaatttcctattccagttttccattctggatggggctgtctcgga

SEQ ID NO: 163070 - DNA, 950 bp, Homo sapiens
  Payload ID: 12138
  Gene Symbol: OLR1
  Gene Name: oxidized low density lipoprotein (lectin-like) receptor 1
  Uniprot ID: P78380
  ENST ID: ENST00000432556
  CDS Start-End: 56-601
agtttgttgaagttcgtgactgcttcactctctcattcttagcttgaatttggaaatgacttttgatgacctaaagatccagactgtgaaggaccagcctgatgagaagtcaaatggaaaaaaagctaaaggtcttcagtttctttactctccatggtggtgcctggctgctgcgactctaggggtcctttgcctgggattagtagtgaccattatggtgctgggcatgcaattatcccaggtgtctgacctcctaacacaagagcaagcaaacctaactcaccagaaaaagaaactggagggacagatctcagcccggcaacaagcagaagaagcttcacaggagtcagaaaacgaactcaaggaaatgatagaaacccttgctcggaagctgaatgagaaatccaaagagcaaatggaacttcaccaccagaatctgaatctccaagaaacactgaagagagtagcaaattgttcaggacttcatccagcaagcaatttcctattccagttttccattctggatggggctgtctcggaggaaccccagctacccatggctctgggaggacggttctcctttgatgccccacttatttagagtccgaggcgctgtctcccagacatacccttcaggtacctgtgcatatatacaacgaggagctgtttatgcggaaaactgcattttagctgccttcagtatatgtcagaagaaggcaaacctaagagcacagtgaatttgaaggctctggaagaaaagaaaaaagtctttgagttttattctggaatttaagctattctttgtcacttgggtgccaaacatgagagcccagaaaactgtcatttagctggctgcagaactcctttgcagaaactggggttccaggagcctggcacctttatgtcaacatttttgattctagctacctgtattatttcacctagcttgt

SEQ ID NO: 163071 - DNA, 516 bp, Homo sapiens
  Payload ID: 12138
  Gene Symbol: OLR1
  Gene Name: oxidized low density lipoprotein (lectin-like) receptor 1
  ENST ID: ENST00000538873
  CDS Start-End: 346-516
acaagtgtttgcaatgttcctgacattaaacaaaatactgcaggaatattcaagaacctccaaatctgtaacttctgagtaaatctgggtcatttttcagcagcttatctattgtcaaaatagatttaattctgttttgatttcctcaaaaagtccctggagggatttttatttggattagaactagagtcttaatgcaactgtgattcagtatcccaggtgtctgacctcctaacacaagagcaagcaaacctaactcaccagaaaaagaaactggagggacagatctcagcccggcaacaagcagaagaagcttcacaggagtcagaaaacgaactcaaggaaatgatagaaacccttgctcggaagctgaatgagaaatccaaagagcaaatggaacttcaccaccagaatctgaatctccaagaaacactgaagagagtagcaaattgttcagctccttgtccgcaagactggatctggcatggagaaaactgttacctattttcctcgggc

SEQ ID NO: 163072 - DNA, 580 bp, Homo sapiens
  Payload ID: 12138
  Gene Symbol: OLR1
  Gene Name: oxidized low density lipoprotein (lectin-like) receptor 1
  ENST ID: ENST00000538745
  CDS Start-End: 213-580
agaatgggaggagacacagcagaggaattgagacataaatagagtaaatcgctaatgacatttcctactaatagtcactgagtctggtgtctgacctcctaacacaagagcaagcaaacctaactcaccagaaaaagaaactggagggacagatctcagcccggcaacaagcagaagaagcttcacaggagtcagaaaacgaactcaaggaaatgatagaaacccttgctcggaagctgaatgagaaatccaaagagcaaatggaacttcaccaccagaatctgaatctccaagaaacactgaagagagtagcaaattgttcagctccttgtccgcaagactggatctggcatggagaaaactgttacctattttcctcgggctcatttaactgggaaaagagccaagagaagtgcttgtctttggatgccaagttgctgaaaattaatagcacagctgatctggacttcatccagcaagcaatttcctattccagttttccattctggatggggctgtctcggaggaaccccagctacccatggctctgggaggacggttctcctttgatgccccactt

SEQ ID NO: 163073 - DNA, 1008 bp, Homo sapiens
  Payload ID: 12138
  Gene Symbol: OLR1
  Gene Name: oxidized low density lipoprotein (lectin-like) receptor 1
  Uniprot ID: P78380
  ENST ID: ENST00000545927
  CDS Start-End: 41-610
gtgactgcttcactctctcattcttagcttgaatttggaaatgacttttgatgacctaaagatccagactgtgaaggaccagcctgatgagaagtcaaatggaaaaaaagctaaaggtcttcagtttctttactctccatggtggtgcctggctgctgcgactctaggggtcctttgcctgggattagtagtgaccattatggtgctgggcatgcaattatcccaggtgtctgacctcctaacacaagagcaagcaaacctaactcaccagaaaaagaaactggagggacagatctcagcccggcaacaagcagaagaagcttcacaggagtcagaaaacgaactcaaggaaatgatagaaacccttgctcggaagctgaatgagaaatccaaagagcaaatggaacttcaccaccagaatctgaatctccaagaaacactgaagagagtagcaaattgttcagctccttgtccgcaagactggatctggcatggagaaaactgttacctattttcctcgggctcatttaactgggaaaagagccaagagaagtgcttgtctttggatgccaagttgctgaaaattaatagcacagctgatctgatttagagtccgaggcgctgtctcccagacatacccttcaggtacctgtgcatatatacaacgaggagctgtttatgcggaaaactgcattttagctgccttcagtatatgtcagaagaaggcaaacctaagagcacagtgaatttgaaggctctggaagaaaagaaaaaagtctttgagttttattctggaatttaagctattctttgtcacttgggtgccaaacatgagagcccagaaaactgtcatttagctggctgcagaactcctttgcagaaactggggttccaggagcctggcacctttatgtcaacatttttgattctagctacctgtattatttcacctagcttgtcccaagcttccctgccagcctgaagtccattttcccctttttattttaa

SEQ ID NO: 163074 - DNA, 732 bp, Homo sapiens
  Payload ID: 12138
  Gene Symbol: OLR1
  Gene Name: oxidized low density lipoprotein (lectin-like) receptor 1
  ENST ID: ENST00000539518
  CDS Start-End: 91-732
actctaggtcttcagtttctttactctccatggtggtgcctggctgctgcgactctaggggtcctttgcctgggattagtagtgaccattatggtgctgggcatgcaattatcccaggtgtctgacctcctaacacaagagcaagcaaacctaactcaccagaaaaagaaactggagggacagatctcagcccggcaacaagcagaagaagcttcacaggagtcagaaaacgaactcaaggaaatgatagaaacccttgctcggaagctgaatgagaaatccaaagagcaaatggaacttcaccaccagaatctgaatctccaagaaacactgaagagagtagcaaattgttcagctccttgtccgcaagactggatctggcatggagaaaactgttacctattttcctcgggctcatttaactgggaaaagagccaagagaagtgcttgtctttggatgccaagttgctgaaaattaatagcacagctgatctggacttcatccagcaagcaatttcctattccagttttccattctggatggggctgtctcggaggaaccccagctacccatggctctgggaggacggttctcctttgatgccccacttatttagagtccgaggcgctgtctcccagacatacccttcaggtacctgtgcatatatacaacgaggagctgtttatgcggaaaactgcattttagctgccttcagtatatgtcagaagaag

SEQ ID NO: 163075 - DNA, 466 bp, Homo sapiens
  Payload ID: 12138
  Gene Symbol: OLR1
  Gene Name: oxidized low density lipoprotein (lectin-like) receptor 1
  ENST ID: ENST00000543414
  CDS Start-End: 154-466
attatttgcaagagacacagctatcttctacaacttctctgctagcttgccacacacactctagaagccagtcttcagtttctttactctccatggtggtgcctggctgctgcgactctaggggtcctttgcctgggattagtagtgaccattatggtgctgggcatgcaattatcccaggtgtctgacctcctaacacaagagcaagcaaacctaactcaccagaaaaagaaactggagggacagatctcagcccggcaacaagcagaagaagcttcacaggagtcagaaaacgaactcaaggaaatgatagaaacccttgctcggaagctgaatgagaaatccaaagagcaaatggaacttcaccaccagaatctgaatctccaagaaacactgaagagagtagcaaattgttcagctccttgtccgcaagactggatctggcatggagaaaactgttacctat

SEQ ID NO: 163076 - DNA, 924 bp, Homo sapiens
  Payload ID: 12138
  Gene Symbol: OLR1
  Gene Name: oxidized low density lipoprotein (lectin-like) receptor 1
  ENST ID: ENST00000544577
  CDS Start-End: 62-559
atttttagtttgttgaagttcgtgactgcttcactctctcattcttagcttgaatttggaaatgacttttgatgacctaaagatccagactgtgaaggaccagcctgatgagaagtcaaatggaaaaaaagctaaaggtcttcagtttctttactctccatggtggtgcctggctgctgcgactctaggggtcctttgcctgggattagtagtgaccattatggtgctgggcatgcaattatcccaggtgtctgacctcctaacacaagagcaagcaaacctaactcaccagaaaaagaaactggagggacagatctcagcccggcaacaagcagaagaagcttcacaggagtcagaaaacgaactcaaggaaatgatagaaacccttgctcggaagctgaatgagaaatccaaagagcaaatggaacttcaccaccagaatctgaatctccaagaaacactgaagagagtagcaaattgttcagctgtttatgcggaaaactgcattttagctgccttcagtatatgtcagaagaaggcaaacctaagagcacagtgaatttgaaggctctggaagaaaagaaaaaagtctttgagttttattctggaatttaagctattctttgtcacttgggtgccaaacatgagagcccagaaaactgtcatttagctggctgcagaactcctttgcagaaactggggttccaggagcctggcacctttatgtcaacatttttgattctagctacctgtattatttcacctagcttgtcccaagcttccctgccagcctgaagtccattttcccctttttattttaaaatttgactcctcttcaagcttgaaaaccctctgaactcagtcttctttacctcattatcaccttcccctcacactcctaaaattgcatgaaagacagaacat

SEQ ID NO: 163077 - DNA, 822 bp, Homo sapiens
  Payload ID: 12138
  Gene Symbol: OLR1
  Gene Name: oxidized low density lipoprotein (lectin-like) receptor 1
  ENST ID: ENST00000543993
  CDS Start-End: 157-390
ctactaatagtcactgagtctgtatcccaggtgtctgacctcctaacacaagagcaagcaaacctaactcaccagaaaaagaaactggagggacagatctcagcccggcaacaagcagaagaagcttcacaggagtcagaaaacgaactcaaggaaatgatagaaacccttgctcggaagctgaatgagaaatccaaagagcaaatggaacttcaccaccagaatctgaatctccaagaaacactgaagagagtagcaaattgttcaggacttcatccagcaagcaatttcctattccagttttccattctggatggggctgtctcggaggaaccccagctacccatggctctgggaggacggttctcctttgatgccccacttatttagagtccgaggcgctgtctcccagacatacccttcaggtacctgtgcatatatacaacgaggagctgtttatgcggaaaactgcattttagctgccttcagtatatgtcagaagaaggcaaacctaagagcacagtgaatttgaaggctctggaagaaaagaaaaaagtctttgagttttattctggaatttaagctattctttgtcacttgggtgccaaacatgagagcccagaaaactgtcatttagctggctgcagaactcctttgcagaaactggggttccaggagcctggcacctttatgtcaacatttttgattctagctacctgtattatttcacctagcttgtcccaagcttccctgccagcctgaagtccattttcccctttttattttaaaatttgactcctcttcaagcttgaaaaccctctg

SEQ ID NO: 163078 - DNA, 3929 bp, Homo sapiens
  Payload ID: 12139
  Gene Symbol: OXNAD1
  Gene Name: oxidoreductase NAD-binding domain containing 1
  Uniprot ID: Q96HP4
  ENST ID: ENST00000285083
  CDS Start-End: 466-1404
ctgggaccgcggagtattccaggcgcctgcaactaaacgtggccgggtctgcaagctaggtgccagcggggaaagtttccctgcttcttatcgtctgctttaacgccttaaatagcccgctgaaggctgcagcaggtgctaggtagcagcctcccggccctcgggaaaggcggggtggggaggcgagagcagcttagcctcctcgacctcccttcctggtgacggacgaacagttcccgtagaatttcgcttcaccgagtgaccttgagcccagggcgacggtcagcttgttaattcctggctgcaggaactttgtgagaattttaatgcatggaaaagctgtccatgttccaactgctgtacatccaaaagtctcagtgtaatagcaggaccaaaatattctgtcaatcagctgaccatatacttaatgactcctaaaatctcgtggacttctaagaaagcgccatggcctgtgctgctgttatgattcctgggttgttgcggtgctctgttggagccatccgtattgaggctgcgtcactgagattgacactcagcactttgcgccaccttactctaaccagcataatgaaatccaaaaggaaaactgatcacatggagagaactgcaagtgtccttcgacgggagattgtgtcagcagctaaggtgtgtggagctgccagtgagtcaccgtcagtgaagagcctccgcttgcttgttgctgatcaagacttttcctttaaagctggccagtgggttgatttctttattccaggagtctctgtggttggtgggttttcaatatgctccagtcccagactgctagaacaagagagagtgatagaattggcagtgaaatatacgaaccaccctcctgccctctgggttcacaatacgtgtacacttgactgtgaagtggctgtgagagtgggtggagagttcttctttgaccctcagcctgcggatgcctctagaaacctcgtgttgattgcaggaggagtcggaattaaccctctgctttccatcctgcggcacgcagcagatctcctcagagagcaggcaaacaaaagaaatggatatgagataggaacaataaaactattctacagtgcaaaaaataccagcgaactcctgtttaagaaaaatatccttgatttagtaaatgaatttcctgagaagattgcatgcagtttgcatgttacaaaacagactacacaaatcaatgcggaactcaagccatacatcacggaaggaagaataacggagaaggagataagagatcatatttcaaaagagactttgttctatatttgtggcccacctccaatgacagactttttctccaagcaactggaaaacaaccatgtacccaaagaacacatttgctttgagaagtggtggtaggaggcagacaaaggcagaaaaaataaagaggtgagatctactcaggagagctcctgtcctttgtggcatgattaattttttttatctctacttgagttgtcttattttttaaggctataaacttagtgaccagctggataataaaagccagctggcagacttaaatgataaactttttgcaaagacctcagtgatcaaactattttttactatactgattttctgttattaacaacgatttaattgtctcatgatgtaccatgattggtcagtatagatttttcttttgtctttaggcaaaaaaaagatatatacttatgtctaatcataggaaaatgtgatttttgagtataaaatgtgggctagctttaaattatttgacagccatctatatatcttatgtttaatgaaagtataatttaaatacaatcttaataattttactttgaaaattctttttatttaatgcctttgtttactgtaccatggcctacagtcttatttggtccatcaaagttaagtttggacatggaaaattgttaggaaaactgctttagggagttaaatatccagcatatttgctttcttgttaatgaatatcctaagtgtgtatcctgactaattgttagtttcttctcaaatgaaaccctttctgtgtcttggctgtctgccttaacgctgtaggaggcagcttcttgcttgggacaaaggcattggtgatgtgttccatgttgaatctgccttcagtgcctgggctggcttgctatggaaatgtgcttagcattgattagggggtagagagctgtttctaaatcctgcttttctactttttatttcactcatttgccagaattgttcttggcaccagcagctccttaacatatagttgttgaatgactgaaagaaagcaactaatgttttaactccttgctaagtctgagattgggaggcagtcccctagagtggatagaaagaatggtggagcctcatcccaaagctgctctgatgaaactgctagaaagcagattgtagttctttgtttagatttttaaaaatccaaaagaagtcctgactgaggccaggccattccttttatgacaagtagtcctgggcccaaggttgcctgcatagagatcacaggagggtgaagggagcctgggaagaaggacagataagtgctggagacctaggagctccagttgagattctgttctggagcggatgagagaagacaggttaccctttcttatctttgttgttgcaggcctcccagggacttgtgggcttgaacagatatgattcatgggacctgaaggtgactctagcttctgcccagttttgagttttgtcaagttttaagcagagatcatttgtcaactattttgatcccagatttgaatttggggaggaagggaggagctactgacctgatgggaatatcataatccattcaaggaaatggtcattagtacctcagaggtgaagggaatatgtgaagctctggatcactacaaggagccctgacttaccagttggccccaaagtgcccaggctgagggcataggagcatgatgagatgcaaggatgtgggattatcaaggggcacgtctactaactggtgaaggcagtctgcgggggaggacacctaaaggtatgcggaaagtacctaacccagacctctctgcattaggagtggaggtgcaaagtgagcatctccagtgcagcatgggatgggaagatagggaggtgtcgcccactgtctcggtttagccagcaccacggctggctgtgtgcctgctactgtcagagagcaagggtcatctgtcctgcccagctatgcctgccaccctgttgctgactcagtattggcagaattgctgagatgggccaggtcatcacctttgcctggagtgttcatcctttcagtgccattattctggtgctaagtgctgaagaacattttcaggtctagccgagaatgtcctcttgctcttgcctgccaggcctgtccagatctttttggtacttaaattgagctaactccagccagagtggcttggaattcatagtgcggtggctcagagtataggctcgaaagcccttgagccagattgcctgggttcagatctcacctatactacttactaggtagatgaccttgagcaagtcacttaactgctctatgcctcatttaaaattacatacaactacatgtaaaagggagatgatactgctgcctacctacctacatgatagggctgttacggggattgaaggtgatcatacatgtaaagtgcttggcagagcactgcatgagtgtgttgtcgttattaatttgctattccttgtcctattcagaaaggatttcaagaggctggatgccttagatgtggtctaacttgaaaccttcatgtgggtgtgcgtctgtcttgtttattgctgtgccaggcacaaaataggtatttcataaatatttgttaatatgctcagagttgataagctggattaaagtgacttcttaagga

SEQ ID NO: 163079 - DNA, 1643 bp, Homo sapiens
  Payload ID: 12139
  Gene Symbol: OXNAD1
  Gene Name: oxidoreductase NAD-binding domain containing 1
  ENST ID: ENST00000435829
  CDS Start-End: 417-1409
gagtattccaggcgcctgcaactaaacgtggccgggtctgcaagctaggtgccagcggggaaagtttccctgcttcttatcgtctgctttaacgccttaaatagcccgctgaaggctgcagcaggtgctaggtagcagcctcccggccctcgggaaaggcggggtggggaggcgagagcagcttagcctcctcgacctcccttcctggtgacggacgaacagttcccgtagaatttcgcttcaccgagtgaccttgagcccagggcgacggtcagcttgttaattcctggctgcaggaactttgtgagaattttaatgcatggaaaagctgtccatgttccaactgctgtacatccaaaagtctcagtgtaatagcaggaccaaaatattctgtcaatcagctgaccatatacttaatgactcctaaaatctcgtggacttctaagttttctgtttgcccagaaagcgccatggcctgtgctgctgttatgattcctgggttgttgcggtgctctgttggagccatccgtattgaggctgcgtcactgagattgacactcagcactttgcgccaccttactctaaccagcataatgaaatccaaaaggaaaactgatcacatggagagaactgcaagtgtccttcgacgggagattgtgtcagcagctaaggtgtgtggagctgccagtgagtcaccgtcagtgaagagcctccgcttgcttgttgctgatcaagacttttcctttaaagctggccagtgggttgatttctttattccaggagtctctgtggttggtgggttttcaatatgctccagtcccagactgctagaacaagagagagtgatagaattggcagtgaaatatacgaaccaccctcctgccctctgggttcacaatacgtgtacacttgactgtgaagtggctgtgagagtgggtggagagttcttctttgaccctcagcctgcggatgcctctagaaacctcgtgttgattgcaggaggagtcggaattaaccctctgctttccatcctgcggcacgcagcagatctcctcagagagcaggcaaacaaaagaaatggatatgagataggaacaataaaactattctacagtgcaaaaaataccagcgaactcctgtttaagaaaaatatccttgatttagtaaatgaatttcctgagaagattgcatgcagtttgcatgttacaaaacagactacacaaatcaatgcggaactcaagccatacatcacggaaggaagaataacggagaaggagataagagatcatatttcaaaagagactttgttctatatttgtggcccacctccaatgacagactttttctccaagcaactggaaaacaaccatgtacccaaagaacacatttgctttgagaagtggtggtaggaggcagacaaaggcagaaaaaataaagaggaaccctgcctacgccatgaggacaggcccaggctagccttcggatgatgagagacctgtggccctgctaagcagcagacgtgagagatgccatcttggagctgctagctgtggtccacccatcagcgcctgcaggcacatgctgagattagtcgatttcctaaaagttgaaggaaaaatcacccagctgacctgtttgggtta

SEQ ID NO: 163080 - DNA, 960 bp, Homo sapiens
  Payload ID: 12139
  Gene Symbol: OXNAD1
  Gene Name: oxidoreductase NAD-binding domain containing 1
  ENST ID: ENST00000452581
  CDS Start-End: 432-602
aaacgtggccgggtctgcaagctaggtgccagcggggaaagtttccctgcttcttatcgtctgctttaacgccttaaatagcccgctgaaggctgcagcaggtgctaggtagcagcctcccggccctcgggaaaggcggggtggggaggcgagagcagcttagcctcctcgacctcccttcctggtgacggacgaacagttcccgtagaatttcgcttcaccgagtgaccttgagcccagggcgacggtcagcttgttaattcctggctgcaggaactttgtgagaattttaatgcatggaaaagctgtccatgttccaactgctgtacatccaaaagtctcagtgtaatagcaggaccaaaatattctgtcaatcagctgaccatatacttaatgactcctaaaatctcgtggacttctaagaaagcgccatggcctgtgctgctgttatgattcctgggttgttgcggtgctctgttggagccatccgtattgaggctgcgtcactgagattgacactcagcactttgcgccaccttactctaaccagattgtgtcagcagctaaggtgtgtggagctgccagtgagtcaccgtcagtgaagagcctccgcttgcttgttgctgatcaagacttttcctttaaagctggccagtgggttgatttctttattccaggagtctctgtggttggtgggttttcaatatgctccagtcccagactgctagaacaagagagagtgatagaattggcagtgaaatatacgaaccaccctcctgccctctgggttcacaatacgtgtacacttgactgtgaagtggctgtgagagtgggtggagagttcttctttgaccctcagcctgcggatgcctctagaaacctcgtgttgattgcaggaggagtcggaattaaccctctgctttccatcctgcggcacgcagcagatctcctcagagagca

SEQ ID NO: 163081 - DNA, 1994 bp, Homo sapiens
  Payload ID: 12139
  Gene Symbol: OXNAD1
  Gene Name: oxidoreductase NAD-binding domain containing 1
  ENST ID: ENST00000442255
  CDS Start-End: 458-673
gcggagtattccaggcgcctgcaactaaacgtggccgggtctgcaagctaggtgccagcggggaaagtttccctgcttcttatcgtctgctttaacgccttaaatagcccgctgaaggctgcagcaggtgctaggtagcagcctcccggccctcgggaaaggcggggtggggaggcgagagcagcttagcctcctcgacctcccttcctggtgacggacgaacagttcccgtagaatttcgcttcaccgagtgaccttgagcccagggcgacggtcagcttgttaattcctggctgcaggaactttgtgagaattttaatgcatggaaaagctgtccatgttccaactgctgtacatccaaaagtctcagtgtaatagcaggaccaaaatattctgtcaatcagctgaccatatacttaatgactcctaaaatctcgtggacttctaagaaagcgccatggcctgtgctgctgttatgattcctgggttgttgcggtgctctgttggagccatccgtattgaggctgcgtcactgagattgacactcagcactttgcgccaccttactctaaccagcataatgaaatccaaaaggaaaactgatcacatggagagaactgcaagtgtccttcgacgggagagcaacttatttcatcaagggagaaagcactaacatctgagaaaggaaagtggacgagctcttgttacccttctaatgtacagattttttccaccatattcagactatagaaagctaatctaccacctgaaggggtgtcaagggctgagaaataaaggatcctcaccctttacctcaattgtgtcagcagctaaggtgtgtggagctgccagtgagtcaccgtcagtgaagagcctccgcttgcttgttgctgatcaagacttttcctttaaagctggccagtgggttgatttctttattccaggagtctctgtggttggtgggttttcaatatgctccagtcccagactgctagaacaagagagagtgatagaattggcagtgaaatatacgaaccaccctcctgccctctgggttcacaatacgtgtacacttgactgtgaagtggctgtgagagtgggtggagagttcttctttgaccctcagcctgcggatgcctctagaaacctcgtgttgattgcaggaggagtcggaattaaccctctgctttccatcctgcggcacgcagcagatctcctcagagagcaggcaaacaaaagaaatggatatgagataggaacaataaaactattctacagtgcaaaaaataccagcgaactcctgtttaagaaaaatatccttgatttagtaaatgaatttcctgagaagattgcatgcagtttgcatgttacaaaacagactacacaaatcaatgcggaactcaagccatacatcacggaaggaagaataacggagaaggagataagagatcatatttcaaaagagactttgttctatatttgtggcccacctccaatgacagactttttctccaagcaactggaaaacaaccatgtacccaaagaacacatttgctttgagaagtggtggtaggaggcagacaaaggcagaaaaaataaagaggtgagatctactcaggagagctcctgtcctttgtggcatgattaattttttttatctctacttgagttgtcttattttttaaggctataaacttagtgaccagctggataataaaagccagctggcagacttaaatgataaactttttgcaaagacctcagtgatcaaactattttttactatactgattttctgttattaacaacgatttaattgtctcatgatgtaccatgattggtcagtatagatttttcttttgtctttaggcaaaaaaaagatatatacttatgtctaatcataggaaaatgtgatttttgagtataaaatgtgggctagctttaaattatttgacagccatctatatatcttatgtttaatgaaagtataattt

SEQ ID NO: 163082 - DNA, 1681 bp, Homo sapiens
  Payload ID: 12139
  Gene Symbol: OXNAD1
  Gene Name: oxidoreductase NAD-binding domain containing 1
  Uniprot ID: Q96HP4
  ENST ID: ENST00000605932
  CDS Start-End: 463-1401
ggaccgcggagtattccaggcgcctgcaactaaacgtggccgggtctgcaagctaggtgccagcggggaaagtttccctgcttcttatcgtctgctttaacgccttaaatagcccgctgaaggctgcagcaggtgctaggtagcagcctcccggccctcgggaaaggcggggtggggaggcgagagcagcttagcctcctcgacctcccttcctggtgacggacgaacagttcccgtagaatttcgcttcaccgagtgaccttgagcccagggcgacggtcagcttgttaattcctggctgcaggaactttgtgagaattttaatgcatggaaaagctgtccatgttccaactgctgtacatccaaaagtctcagtgtaatagcaggaccaaaatattctgtcaatcagctgaccatatacttaatgactcctaaaatctcgtggacttctaagaaagcgccatggcctgtgctgctgttatgattcctgggttgttgcggtgctctgttggagccatccgtattgaggctgcgtcactgagattgacactcagcactttgcgccaccttactctaaccagcataatgaaatccaaaaggaaaactgatcacatggagagaactgcaagtgtccttcgacgggagattgtgtcagcagctaaggtgtgtggagctgccagtgagtcaccgtcagtgaagagcctccgcttgcttgttgctgatcaagacttttcctttaaagctggccagtgggttgatttctttattccaggagtctctgtggttggtgggttttcaatatgctccagtcccagactgctagaacaagagagagtgatagaattggcagtgaaatatacgaaccaccctcctgccctctgggttcacaatacgtgtacacttgactgtgaagtggctgtgagagtgggtggagagttcttctttgaccctcagcctgcggatgcctctagaaacctcgtgttgattgcaggaggagtcggaattaaccctctgctttccatcctgcggcacgcagcagatctcctcagagagcaggcaaacaaaagaaatggatatgagataggaacaataaaactattctacagtgcaaaaaataccagcgaactcctgtttaagaaaaatatccttgatttagtaaatgaatttcctgagaagattgcatgcagtttgcatgttacaaaacagactacacaaatcaatgcggaactcaagccatacatcacggaaggaagaataacggagaaggagataagagatcatatttcaaaagagactttgttctatatttgtggcccacctccaatgacagactttttctccaagcaactggaaaacaaccatgtacccaaagaacacatttgctttgagaagtggtggtaggaggcagacaaaggcagaaaaaataaagaggaaccctgcctacgccatgaggacaggcccaggctagccttcggatgatgagagacctgtggccctgctaagcagcagacgtgagagatgccatcttggagctgctagctgtggtccacccatcagcgcctgcaggcacatgctgagattagtcgatttcctaaaagttgaaggaaaaatcacccagctgacctgtttgggttatgattttaactcactaagctttggggagctttattacacagcagaa

SEQ ID NO: 163083 - DNA, 2288 bp, Homo sapiens
  Payload ID: 12139
  Gene Symbol: OXNAD1
  Gene Name: oxidoreductase NAD-binding domain containing 1
  ENST ID: ENST00000606098
  CDS Start-End: 199-1134
agcccagggcgacggtcagcttgttaattcctggctgcaggaactttgtgagaattttaatgcatggaaaagctgtccatgttccaactgctgtacatccaaaagtctcagtgtaatagcaggaccaaaatattctgtcaatcagctgaccatatacttaatgactcctaaaatctcgtggacttctaagaaagcgccatggcctgtgctgctgttatgattcctgggttgttgcggtgctctgttggagccatccgtattgaggctgcgtcactgagattgacactcagcactttgcgccaccttactctaaccagcataatgaaatccaaaaggaaaactgatcacatggagagaactgcaagtgtccttcgacgggagattgtgtcagcagctaaggtgtgtggagctgccagtgagtcaccgtcagtgaagagcctccgcttgcttgttgctgatcaagacttttcctttaaagctggccagtgggttgatttctttattccaggagtctctgtggttggtgggttttcaatatgctccagtcccagactgctagaacaagagagagtgatagaattggcagtgaaatatacgaaccaccctcctgccctctgggttcacaatacgtgtacacttgactgtgaagtggctgtgagagtgggtggagagttcttctttgaccctcagcctgcggatgcctctagaaacctcgtgttgattgcaggaggagtcggaattaaccctctgctttccatcctgcggcacgcagcagatctcctcagagagcaggcaaacaaaagaaatggatatgagataggaacaataaaactattctacagtgcaaaaaataccagcgaactcctgtttaagaaaaatatccttgatttagtaaatgaatttcctgagaagattgcatgcagtttgcatgttacaaaacagactacacaaatcaatgcggaactcaagccatacatcacgggaagaataacggagaaggagataagagatcatatttcaaaagagactttgttctatatttgtggcccacctccaatgacagactttttctccaagcaactggaaaacaaccatgtacccaaagaacacatttgctttgagaagtggtggtaggaggcagacaaaggcagaaaaaataaagagcagaagagtactagcggccatctccagagacaagaagaaaaagaatttcagaggctcagaggaaagttcaatatggccccatggcaagaaatacaggcatgctggctccaggtggacttgtcaccctaagataaaagttggaggcaactaaggaaaaccactgtggctgtagagatggatgagtgtgaatttataaggacagaagggggtacctgagcctccagggatggtgacaaaagtaaggcaaacccaaaagaggaggaatgttgagcctggaatgagctgaggtgtgcaggtggcgtgaggtatacacacatgcacctcagcctagaatgagatgaggtatgtgaactacgtatgtgcatgtgtgcacacgtatacacatacgccatttaaaatcatgctcaaagcaagaagttgcacaagaaaagggtatgttcaagacaataaaaatgggattattcaactcctattttacttgcttttctacaaggagacaaatttggctaaagtctaagagactgtgaagttttctccccattaatggcatcacagcatttgtatctgattcatcaggattctcctgagaaagagaatcagtaggctatcttgtatctagaaagattcattttgaggaactggcttacatgactgtggaggatgtaaaatccaaagtttgcagggtagcccagcaggctggatattccagcaggagtcgatgttgcagttttgagtctgcaggctgaattccttcctcttccgggatctcaatcttttttcttaaggccttcaactgattgaagtccactcacattaggaagggtaatgtgctttactcttctactgagtggaatgttaatcacatctaaaaatactttcatagcaacatctagattggtgtttgatcaagtaagtgagtactatagcccaacaaagctgacataaaattaaccatcacaggacaattctgcaacttaattttctcgtttaacatttcctgtaattccttccatgtcagcttatacagaatgacctcatctataataagaatatattatcctttgtttaaccattcccctactgatggacatgaacattattaccttttttgatattacaagtaa

SEQ ID NO: 163084 - DNA, 3983 bp, Homo sapiens
  Payload ID: 12139
  Gene Symbol: OXNAD1
  Gene Name: oxidoreductase NAD-binding domain containing 1
  ENST ID: ENST00000627468
  CDS Start-End: 467-1459
caatagaatgtggggctcgcccgcgctgctacgtcacgtctgggaccgcggagtattccaggcgcctgcaactaaacgtggccgggtctgcaagctaggtgccagcggggaaagtttccctgcttcttatcgtctgctttaacgccttaaatagcccgctgaaggctgcagcaggtgctaggtagcagcctcccggccctcgggaaaggcggggtggggaggcgagagcagcttagcctcctcgacctcccttcctggtgacggacgaacagttcccgtagaatttcgcttcaccgagtgaccttgagcccagggcgacggtcagcttgttaattcctggctgcaggaactttgtgagaattttaatgcatggaaaagctgtccatgttccaactgctgtacatccaaaagtctcagtgtaatagcaggaccaaaatattctgtcaatcagctgaccatatacttaatgactcctaaaatctcgtggacttctaagttttctgtttgcccagaaagcgccatggcctgtgctgctgttatgattcctgggttgttgcggtgctctgttggagccatccgtattgaggctgcgtcactgagattgacactcagcactttgcgccaccttactctaaccagcataatgaaatccaaaaggaaaactgatcacatggagagaactgcaagtgtccttcgacgggagattgtgtcagcagctaaggtgtgtggagctgccagtgagtcaccgtcagtgaagagcctccgcttgcttgttgctgatcaagacttttcctttaaagctggccagtgggttgatttctttattccaggagtctctgtggttggtgggttttcaatatgctccagtcccagactgctagaacaagagagagtgatagaattggcagtgaaatatacgaaccaccctcctgccctctgggttcacaatacgtgtacacttgactgtgaagtggctgtgagagtgggtggagagttcttctttgaccctcagcctgcggatgcctctagaaacctcgtgttgattgcaggaggagtcggaattaaccctctgctttccatcctgcggcacgcagcagatctcctcagagagcaggcaaacaaaagaaatggatatgagataggaacaataaaactattctacagtgcaaaaaataccagcgaactcctgtttaagaaaaatatccttgatttagtaaatgaatttcctgagaagattgcatgcagtttgcatgttacaaaacagactacacaaatcaatgcggaactcaagccatacatcacggaaggaagaataacggagaaggagataagagatcatatttcaaaagagactttgttctatatttgtggcccacctccaatgacagactttttctccaagcaactggaaaacaaccatgtacccaaagaacacatttgctttgagaagtggtggtaggaggcagacaaaggcagaaaaaataaagaggtgagatctactcaggagagctcctgtcctttgtggcatgattaattttttttatctctacttgagttgtcttattttttaaggctataaacttagtgaccagctggataataaaagccagctggcagacttaaatgataaactttttgcaaagacctcagtgatcaaactattttttactatactgattttctgttattaacaacgatttaattgtctcatgatgtaccatgattggtcagtatagatttttcttttgtctttaggcaaaaaaaagatatatacttatgtctaatcataggaaaatgtgatttttgagtataaaatgtgggctagctttaaattatttgacagccatctatatatcttatgtttaatgaaagtataatttaaatacaatcttaataattttactttgaaaattctttttatttaatgcctttgtttactgtaccatggcctacagtcttatttggtccatcaaagttaagtttggacatggaaaattgttaggaaaactgctttagggagttaaatatccagcatatttgctttcttgttaatgaatatcctaagtgtgtatcctgactaattgttagtttcttctcaaatgaaaccctttctgtgtcttggctgtctgccttaacgctgtaggaggcagcttcttgcttgggacaaaggcattggtgatgtgttccatgttgaatctgccttcagtgcctgggctggcttgctatggaaatgtgcttagcattgattagggggtagagagctgtttctaaatcctgcttttctactttttatttcactcatttgccagaattgttcttggcaccagcagctccttaacatatagttgttgaatgactgaaagaaagcaactaatgttttaactccttgctaagtctgagattgggaggcagtcccctagagtggatagaaagaatggtggagcctcatcccaaagctgctctgatgaaactgctagaaagcagattgtagttctttgtttagatttttaaaaatccaaaagaagtcctgactgaggccaggccattccttttatgacaagtagtcctgggcccaaggttgcctgcatagagatcacaggagggtgaagggagcctgggaagaaggacagataagtgctggagacctaggagctccagttgagattctgttctggagcggatgagagaagacaggttaccctttcttatctttgttgttgcaggcctcccagggacttgtgggcttgaacagatatgattcatgggacctgaaggtgactctagcttctgcccagttttgagttttgtcaagttttaagcagagatcatttgtcaactattttgatcccagatttgaatttggggaggaagggaggagctactgacctgatgggaatatcataatccattcaaggaaatggtcattagtacctcagaggtgaagggaatatgtgaagctctggatcactacaaggagccctgacttaccagttggccccaaagtgcccaggctgagggcataggagcatgatgagatgcaaggatgtgggattatcaaggggcacgtctactaactggtgaaggcagtctgcgggggaggacacctaaaggtatgcggaaagtacctaacccagacctctctgcattaggagtggaggtgcaaagtgagcatctccagtgcagcatgggatgggaagatagggaggtgtcgcccactgtctcggtttagccagcaccacggctggctgtgtgcctgctactgtcagagagcaagggtcatctgtcctgcccagctatgcctgccaccctgttgctgactcagtattggcagaattgctgagatgggccaggtcatcacctttgcctggagtgttcatcctttcagtgccattattctggtgctaagtgctgaagaacattttcaggtctagccgagaatgtcctcttgctcttgcctgccaggcctgtccagatctttttggtacttaaattgagctaactccagccagagtggcttggaattcatagtgcggtggctcagagtataggctcgaaagcccttgagccagattgcctgggttcagatctcacctatactacttactaggtagatgaccttgagcaagtcacttaactgctctatgcctcatttaaaattacatacaactacatgtaaaagggagatgatactgctgcctacctacctacatgatagggctgttacggggattgaaggtgatcatacatgtaaagtgcttggcagagcactgcatgagtgtgttgtcgttattaatttgctattccttgtcctattcagaaaggatttcaagaggctggatgccttagatgtggtctaacttgaaaccttcatgtgggtgtgcgtctgtcttgtttattgctgtgccaggcacaaaataggtatttcataaatatttgttaatatgctcagagttgataagctggattaaagtgacttcttaagg

SEQ ID NO: 163085 - DNA, 620 bp, Homo sapiens
  Payload ID: 12140
  Gene Symbol: OXLD1
  Gene Name: oxidoreductase-like domain containing 1
  Uniprot ID: Q5BKU9
  ENST ID: ENST00000374741
  CDS Start-End: 12-455
gtccgcgggcgatgctgctgcggagggtggtcgagggaggccgggcggtagccgccgcggtccgtggctcgggggctcgccggttctccagcccggactgctgccagaggcttcctggaggtggcagctttcttcaaaggcaccatcccggagcgcaagcccctgatgggcgcagaaaattcgggacagaccacgtagaggtgggctcccaagcaggtgcggacggcaccaggccgcccaaggcatcgctgccacctgagctccagccgcccacaaactgctgcatgagtggctgccccaactgcgtgtgggtggagtacgcggacaggctgctgcagcacttccaggacggtggggagcgggccctggctgccctggaggagcacgtggctgatgagaacctcaaggccttcctcaggatggagatccggctgcacaccaggtgcggaggctgagccatccctgctggactccctaccgcaggacggagtccaggacgcagccgcagcctccttccttcacaccccctcacagactccttgtgtccaacgggaataggaagaattagttactgacttcacctgagaaaaaaataaattctctatggtggtttcacagga

SEQ ID NO: 163086 - DNA, 923 bp, Homo sapiens
  Payload ID: 12140
  Gene Symbol: OXLD1
  Gene Name: oxidoreductase-like domain containing 1
  ENST ID: ENST00000571757
  CDS Start-End: 57-335
ttggccggagcgcccgccgctcacggtcaggggttgccggatcccgtccgcgggcgatgctgctgcggagggtggtcgagggaggccgggcggtagccgccgcggtccgtggctcggcaagtaccaggacgggtcttggcagcgccgaagggcacgtccgagaggccgctgtccgggggcccgcacgtaccgggaggagccccggcccctccacccgcatgtggggacggagccgggaggatcgcgcgctggccgccgccgaaggacccctcgctcctctcctccatcggctcttaccgagtccccgccccggaatctgtggaggggccgcttagccttgggagaggaagcagcccggtgaacggccactttcctgtttctcagtatctgccgagcgcctgtgtgcgagccctcctgggctctggggactggccgtggacatggagcggatgatgcccctcgcaggactagttaaataaggggctcgccggttctccagcccggactgctgccagaggcttcctggaggtggcagctttcttcaaaggcaccatcccggagcgcaagcccctgatgggcgcagaaaattcgggacagaccacgtagaggtgggctcccaagcaggtgcggacggcaccaggccgcccaaggcatcgctgccacctgagctccagccgcccacaaactgctgcatgagtggctgccccaactgcgtgtgggtggagtacgcggacaggctgctgcagcacttccaggacggtggggagcgggccctggctgccctggaggagcacgtggctgatgagaacctcaaggccttcctcaggatggagatccggctgcacaccaggtgcggaggctgagccatccctgctggactccctaccgcaggacggagtccaggacgcagccgcagcctcctt

SEQ ID NO: 163087 - DNA, 553 bp, Homo sapiens
  Payload ID: 12140
  Gene Symbol: OXLD1
  Gene Name: oxidoreductase-like domain containing 1
  ENST ID: ENST00000571092
  CDS Start-End: 2-280
gatgctgctgcggagggtggtcgagggaggccgggcggtagccgccgcggtccgtggctcggcaagtaccaggacgggtcttggcagcgccgaagggcacgtccgagaggccgctgtccgggggcccgcacgtaccgggaggagccccggcccctccacccgcatgtggggacggagccgggaggatcgcgcgctggccgccgccgaaggacccctcgctcctctcctccatcggctcttaccgagtccccgccccggaatctgtggaggggccgcttagccttgggagaggaagcagcccggtgaacggccactttcctgtttctcagtatctgccgagcgcctgtgtgcgagccctcctgggctctggggactggccgtggacatggagcggatgatgcccctcgcaggactagttaaataagtgaaggggctcgccggttctccagcccggactgctgccagaggcttcctggaggtggcagctttcttcaaaggcaccatcccggagcgcaagcccctgatgggcgcagaaaattcgggacagaccacg

SEQ ID NO: 163088 - DNA, 821 bp, Homo sapiens
  Payload ID: 12140
  Gene Symbol: OXLD1
  Gene Name: oxidoreductase-like domain containing 1
  ENST ID: ENST00000575992
  CDS Start-End: 1-239
ccgccgcggtccgtggctcggcaagtaccaggacgggtcttggcagcgccgaagggcacgtccgagaggccgctgtccgggggcccgcacgtaccgggaggagccccggcccctccacccgcatgtggggacggagccgggaggatcgcgcgctggccgccgccgaaggacccctcgctcctctcctccatcggctcttaccgagtccccgccccggaatctgtggaggggccgcttagccttgggagaggaagcagcccggtgaacggccactttcctgtttctcagtatctgccgagcgcctgtgtgcgagccctcctgggctctggggactggccgtggacatggagcggatgatgcccctcgcaggactagttaaataagtgaagttgggggctcgccggttctccagcccggactgctgccagaggcttcctggaggtggcagctttcttcaaaggcaccatcccggagcgcaagcccctgatgggcgcagaaaattcgggacagaccacgtagaggtgggctcccaagcaggtgcggacggcaccaggccgcccaaggcatcgctgccacctgagctccagccgcccacaaactgctgcatgagtggctgccccaactgcgtgtgggtggagtacgcggacaggctgctgcagcacttccaggacggtggggagcgggccctggctgccctggaggagcacgtggctgatgagaacctcaaggccttcctcaggatggagatccggctgcacaccaggtgcggaggctgagccatccctgctggactccctaccgcaggacggagtccaggacgc

SEQ ID NO: 163089 - DNA, 803 bp, Homo sapiens
  Payload ID: 12140
  Gene Symbol: OXLD1
  Gene Name: oxidoreductase-like domain containing 1
  ENST ID: ENST00000571503
  CDS Start-End: 19-297
ggatcccgtccgcgggcgatgctgctgcggagggtggtcgagggaggccgggcggtagccgccgcggtccgtggctcggcaagtaccaggacgggtcttggcagcgccgaagggcacgtccgagaggccgctgtccgggggcccgcacgtaccgggaggagccccggcccctccacccgcatgtggggacggagccgggaggatcgcgcgctggccgccgccgaaggacccctcgctcctctcctccatcggctcttaccgagtccccgccccggaatctgtggaggggccgcttagccttgggagaggaagcagcccgggggctcgccggttctccagcccggactgctgccagaggcttcctggaggtggcagctttcttcaaaggcaccatcccggagcgcaagcccctgatgggcgcagaaaattcgggacagaccacgtagaggtgggctcccaagcaggtgcggacggcaccaggccgcccaaggcatcgctgccacctgagctccagccgcccacaaactgctgcatgagtggctgccccaactgcgtgtgggtggagtacgcggacaggctgctgcagcacttccaggacggtggggagcgggccctggctgccctggaggagcacgtggctgatgagaacctcaaggccttcctcaggatggagatccggctgcacaccaggtgcggaggctgagccatccctgctggactccctaccgcaggacggagtccaggacgcagccgcagcctccttccttcacaccccctcacagactccttgtgtccaacgggaa

SEQ ID NO: 163090 - DNA, 1781 bp, Homo sapiens
  Payload ID: 12141
  Gene Symbol: OXER1
  Gene Name: oxoeicosanoid (OXE) receptor 1
  Uniprot ID: Q8TDS5
  ENST ID: ENST00000378661
  CDS Start-End: 83-1354
ggctgcagggttccccttggcctgcaaacaggaacacagggtgtttctcagtggctgcgagaatgctgatgaaaaccccaggatgttgtgtcaccgtggtggccagctgatagtgccaatcatcccactttgccctgagcactcctgcaggggtagaagactccagaaccttctctcaggcccatggcccaagcagcccatggaacttcataacctgagctctccatctccctctctctcctcctctgttctccctccctccttctctccctcaccctcctctgctccctctgcctttaccactgtgggggggtcctctggagggccctgccaccccacctcttcctcgctggtgtctgccttcctggcaccaatcctggccctggagtttgtcctgggcctggtggggaacagtttggccctcttcatcttctgcatccacacgcggccctggacctccaacacggtgttcctggtcagcctggtggccgctgacttcctcctgatcagcaacctgcccctccgcgtggactactacctcctccatgagacctggcgctttggggctgctgcctgcaaagtcaacctcttcatgctgtccaccaaccgcacggccagcgttgtcttcctcacagccatcgcactcaaccgctacctgaaggtggtgcagccccaccacgtgctgagccgtgcttccgtgggggcagctgcccgggtggccgggggactctgggtgggcatcctgctcctcaacgggcacctgctcctgagcaccttctccggcccctcctgcctcagctacagggtgggcacgaagccctcggcctcgctccgctggcaccaggcactgtacctgctggagttcttcctgccactggcgctcatcctctttgctattgtgagcattgggctcaccatccggaaccgtggtctgggcgggcaggcaggcccgcagagggccatgcgtgtgctggccatggtggtggccgtctacaccatctgcttcttgcccagcatcatctttggcatggcttccatggtggctttctggctgtccgcctgccgatccctggacctctgcacacagctcttccatggctccctggccttcacctacctcaacagtgtcctggaccccgtgctctactgcttctctagccccaacttcctccaccagagccgggccttgctgggcctcacgcggggccggcagggcccagtgagcgacgagagctcctaccaaccctccaggcagtggcgctaccgggaggcctctaggaaggcggaggccatagggaagctgaaagtgcagggcgaggtctctctggaaaaggaaggctcctcccagggctgagggccagctgcagggctgcagcgctgtgggggtaagggctgccgcgctctggcctggagggacaaggccagcacacggtgcctcaaccaactggacaagggatggcggcagaccaggggccaggccaaagcactggcaggactcaggtgggtggcagggagagaaacccacctaggcctctcagtgtgtccaggatggcattcccagaatgcaggggagagcaggatgccgggtggaggagacaggcaaggtgccgttggcacaccagctcagacaggggcctgcgcagctgcaggggacagacgccaatcactgtcacagcagagtcaccttagaaattggacagctgcatgttctgtgctctccagtttgtcccttccaatattaataaacttcccttttaaatatatttatttgcaagaccaaa

SEQ ID NO: 163091 - DNA, 4181 bp, Homo sapiens
  Payload ID: 12142
  Gene Symbol: OGDH
  Gene Name: oxoglutarate (alpha-ketoglutarate) dehydrogenase (lipoamide)
  Uniprot ID: Q02218
  ENST ID: ENST00000222673
  CDS Start-End: 43-3114
ctgagccggagacaggcagttgtgaaaaacttcaggacaaaaatgtttcatttaaggacttgtgctgctaagttgaggccattgacggcttcccagactgttaagacattttcacaaaacagaccagcagcagctaggacatttcaacagattcggtgctattctgcacctgttgctgctgagccctttctcagtgggactagttcgaactatgtggaggagatgtactgtgcttggctggaaaaccccaaaagtgtacataagtcatgggacattttttttcgcaacacgaatgccggagccccaccgggcactgcctaccagagtccccttcccctgagccgaggctccctggctgctgtggcccatgcacagtccctggtagaagcacagcccaacgtggacaagctcgtggaggaccacctggcagtgcagtcgctcatcagggcatatcagatacgagggcaccatgtagcacagctggaccccctggggattttggatgctgatctggactcctccgtgcccgctgacattatctcatccacagacaaacttgggttctatggcctggatgagtctgacctcgacaaggtcttccacttgcccaccaccactttcatcgggggacaggaatcagcacttcctctgcgggagatcatccgtcggctggagatggcctactgccagcatattggggtggagttcatgttcatcaatgacctggagcagtgccagtggatccggcagaagtttgagacccctgggatcatgcagttcacaaatgaggagaaacggaccctgctggccaggcttgtgcggtccaccaggtttgaggagttcctacagcggaagtggtcctctgagaagcgctttggtctagaaggctgcgaggtactgatccctgccctcaagaccatcattgacaagtctagtgagaatggcgtggactacgtgatcatgggcatgccacacagagggcggctgaacgtgcttgcaaatgtcatcaggaaggagctggaacagatcttctgtcaattcgattcaaagctggaggcagctgatgagggctccggagatgtgaagtaccacctgggcatgtatcaccgcaggatcaatcgtgtcaccgacaggaacattaccttgtccttggtggccaacccttcccaccttgaggccgctgaccccgtggtgatgggcaagaccaaagccgaacagttttactgtggcgacactgaagggaaaaaggtcatgtccatcctgttgcatggggatgctgcatttgctggccagggcattgtgtacgagaccttccacctcagcgacctgccatcctacacaactcatggcaccgtgcacgtggtcgtcaacaaccagatcggcttcaccaccgaccctcggatggcccgctcctccccctaccccactgacgtggcccgagtggtgaatgcccccattttccacgtgaactcagatgaccccgaggctgtcatgtacgtgtgcaaagtggcggccgagtggaggagcaccttccacaaggacgtggttgtcgatttggtgtgttaccggcgcaacggccacaacgagatggatgagcccatgttcacgcagccgctcatgtacaagcagatccgcaagcagaagcctgtgttacagaagtacgctgagctgctggtgtcgcagggtgtggtcaaccagcctgagtatgaggaggaaatttccaagtatgataagatctgtgaggaagcttttgccagatctaaagatgagaagatcttgcacattaagcactggctggactctccctggcctggcttcttcaccctggacgggcagcccaggagcatgtcctgcccctccacgggtctgacggaggatattctgacacacatcgggaatgtggctagttctgtgcctgtggaaaactttactattcatggagggctgagccggatcttgaagactcgtggggaaatggtgaagaaccggactgtggactgggctctagcggagtacatggcgtttggctcgctcctgaaggagggcatccacattcggctgagcggccaggacgtggagcggggcacattcagccaccgccaccatgtgctccatgaccagaatgtggacaagagaacctgcatccccatgaaccatctctggcccaatcaggccccctatactgtgtgcaacagctcactgtctgagtacggcgtgctgggctttgagctgggcttcgccatggccagtcctaatgccctggtcctctgggaagcccaatttggtgacttccacaacacggcccagtgtatcatcgaccagttcatctgcccgggacaagccaagtgggtgcggcagaatggcatcgtgttgctgctgccccatggcatggagggcatgggtccagaacattcctccgcccgcccagagcggttcttgcagatgtgcaacgatgacccagatgtcctgccagaccttaaagaagccaacttcgacatcaatcagctatatgactgcaattgggttgttgtcaactgctccactcctggcaacttcttccacgtgctacgacgccagatcctgctgccattccggaagccgttaattatcttcacccccaaatccctgttgcgccaccccgaggccagatccagctttgatgagatgcttccaggaacccacttccagcgggtgatcccagaagatggccctgcagctcagaacccagaaaatgtcaaaaggcttctcttctgcaccggcaaagtgtattatgacctcacccgggagcgcaaagcacgcgacatggtggggcaggtggccatcacaaggattgagcagctgtcgccattcccctttgacctcctgctgaaggaggtgcagaagtaccccaatgctgagctggcctggtgccaggaggagcacaagaaccaaggctactatgactacgtgaagccaagacttcggaccaccatcagccgcgccaagcccgtctggtatgccggccgggacccagcggctgctccagccaccggcaacaagaagacccacctgacggagctgcagcgcctcctggacacggccttcgacctggacgtcttcaagaacttctcgtagatgctgcctagggttgcttgggccactgccctctccacacccatgactgccccttgcttctcaactaaagaatagtgcctcagcgctgcccacaccaccgccctcctcgctgtgccaccacccctccctctgctctcataggagttaggctgtcgtccccctccagtgcttggctgccccacaggccacacgctgcccaggctctgctgacttctgagcagttttccaggaggccggggggagcaggaggaggaaaggtagcccccgagggatgtccttggggaggggtcagctctggccacaatcctccccaccagtctcacccactaggataggaactgggccttgtgtgctggcttccgctgtcacccagcaaggcacaggctcctgtatttgagactaggatagcttcatcttgagcctgagccttagaatctgtagaggagcctggagtcggatctagccatggctggcagaggtttctagggtgggccccagccgtggcgtgaactgaggatgacccggggcagctggcaggagagagccttggcctgacctggcacagaaagggcagcttcagtctctgcagtgtccattatctgctgttccttcgagggttccaggctgtgtgtggggcccaagcatgccccacccacccctcctgggcccaggcagcacctggagcccacagagtctgtgtgtagccaggaagccccgctcaggtagccaccaccggggcactggctgctctgtcttggtcctgttaaccctccacctcctctcttggactccctccccaccccaaccactctttctttctcctttaacccaatggagactttctgatgcatcgttttctttgctgtgccaaagcaggtcagaagagggagaggaggggctgggggtgaggggccaggccatggccaaggggccagctgcccctcatttatcactctgaccttcacagggacagatctgatttatttattttggttaaaaaaaaaaaaaaggaacagaaacaactttgcattgcattggcttgacccataaactaagttatatccgtg

SEQ ID NO: 163092 - DNA, 1744 bp, Homo sapiens
  Payload ID: 12142
  Gene Symbol: OGDH
  Gene Name: oxoglutarate (alpha-ketoglutarate) dehydrogenase (lipoamide)
  Uniprot ID: Q02218
  ENST ID: ENST00000443864
  CDS Start-End: 94-1377
ccgagagtttggagccccggagtggggtgtcggcgcctcattcgggtggagctgagccggagacaggcagttgtgaaaaacttcaggacaaaaatgtttcatttaaggacttgtgctgctaagttgaggccattgacggcttcccagactgttaagacattttcacaaaacagaccagcagcagctaggacatttcaacagattcggtgctattctgcacctgttgctgctgagccctttctcagtgggactagttcgaactatgtggaggagatgtactgtgcttggctggaaaaccccaaaagtgtacataagtcatgggacattttttttcgcaacacgaatgccggagccccaccgggcactgcctaccagagtccccttcccctgagccgaggctccctggctgctgtggcccatgcacagtccctggtagaagcacagcccaacgtggacaagctcgtggaggaccacctggcagtgcagtcgctcatcagggcatatcagatacgagggcaccatgtagcacagctggaccccctggggattttggatgctgatctggactcctccgtgcccgctgacattatctcatccacagacaaacttgggttctatggcctggatgagtctgacctcgacaaggtcttccacttgcccaccaccactttcatcgggggacaggaatcagcacttcctctgcgggagatcatccgtcggctggagatggcctactgccagcatattggggtggagttcatgttcatcaatgacctggagcagtgccagtggatccggcagaagtttgagacccctgggatcatgcagttcacaaatgaggagaaacggaccctgctggccaggcttgtgcggtccaccaggtttgaggagttcctacagcggaagtggtcctctgagaagcgctttggtctagaaggctgcgaggtactgatccctgccctcaagaccatcattgacaagtctagtgagaatggcgtggactacgtgatcatgggcatgccacacagagggcggctgaacgtgcttgcaaatgtcatcaggaaggagctggaacagatcttctgtcaattcgattcaaagctggaggcagctgatgagggctccggagatgtgaagtaccacctgggcatgtatcaccgcaggatcaatcgtgtcaccgacaggaacattaccttgtccttggtggccaacccttcccaccttgaggccgctgaccccgtggtgatgggcaagaccaaagccgaacagttttactgtggcgacactgaagggaaaaaggtaaggcccagagagaggcgtgcaaggcagatcgtcaaggccccatgttccagcatggagttccgctcaccaacataacccagagccctgggtgcatctagactttaaaaaaatatttaaagtcggccgggcgcagtgtctcacgcctgtaatcccagcactttgggaggccgaggtgggcagatcacctgagttcgggagttggagaccagcctgaccaacatggagaaactccatctctactaaaaatacaaaattagctgggcgtggtggcgcgcgcctgtaatcccagctactcaggaggctgaggcaggagaatcgcttgaacccgggaggtggaggttgcagtgagccgagattacgccattgcactccagcctgggccaacaagagcgaaactctgtctcaaagaaaaaaataaataaataaaaaatatatgtatatg

SEQ ID NO: 163093 - DNA, 3474 bp, Homo sapiens
  Payload ID: 12142
  Gene Symbol: OGDH
  Gene Name: oxoglutarate (alpha-ketoglutarate) dehydrogenase (lipoamide)
  ENST ID: ENST00000447398
  CDS Start-End: 91-3195
agagtttggagccccggagtggggtgtcggcgcctcattcgggtggagctgagccggagacaggcagttgtgaaaaacttcaggacaaaaatgtttcatttaaggacttgtgctgctaagttgaggccattgacggcttcccagactgttaagacattttcacaaaacagaccagcagcagctaggacatttcaacagattcggtgctattctgcacctgttgctgctgagccctttctcagtgggactagttcgaactatgtggaggagatgtactgtgcttggctggaaaaccccaaaagtgtacataagtcatgggacattttttttcgcaacacgaatgccggagccccaccgggcactgcctaccagagtccccttcccctgagccgaggctccctggctgctgtggcccatgcacagtccctggtagaagcacagcccaacgtggacaagctcgtggaggaccacctggcagtgcagtcgctcatcagggcatatcaggtcaggggtcaccacattgcaaaacttgatcctctcggaattagttgtgtaaattttgatgatgctccagtaactgtttcttcaaacgtggatcttgcagttttcaaggaacgacttcgaatgctaacagtaggagggttctatggcctggatgagtctgacctcgacaaggtcttccacttgcccaccaccactttcatcgggggacaggaatcagcacttcctctgcgggagatcatccgtcggctggagatggcctactgccagcatattggggtggagttcatgttcatcaatgacctggagcagtgccagtggatccggcagaagtttgagacccctgggatcatgcagttcacaaatgaggagaaacggaccctgctggccaggcttgtgcggtccaccaggtttgaggagttcctacagcggaagtggtcctctgagaagcgctttggtctagaaggctgcgaggtactgatccctgccctcaagaccatcattgacaagtctagtgagaatggcgtggactacgtgatcatgggcatgccacacagagggcggctgaacgtgcttgcaaatgtcatcaggaaggagctggaacagatcttctgtcaattcgattcaaagctggaggcagctgatgagggctccggagatgtgaagtaccacctgggcatgtatcaccgcaggatcaatcgtgtcaccgacaggaacattaccttgtccttggtggccaacccttcccaccttgaggccgctgaccccgtggtgatgggcaagaccaaagccgaacagttttactgtggcgacactgaagggaaaaaggtcatgtccatcctgttgcatggggatgctgcatttgctggccagggcattgtgtacgagaccttccacctcagcgacctgccatcctacacaactcatggcaccgtgcacgtggtcgtcaacaaccagatcggcttcaccaccgaccctcggatggcccgctcctccccctaccccactgacgtggcccgagtggtgaatgcccccattttccacgtgaactcagatgaccccgaggctgtcatgtacgtgtgcaaagtggcggccgagtggaggagcaccttccacaaggacgtggttgtcgatttggtgtgttaccggcgcaacggccacaacgagatggatgagcccatgttcacgcagccgctcatgtacaagcagatccgcaagcagaagcctgtgttacagaagtacgctgagctgctggtgtcgcagggtgtggtcaaccagcctgagtatgaggaggaaatttccaagtatgataagatctgtgaggaagcttttgccagatctaaagatgagaagatcttgcacattaagcactggctggactctccctggcctggcttcttcaccctggacgggcagcccaggagcatgtcctgcccctccacgggtctgacggaggatattctgacacacatcgggaatgtggctagttctgtgcctgtggaaaactttactattcatggagggctgagccggatcttgaagactcgtggggaaatggtgaagaaccggactgtggactgggctctagcggagtacatggcgtttggctcgctcctgaaggagggcatccacattcggctgagcggccaggacgtggagcggggcacattcagccaccgccaccatgtgctccatgaccagaatgtggacaagagaacctgcatccccatgaaccatctctggcccaatcaggccccctatactgtgtgcaacagctcactgtctgagtacggcgtgctgggctttgagctgggcttcgccatggccagtcctaatgccctggtcctctgggaagcccaatttggtgacttccacaacacggcccagtgtatcatcgaccagttcatctgcccgggacaagccaagtgggtgcggcagaatggcatcgtgttgctgctgccccatggcatggagggcatgggtccagaacattcctccgcccgcccagagcggttcttgcagatgtgcaacgatgacccagatgtcctgccagaccttaaagaagccaacttcgacatcaatcagctatatgactgcaattgggttgttgtcaactgctccactcctggcaacttcttccacgtgctacgacgccagatcctgctgccattccggaagccgttaattatcttcacccccaaatccctgttgcgccaccccgaggccagatccagctttgatgagatgcttccaggaacccacttccagcgggtgatcccagaagatggccctgcagctcagaacccagaaaatgtcaaaaggcttctcttctgcaccggcaaagtgtattatgacctcacccgggagcgcaaagcacgcgacatggtggggcaggtggccatcacaaggattgagcagctgtcgccattcccctttgacctcctgctgaaggaggtgcagaagtaccccaatgctgagctggcctggtgccaggaggagcacaagaaccaaggctactatgactacgtgaagccaagacttcggaccaccatcagccgcgccaagcccgtctggtatgccggccgggacccagcggctgctccagccaccggcaacaagaagacccacctgacggagctgcagcgcctcctggacacggccttcgacctggacgtcttcaagaacttctcgtagatgctgcctagggttgcttgggccactgccctctccacacccatgactgccccttgcttctcaactaaagaatagtgcctcagcgctgcccacaccaccgccctcctcgctgtgccaccacccctccctctgctctcataggagttaggctgtcgtccccctccagtgcttggctgccccacaggccacacgctgcccaggctctgctgacttctgagcagttttccaggaggccggggggagcaggaggaggaaaggtagcccccgagggatgtcctt

SEQ ID NO: 163094 - DNA, 3479 bp, Homo sapiens
  Payload ID: 12142
  Gene Symbol: OGDH
  Gene Name: oxoglutarate (alpha-ketoglutarate) dehydrogenase (lipoamide)
  Uniprot ID: Q02218
  ENST ID: ENST00000449767
  CDS Start-End: 91-3150
agagtttggagccccggagtggggtgtcggcgcctcattcgggtggagctgagccggagacaggcagttgtgaaaaacttcaggacaaaaatgtttcatttaaggacttgtgctgctaagttgaggccattgacggcttcccagactgttaagacattttcacaaaacagaccagcagcagctaggacatttcaacagattcggtgctattctgcacctgttgctgctgagccctttctcagtgggactagttcgaactatgtggaggagatgtactgtgcttggctggaaaaccccaaaagtgtacataagtcatgggacattttttttcgcaacacgaatgccggagccccaccgggcactgcctaccagagtccccttcccctgagccgaggctccctggctgctgtggcccatgcacagtccctggtagaagcacagcccaacgtggacaagctcgtggaggaccacctggcagtgcagtcgctcatcagggcatatcaggtcaggggtcaccacattgcaaaacttgatcctctcggaattagttgtgtaaattttgatgatgctccagtaactgtttcttcaaacgtggggttctatggcctggatgagtctgacctcgacaaggtcttccacttgcccaccaccactttcatcgggggacaggaatcagcacttcctctgcgggagatcatccgtcggctggagatggcctactgccagcatattggggtggagttcatgttcatcaatgacctggagcagtgccagtggatccggcagaagtttgagacccctgggatcatgcagttcacaaatgaggagaaacggaccctgctggccaggcttgtgcggtccaccaggtttgaggagttcctacagcggaagtggtcctctgagaagcgctttggtctagaaggctgcgaggtactgatccctgccctcaagaccatcattgacaagtctagtgagaatggcgtggactacgtgatcatgggcatgccacacagagggcggctgaacgtgcttgcaaatgtcatcaggaaggagctggaacagatcttctgtcaattcgattcaaagctggaggcagctgatgagggctccggagatgtgaagtaccacctgggcatgtatcaccgcaggatcaatcgtgtcaccgacaggaacattaccttgtccttggtggccaacccttcccaccttgaggccgctgaccccgtggtgatgggcaagaccaaagccgaacagttttactgtggcgacactgaagggaaaaaggtcatgtccatcctgttgcatggggatgctgcatttgctggccagggcattgtgtacgagaccttccacctcagcgacctgccatcctacacaactcatggcaccgtgcacgtggtcgtcaacaaccagatcggcttcaccaccgaccctcggatggcccgctcctccccctaccccactgacgtggcccgagtggtgaatgcccccattttccacgtgaactcagatgaccccgaggctgtcatgtacgtgtgcaaagtggcggccgagtggaggagcaccttccacaaggacgtggttgtcgatttggtgtgttaccggcgcaacggccacaacgagatggatgagcccatgttcacgcagccgctcatgtacaagcagatccgcaagcagaagcctgtgttacagaagtacgctgagctgctggtgtcgcagggtgtggtcaaccagcctgagtatgaggaggaaatttccaagtatgataagatctgtgaggaagcttttgccagatctaaagatgagaagatcttgcacattaagcactggctggactctccctggcctggcttcttcaccctggacgggcagcccaggagcatgtcctgcccctccacgggtctgacggaggatattctgacacacatcgggaatgtggctagttctgtgcctgtggaaaactttactattcatggagggctgagccggatcttgaagactcgtggggaaatggtgaagaaccggactgtggactgggctctagcggagtacatggcgtttggctcgctcctgaaggagggcatccacattcggctgagcggccaggacgtggagcggggcacattcagccaccgccaccatgtgctccatgaccagaatgtggacaagagaacctgcatccccatgaaccatctctggcccaatcaggccccctatactgtgtgcaacagctcactgtctgagtacggcgtgctgggctttgagctgggcttcgccatggccagtcctaatgccctggtcctctgggaagcccaatttggtgacttccacaacacggcccagtgtatcatcgaccagttcatctgcccgggacaagccaagtgggtgcggcagaatggcatcgtgttgctgctgccccatggcatggagggcatgggtccagaacattcctccgcccgcccagagcggttcttgcagatgtgcaacgatgacccagatgtcctgccagaccttaaagaagccaacttcgacatcaatcagctatatgactgcaattgggttgttgtcaactgctccactcctggcaacttcttccacgtgctacgacgccagatcctgctgccattccggaagccgttaattatcttcacccccaaatccctgttgcgccaccccgaggccagatccagctttgatgagatgcttccaggaacccacttccagcgggtgatcccagaagatggccctgcagctcagaacccagaaaatgtcaaaaggcttctcttctgcaccggcaaagtgtattatgacctcacccgggagcgcaaagcacgcgacatggtggggcaggtggccatcacaaggattgagcagctgtcgccattcccctttgacctcctgctgaaggaggtgcagaagtaccccaatgctgagctggcctggtgccaggaggagcacaagaaccaaggctactatgactacgtgaagccaagacttcggaccaccatcagccgcgccaagcccgtctggtatgccggccgggacccagcggctgctccagccaccggcaacaagaagacccacctgacggagctgcagcgcctcctggacacggccttcgacctggacgtcttcaagaacttctcgtagatgctgcctagggttgcttgggccactgccctctccacacccatgactgccccttgcttctcaactaaagaatagtgcctcagcgctgcccacaccaccgccctcctcgctgtgccaccacccctccctctgctctcataggagttaggctgtcgtccccctccagtgcttggctgccccacaggccacacgctgcccaggctctgctgacttctgagcagttttccaggaggccggggggagcaggaggaggaaaggtagcccccgagggatgtccttggggaggggtcagctctggccacaatcctccccaccagtctcacccacta

SEQ ID NO: 163095 - DNA, 2962 bp, Homo sapiens
  Payload ID: 12142
  Gene Symbol: OGDH
  Gene Name: oxoglutarate (alpha-ketoglutarate) dehydrogenase (lipoamide)
  ENST ID: ENST00000439616
  CDS Start-End: 110-2731
atacgccggggcggggccgagagtttggagccccggagtggggtgtcggcgcctcattcgggtggagctgagccggagacaggcagttgtgaaaaacttcaggacaaaaatgtttcatttaaggacttgtgctgctaagttgaggccattgacggcttcccagactgttaagacattttcacaaaacagaccagcagcagctaggacatttcaacagattcggtgctattctgcacctgttgctgctgagccctttctcagtgggactagttcgaactatgtggaggagatgtactgtgcttggctggaaaaccccaaaagtgtacataagggttctatggcctggatgagtctgacctcgacaaggtcttccacttgcccaccaccactttcatcgggggacaggaatcagcacttcctctgcgggagatcatccgtcggctggaggtttgaggagttcctacagcggaagtggtcctctgagaagcgctttggtctagaaggctgcgaggtactgatccctgccctcaagaccatcattgacaagtctagtgagaatggcgtggactacgtgatcatgggcatgccacacagagggcggctgaacgtgcttgcaaatgtcatcaggaaggagctggaacagatcttctgtcaattcgattcaaagctggaggcagctgatgagggctccggagatgtgaagtaccacctgggcatgtatcaccgcaggatcaatcgtgtcaccgacaggaacattaccttgtccttggtggccaacccttcccaccttgaggccgctgaccccgtggtgatgggcaagaccaaagccgaacagttttactgtggcgacactgaagggaaaaaggtcatgtccatcctgttgcatggggatgctgcatttgctggccagggcattgtgtacgagaccttccacctcagcgacctgccatcctacacaactcatggcaccgtgcacgtggtcgtcaacaaccagatcggcttcaccaccgaccctcggatggcccgctcctccccctaccccactgacgtggcccgagtggtgaatgcccccattttccacgtgaactcagatgaccccgaggctgtcatgtacgtgtgcaaagtggcggccgagtggaggagcaccttccacaaggacgtggttgtcgatttggtgtgttaccggcgcaacggccacaacgagatggatgagcccatgttcacgcagccgctcatgtacaagcagatccgcaagcagaagcctgtgttacagaagtacgctgagctgctggtgtcgcagggtgtggtcaaccagcctgagtatgaggaggaaatttccaagtatgataagatctgtgaggaagcttttgccagatctaaagatgagaagatcttgcacattaagcactggctggactctccctggcctggcttcttcaccctggacgggcagcccaggagcatgtcctgcccctccacgggtctgacggaggatattctgacacacatcgggaatgtggctagttctgtgcctgtggaaaactttactattcatggagggctgagccggatcttgaagactcgtggggaaatggtgaagaaccggactgtggactgggctctagcggagtacatggcgtttggctcgctcctgaaggagggcatccacattcggctgagcggccaggacgtggagcggggcacattcagccaccgccaccatgtgctccatgaccagaatgtggacaagagaacctgcatccccatgaaccatctctggcccaatcaggccccctatactgtgtgcaacagctcactgtctgagtacggcgtgctgggctttgagctgggcttcgccatggccagtcctaatgccctggtcctctgggaagcccaatttggtgacttccacaacacggcccagtgtatcatcgaccagttcatctgcccgggacaagccaagtgggtgcggcagaatggcatcgtgttgctgctgccccatggcatggagggcatgggtccagaacattcctccgcccgcccagagcggttcttgcagatgtgcaacgatgacccagatgtcctgccagaccttaaagaagccaacttcgacatcaatcagctatatgactgcaattgggttgttgtcaactgctccactcctggcaacttcttccacgtgctacgacgccagatcctgctgccattccggaagccgttaattatcttcacccccaaatccctgttgcgccaccccgaggccagatccagctttgatgagatgcttccaggaacccacttccagcgggtgatcccagaagatggccctgcagctcagaacccagaaaatgtcaaaaggcttctcttctgcaccggcaaagtgtattatgacctcacccgggagcgcaaagcacgcgacatggtggggcaggtggccatcacaaggattgagcagctgtcgccattcccctttgacctcctgctgaaggaggtgcagaagtaccccaatgctgagctggcctggtgccaggaggagcacaagaaccaaggctactatgactacgtgaagccaagacttcggaccaccatcagccgcgccaagcccgtctggtatgccggccgggacccagcggctgctccagccaccggcaacaagaagacccacctgacggagctgcagcgcctcctggacacggccttcgacctggacgtcttcaagaacttctcgtagatgctgcctagggttgcttgggccactgccctctccacacccatgactgccccttgcttctcaactaaagaatagtgcctcagcgctgcccacaccaccgccctcctcgctgtgccaccacccctccctctgctctcataggagttaggctgtcgtccccctccagtgcttggctgccccacaggccacacgctgcccaggctctgctgacttctgagcagttttccagga

SEQ ID NO: 163096 - DNA, 789 bp, Homo sapiens
  Payload ID: 12142
  Gene Symbol: OGDH
  Gene Name: oxoglutarate (alpha-ketoglutarate) dehydrogenase (lipoamide)
  ENST ID: ENST00000419661
  CDS Start-End: 157-789
tttggagccccggagtggggtgtcggcgcctcattcgggtggagctgagccggagacaggcagcgtccttgtgaactttccgcttggatcctgactctgctgttagtagcctatgaccttggatgaaatgcagttgtgaaaaacttcaggacaaaaatgtttcatttaaggacttgtgctgctaagttgaggccattgacggcttcccagactgttaagacattttcacaaaacagaccagcagcagctaggacatttcaacagattcggtgctattctgcacctgttgctgctgagccctttctcagtgggactagttcgaactatgtggaggagatgtactgtgcttggctggaaaaccccaaaagtgtacataagtcatgggacattttttttcgcaacacgaatgccggagccccaccgggcactgcctaccagagtccccttcccctgagccgaggctccctggctgctgtggcccatgcacagtccctggtagaagcacagcccaacgtggacaagctcgtggaggaccacctggcagtgcagtcgctcatcagggcatatcagatacgagggcaccatgtagcacagctggaccccctggggattttggatgctgatctggactcctccgtgcccgctgacattatctcatccacagacaaacttgggttctatggcctggatgagtctgacctcgacaaggtcttccacttgcccaccaccactttcatcgggggacaggaatcagcacttcctctgcgggagatcatccgtcggctggag

SEQ ID NO: 163097 - DNA, 3309 bp, Homo sapiens
  Payload ID: 12142
  Gene Symbol: OGDH
  Gene Name: oxoglutarate (alpha-ketoglutarate) dehydrogenase (lipoamide)
  ENST ID: ENST00000444676
  CDS Start-End: 54-3170
ttcgggtggagctgagccggagacaggcagttgtgaaaaacttcaggacaaaaatgtttcatttaaggacttgtgctgctaagttgaggccattgacggcttcccagactgttaagacattttcacaaaacagaccagcagcagctaggacatttcaacagattcggtgctattctgcacctgttgctgctgagccctttctcagtgggactagttcgaactatgtggaggagatgtactgtgcttggctggaaaaccccaaaagtgtacataagtcatgggacattttttttcgcaacacgaatgccggagccccaccgggcactgcctaccagagtccccttcccctgagccgaggctccctggctgctgtggcccatgcacagtccctggtagaagcacagcccaacgtggacaagctcgtggaggaccacctggcagtgcagtcgctcatcagggcatatcagatacgagggcaccatgtagcacagctggaccccctggggattttggatgctgatctggactcctccgtgcccgctgacattatctcatccacagacaaacttgatcttgcagttttcaaggaacgacttcgaatgctaacagtaggagggttctatggcctggatgagtctgacctcgacaaggtcttccacttgcccaccaccactttcatcgggggacaggaatcagcacttcctctgcgggagatcatccgtcggctggagatggcctactgccagcatattggggtggagttcatgttcatcaatgacctggagcagtgccagtggatccggcagaagtttgagacccctgggatcatgcagttcacaaatgaggagaaacggaccctgctggccaggcttgtgcggtccaccaggtttgaggagttcctacagcggaagtggtcctctgagaagcgctttggtctagaaggctgcgaggtactgatccctgccctcaagaccatcattgacaagtctagtgagaatggcgtggactacgtgatcatgggcatgccacacagagggcggctgaacgtgcttgcaaatgtcatcaggaaggagctggaacagatcttctgtcaattcgattcaaagctggaggcagctgatgagggctccggagatgtgaagtaccacctgggcatgtatcaccgcaggatcaatcgtgtcaccgacaggaacattaccttgtccttggtggccaacccttcccaccttgaggccgctgaccccgtggtgatgggcaagaccaaagccgaacagttttactgtggcgacactgaagggaaaaaggtcatgtccatcctgttgcatggggatgctgcatttgctggccagggcattgtgtacgagaccttccacctcagcgacctgccatcctacacaactcatggcaccgtgcacgtggtcgtcaacaaccagatcggcttcaccaccgaccctcggatggcccgctcctccccctaccccactgacgtggcccgagtggtgaatgcccccattttccacgtgaactcagatgaccccgaggctgtcatgtacgtgtgcaaagtggcggccgagtggaggagcaccttccacaaggacgtggttgtcgatttggtgtgttaccggcgcaacggccacaacgagatggatgagcccatgttcacgcagccgctcatgtacaagcagatccgcaagcagaagcctgtgttacagaagtacgctgagctgctggtgtcgcagggtgtggtcaaccagcctgagtatgaggaggaaatttccaagtatgataagatctgtgaggaagcttttgccagatctaaagatgagaagatcttgcacattaagcactggctggactctccctggcctggcttcttcaccctggacgggcagcccaggagcatgtcctgcccctccacgggtctgacggaggatattctgacacacatcgggaatgtggctagttctgtgcctgtggaaaactttactattcatggagggctgagccggatcttgaagactcgtggggaaatggtgaagaaccggactgtggactgggctctagcggagtacatggcgtttggctcgctcctgaaggagggcatccacattcggctgagcggccaggacgtggagcggggcacattcagccaccgccaccatgtgctccatgaccagaatgtggacaagagaacctgcatccccatgaaccatctctggcccaatcaggccccctatactgtgtgcaacagctcactgtctgagtacggcgtgctgggctttgagctgggcttcgccatggccagtcctaatgccctggtcctctgggaagcccaatttggtgacttccacaacacggcccagtgtatcatcgaccagttcatctgcccgggacaagccaagtgggtgcggcagaatggcatcgtgttgctgctgccccatggcatggagggcatgggtccagaacattcctccgcccgcccagagcggttcttgcagatgtgcaacgatgacccagatgtcctgccagaccttaaagaagccaacttcgacatcaatcagctatatgactgcaattgggttgttgtcaactgctccactcctggcaacttcttccacgtgctacgacgccagatcctgctgccattccggaagccgttaattatcttcacccccaaatccctgttgcgccaccccgaggccagatccagctttgatgagatgcttccaggaacccacttccagcgggtgatcccagaagatggccctgcagctcagaacccagaaaatgtcaaaaggcttctcttctgcaccggcaaagtgtattatgacctcacccgggagcgcaaagcacgcgacatggtggggcaggtggccatcacaaggattgagcagctgtcgccattcccctttgacctcctgctgaaggaggtgcagaagtaccccaatgctgagctggcctggtgccaggaggagcacaagaaccaaggctactatgactacgtgaagccaagacttcggaccaccatcagccgcgccaagcccgtctggtatgccggccgggacccagcggctgctccagccaccggcaacaagaagacccacctgacggagctgcagcgcctcctggacacggccttcgacctggacgtcttcaagaacttctcgtagatgctgcctagggttgcttgggccactgccctctccacacccatgactgccccttgcttctcaactaaagaatagtgcctcagcgctgcccacaccaccgccctcctcgctgtgccaccacccctccctctgctctcat

SEQ ID NO: 163098 - DNA, 4116 bp, Homo sapiens
  Payload ID: 12142
  Gene Symbol: OGDH
  Gene Name: oxoglutarate (alpha-ketoglutarate) dehydrogenase (lipoamide)
  ENST ID: ENST00000631326
  CDS Start-End: 54-3059
ttcgggtggagctgagccggagacaggcagttgtgaaaaacttcaggacaaaaatgtttcatttaaggacttgtgctgctaagttgaggccattgacggcttcccagactgttaagacattttcacaaaacagaccagcagcagctaggacatttcaacagattcggtgctattctgcacctgttgctgctgagccctttctcagtgggactagttcgaactatgtggaggagatgtactgtgcttggctggaaaaccccaaaagtgtacataagtcatgggacattttttttcgcaacacgaatgccggagccccaccgggcactgcctaccagagtccccttcccctgagccgaggctccctggctgctgtggcccatgcacagtccctggtagaagcacagcccaacgtggacaagctcgtggaggaccacctggcagtgcagtcgctcatcagggcatatcagatacgagggcaccatgtagcacagctggaccccctggggattttggatgctgatctggactcctccgtgcccgctgacattatctcatccacagacaaacttgggttctatggcctggatgagtctgacctcgacaaggtcttccacttgcccaccaccactttcatcgggggacaggaatcagcacttcctctgcgggagatcatccgtcggctggagatggcctactgccagcatattggggtggagttcatgttcatcaatgacctggagcagtgccagtggatccggcagaagtttgagacccctgggatcatgcagttcacaaatgaggagaaacggaccctgctggccaggcttgtgcggtccaccaggtttgaggagttcctacagcggaagtggtcctctgagaagcgctttggtctagaaggctgcgaggtactgatccctgccctcaagaccatcattgacaagtctagtgagaatggcgtggactacgtgatcatgggcatgccacacagagggcggctgaacgtgcttgcaaatgtcatcaggaaggagctggaacagatcttctgtcaattcgattcaaagctggaggcagctgatgagggctccggagatgtgaagtaccacctgggcatgtatcaccgcaggatcaatcgtgtcaccgacaggaacattaccttgtccttggtggccaacccttcccaccttgaggccgctgaccccgtggtgatgggcaagaccaaagccgaacagttttactgtggcgacactgaagggaaaaaggtcatgtccatcctgttgcatggggatgctgcatttgctggccagggcattgtgtacgagaccttccacctcagcgacctgccatcctacacaactcatggcaccgtgcacgtggtcgtcaacaaccagatcggcttcaccaccgaccctcggatggcccgctcctccccctaccccactgacgtggcccgagtggtgaatgcccccattttccacgtgaactcagatgaccccgaggctgtcatgtacgtgtgcaaagtggcggccgagtggaggagcaccttccacaaggacgtggttgtcgatttggtgtgttaccggcgcaacggccacaacgagatggatgagcccatgttcacgcagccgctcatgtacaagcagatccgcaagcagaagcctgtgttacagaagtacgctgagctgctggtgtcgcagggtgtggtcaaccagcctgagtatgaggaggaaatttccaagtatgataagatctgtgaggaagcttttgccagatctaaagatgagaagatcttgcacattaagcactggctggactctccctggcctggcttcttcaccctggacgggcagcccaggagcatgtcctgcccctccacgggtctgacggaggatattctgacacacatcgggaatgtggctagttctgtgcctgtggaaaactttactattcatggagggctgagccggatcttgaagactcgtggggaaatggtgaagaaccggactgtggactgggctctagcggagtacatggcgtttggctcgctcctgaaggagggcatccacattcggctgagcggccaggacgtggagcggggcacattcagccaccgccaccatgtgctccatgaccagaatgtggacaagagaacctgcatccccatgaaccatctctggcccaatcaggccccctatactgtgtgcaacagctcactgtctgagtacggcgtgctggggcttgctgggcttcgcatggccagtcctaatgccctggtcctctgggaagcccaatttggtgacttccacaacacggcccagtgtatcatcgaccagttcatctgcccgggacaagccaagtgggtgcggcagaatggcatcgtgttgctgctgccccatggcatggagggcatgggtccagaacattcctccgcccgcccagagcggttcttgcagatgtgcaacgatgacccagatgtcctgccagaccttaaagaagccaacttcgacatcaatcagctatatgactgcaattgggttgttgtcaactgctccactcctggcaacttcttccacgtgctacgacgccagatcctgctgccattccggaagccgttaattatcttcacccccaaatccctgttgcgccaccccgaggccagatccagctttgatgagatgcttccaggaacccacttccagcgggtgatcccagaagatggccctgcagctcagaacccagaaaatgtcaaaaggcttctcttctgcaccggcaaagtgtattatgacctcacccgggagcgcaaagcacgcgacatggtggggcaggtggccatcacaaggattgagcagctgtcgccattcccctttgacctcctgctgaaggaggtgcagaagtaccccaatgctgagctggcctggtgccaggaggagcacaagaaccaaggctactatgactacgtgaagccaagacttcggaccaccatcagccgcgccaagcccgtctggtatgccggccgggacccagcggctgctccagccaccggcaacaagaagacccactgacggagctgcagcgcctcctggacacggccttcgacctggacgtcttcaagaacttctcgtagatgctgcctagggttgcttgggccactgccctctccacacccatgactgccccttgcttctcaactaaagaatagtgcctcagcgctgcccacaccaccgccctcctcgctgtgccaccacccctccctctgctctcataggagttaggctgtcgtccccctccagtgcttggctgccccacaggccacacgctgcccaggctctgctgacttctgagcagttttccaggaggccggggggagcaggaggaggaaaggtagcccccgagggatgtccttggggaggggtcagctctggccacaatcctccccaccagtctcacccactaggataggaactgggccttgtgtgctggcttccgctgtcacccagcaaggcacaggctcctgtatttgagactaggatagcttcatcttgagcctgagccttagaatctgtagaggagcctggagtcggatctagccatggctggcagaggtttctagggtgggccccagccgtggcgtgaactgaggatgacccggggcagctggcaggagagagccttggcctgacctggcacagaaagggcagcttcagtctctgcagtgtccattatctgctgttccttcgagggttccaggctgtgtgtggggcccaagcatgccccacccacccctcctgggcccaggcagcacctggagcccacagagtctgtgtgtagccaggaagccccgctcaggtagccaccaccggggcactggctgctctgtcttggtcctgttaaccctccacctcctctcttggactccctccccaccccaaccactctttctttctcctttaacccaatggagactttctgatgcatcgttttctttgctgtgccaaagcaggtcagaagagggagaggaggggctgggggtgaggggccaggccatggccaaggggccagctgcccctcatttatcactctgaccttcacagggacagatctgatttatttattttggtt

SEQ ID NO: 163099 - DNA, 2285 bp, Homo sapiens
  Payload ID: 12143
  Gene Symbol: OXGR1
  Gene Name: oxoglutarate (alpha-ketoglutarate) receptor 1
  Uniprot ID: Q96P68
  ENST ID: ENST00000298440
  CDS Start-End: 245-1258
aactaggctgcacaggcacgctgggcgcatgtccgcctcgccggggctgccagaatcttggaatcccaatccgtgaggttcctgggtgtgctggcatcaggacagcggtccacgaacgggtaatcctgatgaaaatcaacaaaatacacatgaagagacagcactgagagcgagttactgctcatttgattcatattgccaaactgaactctcttgttttcttgcaagatgaaaggagacaaccatgaatgagccactagactatttagcaaatgcttctgatttccccgattatgcagctgcttttggaaattgcactgatgaaaacatcccactcaagatgcactacctccctgttatttatggcattatcttcctcgtgggatttccaggcaatgcagtagtgatatccacttacattttcaaaatgagaccttggaagagcagcaccatcattatgctgaacctggcctgcacagatctgctgtatctgaccagcctccccttcctgattcactactatgccagtggcgaaaactggatctttggagatttcatgtgtaagtttatccgcttcagcttccatttcaacctgtatagcagcatcctcttcctcacctgtttcagcatcttccgctactgtgtgatcattcacccaatgagctgcttttccattcacaaaactcgatgtgcagttgtagcctgtgctgtggtgtggatcatttcactggtagctgtcattccgatgaccttcttgatcacatcaaccaacaggaccaacagatcagcctgtctcgacctcaccagttcggatgaactcaatactattaagtggtacaacctgattttgactgcaactactttctgcctccccttggtgatagtgacactttgctataccacgattatccacactctgacccatggactgcaaactgacagctgccttaagcagaaagcacgaaggctaaccattctgctactccttgcattttacgtatgttttttacccttccatatcttgagggtcattcggatcgaatctcgcctgctttcaatcagttgttccattgagaatcagatccatgaagcttacatcgtttctagaccattagctgctctgaacacctttggtaacctgttactatatgtggtggtcagcgacaactttcagcaggctgtctgctcaacagtgagatgcaaagtaagcgggaaccttgagcaagcaaagaaaattagttactcaaacaacccttgaaatatttcatttacttaaccaaaaacaaatacttgctgatactttacctagcatcctaagatgttcaggatgtctccctcaatggaactcctggtaaatactgtgtattcaagtaatcatgtgccaaagccagggcagagcttctagttctttgcaatccctttattgagctcctccactggggagatataagaatgggatgcatgtatatcagcaaagtattcagacatagtattacaagctattggaactcagaggcatcttagagaacatctgttcccaccaacttactatatatacacggaaaccaatttcttacccttgccctagattgctcagtaaatttgtgccaagataggagaaaaccaatcttttcactcatcatttcatgcttctctgcactctgggcctatttgtattgaaccattagacaattcaaaccactacttgtatctttcttaatatttattttttacatctcagagctctacaatttgtttccttcaagcttaactttgagattataaaactgggtttagccagttctgtatattacttcaagccagtaagatacccttgaaataatccaaggacgtccatgcaaatagttgaaattagtacctgcaatatatttggagtattatgtctttattgttgttaaaaagtttttattgaatgtatgaaaattatcaaattgtattcatcattattaacatgtcctggggaaggaagggaaactttctaggacagaagtcactttcagatgtcatgtatgtattgggtgttcaatcatatctaacactgttttgatttttgtgggaaaatattccaggaaacgctaattctctttagactccttgttcttttatgactacaatgaacatatgtctatgtgatagctaaagatatttttgaattgtatgtgtgcttaattatcggtaagtataaatatttgagaaaacacatggtctggatatttaaaaccctcataaacatgttggtacagttaataaacttatttataatt

SEQ ID NO: 163100 - DNA, 643 bp, Homo sapiens
  Payload ID: 12143
  Gene Symbol: OXGR1
  Gene Name: oxoglutarate (alpha-ketoglutarate) receptor 1
  ENST ID: ENST00000541038
  CDS Start-End: 457-643
ggatgctgctggccaggctgctcggggcgaggacccgagaacacgcacttgctcgctgggcctcggaggggtgggaggggcggggcggtgcgcagcctccccgggacaggtctgcggtccgggaccaactaggctgcacaggcacgctgggcgcatgtccgcctcgccggggctgccagaatcttggaatcccaatccgtgaggttcctgggtgtgctggcatcaggacagcggtccacgaacggtgtgttacccaaatattgacatcctgcagctagcctcaaacaatcacagctactttccaatttcagagaaaaaaaggctaaaattggtaatcctgatgaaaatcaacaaaatacacatgaagagacagcactgagagcgagttactgctcatttgattcatattgccaaactgaactctcttgttttcttgcaagatgaaaggagacaaccatgaatgagccactagactatttagcaaatgcttctgatttccccgattatgcagctgcttttggaaattgcactgatgaaaacatcccactcaagatgcactacctccctgttatttatggcattatcttcctcgtgggatttccaggcaatgcagtagtgatatccacttacattttcaaaatga

SEQ ID NO: 163101 - DNA, 1305 bp, Homo sapiens
  Payload ID: 12143
  Gene Symbol: OXGR1
  Gene Name: oxoglutarate (alpha-ketoglutarate) receptor 1
  Uniprot ID: Q96P68
  ENST ID: ENST00000543457
  CDS Start-End: 292-1305
aggtctgcggtccgggaccaactaggctgcacaggcacgctgggcgcatgtccgcctcgccggggctgccagaatcttggaatcccaatccgtgaggttcctgggtgtgctggcatcaggacagcggtccacgaacggtgtgttacccaaatattgacatcctgcagctagcctcaaacaatcacagctactttccaatttcagagaaaaaaaggctaaaattggtaatcctgatgaaaatcaacaaaatacacatgaagagacagcactgagagatgaaaggagacaaccatgaatgagccactagactatttagcaaatgcttctgatttccccgattatgcagctgcttttggaaattgcactgatgaaaacatcccactcaagatgcactacctccctgttatttatggcattatcttcctcgtgggatttccaggcaatgcagtagtgatatccacttacattttcaaaatgagaccttggaagagcagcaccatcattatgctgaacctggcctgcacagatctgctgtatctgaccagcctccccttcctgattcactactatgccagtggcgaaaactggatctttggagatttcatgtgtaagtttatccgcttcagcttccatttcaacctgtatagcagcatcctcttcctcacctgtttcagcatcttccgctactgtgtgatcattcacccaatgagctgcttttccattcacaaaactcgatgtgcagttgtagcctgtgctgtggtgtggatcatttcactggtagctgtcattccgatgaccttcttgatcacatcaaccaacaggaccaacagatcagcctgtctcgacctcaccagttcggatgaactcaatactattaagtggtacaacctgattttgactgcaactactttctgcctccccttggtgatagtgacactttgctataccacgattatccacactctgacccatggactgcaaactgacagctgccttaagcagaaagcacgaaggctaaccattctgctactccttgcattttacgtatgttttttacccttccatatcttgagggtcattcggatcgaatctcgcctgctttcaatcagttgttccattgagaatcagatccatgaagcttacatcgtttctagaccattagctgctctgaacacctttggtaacctgttactatatgtggtggtcagcgacaactttcagcaggctgtctgctcaacagtgagatgcaaagtaagcgggaaccttgagcaagcaaagaaaattagttactcaaacaacccttga

SEQ ID NO: 163102 - DNA, 588 bp, Homo sapiens
  Payload ID: 12143
  Gene Symbol: OXGR1
  Gene Name: oxoglutarate (alpha-ketoglutarate) receptor 1
  ENST ID: ENST00000541518
  CDS Start-End: 382-588
agagcgagactccttctcaaaagaaaaaaaaaaaaaagaggcactgggctgtaggagagtggtgaaatttctggaccaagacaaggcggccacaaccctcctggggcaacaaccctcccgccgggctggttttttggaacctctgcaaacactttctcctggaatcttggaatcccaatccgtgaggttcctgggtgtgctggcatcaggacagcggtccacgaacggtgtgttacccaaatattgacatcctgcagctagcctcaaacaatcacagctactttccaatttcagagaaaaaaaggctaaaattggtaatcctgatgaaaatcaacaaaatacacatgaagagacagcactgagagatgaaaggagacaaccatgaatgagccactagactatttagcaaatgcttctgatttccccgattatgcagctgcttttggaaattgcactgatgaaaacatcccactcaagatgcactacctccctgttatttatggcattatcttcctcgtgggatttccaggcaatgcagtagtgatatccacttacattttcaaaatgagaccttggaagagcagcacc

SEQ ID NO: 163103 - DNA, 3704 bp, Homo sapiens
  Payload ID: 12144
  Gene Symbol: OGDHL
  Gene Name: oxoglutarate dehydrogenase-like
  Uniprot ID: Q9ULD0
  ENST ID: ENST00000374103
  CDS Start-End: 87-3119
acggcgcgcgcgcaccccttccgcgcagccccctgacctgcagcctccggacctcgctgcagcgcggacccggcccgcccgcccgaatgagtcagctgaggctgctgccgtcccgtcttggggtacaggctgcgaggctcctggctgcacatgacgtcccggtgtttggctggcgcagcaggtcctccgggccaccggccaccttcccaagcagcaaaggtggaggcggctccagttacatggaggagatgtacttcgcctggttggaaaacccccagagtgtccacaagtcctgggacagcttcttcagggaagccagcgaggaagccttttctggctctgctcagccacggcccccttctgttgtccatgagagcaggtctgcagtctcaagtcggaccaagaccagcaaattggtggaggaccacctggctgtgcagtccctgatccgggcctaccagatccggggtcaccatgtggcccagctggaccccctgggcattctggatgcagacctggactcctttgtgccctcagacttgatcacaaccattgataaactggccttctatgaccttcaggaggctgaccttgataaggagttccagctgccgacaaccaccttcattgggggctctgaaaacaccctctctctgcgggagatcattcggcgcctggagaacacctactgccagcacattggcctggagttcatgttcatcaacgatgtggagcagtgccagtggatccggcagaagtttgagacccctggtgtgatgcagttctccagcgaggagaagcggaccctgctggcccggctagtgcgctccatgaggtttgaagacttcctggcccggaaatggtcctcagagaagcggtttggcctggagggctgtgaagtgatgattcctgccctcaagaccatcatcgacaaatccagcgagatggggattgagaatgtcatcttggggatgccacacaggggaaggctgaacgtgctggccaacgtgatccgcaaggacctggagcagatcttctgccagtttgaccccaagctggaggcggcggacgagggctccggggatgtcaagtaccacctgggcatgtaccatgagaggatcaaccgcgtcaccaaccggaacatcactctgtcgctggttgccaacccctcccacctggaggcagtggaccctgtggtgcaggggaagacaaaggcagagcagttctaccgtggagatgcccagggcaagaaggtcatgtccatcctggttcatggggacgccgcctttgctggccagggcgtggtatatgagaccttccacctgagcgacctgccctcctacacgaccaatggtaccgtgcacgtcgtcgtcaacaaccagattggattcaccacagacccccgaatggcccgctcctcaccatacccgaccgacgtggcccgggtggtcaatgcgcctatcttccatgtgaatgccgatgacccagaggctgtgatatatgtgtgcagtgtggcagccgaatggagaaacactttcaacaaagatgttgtcgtggacctggtctgttaccgccggcgtggccacaatgagatggacgagcccatgttcacccagccgctcatgtacaagcagatccacagacaggtgcctgtgctgaagaagtacgcagacaagctgattgccgagggcacagtcaccctgcaggagtttgaggaagaaattgccaaatacgaccggatctgtgaggaggcttatggcaggtccaaggataaaaagattctgcatataaagcactggttggactccccctggcctggcttcttcaacgtagatggggagcccaagagcatgacatgcccagccacggggatccctgaggacatgctcacccacatcggcagtgtggccagctctgtgcccctggaggactttaagatccacactggcctctctcgcattctgcggggccgtgcggacatgaccaagaaccggacggtggactgggcgttggcagagtacatggcctttggctccctgctgaaggaaggcatccacgtgcggctcagcgggcaggatgtggagaggggcacattcagtcaccggcaccatgttctccatgaccaggaggttgaccgcaggacgtgtgtgcctatgaatcatctctggcctgaccaggccccgtacaccgtgtgcaacagctccctctcggagtacggagtcctgggctttgagctgggctatgccatggccagccccaatgccctggtcctctgggaggcccagtttggggacttccacaacacggcccagtgcatcatcgaccagttcatcagcaccggccaggccaagtgggtgcggcataatggcattgtgctgctgctgccccatggcatggaaggcatgggcccagagcactcgtcagcgaggcccgaaaggttcctgcagatgagcaatgatgactcggatgcctaccctgcattcaccaaggacttcgaggtgagccagctctatgactgcaactggatcgtggtcaactgctccacaccggccaactacttccacgtgctgcgccggcagatcctgctgcccttccgcaagccgctgattatcttcacacctaaatctctgctgaggcacccagaggccaagtccagctttgaccaaatggtatccgggaccagcttccagcgggtgattcctgaagatggggccgcagcacgggcccctgagcaggtgcagcggctcatcttctgcacgggaaaggtgtactatgacctggtgaaggagcggagcagccaggacctggaggagaaagtggccatcacgcgcctggagcagatctctccattccccttcgacctgatcaagcaggaggcagagaagtacccaggtgcggagctggcctggtgtcaggaggagcacaagaacatgggctactatgactacatcagcccacgcttcatgaccatcctgaggcgcgcacggcccatatggtatgttggccgggacccagcggctgcaccagccacaggaaacaggaacactcacctggtgtcactgaagaagtttctggatactgccttcaatctccaggcctttgagggcaagacattttagagctgggcaaaacctgtgtaggtctcgctgtgggtttgctggggaccaagggggtgatgaaaaggggaggggcggagctcctgcccaggagaggggctgtggggccccaggataaaacagacacagtgacagggccaagagccagcactgctggccttggtgtcatgccagaatctaccaggactgagggagccagaggagtcctataggcaggctactgtgctggagcatcccccagctgctcccatcttgctggaatttcttgggcggcttctccacctgtatctcaagacagacacccgggggcctgtgtctgtggccgctcccatcccggcagccctggctgctgctcgccccaccctcgcttatctgtagattcaaagcgatgttctcttctgtgctcttagaagtagggagttcagcagtaacagccaggtgaagcgaacctgctgggtgatttgtttgcgctctgttttatggggcattcctgcgagatgtgtcagcttctgtgtgaaatgcagccacagctcatgtgtaccaaagtagaaaaccaaatcacagagaaataaaaacatgcttcagaga

SEQ ID NO: 163104 - DNA, 3383 bp, Homo sapiens
  Payload ID: 12144
  Gene Symbol: OGDHL
  Gene Name: oxoglutarate dehydrogenase-like
  Uniprot ID: Q9ULD0
  ENST ID: ENST00000432695
  CDS Start-End: 394-2799
gagtctcaggggcgcgcgcccgtgggcggctgcgtcacgtgacccaggtaattggcacggcgcgcgcgcaccccttccgcgcagccccctgacctgcagcctccggacctcgctgcagcgcggacccggcccgcccgcccgatccggggtcaccatgtggcccagctggaccccctgggcattctggatgcagacctggactcctttgtgccctcagacttgatcacaaccattgataaactggccttctatgaccttcaggaggctgaccttgataaggagttccagctgccgacaaccaccttcattgggggctctgaaaacaccctctctctgcgggagatcattcggcgcctggagaacacctactgccagcacattggcctggagttcatgttcatcaacgatgtggagcagtgccagtggatccggcagaagtttgagacccctggtgtgatgcagttctccagcgaggagaagcggaccctgctggcccggctagtgcgctccatgaggtttgaagacttcctggcccggaaatggtcctcagagaagcggtttggcctggagggctgtgaagtgatgattcctgccctcaagaccatcatcgacaaatccagcgagatggggattgagaatgtcatcttggggatgccacacaggggaaggctgaacgtgctggccaacgtgatccgcaaggacctggagcagatcttctgccagtttgaccccaagctggaggcggcggacgagggctccggggatgtcaagtaccacctgggcatgtaccatgagaggatcaaccgcgtcaccaaccggaacatcactctgtcgctggttgccaacccctcccacctggaggcagtggaccctgtggtgcaggggaagacaaaggcagagcagttctaccgtggagatgcccagggcaagaaggtcatgtccatcctggttcatggggacgccgcctttgctggccagggcgtggtatatgagaccttccacctgagcgacctgccctcctacacgaccaatggtaccgtgcacgtcgtcgtcaacaaccagattggattcaccacagacccccgaatggcccgctcctcaccatacccgaccgacgtggcccgggtggtcaatgcgcctatcttccatgtgaatgccgatgacccagaggctgtgatatatgtgtgcagtgtggcagccgaatggagaaacactttcaacaaagatgttgtcgtggacctggtctgttaccgccggcgtggccacaatgagatggacgagcccatgttcacccagccgctcatgtacaagcagatccacagacaggtgcctgtgctgaagaagtacgcagacaagctgattgccgagggcacagtcaccctgcaggagtttgaggaagaaattgccaaatacgaccggatctgtgaggaggcttatggcaggtccaaggataaaaagattctgcatataaagcactggttggactccccctggcctggcttcttcaacgtagatggggagcccaagagcatgacatgcccagccacggggatccctgaggacatgctcacccacatcggcagtgtggccagctctgtgcccctggaggactttaagatccacactggcctctctcgcattctgcggggccgtgcggacatgaccaagaaccggacggtggactgggcgttggcagagtacatggcctttggctccctgctgaaggaaggcatccacgtgcggctcagcgggcaggatgtggagaggggcacattcagtcaccggcaccatgttctccatgaccaggaggttgaccgcaggacgtgtgtgcctatgaatcatctctggcctgaccaggccccgtacaccgtgtgcaacagctccctctcggagtacggagtcctgggctttgagctgggctatgccatggccagccccaatgccctggtcctctgggaggcccagtttggggacttccacaacacggcccagtgcatcatcgaccagttcatcagcaccggccaggccaagtgggtgcggcataatggcattgtgctgctgctgccccatggcatggaaggcatgggcccagagcactcgtcagcgaggcccgaaaggttcctgcagatgagcaatgatgactcggatgcctaccctgcattcaccaaggacttcgaggtgagccagctctatgactgcaactggatcgtggtcaactgctccacaccggccaactacttccacgtgctgcgccggcagatcctgctgcccttccgcaagccgctgattatcttcacacctaaatctctgctgaggcacccagaggccaagtccagctttgaccaaatggtatccgggaccagcttccagcgggtgattcctgaagatggggccgcagcacgggcccctgagcaggtgcagcggctcatcttctgcacgggaaaggtgtactatgacctggtgaaggagcggagcagccaggacctggaggagaaagtggccatcacgcgcctggagcagatctctccattccccttcgacctgatcaagcaggaggcagagaagtacccaggtgcggagctggcctggtgtcaggaggagcacaagaacatgggctactatgactacatcagcccacgcttcatgaccatcctgaggcgcgcacggcccatatggtatgttggccgggacccagcggctgcaccagccacaggaaacaggaacactcacctggtgtcactgaagaagtttctggatactgccttcaatctccaggcctttgagggcaagacattttagagctgggcaaaacctgtgtaggtctcgctgtgggtttgctggggaccaagggggtgatgaaaaggggaggggcggagctcctgcccaggagaggggctgtggggccccaggataaaacagacacagtgacagggccaagagccagcactgctggccttggtgtcatgccagaatctaccaggactgagggagccagaggagtcctataggcaggctactgtgctggagcatcccccagctgctcccatcttgctggaatttcttgggcggcttctccacctgtatctcaagacagacacccgggggcctgtgtctgtggccgctcccatcccggcagccctggctgctgctcgccccaccctcgcttatctgtagattcaaagcgatgttctcttctgtgctcttagaagtagggagttcagcagtaacagccaggtgaagcgaacctgctgggtgatttgtttgcgctctgttttatggggcattcctgcgagatgtgtcagcttctgtgtgaaatgcagccacagctcatgtgtaccaaagtagaaaaccaaatcacagagaaataaaaacatgcttcagag

SEQ ID NO: 163105 - DNA, 3588 bp, Homo sapiens
  Payload ID: 12144
  Gene Symbol: OGDHL
  Gene Name: oxoglutarate dehydrogenase-like
  Uniprot ID: Q9ULD0
  ENST ID: ENST00000419399
  CDS Start-End: 143-3004
gagtctcaggggcgcgcgcccgtgggcggctgcgtcacgtgacccaggtaattggcacggcgcgcgcgcaccccttccgcgcagccccctgacctgcagcctccggacctcgctgcagcgcggacccggcccgcccgcccgaatgagtcagctgaggctgctgccgtcccgtcttggggtacaggctgcgaggctcctggctgcacatgacgtcccggtgtttggctggcgcagcaggtcctccgggccaccggccaccttcccaagcagcaaaggtggaggcggctccagttacatggaggagatgtacttcgcctggttggaaaacccccagagtgtccacaagatccggggtcaccatgtggcccagctggaccccctgggcattctggatgcagacctggactcctttgtgccctcagacttgatcacaaccattgataaactggccttctatgaccttcaggaggctgaccttgataaggagttccagctgccgacaaccaccttcattgggggctctgaaaacaccctctctctgcgggagatcattcggcgcctggagaacacctactgccagcacattggcctggagttcatgttcatcaacgatgtggagcagtgccagtggatccggcagaagtttgagacccctggtgtgatgcagttctccagcgaggagaagcggaccctgctggcccggctagtgcgctccatgaggtttgaagacttcctggcccggaaatggtcctcagagaagcggtttggcctggagggctgtgaagtgatgattcctgccctcaagaccatcatcgacaaatccagcgagatggggattgagaatgtcatcttggggatgccacacaggggaaggctgaacgtgctggccaacgtgatccgcaaggacctggagcagatcttctgccagtttgaccccaagctggaggcggcggacgagggctccggggatgtcaagtaccacctgggcatgtaccatgagaggatcaaccgcgtcaccaaccggaacatcactctgtcgctggttgccaacccctcccacctggaggcagtggaccctgtggtgcaggggaagacaaaggcagagcagttctaccgtggagatgcccagggcaagaaggtcatgtccatcctggttcatggggacgccgcctttgctggccagggcgtggtatatgagaccttccacctgagcgacctgccctcctacacgaccaatggtaccgtgcacgtcgtcgtcaacaaccagattggattcaccacagacccccgaatggcccgctcctcaccatacccgaccgacgtggcccgggtggtcaatgcgcctatcttccatgtgaatgccgatgacccagaggctgtgatatatgtgtgcagtgtggcagccgaatggagaaacactttcaacaaagatgttgtcgtggacctggtctgttaccgccggcgtggccacaatgagatggacgagcccatgttcacccagccgctcatgtacaagcagatccacagacaggtgcctgtgctgaagaagtacgcagacaagctgattgccgagggcacagtcaccctgcaggagtttgaggaagaaattgccaaatacgaccggatctgtgaggaggcttatggcaggtccaaggataaaaagattctgcatataaagcactggttggactccccctggcctggcttcttcaacgtagatggggagcccaagagcatgacatgcccagccacggggatccctgaggacatgctcacccacatcggcagtgtggccagctctgtgcccctggaggactttaagatccacactggcctctctcgcattctgcggggccgtgcggacatgaccaagaaccggacggtggactgggcgttggcagagtacatggcctttggctccctgctgaaggaaggcatccacgtgcggctcagcgggcaggatgtggagaggggcacattcagtcaccggcaccatgttctccatgaccaggaggttgaccgcaggacgtgtgtgcctatgaatcatctctggcctgaccaggccccgtacaccgtgtgcaacagctccctctcggagtacggagtcctgggctttgagctgggctatgccatggccagccccaatgccctggtcctctgggaggcccagtttggggacttccacaacacggcccagtgcatcatcgaccagttcatcagcaccggccaggccaagtgggtgcggcataatggcattgtgctgctgctgccccatggcatggaaggcatgggcccagagcactcgtcagcgaggcccgaaaggttcctgcagatgagcaatgatgactcggatgcctaccctgcattcaccaaggacttcgaggtgagccagctctatgactgcaactggatcgtggtcaactgctccacaccggccaactacttccacgtgctgcgccggcagatcctgctgcccttccgcaagccgctgattatcttcacacctaaatctctgctgaggcacccagaggccaagtccagctttgaccaaatggtatccgggaccagcttccagcgggtgattcctgaagatggggccgcagcacgggcccctgagcaggtgcagcggctcatcttctgcacgggaaaggtgtactatgacctggtgaaggagcggagcagccaggacctggaggagaaagtggccatcacgcgcctggagcagatctctccattccccttcgacctgatcaagcaggaggcagagaagtacccaggtgcggagctggcctggtgtcaggaggagcacaagaacatgggctactatgactacatcagcccacgcttcatgaccatcctgaggcgcgcacggcccatatggtatgttggccgggacccagcggctgcaccagccacaggaaacaggaacactcacctggtgtcactgaagaagtttctggatactgccttcaatctccaggcctttgagggcaagacattttagagctgggcaaaacctgtgtaggtctcgctgtgggtttgctggggaccaagggggtgatgaaaaggggaggggcggagctcctgcccaggagaggggctgtggggccccaggataaaacagacacagtgacagggccaagagccagcactgctggccttggtgtcatgccagaatctaccaggactgagggagccagaggagtcctataggcaggctactgtgctggagcatcccccagctgctcccatcttgctggaatttcttgggcggcttctccacctgtatctcaagacagacacccgggggcctgtgtctgtggccgctcccatcccggcagccctggctgctgctcgccccaccctcgcttatctgtagattcaaagcgatgttctcttctgtgctcttagaagtagggagttcagcagtaacagccaggtgaagcgaacctgctgggtgatttgtttgcgctctgttttatggggcattcctgcgagatgtgtcagcttctgtgtgaaatgcagccacagctcatgtgtaccaaagtagaaaaccaaatcacagagaaataaaaacatgcttcagag

SEQ ID NO: 163106 - DNA, 5083 bp, Homo sapiens
  Payload ID: 12145
  Gene Symbol: OSBP
  Gene Name: oxysterol binding protein
  Uniprot ID: P22059
  ENST ID: ENST00000263847
  CDS Start-End: 481-2904
agaagagcgatgggagggggtgacgtggcagtgacaggcgcataaactgaaatgaatggcggaaacagcagccaatcggcgatcagattggccgggcattccgcattctcccgtcctccctgagcgctggaaacttcaggaaagcaccaatgagcttccccaaaagtctgattggcctttatctgaaccaatcaaaggtgggtctggcggacgcgtcccaccccaggctctcactgggcgctgtagaatgacaggcccgagagaaatgccaatatccgcggggtcttcctcaagtgacactcagcggcaccaatcgacgtccttcttcccggcggccgagccctcctccccgcggctggccgggcggggcggggacgctgcgcggcggtggctgatgcggtagccgtgtggggcgctccgggcggcgacggcggctctcgtaggcggttccggtcttgtatctccaggcggcggcggctcatggcggcgacggagctgagaggagtggtggggccaggcccggcagccattgcagcacttggcggcggcggcgccggtcccccagtggtgggaggaggcggcggccgcggagatgcggggccaggctccggggccgcgtcagggacggtggtcgcggcggcggcgggaggcccgggcccgggggccgggggagtggcggcggctggcccggcccctgcgccgccgactgggggctcgggcggctcgggcgctgggggttcgggctcggctcgagagggctggctcttcaaatggaccaattatatcaaaggctaccagcggcgatggttcgtgctgagcaacgggctcctgagctactacagatcaaaggcagaaatgagacatacctgccgtggtaccatcaacctcgccacagccaacatcaccgtggaggactcctgcaacttcatcatttccaatgggggtgctcagacctaccatctgaaagctagttcagaagttgagcggcagcgctgggtgacggccctggaactggccaaggccaaagctgtgaagatgctggcagagtcagatgaatcaggagatgaagagtctgtctcacaaactgacaagactgagctgcagaatacccttcggaccctctctagcaaagtagaggacttgagcacgtgcaatgacttgatagctaagcatggcacagctctgcagcgttctctcagtgagctggagtccctgaagttgcctgctgagagcaatgaaaagatcaaacaggtcaacgaacgagccacactctttaggataacatccaatgccatgatcaacgcctgcagagatttcctcatgttagcccagacccatagtaaaaaatggcaaaagtcactacagtatgaaagagaccagcgtatccgactggaagaaaccctcgagcagctggcgaagcagcataatcacctggagagggccttccgaggagccacggtgctgccggcaaacactcctggcaatgtgggttctggtaaagatcagtgctgctctggcaaaggggacatgagcgatgaagatgatgagaatgaattttttgatgcacctgagatcatcaccatgcctgaaaatttgggccacaaacgtactggcagcaatatcagtggagccagcagtgacatcagccttgatgaacagtacaagcatcagctggaggagaccaaaaaggaaaagagaaccagaataccatacaagccaaactatagcctcaatttatggagcatcatgaagaactgcattggaaaagaactctctaagatccccatgccggtaaactttaatgagcccttgtccatgcttcagcgccttactgaagatctggaataccatgagctgttagaccgagctgcaaaatgtgagaattctctagaacagctctgttatgttgcagctttcaccgtgtcctcctactccactactgtcttccgcaccagtaagccattcaacccactgcttggggagacctttgagctggaccgattagaggagaatgggtaccgatccctctgtgaacaggtgagtcatcatccccctgctgctgcgcaccatgctgagtccaaaaatggctggacattgcgtcaggaaatcaaaatcaccagcaagtttcgaggcaaatacctctccattatgcccctcggtaccattcattgtattttccatgcaactgggcaccactacacttggaagaaagttaccacaactgtacacaacattattgtgggcaagttgtggatagatcagtctggcgaaattgatattgtgaatcacaagacaggagacaagtgtaatcttaaatttgttccttatagctacttctctcgggatgtagcaagaaaggtgacgggggaagtgacagatccatcaggaaaagtccactttgctcttctggggacgtgggatgagaaaatggaatgtttcaaagtacagccagtcattggggaaaatgggggtgatgctcgacagagaggccatgaagcagaggaaagcagggtcatgctgtggaaaaggaatcctttaccgaagaatgcagaaaacatgtactacttctcagagcttgctctgactctcaatgcttgggaaagtggcactgcccccacagacagccggttacgacctgaccagagactgatggaaaatggacgctgggatgaagcaaatgcggagaagcagcgcctggaggaaaaacaaagactttccagaaagaagagagaagcggaagctatgaaagccacagaggatggcacaccatatgatccctataaggcactgtggtttgagcggaagaaggaccctgttaccaaggagttaacccatatttataggggagaatactgggagtgtaaagaaaaacaggactggagctcatgcccggacattttctgaaacggcagtaacaaaaaagaggagcatataatggagaagaggacagaggatgtgtgggaaagctggaagttgtgactctcttaccaagtgctttcctcaagtttgtctctcttgaccaatcattttttccaaatcaatcaccagaaggagacaccagtggtggtgattggctggttgccttagctgattgaaactgaaatcgacataggagatactatgtctgtaagggagaggtttagtggccgaaggttagtgttattccacatccacgaagtcaagtattcttggctcttctttctccctctgcccccatttaagacaatgtcactcaccctccccttgtagtatcctgctcagccaagatctgcctaagattatgattcaggggcattttggtgctgttaaaagcaagagccgaatttagaagttcccttaaaaagaaacacataagacttaccaatggaggcattgtgaatggttgcagtggagcttaggtataacatcatcaagtgtgttcacacgcggggtcggtttaatggagtgtccacgcggagataactgcgatattggaacacctgtgagagagattgttctatagggctggaatattcagagttacattcttggaagtttctgtttttacttgcatcaaacacccctctgttgttctccatcatctttaatagcaactggagaccactttggtcattggtaagggggtgcattctcctcacaaaggggttttatggacttcctcaggcggagagcttctgagaacacaggcaggatggaaaaagactactagccacttttgctttcccaaccccccttaatgccatccttcattgtctttctggcttctcttcttctggcacagtaccattttgggtctgtgccccagtgtggagcaaaacattgcctgtcccattctgatatacttcagaatttgagagcagaagttaatgtggaacaaaagttttcaccatctctcaagccccaaggactggagccacctctggaataatgtgttaaatatctgtatattatatatatgtagagaaaaatctaattttttggtttgatttccttcccattaagaatcttgttttttgatacccttgtctccctgagactctttcttggacacgtgttgatgtggatggcactcctgctctccatcttttatgggcagagagatttcaaaacctgagcaggatcatgtctggcagttactaaacagggactttgtccatggtttgtatcatggggtgcctactgctgtctaaactctgctctcctaattagctgactcttgaaaatgaaatcctaacctctttcctgcctcttttctttctcttttcaggaagagtgtgggtagaaagtccggagggcaacttccaatttaattctgctctgtccggcgcataggctgaattccaaaagaactttcttcctaggatgtggggcttaaagcaccgtcatgtggggtggatcagataattgctcctgtggggccctggcttccttctctgtttgtgcagtatttgtttttgttgtcttgttgagaaatatcccctgtgcaacccacccttggttgaggatcacaaattgaggtgccttccttgtatgctttttgttagtattttttgtttttgttccttaactgctgagcctcagccagcgtgggtcctgggggaaataccattccaaaggaagccatccctatggggaaattggttttactgggtaaattaatacttttatttcttcccctatcccttccttcctagttgtgataaacatgggagaggagtgactttgactgctggggaatttcctcctaagaaccttattcccaaaataagccagggattatgtcaaggcttctttcaaggaggctcataaaagcagtgacctcatccggggctttggatagagtgagaattccccaactaaattggacttctctgctttatccccttctcttccttcaccatctgcactacatttctggctgatcccaatcagattcccgctaatggaagaagtttagaatctttcaggtggaataaagtcacatgaaaacaaaacacaactatatatattttcagtttttttgccttattgatttttttccaaaaaaaaaaaactactaaattaaataattttttaaaagtca

SEQ ID NO: 163107 - DNA, 991 bp, Homo sapiens
  Payload ID: 12145
  Gene Symbol: OSBP
  Gene Name: oxysterol binding protein
  ENST ID: ENST00000525357
  CDS Start-End: 1-515
tcagtggagccagcagtgacatcagccttgatgaacagtacaagcatcagctggaggagaccaaaaaggaaaagagaaccagaataccatacaagccaaactatagcctcaatttatggagcatcatgaagaactgcattggaaaagaactctctaagatccccatgccggtaaactttaatgagcccttgtccatgcttcagcgccttactgaagatctggaataccatgagctgttagaccgagctgcaaaatgtgagaattctctagaacagctctgttatgttgcagctttcaccgtgtcctcctactccactactgtcttccgcaccagtaagccattcaacccactgcttggggagacctttgagctggaccgattagaggagaatgggtaccgatccctctgtgaacaggtaccattcattgtattttccatgcaactgggcaccactacacttggaagaaagttaccacaactgtacacaacattattgtgggcaagttgtggatagatcagtctggcgaaattgatattgtgaatcacaagacaggagacaagtgtaatcttaaatttgttccttatagctacttctctcgggatgtagcaagaaaggtgacgggggaagtgacagatccatcaggaaaagtccactttgctcttctggggacgtgggatgagaaaatggaatgtttcaaagtacagccagtcattggggaaaatgggggtgatgctcgacagagaggccatgaagcagaggaaagcagggtcatgctgtggaaaaggaatcctttaccgaagaatgcagaaaacatgtactacttctcagagcttgctctgactctcaatgcttgggaaagtggcactgcccccacagacagccggttacgacctgaccagagactgatggaaaatggacgctgggatgaagcaaatgcggagaagcagcgcctggaggaaaaacaaagactttccagaaagaagagagaa

SEQ ID NO: 163108 - DNA, 4340 bp, Homo sapiens
  Payload ID: 12146
  Gene Symbol: OSBP2
  Gene Name: oxysterol binding protein 2
  Uniprot ID: Q969R2
  ENST ID: ENST00000332585
  CDS Start-End: 105-2855
gcccccgcctcgcgccgcgcgcacgtgactgcgcccccggccccgcccccggcctgccccccgcccccactggccgctcggccgcgcgcgggtcggccggctctatggggaaagcggcggctccgagccgaggcggcggctgtggcggccgctcccgcgggctctcgtcgctgttcacggttgtcccctgcctgtcgtgccacacggcggcgccgggcatgagcgcttccacgtccggctccgggccggagcccaagccccagccccagcccgtgcccgaaccggagcggggaccgctgtcagaacaggtgtcggaggcagtttcggaggcagtgccaagatcggaacctgtgtccgagacgacgtctgagccggagccaggggctgggcagccatcggaactgctgcaggggtcgcggccggggtcagagtcaagctcaggtgtaggggctgggcccttcactaaggccgcatcggagccgctctcccgggcggtggggagcgcgacctttctcagacccgagtcaggatcgctgccagcgttaaagcccctgcctcttctgcgaccaggacaggcgaagactcctcttggggttccaatgtcggggactggcacgacctccagtgccccactggccttactgcctctggacagcttcgagggctggcttctcaagtggaccaactatctgaagggctaccagcgccgctggttcgtgctgggcaatggtttgctctcttactacagaaatcagggtgaaatggcccacacgtgccgtggaaccatcaacctgtccaccgcgcacattgacacggaggactcttgtggtatcttgctgaccagtggggccaggagctaccacctcaaggccagctcagaggtggaccggcagcagtggatcaccgccctggagctggccaaggccaaggctgtccgcgtgatgaacactcattcagatgactctggggacgacgacgaggctaccaccccagccgacaagagcgagctgcaccacaccctgaagaatctttccctgaagttagatgacctcagcacgtgcaatgacctcatcgccaagcacggcgctgcactccagcgctccctgacagagctggacggcctcaagatcccatctgagagtggggagaagctgaaggtggtgaatgagcgggccaccctcttccgcatcacatccaatgctatgatcaacgcctgcagggacttcttggaactagcagagatacacagtcggaaatggcagcgggcactgcagtatgagcaggagcagcgcgtgcacttggaggaaaccattgagcagctggcgaagcagcacaacagcctcgagcgggccttccacagtgcccctggccggccggccaacccctccaagagcttcattgagggaagcctcttgactcccaaaggagaggacagtgaggaagatgaagataccgagtactttgatgccatggaagactccacatccttcatcaccgtgatcaccgaggccaaggaagacagcagaaaagctgaaggtagcaccgggacaagttccgtggactggagctcagcagacaatgtactagatggtgcctcgctcgtgcccaagggttcatccaaagtcaagaggcgagtccgcattcccaacaagcccaactacagccttaacctctggagcatcatgaagaactgcatcggccgggagctctccaggatccccatgccggtgaacttcaatgagcccctgtccatgctccagcggctgacagaggacctggagtaccaccacctgctggacaaggcagtgcactgcaccagctcagtggagcagatgtgcctggtggccgccttctctgtgtcctcctactccaccacagtgcaccgcatcgccaagcccttcaaccccatgctgggggagaccttcgagctggaccgcctcgacgacatgggcctgcgctccctctgtgagcaggtgagccaccaccccccctcagctgcgcactacgtgttctccaagcatggctggagcctctggcaggagatcaccatctccagcaagttccggggaaaatacatctccatcatgccgctaggtgccatccacttagaattccaggccagtgggaatcactacgtgtggaggaagagcacctcaactgttcacaacatcatcgtgggcaagctctggatcgaccagtcaggggacatcgagattgtgaaccataagaccaatgaccggtgccagctgaagttcctgccctacagctacttctccaaagaggcagcccggaaggtgacaggagtggtgagtgacagccagggcaaggcccattacgtgctgtccggctcgtgggatgaacaaatggagtgctccaaggtcatgcatagcagtcccagcagccccagctctgacgggaagcagaagacagtgtaccagaccctgtcagccaagctgctgtggaagaagtacccgctgccggagaacgcggagaacatgtactacttctcagagctggccctgaccctcaacgagcacgaggagggcgtagcgccaaccgacagccgcctgcggcccgaccagcggctgatggagaagggccgttgggacgaggccaataccgagaagcagcggctggaggagaagcagcgcctgtcgcggcgccggcggctggaggcctgcgggccgggcagcagctgcagctcggaggaagagaaggaggcggatgcctacacgccactgtggtttgagaagaggctggatccgctgaccggggagatggcctgtgtgtacaagggcggctactgggaggccaaggagaagcaagactggcatatgtgccccaacatcttctgagcgccacccttgcaacaaatacaggcgcctgcacagcctggcccacctgttcattaatgcactcaatttagtactgaatggtctttctcccagcccattcccagcccttcctatttcctttcctattttttttttctccccacactttcttgggactcccaccttggaaggaggaagggctgacctgggttctctccagcccccaggtgcgccgggtcacccgtgccccttcattatggacctgggccctaccggaacccctgccccagttaccacaactcaggccggctggcccgggccatgggctgcgcaaatcaccagcccccaacccagggaggaactggcccctcctagggagcctcttcgacttttttagaaaaatgatctccatttctttccagccatgatgtttagtaaatatttttagtaccgcacttagcagacagctttccaagtgtgctttcttgccacaaaagtgtcctggcaagagccccttatttttaagacatcaggaagccagaccgctttgagttgggagaattttgtagctcaacatatcaagtcctcgatggtatctgagctgcccacacccccacctgccaaggccccacagagcccaaaacagaagggggctgccccagcccagcagagcacagagtttctggagctcccatccacagatgcaggagggggtactgatggtaacccccatgtggatttgagggcagcagtccctggcctcaccctagccagcctgggtggctccctagccccaagaggccaggaagggctggaaggcagggcctgcaggtgctccccgccctgagacccaggccccaaatcagcaataatgaacaaacccttggcccagcctgggctggtgacctgggcaccagagaccttgcatccctcctcatcctaggaggcccctaggggtgccccatctcagtgtcccctgaactctttatttgcctaatttatatatatatatatgagatatataaatatatataaaatagctattttgcttaaatttctacagtatgtaaaagtgaaaaaatgatgaagacgggtgcacctgtctgagtttggccctcatgtgagctgtgcccttccctctcctcatgcccccttccagcggcttctgccaaccatggggggctggaccaccatggccactgacccagcccctcagaatcccacactccaatcctttccatttcagtttagtcctaaaagttcatcacagggtctttctttctactccaggactggttttgtttttatatatataaaaaaaaaaagtgaaaacaccaatgtgtgaaatgccttacaatgcccactggagaggcggggcggggtggggcaggatggccccactggggctcctacagagctgtggaatgtacctctccccaacactgttttgttagcgagcaccttttgaccagtaataaaaaaccttggctttggagttttccactg

SEQ ID NO: 163109 - DNA, 3728 bp, Homo sapiens
  Payload ID: 12146
  Gene Symbol: OSBP2
  Gene Name: oxysterol binding protein 2
  ENST ID: ENST00000403222
  CDS Start-End: 333-2243
agagaacccgaacgatgtcgtcactggcagcgaagcgccttggcatgaaccgtaggccagctggctcaggaggtggaggcggtgaggcggccacttggggccaccgcttctggcggccgcaggagcgacccacagacagaaatcagggtgaaatggcccacacgtgccgtggaaccatcaacctgtccaccgcgcacattgacacggaggactcttgtggtatcttgctgaccagtggggccaggagctaccacctcaaggccagctcagaggtggaccggcagcagtggatcaccgccctggagctggccaaggccaaggctgtccgcgtgatgaacactcattcagatgactctggggacgacgacgaggctaccaccccagccgacaagagcgagctgcaccacaccctgaagaatctttccctgaagttagatgacctcagcacgtgcaatgacctcatcgccaagcacggcgctgcactccagcgctccctgacagagctggacggcctcaagatcccatctgagagtggggagaagctgaaggtggtgaatgagcgggccaccctcttccgcatcacatccaatgctatgatcaacgcctgcagggacttcttggaactagcagagatacacagtcggaaatggcagcgggcactgcagtatgagcaggagcagcgcgtgcacttggaggaaaccattgagcagctggcgaagcagcacaacagcctcgagcgggccttccacagtgcccctggccggccggccaacccctccaagagcttcattgagggtgacctcttgactcccaaaggagaggacagtgaggaagatgaagataccgagtactttgatgccatggaagactccacatccttcatcaccgtgatcaccgaggccaaggaagacagaaaagctgaaggtagcaccgggacaagttccgtggactggagctcagcagacaatgtactagatggtgcctcgctcgtgcccaagggttcatccaaagtcaagaggcgagtccgcattcccaacaagcccaactacagccttaacctctggagcatcatgaagaactgcatcggccgggagctctccaggatccccatgccggtgaacttcaatgagcccctgtccatgctccagcggctgacagaggacctggagtaccaccacctgctggacaaggcagtgcactgcaccagctcagtggagcagatgtgcctggtggccgccttctctgtgtcctcctactccaccacagtgcaccgcatcgccaagcccttcaaccccatgctgggggagaccttcgagctggaccgcctcgacgacatgggcctgcgctccctctgtgagcaggtgagccaccaccccccctcagctgcgcactacgtgttctccaagcatggctggagcctctggcaggagatcaccatctccagcaagttccggggaaaatacatctccatcatgccgctaggtgccatccacttagaattccaggccagtgggaatcactacgtgtggaggaagagcacctcaactgttcacaacatcatcgtgggcaagctctggatcgaccagtcaggggacatcgagattgtgaaccataagaccaatgaccggtgccagctgaagttcctgccctacagctacttctccaaagaggcagcccggaaggtgacaggagtggtgagtgacagccagggcaaggcccattacgtgctgtccggctcgtgggatgaacaaatggagtgctccaaggtcatgcatagcagtcccagcagccccagctctgacgggaagcagaagacagtgtaccagaccctgtcagccaagctgctgtggaagaagtacccgctgccggagaacgcggagaacatgtactacttctcagagctggccctgaccctcaacgagcacgaggagggcgtagcgccaaccgacagccgcctgcggcccgaccagcggctgatggagaagggccgttgggacgaggccaataccgagaagcagcggctggaggagaagcagcgcctgtcgcggcgccggcggctggaggcctgcgggccgggcagcagctgcagctcggaggaagagaaggaggcggatgcctacacgccactgtggtttgagaagaggctggatccgctgaccggggagatggcctgtgtgtacaagggcggctactgggaggccaaggagaagcaagactggcatatgtgccccaacatcttctgagcgccacccttgcaacaaatacaggcgcctgcacagcctggcccacctgttcattaatgcactcaatttagtactgaatggtctttctcccagcccattcccagcccttcctatttcctttcctattttttttttctccccacactttcttgggactcccaccttggaaggaggaagggctgacctgggttctctccagcccccaggtgcgccgggtcacccgtgccccttcattatggacctgggccctaccggaacccctgccccagttaccacaactcaggccggctggcccgggccatgggctgcgcaaatcaccagcccccaacccagggaggaactggcccctcctagggagcctcttcgacttttttagaaaaatgatctccatttctttccagccatgatgtttagtaaatatttttagtaccgcacttagcagacagctttccaagtgtgctttcttgccacaaaagtgtcctggcaagagccccttatttttaagacatcaggaagccagaccgctttgagttgggagaattttgtagctcaacatatcaagtcctcgatggtatctgagctgcccacacccccacctgccaaggccccacagagcccaaaacagaagggggctgccccagcccagcagagcacagagtttctggagctcccatccacagatgcaggagggggtactgatggtaacccccatgtggatttgagggcagcagtccctggcctcaccctagccagcctgggtggctccctagccccaagaggccaggaagggctggaaggcagggcctgcaggtgctccccgccctgagacccaggccccaaatcagcaataatgaacaaacccttggcccagcctgggctggtgacctgggcaccagagaccttgcatccctcctcatcctaggaggcccctaggggtgccccatctcagtgtcccctgaactctttatttgcctaatttatatatatatatatgagatatataaatatatataaaatagctattttgcttaaatttctacagtatgtaaaagtgaaaaaatgatgaagacgggtgcacctgtctgagtttggccctcatgtgagctgtgcccttccctctcctcatgcccccttccagcggcttctgccaaccatggggggctggaccaccatggccactgacccagcccctcagaatcccacactccaatcctttccatttcagtttagtcctaaaagttcatcacagggtctttctttctactccaggactggttttgtttttatatatataaaaaaaaaaagtgaaaacaccaatgtgtgaaatgccttacaatgcccactggagaggcggggcggggtggggcaggatggccccactggggctcctacagagctgtggaatgtacctctccccaacactgttttgttagcgagcaccttttgaccagtaataaaaaaccttggctttggagttttccactg

SEQ ID NO: 163110 - DNA, 3669 bp, Homo sapiens
  Payload ID: 12146
  Gene Symbol: OSBP2
  Gene Name: oxysterol binding protein 2
  ENST ID: ENST00000407373
  CDS Start-End: 145-2376
aacctctgcggaagcctcacagactgccagcctacccagggatcccgggaggtccaagttcagaatcccactttgagatgtttcttgtactaaaacgcttggtttacaaaaagtcttcccctatttgtttagagaacccgaacgatgtcgtcactggcagcgaagcgccttggcatgaaccgtaggccagctggctcaggaggtggaggcggtgaggcggccacttggggccaccgcttctggcggccgcaggagcgacccacagacagaaatcagggtgaaatggcccacacgtgccgtggaaccatcaacctgtccaccgcgcacattgacacggaggactcttgtggtatcttgctgaccagtggggccaggagctaccacctcaaggccagctcagaggtggaccggcagcagtggatcaccgccctggagctggccaaggccaaggctgtccgcgtgatgaacactcattcagatgactctggggacgacgacgaggctaccaccccagccgacaagagcgagctgcaccacaccctgaagaatctttccctgaagttagatgacctcagcacgtgcaatgacctcatcgccaagcacggcgctgcactccagcgctccctgacagagctggacggcctcaagatcccatctgagagtggggagaagctgaaggtggtgaatgagcgggccaccctcttccgcatcacatccaatgctatgatcaacgcctgcagggacttcttggaactagcagagatacacagtcggaaatggcagcgggcactgcagtatgagcaggagcagcgcgtgcacttggaggaaaccattgagcagctggcgaagcagcacaacagcctcgagcgggccttccacagtgcccctggccggccggccaacccctccaagagcttcattgagggaagcctcttgactcccaaaggagaggacagtgaggaagatgaagataccgagtactttgatgccatggaagactccacatccttcatcaccgtgatcaccgaggccaaggaagacagcagaaaagctgaaggtagcaccgggacaagttccgtggactggagctcagcagacaatgtactagatggtgcctcgctcgtgcccaagggttcatccaaagtcaagaggcgagtccgcattcccaacaagcccaactacagccttaacctctggagcatcatgaagaactgcatcggccgggagctctccaggatccccatgccggtgaacttcaatgagcccctgtccatgctccagcggctgacagaggacctggagtaccaccacctgctggacaaggcagtgcactgcaccagctcagtggagcagatgtgcctggtggccgccttctctgtgtcctcctactccaccacagtgcaccgcatcgccaagcccttcaaccccatgctgggggagaccttcgagctggaccgcctcgacgacatgggcctgcgctccctctgtgagcaggtgagccaccaccccccctcagctgcgcactacgtgttctccaagcatggctggagcctctggcaggagatcaccatctccagcaagttccggggaaaatacatctccatcatgccgctaggtgccatccacttagaattccaggccagtgggaatcactacgtgtggaggaagagcacctcaactgttcacaacatcatcgtgggcaagctctggatcgaccagtcaggggacatcgagattgtgaaccataagaccaatgaccggtgccagctgaagttcctgccctacagctacttctccaaagaggcagcccggaaggtgacaggagtggtgagtgacagccagggcaaggcccattacgtgctgtccggctcgtgggatgaacaaatggagtgctccaaggtcatgcatagcagtcccagcagccccagctctgacgggaagcagaagacagtgtaccagaccctgtcagccaagctgctgtggaagaagtacccgctgccggagaacgcggagaacatgtactacttctcagagctggccctgaccctcaacgagcacgaggagggcgtagcgccaaccgacagccgcctgcggcccgaccagcggctgatggagaagggccgttgggacgaggccaataccgagaagcagcggctggaggagaagcagcgcctgtcgcggcgccggcggctggaggcctgcgggccgggcagcagctgcagctcggaggaagagaaggaggcggatgcctacacgccactgtggtttgagaagaggctggatccgctgaccggggagatggcctgtgtgtacaagggcggctactgggaggccaaggagaagcaagactggcatatgtgccccaacatcttctgagcgccacccttgcaacaaatacaggcgcctgcacagcctggcccacctgttcattaatgcactcaatttagtactgaatggtctttctcccagcccattcccagcccttcctatttcctttcctattttttttttctccccacactttcttgggactcccaccttggaaggaggaagggctgacctgggttctctccagcccccaggtgcgccgggtcacccgtgccccttcattatggacctgggccctaccggaacccctgccccagttaccacaactcaggccggctggcccgggccatgggctgcgcaaatcaccagcccccaacccagggaggaactggcccctcctagggagcctcttcgacttttttagaaaaatgatctccatttctttccagccatgatgtttagtaaatatttttagtaccgcacttagcagacagctttccaagtgtgctttcttgccacaaaagtgtcctggcaagagccccttatttttaagacatcaggaagccagaccgctttgagttgggagaattttgtagctcaacatatcaagtcctcgatggtatctgagctgcccacacccccacctgccaaggccccacagagcccaaaacagaagggggctgccccagcccagcagagcacagagtttctggagctcccatccacagatgcaggagggggtactgatggtaacccccatgtggatttgagggcagcagtccctggcctcaccctagccagcctgggtggctccctagccccaagaggccaggaagggctggaaggcagggcctgcaggtgctccccgccctgagacccaggccccaaatcagcaataatgaacaaacccttggcccagcctgggctggtgacctgggcaccagagaccttgcatccctcctcatcctaggaggcccctaggggtgccccatctcagtgtcccctgaactctttatttgcctaatttatatatatatatatgagatatataaatatatataaaatagctattttgcttaaatttctacagtatgtaaaagtgaaaaaatgatgaagacgggtgcacctgtctgagtttggccctcatgtgagctgtgcccttccctctcctcatgcccccttccagcggcttctgccaaccatggggggctggaccaccatggccactgacccagcccctcagaatcccacactccaatcctttccatttcagtttagtcctaaaagttcatcacagggtctttctttctactccaggactggttttgtttttatatatat

SEQ ID NO: 163111 - DNA, 2468 bp, Homo sapiens
  Payload ID: 12146
  Gene Symbol: OSBP2
  Gene Name: oxysterol binding protein 2
  Uniprot ID: Q969R2
  ENST ID: ENST00000401475
  CDS Start-End: 386-2035
agagcaactagagcaggcagtagagtggggtgggcggggatgaggagggggttgggtggctggtggccctagaggctggccctaaagaatacctggacagcctgccaccctattgctccaaaatgaaaatcctctaacagatgactctggggacgacgacgaggctaccaccccagccgacaagagcgagctgcaccacaccctgaagaatctttccctgaagttagatgacctcagcacgtgcaatgacctcatcgccaagcacggcgctgcactccagcgctccctgacagagctggacggcctcaagatcccatctgagagtggggagaagctgaaggtggtgaatgagcgggccaccctcttccgcatcacatccaatgctatgatcaacgcctgcagggacttcttggaactagcagagatacacagtcggaaatggcagcgggcactgcagtatgagcaggagcagcgcgtgcacttggaggaaaccattgagcagctggcgaagcagcacaacagcctcgagcgggccttccacagtgcccctggccggccggccaacccctccaagagcttcattgagggaagcctcttgactcccaaaggagaggacagtgaggaagatgaagataccgagtactttgatgccatggaagactccacatccttcatcaccgtgatcaccgaggccaaggaagacagaaaagctgaaggtagcaccgggacaagttccgtggactggagctcagcagacaatgtactagatggtgcctcgctcgtgcccaagggttcatccaaagtcaagaggcgagtccgcattcccaacaagcccaactacagccttaacctctggagcatcatgaagaactgcatcggccgggagctctccaggatccccatgccggtgaacttcaatgagcccctgtccatgctccagcggctgacagaggacctggagtaccaccacctgctggacaaggcagtgcactgcaccagctcagtggagcagatgtgcctggtggccgccttctctgtgtcctcctactccaccacagtgcaccgcatcgccaagcccttcaaccccatgctgggggagaccttcgagctggaccgcctcgacgacatgggcctgcgctccctctgtgagcaggtgagccaccaccccccctcagctgcgcactacgtgttctccaagcatggctggagcctctggcaggagatcaccatctccagcaagttccggggaaaatacatctccatcatgccgctaggtgccatccacttagaattccaggccagtgggaatcactacgtgtggaggaagagcacctcaactgttcacaacatcatcgtgggcaagctctggatcgaccagtcaggggacatcgagattgtgaaccataagaccaatgaccggtgccagctgaagttcctgccctacagctacttctccaaagaggcagcccggaaggtgacaggagtggtgagtgacagccagggcaaggcccattacgtgctgtccggctcgtgggatgaacaaatggagtgctccaaggtcatgcatagcagtcccagcagccccagctctgacgggaagcagaagacagtgtaccagaccctgtcagccaagctgctgtggaagaagtacccgctgccggagaacgcggagaacatgtactacttctcagagctggccctgaccctcaacgagcacgaggagggcgtagcgccaaccgacagccgcctgcggcccgaccagcggctgatggagaagggccgttgggacgaggccaataccgagaagcagcggctggaggagaagcagcgcctgtcgcggcgccggcggctggaggcctgcgggccgggcagcagctgcagctcggaggaagagaaggaggcggatgcctacacgccactgtggtttgagaagaggctggatccgctgaccggggagatggcctgtgtgtacaagggcggctactgggaggccaaggagaagcaagactggcatatgtgccccaacatcttctgagcgccacccttgcaacaaatacaggcgcctgcacagcctggcccacctgttcattaatgcactcaatttagtactgaatggtctttctcccagcccattcccagcccttcctatttcctttcctattttttttttctccccacactttcttgggactcccaccttggaaggaggaagggctgacctgggttctctccagcccccaggtgcgccgggtcacccgtgccccttcattatggacctgggccctaccggaacccctgccccagttaccacaactcaggccggctggcccgggccatgggctgcgcaaatcaccagcccccaacccagggaggaactggcccctcctagggagcctcttcgacttttttagaaaaatgatctccatttctttccagccatgatgtttagtaaatatttttagtaccgc

SEQ ID NO: 163112 - DNA, 861 bp, Homo sapiens
  Payload ID: 12146
  Gene Symbol: OSBP2
  Gene Name: oxysterol binding protein 2
  ENST ID: ENST00000424224
  CDS Start-End: 338-861
ggcggcggcggcggcggcagcagcagcagctgcaagagccctcgcagcctcggggcaggacccacgtccacacccgagagcccctccctgggatgactctggggacgacgacgaggctaccaccccagccgacaagagcgagctgcaccacaccctgaagaatctttccctgaagttagatgacctcagcacgtgcaatgacctcatcgccaagcacggcgctgcactccagcgctccctgacagagctggacggcctcaagatcccatctgagagtggggagaagctgaaggtggtgaatgagcgggccaccctcttccgcatcacatccaatgctatgatcaacgcctgcagggacttcttggaactagcagagatacacagtcggaaatggcagcgggcactgcagtatgagcaggagcagcgcgtgcacttggaggaaaccattgagcagctggcgaagcagcacaacagcctcgagcgggccttccacagtgcccctggccggccggccaacccctccaagagcttcattgagggaagcctcttgactcccaaaggagaggacagtgaggaagatgaagataccgagtactttgatgccatggaagactccacatccttcatcaccgtgatcaccgaggccaaggaagacagcagaaaagctgaaggtagcaccgggacaagttccgtggactggagctcagcagacaatgtactagatggtgcctcgctcgtgcccaagggttcatccaaagtcaagaggcgagtccgcattcccaacaagcccaactacagccttaacctctggagcatcatgaagaactgcatcggccgggagctctccaggatccccatgcc

SEQ ID NO: 163113 - DNA, 3580 bp, Homo sapiens
  Payload ID: 12146
  Gene Symbol: OSBP2
  Gene Name: oxysterol binding protein 2
  Uniprot ID: Q969R2
  ENST ID: ENST00000437268
  CDS Start-End: 116-2095
gagtgtccgccgcctccgccgggcggcccaccgagctgtgcacgcgtccgtgcaagcccccgggacccggcgccatgtagcgccccgccgattggaggctgccccgccgcgggaaatgaagggacgcggctgctgggacacggcctccgtgcgctccttctgcagctccggctgcctgaataaatttaagaaggatgactctggggacgacgacgaggctaccaccccagccgacaagagcgagctgcaccacaccctgaagaatctttccctgaagttagatgacctcagcacgtgcaatgacctcatcgccaagcacggcgctgcactccagcgctccctgacagagctggacggcctcaagatcccatctgagagtggggagaagctgaaggtggtgaatgagcgggccaccctcttccgcatcacatccaatgctatgatcaacgcctgcagggacttcttggaactagcagagatacacagtcggaaatggcagcgggcactgcagtatgagcaggagcagcgcgtgcacttggaggaaaccattgagcagctggcgaagcagcacaacagcctcgagcgggccttccacagtgcccctggccggccggccaacccctccaagagcttcattgagggaagcctcttgactcccaaaggagaggacagtgaggaagatgaagataccgagtactttgatgccatggaagactccacatccttcatcaccgtgatcaccgaggccaaggaagacagcagaaaagctgaaggtagcaccgggacaagttccgtggactggagctcagcagacaatgtactagatggtgcctcgctcgtgcccaagggttcatccaaagtcaagaggcgagtccgcattcccaacaagcccaactacagccttaacctctggagcatcatgaagaactgcatcggccgggagctctccaggatccccatgccggtgaacttcaatgagcccctgtccatgctccagcggctgacagaggacctggagtaccaccacctgctggacaaggcagtgcactgcaccagctcagtggagcagatgtgcctggtggccgccttctctgtgtcctcctactccaccacagtgcaccgcatcgccaagcccttcaaccccatgctgggggagaccttcgagctggaccgcctcgacgacatgggcctgcgctccctctgtgagcaggtgagccaccaccccccctcagctgcgcactacgtgttctccaagcatggctggagcctctggcaggagatcaccatctccagcaagttccggggaaaatacatctccatcatgccgctaggtgccatccacttagaattccaggccagtgggaatcactacgtgtggaggaagagcacctcaactgttcacaacatcatcgtgggcaagctctggatcgaccagtcaggggacatcgagattgtgaaccataagaccaatgaccggtgccagctgaagttcctgccctacagctacttctccaaagaggcagcccggaaggtgacaggagtggtgagtgacagccagggcaaggcccattacgtgctgtccggctcgtgggatgaacaaatggagtgctccaaggtcatgcatagcagtcccagcagccccagctctgacgggaagcagaagacagtgtaccagaccctgtcagccaagctgctgtggaagaagtacccgctgccggagaacgcggagaacatgtactacttctcagagctggccctgaccctcaacgagcacgaggagggcgtagcgccaaccgacagccgcctgcggcccgaccagcggctgatggagaagggccgttgggacgaggccaataccgagaagcagcggctggaggagaagcagcgcctgtcgcggcgccggcggctggaggcctgcgggccgggcagcagctgcagctcggaggaagcagagaaggaggcggatgcctacacgccactgtggtttgagaagaggctggatccgctgaccggggagatggcctgtgtgtacaagggcggctactgggaggccaaggagaagcaagactggcatatgtgccccaacatcttctgagcgccacccttgcaacaaatacaggcgcctgcacagcctggcccacctgttcattaatgcactcaatttagtactgaatggtctttctcccagcccattcccagcccttcctatttcctttcctattttttttttctccccacactttcttgggactcccaccttggaaggaggaagggctgacctgggttctctccagcccccaggtgcgccgggtcacccgtgccccttcattatggacctgggccctaccggaacccctgccccagttaccacaactcaggccggctggcccgggccatgggctgcgcaaatcaccagcccccaacccagggaggaactggcccctcctagggagcctcttcgacttttttagaaaaatgatctccatttctttccagccatgatgtttagtaaatatttttagtaccgcacttagcagacagctttccaagtgtgctttcttgccacaaaagtgtcctggcaagagccccttatttttaagacatcaggaagccagaccgctttgagttgggagaattttgtagctcaacatatcaagtcctcgatggtatctgagctgcccacacccccacctgccaaggccccacagagcccaaaacagaagggggctgccccagcccagcagagcacagagtttctggagctcccatccacagatgcaggagggggtactgatggtaacccccatgtggatttgagggcagcagtccctggcctcaccctagccagcctgggtggctccctagccccaagaggccaggaagggctggaaggcagggcctgcaggtgctccccgccctgagacccaggccccaaatcagcaataatgaacaaacccttggcccagcctgggctggtgacctgggcaccagagaccttgcatccctcctcatcctaggaggcccctaggggtgccccatctcagtgtcccctgaactctttatttgcctaatttatatatatatatatgagatatataaatatatataaaatagctattttgcttaaatttctacagtatgtaaaagtgaaaaaatgatgaagacgggtgcacctgtctgagtttggccctcatgtgagctgtgcccttccctctcctcatgcccccttccagcggcttctgccaaccatggggggctggaccaccatggccactgacccagcccctcagaatcccacactccaatcctttccatttcagtttagtcctaaaagttcatcacagggtctttctttctactccaggactggttttgtttttatatatataaaaaaaaaaagtgaaaacaccaatgtgtgaaatgccttacaatgcccactggagaggcggggcggggtggggcaggatggccccactggggctcctacagagctgtggaatgtacctctccccaacactgttttgttagcgagcaccttttgaccagtaataaaaaaccttggctttggagttttccactg

SEQ ID NO: 163114 - DNA, 2836 bp, Homo sapiens
  Payload ID: 12146
  Gene Symbol: OSBP2
  Gene Name: oxysterol binding protein 2
  Uniprot ID: Q969R2
  ENST ID: ENST00000446658
  CDS Start-End: 22-2769
gcgcgcgggtcggccggctctatggggaaagcggcggctccgagccgaggcggcggctgtggcggccgctcccgcgggctctcgtcgctgttcacggttgtcccctgcctgtcgtgccacacggcggcgccgggcatgagcgcttccacgtccggctccgggccggagcccaagccccagccccagcccgtgcccgaaccggagcggggaccgctgtcagaacaggtgtcggaggcagtttcggaggcagtgccaagatcggaacctgtgtccgagacgacgtctgagccggagccaggggctgggcagccatcggaactgctgcaggggtcgcggccggggtcagagtcaagctcaggtgtaggggctgggcccttcactaaggccgcatcggagccgctctcccgggcggtggggagcgcgacctttctcagacccgagtcaggatcgctgccagcgttaaagcccctgcctcttctgcgaccaggacaggcgaagactcctcttggggttccaatgtcggggactggcacgacctccagtgccccactggccttactgcctctggacagcttcgagggctggcttctcaagtggaccaactatctgaagggctaccagcgccgctggttcgtgctgggcaatggtttgctctcttactacagaaatcagggtgaaatggcccacacgtgccgtggaaccatcaacctgtccaccgcgcacattgacacggaggactcttgtggtatcttgctgaccagtggggccaggagctaccacctcaaggccagctcagaggtggaccggcagcagtggatcaccgccctggagctggccaaggccaaggctgtccgcgtgatgaacactcattcagatgactctggggacgacgacgaggctaccaccccagccgacaagagcgagctgcaccacaccctgaagaatctttccctgaagttagatgacctcagcacgtgcaatgacctcatcgccaagcacggcgctgcactccagcgctccctgacagagctggacggcctcaagatcccatctgagagtggggagaagctgaaggtggtgaatgagcgggccaccctcttccgcatcacatccaatgctatgatcaacgcctgcagggacttcttggaactagcagagatacacagtcggaaatggcagcgggcactgcagtatgagcaggagcagcgcgtgcacttggaggaaaccattgagcagctggcgaagcagcacaacagcctcgagcgggccttccacagtgcccctggccggccggccaacccctccaagagcttcattgagggaagcctcttgactcccaaaggagaggacagtgaggaagatgaagataccgagtactttgatgccatggaagactccacatccttcatcaccgtgatcaccgaggccaaggaagacagaaaagctgaaggtagcaccgggacaagttccgtggactggagctcagcagacaatgtactagatggtgcctcgctcgtgcccaagggttcatccaaagtcaagaggcgagtccgcattcccaacaagcccaactacagccttaacctctggagcatcatgaagaactgcatcggccgggagctctccaggatccccatgccggtgaacttcaatgagcccctgtccatgctccagcggctgacagaggacctggagtaccaccacctgctggacaaggcagtgcactgcaccagctcagtggagcagatgtgcctggtggccgccttctctgtgtcctcctactccaccacagtgcaccgcatcgccaagcccttcaaccccatgctgggggagaccttcgagctggaccgcctcgacgacatgggcctgcgctccctctgtgagcaggtgagccaccaccccccctcagctgcgcactacgtgttctccaagcatggctggagcctctggcaggagatcaccatctccagcaagttccggggaaaatacatctccatcatgccgctaggtgccatccacttagaattccaggccagtgggaatcactacgtgtggaggaagagcacctcaactgttcacaacatcatcgtgggcaagctctggatcgaccagtcaggggacatcgagattgtgaaccataagaccaatgaccggtgccagctgaagttcctgccctacagctacttctccaaagaggcagcccggaaggtgacaggagtggtgagtgacagccagggcaaggcccattacgtgctgtccggctcgtgggatgaacaaatggagtgctccaaggtcatgcatagcagtcccagcagccccagctctgacgggaagcagaagacagtgtaccagaccctgtcagccaagctgctgtggaagaagtacccgctgccggagaacgcggagaacatgtactacttctcagagctggccctgaccctcaacgagcacgaggagggcgtagcgccaaccgacagccgcctgcggcccgaccagcggctgatggagaagggccgttgggacgaggccaataccgagaagcagcggctggaggagaagcagcgcctgtcgcggcgccggcggctggaggcctgcgggccgggcagcagctgcagctcggaggaagagaaggaggcggatgcctacacgccactgtggtttgagaagaggctggatccgctgaccggggagatggcctgtgtgtacaagggcggctactgggaggccaaggagaagcaagactggcatatgtgccccaacatcttctgagcgccacccttgcaacaaatacaggcgcctgcacagcctggcccacctgttcattaatgcactcaat

SEQ ID NO: 163115 - DNA, 930 bp, Homo sapiens
  Payload ID: 12146
  Gene Symbol: OSBP2
  Gene Name: oxysterol binding protein 2
  ENST ID: ENST00000433183
  CDS Start-End: 1-224
gtgccatccacttagaattccaggccagtgggaatcactacgtgtggaggaagagcacctcaactgttcacaacatcatcgtgggcaagctctggatcgaccagtcaggggacatcgagattgtgaaccataagaccaatgaccggtgccagctgaagttcctgccctacagctacttctccaaagaggcagcccggaaggtaagcaggaccagccacctctaagcaccccagggggcccagggcagagtctgcacctacgctggtcctgccaatgtccacaggtgacaggagtggtgagtgacagccagggcaaggcccattacgtgctgtccggctcgtgggatgaacaaatggagtgctccaaggtcatgcatagcagtcccagcagccccagctctgacgggaagcagaagacagtgtaccagaccctgtcagccaagctgctgtggaagaagtacccgctgccgtgagtagggctggcaggggccccgccacaggcaaaggagagggaaggaggacagtggacagaaagcaactgacaggcacaggaggtcgggagggttcagtccacacatgggcagagaacagtattatgcagccgacatcccagtgtgaaggcagacaccgaacagtaaataaatgtgaaactatcaaacactatgcacagactttaagcgaggtgataggacagagcccctccctgttcctccctacaagaaataaaaaacatacttgaaaataaccacaggaaatagaaaactataaaatgtggcataggaaagtccaaagagaacaaatagaaattcgacaaagggaaaaaaaaatgactgacattgagaaccctgtggaatggtttagtagctagaatctatcacctgaacacaggtcagaagaagtgacagaactgcatttaaagagacaaaaccca

SEQ ID NO: 163116 - DNA, 895 bp, Homo sapiens
  Payload ID: 12146
  Gene Symbol: OSBP2
  Gene Name: oxysterol binding protein 2
  ENST ID: ENST00000453621
  CDS Start-End: 1-895
agcattctgagaacagcagggccacgccaggcgcctgcctctccccacagcacagccaggatggggcctggagaaggccggcagcagcagaggagaccctgggagtcagggatggacaccaggcctgcagggacttcttggaactagcagagatacacagtcggaaatggcagcgggcactgcagtatgagcaggagcagcgcgtgcacttggaggaaaccattgagcagctggcgaagcagcacaacagcctcgagcgggccttccacagtgcccctggccggccggccaacccctccaagagcttcattgagggaagcctcttgactcccaaaggagaggacagtgaggaagatgaagataccgagtactttgatgccatggaagactccacatccttcatcaccgtgatcaccgaggccaaggaagacagaaaagctgaaggtagcaccgggacaagttccgtggactggagctcagcagacaatgtactagatggtgcctcgctcgtgcccaagggttcatccaaagtcaagaggcgagtccgcattcccaacaagcccaactacagccttaacctctggagcatcatgaagaactgcatcggccgggagctctccaggatccccatgccggtgaacttcaatgagcccctgtccatgctccagcggctgacagaggacctggagtaccaccacctgctggacaaggcagtgcactgcaccagctcagtggagcagatgtgcctggtggccgccttctctgtgtcctcctactccaccacagtgcaccgcatcgccaagcccttcaaccccatgctgggggagaccttcgagctggaccgcctcgacgacatgggcctgcgctccctctgtgagcaggtgagccaccaccc

SEQ ID NO: 163117 - DNA, 589 bp, Homo sapiens
  Payload ID: 12146
  Gene Symbol: OSBP2
  Gene Name: oxysterol binding protein 2
  ENST ID: ENST00000454145
  CDS Start-End: 1-589
agcattctgagaacagcagggccacgccaggcgcctgcctctccccacagcacagccaggatggggcctggagaaggccggcagcagcagaggagaccctgggagtcagggatggacaccaggcctgcagggacttcttggaactagcagagatacacagtcggaaatggcagcgggcactgcagtatgagcaggagcagcgcgtgcacttggaggaaaccattgagcagctggcgaagcagcacaacagcctcgagcgggccttccacagtgcccctggccggccggccaacccctccaagagcttcattgagggaagcctcttgactcccaaaggagaggacagtgaggaagatgaagataccgagtactttgatgccatggaagactccacatccttcatcaccgtgatcaccgaggccaaggaagacagcagaaaagctgaaggtagcaccgggacaagttccgtggactggagctcagcagacaatggttcatccaaagtcaagaggcgagtccgcattcccaacaagcccaactacagccttaacctctggagcatcatgaagaactgcatcggccgggagct

SEQ ID NO: 163118 - DNA, 2763 bp, Homo sapiens
  Payload ID: 12146
  Gene Symbol: OSBP2
  Gene Name: oxysterol binding protein 2
  ENST ID: ENST00000452656
  CDS Start-End: 1-1353
gcctgcagggacttcttggaactagcagagatacacagtcggaaatggcagcgggcactgcagtatgagcaggagcagcgcgtgcacttggaggaaaccattgagcagctggcgaagcagcacaacagcctcgagcgggccttccacagtgcccctggccggccggccaacccctccaagagcttcattgagggaagcctcttgactcccaaaggagaggacagtgaggaagatgaagataccgagtactttgatgccatggaagactccacatccttcatcaccgtgatcaccgaggccaaggaagacagcagaaaagctgaaggtagcaccgggacaagttccgtggactggagctcagcagacaatgtactagatggtgcctcgctcgtgcccaagggttcatccaaagtcaagaggcgagtccgcattcccaacaagcccaactacagccttaacctctggagcatcatgaagaactgcatcggccgggagctctccaggatccccatgccggtgaacttcaatgagcccctgtccatgctccagcggctgacagaggacctggagtaccaccacctgctggacaaggcagtgcactgcaccagctcagtggagcagatgtgcctggtggccgccttctctgtgtcctcctactccaccacagtgcaccgcatcgccaagcccttcaaccccatgctgggggagaccttcgagctggaccgcctcgacgacatgggcctgcgctccctctgtgagcaggtgagccaccaccccccctcagctgcgcactacgtgttctccaagcatggctggagcctctggcaggagatcaccatctccagcaagttccggggaaaatacatctccatcatgccgctaggtgccatccacttagaattccaggccagtgggaatcactacgtgtggaggaagagcacctcaactgttcacaacatcatcgtgggcaagctctggatcgaccagtcaggggacatcgagattgtgaaccataagaccaatgaccggtgccagctgaagttcctgccctacagctacttctccaaagaggcagcccggaagggagaacgcggagaacatgtactacttctcagagctggccctgaccctcaacgagcacgaggagggcgtagcgccaaccgacagccgcctgcggcccgaccagcggctgatggagaagggccgttgggacgaggccaataccgagaagcagcggctggaggagaagcagcgcctgtcgcggcgccggcggctggaggcctgcgggccgggcagcagctgcagctcggaggaagagaaggaggcggatgcctacacgccactgtggtttgagaagaggctggatccgctgaccggggagatggcctgtgtgtacaagggcggctactgggaggccaaggagaagcaagactggcatatgtgccccaacatcttctgagcgccacccttgcaacaaatacaggcgcctgcacagcctggcccacctgttcattaatgcactcaatttagtactgaatggtctttctcccagcccattcccagcccttcctatttcctttcctattttttttttctccccacactttcttgggactcccaccttggaaggaggaagggctgacctgggttctctccagcccccaggtgcgccgggtcacccgtgccccttcattatggacctgggccctaccggaacccctgccccagttaccacaactcaggccggctggcccgggccatgggctgcgcaaatcaccagcccccaacccagggaggaactggcccctcctagggagcctcttcgacttttttagaaaaatgatctccatttctttccagccatgatgtttagtaaatatttttagtaccgcacttagcagacagctttccaagtgtgctttcttgccacaaaagtgtcctggcaagagccccttatttttaagacatcaggaagccagaccgctttgagttgggagaattttgtagctcaacatatcaagtcctcgatggtatctgagctgcccacacccccacctgccaaggccccacagagcccaaaacagaagggggctgccccagcccagcagagcacagagtttctggagctcccatccacagatgcaggagggggtactgatggtaacccccatgtggatttgagggcagcagtccctggcctcaccctagccagcctgggtggctccctagccccaagaggccaggaagggctggaaggcagggcctgcaggtgctccccgccctgagacccaggccccaaatcagcaataatgaacaaacccttggcccagcctgggctggtgacctgggcaccagagaccttgcatccctcctcatcctaggaggcccctaggggtgccccatctcagtgtcccctgaactctttatttgcctaatttatatatatatatatgagatatataaatatatataaaatagctattttgcttaaatttctacagtatgtaaaagtgaaaaaatgatgaagacgggtgcacctgtctgagtttggccctcatgtgagctgtgcccttccctctcctcatgcccccttccagcggcttctgccaaccatggggggctggaccaccatggccactgacccagcccctcagaatcccacactccaatcctttccatttcagtttagtcctaaaagttcatcacagggtctttctttctactccaggactggttttgtttttatatatataaaaaaaaaaa

SEQ ID NO: 163119 - DNA, 2747 bp, Homo sapiens
  Payload ID: 12146
  Gene Symbol: OSBP2
  Gene Name: oxysterol binding protein 2
  Uniprot ID: Q969R2
  ENST ID: ENST00000438716
  CDS Start-End: 280-2532
catggtgaaaccccgtttctactaaaaatacaaaatttagctgggcatggtgcgggccgtggaattccagctactagggaggccaaggcaggagaatcgcttgaacctgggaagcggaggctgcagtgaaccaagatcacgccactgcattccagcctgggctaccgagtgagactcagtctcaaaaaggaaaaaaaaaaaaagcggaaaaaaaaattcgctgatgttttaaccattctggggtcacagcctcctttgttatggacctactctggaaaaatgcacagacagagaacccgaacgatgtcgtcactggcagcgaagcgccttggcatgaaccgtaggccagctggctcaggaggtggaggcggtgaggcggccacttggggccaccgcttctggcggccgcaggagcgacccacagacagaaatcagggtgaaatggcccacacgtgccgtggaaccatcaacctgtccaccgcgcacattgacacggaggactcttgtggtatcttgctgaccagtggggccaggagctaccacctcaaggccagctcagaggtggaccggcagcagtggatcaccgccctggagctggccaaggccaaggctgtccgcgtgatgaacactcattcagatgactctggggacgacgacgaggctaccaccccagccgacaagagcgagctgcaccacaccctgaagaatctttccctgaagttagatgacctcagcacgtgcaatgacctcatcgccaagcacggcgctgcactccagcgctccctgacagagctggacggcctcaagatcccatctgagagtggggagaagctgaaggtggtgaatgagcgggccaccctcttccgcatcacatccaatgctatgatcaacgcctgcagggacttcttggaactagcagagatacacagtcggaaatggcagcgggcactgcagtatgagcaggagcagcgcgtgcacttggaggaaaccattgagcagctggcgaagcagcacaacagcctcgagcgggccttccacagtgcccctggccggccggccaacccctccaagagcttcattgagggaagcctcttgactcccaaaggagaggacagtgaggaagatgaagataccgagtactttgatgccatggaagactccacatccttcatcaccgtgatcaccgaggccaaggaagacagaaaagctgaaggtagcaccgggacaagttccgtggactggagctcagcagacaatgtactagatggtgcctcgctcgtgcccaagggttcatccaaagtcaagaggcgagtccgcattcccaacaagcccaactacagccttaacctctggagcatcatgaagaactgcatcggccgggagctctccaggatccccatgccggtgaacttcaatgagcccctgtccatgctccagcggctgacagaggacctggagtaccaccacctgctggacaaggcagtgcactgcaccagctcagtggagcagatgtgcctggtggccgccttctctgtgtcctcctactccaccacagtgcaccgcatcgccaagcccttcaaccccatgctgggggagaccttcgagctggaccgcctcgacgacatgggcctgcgctccctctgtgagcaggtgagccaccaccccccctcagctgcgcactacgtgttctccaagcatggctggagcctctggcaggagatcaccatctccagcaagttccggggaaaatacatctccatcatgccgctaggtgccatccacttagaattccaggccagtgggaatcactacgtgtggaggaagagcacctcaactgttcacaacatcatcgtgggcaagctctggatcgaccagtcaggggacatcgagattgtgaaccataagaccaatgaccggtgccagctgaagttcctgccctacagctacttctccaaagaggcagcccggaaggtgacaggagtggtgagtgacagccagggcaaggcccattacgtgctgtccggctcgtgggatgaacaaatggagtgctccaaggtcatgcatagcagtcccagcagccccagctctgacgggaagcagaagacagtgtaccagaccctgtcagccaagctgctgtggaagaagtacccgctgccggagaacgcggagaacatgtactacttctcagagctggccctgaccctcaacgagcacgaggagggcgtagcgccaaccgacagccgcctgcggcccgaccagcggctgatggagaagggccgttgggacgaggccaataccgagaagcagcggctggaggagaagcagcgcctgtcgcggcgccggcggctggaggcctgcgggccgggcagcagctgcagctcggaggaagagaaggaggcggatgcctacacgccactgtggtttgagaagaggctggatccgctgaccggggagatggcctgtgtgtacaagggcggctactgggaggccaaggagaagcaagactggcatatgtgccccaacatcttctgagcgccacccttgcaacaaatacaggcgcctgcacagcctggcccacctgttcattaatgcactcaatttagtactgaatggtctttctcccagcccattcccagcccttcctatttcctttcctattttttttttctccccacactttcttgggactcccaccttggaaggaggaagggctgacctgggttctctccagcccccaggtgcgccgg

SEQ ID NO: 163120 - DNA, 559 bp, Homo sapiens
  Payload ID: 12146
  Gene Symbol: OSBP2
  Gene Name: oxysterol binding protein 2
  ENST ID: ENST00000445781
  CDS Start-End: 485-559
agagcaactagagcaggcagtagagtggggtgggcggggatgaggagggggttgggtggctggtggccctagaggctggccctaaagaatacctggacagcctgccaccctattgctccaaaatgaaaatcctctaacagggtcaactggtggcagggaacaaaaccccgctgagactggctgaaacacaagtggggcctgtgctcagggtgcaggaagtggagcatccaaggggagagatgactctggggacgacgacgaggctaccaccccagccgacaagagcgagctgcaccacaccctgaagaatctttccctgaagttagatgacctcagcacgtgcaatgacctcatcgccaagcacggcgctgcactccagcgctccctgacagagctggacggcctcaagatcccatctgagagtggggagaagctgaaggtggtgaatgagcgggccaccctcttccgcatcacatccaatgctatgatcaacgcctgcagggacttcttggaactagcagagatacacagtcggaaatggcagcgggcactgcagtat

SEQ ID NO: 163121 - DNA, 3050 bp, Homo sapiens
  Payload ID: 12146
  Gene Symbol: OSBP2
  Gene Name: oxysterol binding protein 2
  ENST ID: ENST00000431368
  CDS Start-End: 1-1766
agcattctgagaacagcagggccacgccaggcgcctgcctctccccacagcacagccaggatggggcctggagaaggccggcagcagcagaggagaccctgggagtcagggatggacaccaggcctgcagggacttcttggaactagcagagatacacagtcggaaatggcagcgggcactgcagtatgagcaggagcagcgcgtgcacttggaggaaaccattgagcagctggcgaagcagcacaacagcctcgagcgggccttccacagtgcccctggccggccggccaacccctccaagagcttcattgagggaagcctcttgactcccaaaggagaggacagtgaggaagatgaagataccgagtactttgatgccatggaagactccacatccttcatcaccgtgatcaccgaggccaaggaagacagcagaaaagctgaaggtagcaccgggacaagttccgtggactggagctcagcagacaatgtactagatggtgcctcgctcgtgcccaagggttcatccaaagtcaagaggcgagtccgcattcccaacaagcccaactacagccttaacctctggagcatcatgaagaactgcatcggccgggagctctccaggatccccatgccggtgaacttcaatgagcccctgtccatgctccagcggctgacagaggacctggagtaccaccacctgctggacaaggcagtgcactgcaccagctcagtggagcagatgtgcctggtggccgccttctctgtgtcctcctactccaccacagtgcaccgcatcgccaagcccttcaaccccatgctgggggagaccttcgagctggaccgcctcgacgacatgggcctgcgctccctctgtgagcaggtgagccaccaccccccctcagctgcgcactacgtgttctccaagcatggctggagcctctggcaggagatcaccatctccagcaagttccggggaaaatacatctccatcatgccgctaggtgccatccacttagaattccaggccagtgggaatcactacgtgtggaggaagagcacctcaactgttcacaacatcatcgtgggcaagctctggatcgaccagtcaggggacatcgagattgtgaaccataagaccaatgaccggtgccagctgaagttcctgccctacagctacttctccaaagaggcagcccggaaggtgacaggagtggtgagtgacagccagggcaaggcccattacgtgctgtccggctcgtgggatgaacaaatggagtgctccaaggtcatgcatagcagtcccagcagccccagctctgacgggaagcagaagacagtgtaccagaccctgtcagccaagctgctgtggaagaagtacccgctgccggagaacgcggagaacatgtactacttctcagagctggccctgaccctcaacgagcacgaggagggcgtagcgccaaccgacagccgcctgcggcccgaccagcggctgatggagaagggccgttgggacgaggccaataccgagaagcagcggctggaggagaagcagcgcctgtcgcggcgccggcggctggaggcctgcgggccgggcagcagctgcagctcggaggaagagaaggaggcggatgcctacacgccactgtggtttgagaagaggctggatccgctgaccggggagatggcctgtgtgtacaagggcggctactgggaggccaaggagaagcaagactggcatatgtgccccaacatcttctgagcgccacccttgcaacaaatacaggcgcctgcacagcctggcccacctgttcattaatgcactcaatttagtactgaatggtctttctcccagcccattcccagcccttcctatttcctttcctattttttttttctccccacactttcttgggactcccaccttggaaggaggaagggctgacctgggttctctccagcccccaggtgcgccgggtcacccgtgccccttcattatggacctgggccctaccggaacccctgccccagttaccacaactcaggccggctggcccgggccatgggctgcgcaaatcaccagcccccaacccagggaggaactggcccctcctagggagcctcttcgacttttttagaaaaatgatctccatttctttccagccatgatgtttagtaaatatttttagtaccgcacttagcagacagctttccaagtgtgctttcttgccacaaaagtgtcctggcaagagccccttatttttaagacatcaggaagccagaccgctttgagttgggagaattttgtagctcaacatatcaagtcctcgatggtatctgagctgcccacacccccacctgccaaggccccacagagcccaaaacagaagggggctgccccagcccagcagagcacagagtttctggagctcccatccacagatgcaggagggggtactgatggtaacccccatgtggatttgagggcagcagtccctggcctcaccctagccagcctgggtggctccctagccccaagaggccaggaagggctggaaggcagggcctgcaggtgctccccgccctgagacccaggccccaaatcagcaataatgaacaaacccttggcccagcctgggctggtgacctgggcaccagagaccttgcatccctcctcatcctaggaggcccctaggggtgccccatctcagtgtcccctgaactctttatttgcctaatttatatatatatatatgagatatataaatatatataaaatagctattttgcttaaatttctacagtatgtaaaagtgaaaaaatgatgaagacgggtgcacctgtctgagtttggccctcatgtgagctgtgcccttccctctcctcatgcccccttccagcggcttctgccaaccatggggggctggaccaccatggccactgacccagcccctcagaatcccacactccaatcctttccatttcagtttagtcctaaaagttcatcacagggtctttctttctactccaggactggttttgtttt

SEQ ID NO: 163122 - DNA, 3248 bp, Homo sapiens
  Payload ID: 12146
  Gene Symbol: OSBP2
  Gene Name: oxysterol binding protein 2
  Uniprot ID: Q969R2
  ENST ID: ENST00000535268
  CDS Start-End: 381-1763
agcattctgagaacagcagggccacgccaggcgcctgcctctccccacagcacagccaggatggggcctggagaaggccggcagcagcagaggagaccctgggagtcagggatggacaccaggcctgcagggacttcttggaactagcagagatacacagtcggaaatggcagcgggcactgcagtatgagcaggagcagcgcgtgcacttggaggaaaccattgagcagctggcgaagcagcacaacagcctcgagcgggccttccacagtgcccctggccggccggccaacccctccaagagcttcattgagggaagcctcttgactcccaaaggagaggacagtgaggaagatgaagataccgagtactttgatgccatggaagactccacatccttcatcaccgtgatcaccgaggccaaggaagacagaaaagctgaaggtagcaccgggacaagttccgtggactggagctcagcagacaatgtactagatggtgcctcgctcgtgcccaagggttcatccaaagtcaagaggcgagtccgcattcccaacaagcccaactacagccttaacctctggagcatcatgaagaactgcatcggccgggagctctccaggatccccatgccggtgaacttcaatgagcccctgtccatgctccagcggctgacagaggacctggagtaccaccacctgctggacaaggcagtgcactgcaccagctcagtggagcagatgtgcctggtggccgccttctctgtgtcctcctactccaccacagtgcaccgcatcgccaagcccttcaaccccatgctgggggagaccttcgagctggaccgcctcgacgacatgggcctgcgctccctctgtgagcaggtgagccaccaccccccctcagctgcgcactacgtgttctccaagcatggctggagcctctggcaggagatcaccatctccagcaagttccggggaaaatacatctccatcatgccgctaggtgccatccacttagaattccaggccagtgggaatcactacgtgtggaggaagagcacctcaactgttcacaacatcatcgtgggcaagctctggatcgaccagtcaggggacatcgagattgtgaaccataagaccaatgaccggtgccagctgaagttcctgccctacagctacttctccaaagaggcagcccggaaggtgacaggagtggtgagtgacagccagggcaaggcccattacgtgctgtccggctcgtgggatgaacaaatggagtgctccaaggtcatgcatagcagtcccagcagccccagctctgacgggaagcagaagacagtgtaccagaccctgtcagccaagctgctgtggaagaagtacccgctgccggagaacgcggagaacatgtactacttctcagagctggccctgaccctcaacgagcacgaggagggcgtagcgccaaccgacagccgcctgcggcccgaccagcggctgatggagaagggccgttgggacgaggccaataccgagaagcagcggctggaggagaagcagcgcctgtcgcggcgccggcggctggaggcctgcgggccgggcagcagctgcagctcggaggaagagaaggaggcggatgcctacacgccactgtggtttgagaagaggctggatccgctgaccggggagatggcctgtgtgtacaagggcggctactgggaggccaaggagaagcaagactggcatatgtgccccaacatcttctgagcgccacccttgcaacaaatacaggcgcctgcacagcctggcccacctgttcattaatgcactcaatttagtactgaatggtctttctcccagcccattcccagcccttcctatttcctttcctattttttttttctccccacactttcttgggactcccaccttggaaggaggaagggctgacctgggttctctccagcccccaggtgcgccgggtcacccgtgccccttcattatggacctgggccctaccggaacccctgccccagttaccacaactcaggccggctggcccgggccatgggctgcgcaaatcaccagcccccaacccagggaggaactggcccctcctagggagcctcttcgacttttttagaaaaatgatctccatttctttccagccatgatgtttagtaaatatttttagtaccgcacttagcagacagctttccaagtgtgctttcttgccacaaaagtgtcctggcaagagccccttatttttaagacatcaggaagccagaccgctttgagttgggagaattttgtagctcaacatatcaagtcctcgatggtatctgagctgcccacacccccacctgccaaggccccacagagcccaaaacagaagggggctgccccagcccagcagagcacagagtttctggagctcccatccacagatgcaggagggggtactgatggtaacccccatgtggatttgagggcagcagtccctggcctcaccctagccagcctgggtggctccctagccccaagaggccaggaagggctggaaggcagggcctgcaggtgctccccgccctgagacccaggccccaaatcagcaataatgaacaaacccttggcccagcctgggctggtgacctgggcaccagagaccttgcatccctcctcatcctaggaggcccctaggggtgccccatctcagtgtcccctgaactctttatttgcctaatttatatatatatatatgagatatataaatatatataaaatagctattttgcttaaatttctacagtatgtaaaagtgaaaaaatgatgaagacgggtgcacctgtctgagtttggccctcatgtgagctgtgcccttccctctcctcatgcccccttccagcggcttctgccaaccatggggggctggaccaccatggccactgacccagcccctcagaatcccacactccaatcctttccatttcagtttagtcctaaaagttcatcacagggtctttctttctactccaggactggttttgtttttatatatataaaaaaaaaaagtgaaaacaccaatgtgtgaaatgccttacaatgcccactggagaggcggggcggggtggggcaggatggccccactggggctcctacagagctgtggaatgtacctctccccaacactgttttgttagcgagcaccttttgaccagtaataaaaaaccttggctttggagttttccactg

SEQ ID NO: 163123 - DNA, 6600 bp, Homo sapiens
  Payload ID: 12147
  Gene Symbol: OSBPL10
  Gene Name: oxysterol binding protein-like 10
  Uniprot ID: Q9BXB5
  ENST ID: ENST00000396556
  CDS Start-End: 124-2418
catttcccggggatttggagcaggcacgcgcggcccgggcgtccggagctgtagcagcagcagcagccgccgtgccggggccgccaccgcggcgggcacccgcgtcccgggcgcccacggaccatggagagggcagtccagggcacagacggcggcgggggtagcaacagcagcagccgcagcagcagccgtgctacctcggcgggctcctcgccctcctgctctctggcgggccggggggtctccagccggtcggcggcggccgggctcggcggcgggggaagccgcagcagcccgggctctgtggccgctagcccgtccgggggaggcggccgcaggagggagccggcgctcgagggcgtgctcagcaaatacaccaacctcctccagggctggcagaacaggtacttcgtactggatttcgaggctggcatcctgcagtattttgtgaatgagcaaagcaaacaccagaagcctcgaggagtcctgtctttatctggagccatagtgtccctgagcgatgaagctccccacatgctggtggtgtactctgctaatggagagatgtttaaactgagagctgctgatgcaaaagagaaacaattctgggtgactcagcttcgagcttgtgccaaataccacatggaaatgaattctaagagtgctccaagctcccgaagccgaagtctcactttgctcccacatggaacacccaattctgcgtctccctgtagccagagacacctcagtgtgggggcccccggtgttgtcacaatcacgcatcacaagtcgcctgcagccgcccgaagagccaagagtcagtattccggccagcttcacgaagtcagagagatgatgaaccaggtggaagggcagcagaagaaccttgtgcacgccattgagtccctgccagggtccggccccctcactgccttggaccaggacctgctgctcctgaaagctacctctgctgccaccctcagctgccttggggagtgcctcaacttgttacagcagagtgtgcaccaggcgggccagcccagccagaagccaggagcctcggaaaacatcctgggatggcacgggtccaagtcacattccacagagcagctgaaaaatgggacacttggctctttgccatcagccagtgccaacataacctgggcaattttaccaaactctgctgaagacgaacaaacctcacagccagagccagagccaaactcaggctctgaattggttttgtctgaagatgaaaaaagtgacaatgaagataaggaagagacggaattgggcgtcatggaggatcagcgtagtataattcttcatctcatttcacaactcaaacttggaatggatttgaccaaggtggtgcttcccacctttatcctggagaagcgatctttgctggagatgtatgcagatttcatggcgcacccagacctactgctggccatcaccgctggggccacaccagaggagagagtcatttgcttcgttgagtattatctcacagcctttcacgagggccgcaagggcgctttagccaagaagccctacaaccccatcataggcgagacatttcactgctcctgggaagttcccaaggacagggtcaagcctaagaggactgcttcccgctctcctgccagctgtcacgaacacccaatggccgatgacccttccaaaagctacaaactaaggtttgtggctgagcaagtgtcccatcacccacccatctcctgcttctactgtgagtgcgaggagaagagactgtgcgtcaacactcatgtatggaccaaaagcaagttcatgggcatgtccgtgggggtctctatgataggggaaggtgtgttgaggctcctggaacacggggaggagtacgtattcaccctgcctagtgcctacgcccggtccattctcaccatcccgtgggtggagctcggaggaaaagtcagcatcaactgtgccaagactgggtactcagcgacagtgatattccacacgaagcctttctatggagggaaagtccacagggttaccgcagaagtgaagcacaacccaaccaacaccattgtttgtaaagcccatggggaatggaatggtactttagagttcacctacaacaatggagaaaccaaagtcatcgacacaaccacactgccagtgtatcccaagaagatcagacctcttgagaagcagggacccatggagtccaggaacctctggcgggaggtgacccgatacctgcggctgggggacattgacgcagccaccgagcagaagcggcacctggaggagaagcaacgggtggaggaacggaagcgcgagaacctccgcacaccatggaagcccaaatattttatccaggagggcgatggctgggtatacttcaatcccctctggaaagcacactgatggggtggaggtgcagagctttccagtatagccctgtttttgtaggaatattaaagtagtagagtatcagggttttgttggcattcactgagaccttgtattagcatccaagaaatgatgagagagagagaaattatatactatgaaaagtgcacccccacactctgctagaggaatgaatttattcaagagccattcggggcacgtgtgtgtacacaccgtatacgttcacacacatgcactatgtaaacatctgagtatgattacacatttaaatactgcactcaccaaggttaaagtgggtaatcataagctcctttttatcaatgaagtttgaagtttttctatttttcactttgccaaaaatgttttacactcacaaagatattctcacttagtcaactcctgtcaaaatgaaggtgaactggcatggcccgatcactgtccataagggagaaagtggctcattcctggtagaagtatgggtggttatcatttcaaaattattgtgattctcacctccctccccacctcagtgttttgtctgtccgcgcccaagaaagataagcaagtatttcctgctggatgggggttggcaggaagctgttaaagatttatgccagagccttgcaggatggagcacctctgggacaactaagagccaaggcccaccaaggagttttccacccgtctctcatggtcacagcgctagtcattcatttttgagaagttgcttcttttacatcagaaaaccagtcaatcatatggagacttcttttgtgatgaaaaagggctttagaagttaaatacatgcatgcacatgaaaacatgcacaaccacagcctcaatcttgtatttagtttggggaaagagaagagaatttcctgtggattattttttcctcaagtgcacctctctggttaacccaaactctgcaagaaagcactgtgactaaaacatacataacgcctgcataaatattccatggtttcagttaaatttcagtttttagcctttacacatgaggtcaaaggagtgacgaaaatacaaagcaaggaaaaaatgaaatatctggtttttgctgaatgcttaatttattttttactgtgccactccaatatttatcaaatccaaatagcatgaatgcttctctgtagtaatactaattttgtgccttttgtctgctttcttaagaccagttgttcacactttgtagatattagacaaatatatttcgattgaatacatatctgtgtctgtgttttattttcagggattcaacagttctattaaattggtggctctaagtgagctcaacttttcctggttaaatatttctagttattgatatgaagagcaatcatatctatatggaaaaagtatttaacacatttaaaaatgtaccagataaacatttatgaatattttctggtaagtccataagaacatttaactcctacccagtgagtgttgtttcacgagaagagtcactgccagaagtcacaatagaagcctacttaggtccacagtctttaaagcatctgggtgaatcaagtatctggaaccatcttatttctgacagagaaagtggaacaaatgctattttgagaaaaagaagaaaactcaactcaatgagactgaaaagtaatcactgtgttgttggattttccagtctgactacaaagcataaaccatctgggaagtaaaacatggagagggctcacttttcttttgaggccaggggtacatttaaaattgtgaaatgttatgtgtcaggagatttacataaaacatatgtactccaggaataattataaatacccttgtagccactgcttaagcaaagaaacctgtttaccagtaccttaaaagccactattgtgcccctatacaattgtatccctctccatgccttcctggaataaccatccccttatgggttttttgttgttcttttagactatacacactatgtgtgtatttctaaacagtgtgattggttttacccatttttgtaaaaattgaatcataccctagtttgcctatttgagccaatattttctttctagttcaatccttgttgctctatttgttcattttcttgctgagttcatattatgttttattgtggtaaaatatatgtaacaaaatctaccattttaactattttttttttcccagatggagtctcactctgtcacccaggctggagtgcaatggcgcgcaatctctgctcactgcaacctctgccttccgggttcaagcgattctcctgcttcagcctcccgagtagctgggattacaggcgtgtgccaccatgcccagctaatttttgtatttttagtagagatggggtttcaccatgttggccaggctggtctcaaactcctgacctcaggtgattcacccacctgagcctcccaaagtgctgggattacaggtgtgagccactgtgcccagcctggcattttaaaaatatactgagaagtggaattgctatatcatatgaaaattctggtttaagttttaaggaattgccacacagtttctcacaagagctggctgccacattttgcaatgccactagcaatgcacaagggatccaatttctccacatcctcaccaatacctattattttgtttttacttttgttgtttctttaaccccatcctaatggctatgaagtgccatctcaatgtggttttgatttatatttccctaatgattagtgatgttgagcatgtgtttttgtggttttggccatttgtaaatctttggagaaatgtttattcaaatccttttgcccattttaaaattaggttctttttgttgagttttaggagtcctttatgggtattaatcctttctggatattaatcctttatcagatatgatgtgcaaatattttcttctgactctttggttgcctcttcactgttaatggtgtcctctgatgtacaaaagtatttaattttgataatgtctaatttatttttctttgtacttgtgcttttgatgtcatatccaagaaatcattgacaaatacaatgctgtgaagtttttgtcctatgatttcttctaagagttttatagttttaggtcttactggggggtagggggtactttgatccattttgagttggtttttatatatggtgttagataagggtccaacttcattcttttgcatgtggatatccagtttccccaacaccatttgttgaaaagactctgcattccccattgagtgatcttggtaccttgttgaaaatcactggctatatacacgaatgtttatttatggcctattcttttccaatggtcgatgtcagtctttatgccagtaccacactcttttagttactgtagctttgtagcaagttacaagattaggaagtatgagacctccaacttttttattcttttttcaatattgtttcgtctgtacagggtcatttaagattccatgtgaattttaggatgaaattttctatttttgcaaaaaactctgggattttgatagggattgcattgaatctgtagatccctttgagtagcattgtcttaacagtaagtcttccaatctgttaaccagaatatctttccatttatttatctgtcttaatttctttcagcatgttttgtagttttcactgggcaagtcttcctcagttaagtttaattcttaagtattttactctttttggtactactgtaagtagatctttctcagtttcctttttggattgttcaatgttggcatataaaagtgtaagtgccaggcacagtgtcacatgcctatagttccagctactcaggaggctgagacaggaggattgcttgggcccaggagtttgagatttcagcatgctatgattgctcctgtgaatagccactgcactccagcctgggcaacataacaagacctcatttcgtaaaaaacacataatactgatttttgtgcattggttttgtatcctttgctgaatttgtttattctaacagttttttggggggtgtgtgggatctaggattttctagatacaatcatgtcatttgctaacagattttacttcttccaaatttggatgtcttttatttcttgttcttgcctaattgctgtacctagaacttcaaatactgtgttgaaggaaggaggcaaaaaaaaaaaaaaaaaaaaa

SEQ ID NO: 163124 - DNA, 519 bp, Homo sapiens
  Payload ID: 12147
  Gene Symbol: OSBPL10
  Gene Name: oxysterol binding protein-like 10
  ENST ID: ENST00000428241
  CDS Start-End: 1-519
aagtcgcctgcagccgcccgaagagccaagagtcagtattccggccagcttcacgaagtcagagaggtgaaggcttgtatgctcaacaacatgtgtgaggtcacacagagagtcattggcatcgtcaagactcaaacccagttgatctttctgatgatgaaccaggtggaagggcagcagaagaaccttgtgcacgccattgagtccctgccagggtccggccccctcactgccttggaccaggacctgctgctcctgaaagctacctctgctgccaccctcagctgccttggggagtgcctcaacttgttacagcagagtgtgcaccaggcgggccagcccagccagaagccaggagcctcggaaaacatcctgggatggcacgggtccaagtcacattccacagagcagctgaaaaatgggacacttggctctttgccatcagccagtgccaacataacctgggcaattttaccaaactctgctgaagacgaacaaacctcacagccagagccagag

SEQ ID NO: 163125 - DNA, 2624 bp, Homo sapiens
  Payload ID: 12147
  Gene Symbol: OSBPL10
  Gene Name: oxysterol binding protein-like 10
  Uniprot ID: Q9BXB5
  ENST ID: ENST00000438237
  CDS Start-End: 122-2224
tttcccggggatttggagcaggcacgcgcggcccgggcgtccggagctgtagcagcagcagcagccgccgtgccggggccgccaccgcggcgggcacccgcgtcccgggcgcccacggaccatggagagggcagtccagggcacagacggcggcgggggtagcaacagcagcagccgcagcagcagccgtgctacctcggcgggctcctcgccctcctgctctctggcgggccggggggtctccagccggtcggcggcggccgggctcggcggcgggggaagccgcagcagcccgggctctgtggccgctagcccgtccgggggaggcggccgcaggagggagccggcgctcgagggcgtgctcagcaaatacaccaacctcctccagggctggcagaacaggtacttcgtactggatttcgaggctggcatcctgcagtattttgtgaatgagcaaagcaaacaccagaagcctcgaggagtcctgtctttatctggagccatagtgtccctgagcgatgaagctccccacatgctggtggtgtactctgctaatggagagatgtttaaactgagagctgctgatgcaaaagagaaacaattctgggtgactcagcttcgagcttgtgccaaataccacatggaaatgaattctaagatgatgaaccaggtggaagggcagcagaagaaccttgtgcacgccattgagtccctgccagggtccggccccctcactgccttggaccaggacctgctgctcctgaaagctacctctgctgccaccctcagctgccttggggagtgcctcaacttgttacagcagagtgtgcaccaggcgggccagcccagccagaagccaggagcctcggaaaacatcctgggatggcacgggtccaagtcacattccacagagcagctgaaaaatgggacacttggctctttgccatcagccagtgccaacataacctgggcaattttaccaaactctgctgaagacgaacaaacctcacagccagagccagagccaaactcaggctctgaattggttttgtctgaagatgaaaaaagtgacaatgaagataaggaagagacggaattgggcgtcatggaggatcagcgtagtataattcttcatctcatttcacaactcaaacttggaatggatttgaccaaggtggtgcttcccacctttatcctggagaagcgatctttgctggagatgtatgcagatttcatggcgcacccagacctactgctggccatcaccgctggggccacaccagaggagagagtcatttgcttcgttgagtattatctcacagcctttcacgagggccgcaagggcgctttagccaagaagccctacaaccccatcataggcgagacatttcactgctcctgggaagttcccaaggacagggtcaagcctaagaggactgcttcccgctctcctgccagctgtcacgaacacccaatggccgatgacccttccaaaagctacaaactaaggtttgtggctgagcaagtgtcccatcacccacccatctcctgcttctactgtgagtgcgaggagaagagactgtgcgtcaacactcatgtatggaccaaaagcaagttcatgggcatgtccgtgggggtctctatgataggggaaggtgtgttgaggctcctggaacacggggaggagtacgtattcaccctgcctagtgcctacgcccggtccattctcaccatcccgtgggtggagctcggaggaaaagtcagcatcaactgtgccaagactgggtactcagcgacagtgatattccacacgaagcctttctatggagggaaagtccacagggttaccgcagaagtgaagcacaacccaaccaacaccattgtttgtaaagcccatggggaatggaatggtactttagagttcacctacaacaatggagaaaccaaagtcatcgacacaaccacactgccagtgtatcccaagaagatcagacctcttgagaagcagggacccatggagtccaggaacctctggcgggaggtgacccgatacctgcggctgggggacattgacgcagccaccgagcagaagcggcacctggaggagaagcaacgggtggaggaacggaagcgcgagaacctccgcacaccatggaagcccaaatattttatccaggagggcgatggctgggtatacttcaatcccctctggaaagcacactgatggggtggaggtgcagagctttccagtatagccctgtttttgtaggaatattaaagtagtagagtatcagggttttgttggcattcactgagaccttgtattagcatccaagaaatgatgagagagagagaaattatatactatgaaaagtgcacccccacactctgctagaggaatgaatttattcaagagccattcggggcacgtgtgtgtacacaccgtatacgttcacacacatgcactatgtaaacatctgagtatgattacacatttaaatactgcactcaccaaggttaaagtgggtaatcataagctcctttttatcaatgaagtttgaagtttttctatttttcactttgccaaaaatgttttacactcacaaagatattctcacttagtc

SEQ ID NO: 163126 - DNA, 7723 bp, Homo sapiens
  Payload ID: 12147
  Gene Symbol: OSBPL10
  Gene Name: oxysterol binding protein-like 10
  ENST ID: ENST00000429492
  CDS Start-End: 1-1616
gtcagtattccggccagcttcacgaagtcagagagatgatgaaccaggtggaagggcagcagaagaaccttgtgcacgccattgagtccctgccagggtccggccccctcactgccttggaccaggacctgctgctcctgaaagctacctctgctgccaccctcagctgccttggggagtgcctcaacttgttacagcagagtgtgcaccaggcgggccagcccagccagaagccaggagcctcggaaaacatcctgggatggcacgggtccaagtcacattccacagagcagctgaaaaatgggacacttggctctttgccatcagccagtgccaacataacctgggcaattttaccaaactctgctgaagacgaacaaacctcacagccagagccagagccaaactcaggctctgaattggttttgtctgaagatgaaaaaagtgacaatgaagataaggaagagacggaattgggcgtcatggaggatcagcgtagtataattcttcatctcatttcacaactcaaacttggaatggatttgaccaaggtggtgcttcccacctttatcctggagaagcgatctttgctggagatgtatgcagatttcatggcgcacccagacctactgctggccatcaccgctggggccacaccagaggagagagtcatttgcttcgttgagtattatctcacagcctttcacgagggccgcaagggcgctttagccaagaagccctacaaccccatcataggcgagacatttcactgctcctgggaagttcccaaggacagggtcaagcctaagaggactgcttcccgctctcctgccagctgtcacgaacacccaatggccgatgacccttccaaaagctacaaactaaggtttgtggctgagcaagtgtcccatcacccacccatctcctgcttctactgtgagtgcgaggagaagagactgtgcgtcaacactcatgtatggaccaaaagcaagttcatgggcatgtccgtgggggtctctatgataggggaaggtgtgttgaggctcctggaacacggggaggagtacgtattcaccctgcctagtgcctacgcccggtccattctcaccatcccgtgggtggagctcggaggaaaagtcagcatcaactgtgccaagactgggtactcagcgacagtgatattccacacgaagcctttctatggagggaaagtccacagggttaccgcagaagtgaagcacaacccaaccaacaccattgtttgtaaagcccatggggaatggaatggtactttagagttcacctacaacaatggagaaaccaaagtcatcgacacaaccacactgccagtgtatcccaagaagatcagacctcttgagaagcagggacccatggagtccaggaacctctggcgggaggtgacccgatacctgcggctgggggacattgacgcagccaccgagcagaagcggcacctggaggagaagcaacgggtggaggaacggaagcgcgagaacctccgcacaccatggaagcccaaatattttatccaggaggtaactctgccgcctgtcattggtcccttgcccaggagagaacttgtcctgagagggtagatgggtttttcttgctgagcccccaagactggataaataccaggcaggggaagggatggactagggcagctcggttctgactccagctttggacaaggcttcaggacaggttttctgccacaatattcatgaaaccttctggagggcagaactgagcaactgacacttcccctccagtatccctatgtcagaaaagcatgtcagcctgcctgtgagggatcgcgatgggactgcagactggatactgttctatttttaaaaagaaaatcatcatggcacctgttagatcatctttagtaacaaattagttgaggagtgcctcacaggccatctcaacacctgggtgggctggagccctcactgatgaagaattgcctttcagagctttgcctcctgtgggccacaagggctagtcatgcaggggaaggccagcctgagtcctgtgcctaaaatgctgttgctgtcacctgcaaatgtgacactagaagctagaaataatatctgggcaagtgggcagggcactgtgtgcccagctgaagcccttatgctcttgaagttgtggagggattgggaagcactctgagaacagaattggaaattatgaaaatgtaggagccacacgtcttaaagcaggcccacaggaacccagcaacatcaatgaagagcaggccggtgagggctggggcagatgccactcatcttccagtgataaaacagattgtctagttgttcatgaggagccagaaatctaaatttttatgagaaatctcatatttgcatggtcaaagatttaaaaaaatttaaataccagtaggcaatcaaaatgtatctgtgggctttccttagcccaggtgctggtaacccctgacttctgctacaaagagggattattctgtctatatacgaggctgagaagtgagttagggcaacatagtaggtaactggggtggattcatggttaagagcaggaagagcaggaagccaccactgttctccccagagtcaggctgtggactgaaggagatttcaaggttggattctggttcagacaggaaagctgcctggagaagactttgcctttatgggtcactgagtggggaccctgtgtgggagccctgcccaggtgaggtaaaaccttgaaagatccttctgtgaggttagctcccttttctcttgagggagctagtagcttgagagagctagtttgtctggcttctgtggaaggctgtgcattaaacagcaacaacaacaagaaaaaacatttacagttcttcctgagtttaagaaaagccagtatgcccataacagaagggctgggaacatgtaaggaataagagtcatctgaacaccagcacagttattcagtatagtgccttctagtcataactagatggtattaataccattttaattcttgcctttttctcacttgatatttgattgatggtgtttcttgtgtgtgctgatttgtttgtgactactgcctgctggagagagcctttgttgggtgttcccctgtgggctggaagtcactggtatgcacacccttgccttttctttcccctggccattcatctagctactctccttttctcttgtcccactgtcaaagtgcttcttttttttggccaagtaatcagtctcgatggaagccaaccaagctccccttttattttgctcatttcttggggtttcctcctgccatgccagggtaggaaggtcaaggtcatctagatctccaaagagcagctgggctgaggaggggtactgaggccagcagcctggcctgcgtgtgaggtattaagacacggcagacacacagagtggctgcggttatccttgcttccccttttccctgttgagaggtctccatgtaataatgcctcctttcttctcttgcagggcgatggctgggtatacttcaatcccctctggaaagcacactgatggggtggaggtgcagagctttccagtatagccctgtttttgtaggaatattaaagtagtagagtatcagggttttgttggcattcactgagaccttgtattagcatccaagaaatgatgagagagagagaaattatatactatgaaaagtgcacccccacactctgctagaggaatgaatttattcaagagccattcggggcacgtgtgtgtacacaccgtatacgttcacacacatgcactatgtaaacatctgagtatgattacacatttaaatactgcactcaccaaggttaaagtgggtaatcataagctcctttttatcaatgaagtttgaagtttttctatttttcactttgccaaaaatgttttacactcacaaagatattctcacttagtcaactcctgtcaaaatgaaggtgaactggcatggcccgatcactgtccataagggagaaagtggctcattcctggtagaagtatgggtggttatcatttcaaaattattgtgattctcacctccctccccacctcagtgttttgtctgtccgcgcccaagaaagataagcaagtatttcctgctggatgggggttggcaggaagctgttaaagatttatgccagagccttgcaggatggagcacctctgggacaactaagagccaaggcccaccaaggagttttccacccgtctctcatggtcacagcgctagtcattcatttttgagaagttgcttcttttacatcagaaaaccagtcaatcatatggagacttcttttgtgatgaaaaagggctttagaagttaaatacatgcatgcacatgaaaacatgcacaaccacagcctcaatcttgtatttagtttggggaaagagaagagaatttcctgtggattattttttcctcaagtgcacctctctggttaacccaaactctgcaagaaagcactgtgactaaaacatacataacgcctgcataaatattccatggtttcagttaaatttcagtttttagcctttacacatgaggtcaaaggagtgacgaaaatacaaagcaaggaaaaaatgaaatatctggtttttgctgaatgcttaatttattttttactgtgccactccaatatttatcaaatccaaatagcatgaatgcttctctgtagtaatactaattttgtgccttttgtctgctttcttaagaccagttgttcacactttgtagatattagacaaatatatttcgattgaatacatatctgtgtctgtgttttattttcagggattcaacagttctattaaattggtggctctaagtgagctcaacttttcctggttaaatatttctagttattgatatgaagagcaatcatatctatatggaaaaagtatttaacacatttaaaaatgtaccagataaacatttatgaatattttctggtaagtccataagaacatttaactcctacccagtgagtgttgtttcacgagaagagtcactgccagaagtcacaatagaagcctacttaggtccacagtctttaaagcatctgggtgaatcaagtatctggaaccatcttatttctgacagagaaagtggaacaaatgctattttgagaaaaagaagaaaactcaactcaatgagactgaaaagtaatcactgtgttgttggattttccagtctgactacaaagcataaaccatctgggaagtaaaacatggagagggctcacttttcttttgaggccaggggtacatttaaaattgtgaaatgttatgtgtcaggagatttacataaaacatatgtactccaggaataattataaatacccttgtagccactgcttaagcaaagaaacctgtttaccagtaccttaaaagccactattgtgcccctatacaattgtatccctctccatgccttcctggaataaccatccccttatgggttttttgttgttcttttagactatacacactatgtgtgtatttctaaacagtgtgattggttttacccatttttgtaaaaattgaatcataccctagtttgcctatttgagccaatattttctttctagttcaatccttgttgctctatttgttcattttcttgctgagttcatattatgttttattgtggtaaaatatatgtaacaaaatctaccattttaactattttttttttcccagatggagtctcactctgtcacccaggctggagtgcaatggcgcgcaatctctgctcactgcaacctctgccttccgggttcaagcgattctcctgcttcagcctcccgagtagctgggattacaggcgtgtgccaccatgcccagctaatttttgtatttttagtagagatggggtttcaccatgttggccaggctggtctcaaactcctgacctcaggtgattcacccacctgagcctcccaaagtgctgggattacaggtgtgagccactgtgcccagcctggcattttaaaaatatactgagaagtggaattgctatatcatatgaaaattctggtttaagttttaaggaattgccacacagtttctcacaagagctggctgccacattttgcaatgccactagcaatgcacaagggatccaatttctccacatcctcaccaatacctattattttgtttttacttttgttgtttctttaaccccatcctaatggctatgaagtgccatctcaatgtggttttgatttatatttccctaatgattagtgatgttgagcatgtgtttttgtggttttggccatttgtaaatctttggagaaatgtttattcaaatccttttgcccattttaaaattaggttctttttgttgagttttaggagtcctttatgggtattaatcctttctggatattaatcctttatcagatatgatgtgcaaatattttcttctgactctttggttgcctcttcactgttaatggtgtcctctgatgtacaaaagtatttaattttgataatgtctaatttatttttctttgtacttgtgcttttgatgtcatatccaagaaatcattgacaaatacaatgctgtgaagtttttgtcctatgatttcttctaagagttttatagttttaggtcttactggggggtagggggtactttgatccattttgagttggtttttatatatggtgttagataagggtccaacttcattcttttgcatgtggatatccagtttccccaacaccatttgttgaaaagactctgcattccccattgagtgatcttggtaccttgttgaaaatcactggctatatacacgaatgtttatttatggcctattcttttccaatggtcgatgtcagtctttatgccagtaccacactcttttagttactgtagctttgtagcaagttacaagattaggaagtatgagacctccaacttttttattcttttttcaatattgtttcgtctgtacagggtcatttaagattccatgtgaattttaggatgaaattttctatttttgcaaaaaactctgggattttgatagggattgcattgaatctgtagatccctttgagtagcattgtcttaacagtaagtcttccaatctgttaaccagaatatctttccatttatttatctgtcttaatttctttcagcatgttttgtagttttcactgggcaagtcttcctcagttaagtttaattcttaagtattttactctttttggtactactgtaagtagatctttctcagtttcctttttggattgttcaatgttggcatataaaagtgtaagtgccaggcacagtgtcacatgcctatagttccagctactcaggaggctgagacaggaggattgcttgggcccaggagtttgagatttcagcatgctatgattgctcctgtgaatagccactgcactccagcctgggcaacataacaagacctcatttcgtaaaaaacacataatactgatttttgtgcattggttttgtatcctttgctgaatttgtttattctaacagttttttggggggtgtgtgggatctaggattttctagatacaatcatgtcatttgctaacagattttacttcttccaaatttggatgtcttttatttcttgttcttgcctaattgctgtacctagaacttcaaatactgtgttgaaggaaggagg

SEQ ID NO: 163127 - DNA, 4191 bp, Homo sapiens
  Payload ID: 12148
  Gene Symbol: OSBPL11
  Gene Name: oxysterol binding protein-like 11
  Uniprot ID: Q9BXB4
  ENST ID: ENST00000296220
  CDS Start-End: 291-2534
cacttaagtcttctcgccggatgctttttcctccttgcttttgccggaaaggagagagatacatgtgaaggatatctgtcctcgttgcttcccctgccctctcaaaagtttaacttctgtgggaatgtgtatcttccttttctggaccatttgacagtcccgccccagccgccgtgtgatttagcaaccggtatcatattcagatcaaatcttaaaaaaaaaaagtcacctacagaactacagaattgttctctcccgctcaagaagggcaagtggactttggcgttaagatgcaggggggtgaaccagtgtccacaatgaaagtctcggagagcgaaggaaagctggagggccaggccacagcggtgaccccgaacaagaacagcagctgtggaggtggaatcagtagcagcagcagcagccgcggtggcagtgcaaaaggctggcagtacagtgatcacatggaaaatgtgtatggctatttaatgaagtataccaaccttgtcactgggtggcagtacaggttttttgttttaaacaatgaagctgggctgttggagtactttgtgaatgaacagtctagaaatcagaaacctagaggaactttgcagcttgcaggagctgtaatatcacccagtgatgaggattctcacaccttcactgtaaacgctgccagtggggaacaatataaactcagagctacagatgcaaaagagcgacagcactgggttagcagacttcagatatgtacacagcatcatactgaagctattggaaagaataatcctcctctgaagtcacggagcttctcacttgcatctagtagtaattctcctatatcgcagaggagaccaagtcaaaatgccatttctttttttaatgttggacattccaaactgcaatcactgagcaaaagaactaatttacctccagaccatcttgtggaagtcagagaaatgatgtctcatgctgaaggacaacaaagagacttaattagacgaattgaatgccttcctacttctggccatcttagttccttggaccaggatctcttaatgctcaaagctacttccatggcaactatgaactgcttaaatgactgctttcatattctccagttacagcatgcatcacatcagaagggctcattgccttcaggaacgacaatcgagtggttagaaccaaagatatctttatcaaaccactataaaaatggagctgaccagccctttgcaactgatcagagtaagccggtggcagtcccagaagagcagcctgttgcagaatctggactattagcgagggagcctgaagaaataaatgcagatgatgagatagaggatacatgtgaccacaaagaggatgacctgggagctgtagaagaacaacgtagtgtcatcctacatctcttgtcacagcttaagctgggcatggatttaacaagagtggtgcttcctacatttatcctagagaagcgttccttgctggaaatgtatgcagactttatgtctcatccagacctatttatagccatcactaatggagccacagctgaggacagaatgattcgctttgttgagtactaccttacctcatttcatgaaggccgtaagggagccattgctaaaaaaccatacaatcctatcattggagaaacatttcactgttcctggaagatgccaaaaagcgaggtagcatccagtgtttttagcagttcttccacccagggagtcacaaatcatgctcctttatcgggggagtctttgacccaggtgggatcagactgttacacagtcagatttgttgctgagcaggtttctcatcatcctccagtctcaggattttatgcagaatgtacagagaggaagatgtgtgtaaatgcgcatgtctggactaagagcaagttcttaggcatgtcaataggcgtgacaatggttggagaaggtatccttagtctgttggagcatggagaagagtacacattttctctaccctgtgcatatgctcggtcaattttgactgttccttgggtagaactgggtggcaaagtcagtgtcaactgtgcaaaaactggatattcagccagcatcacttttcataccaagccattttatggtggcaaactgcatcgggttacagctgaagtaaagcacaacatcaccaacactgtggtatgcagagtgcaaggggaatggaatagtgttcttgagttcacatatagcaatggagagacaaagtatgtggacttgactaaattggcagtgacgaagaaaagagtgagacctctggagaagcaggatccatttgaatccaggcgattgtggaaaaatgtgacagactcgctgagagaatctgaaattgataaggccacagagcataagcataccctggaagaacgtcagaggactgaagaaaggcatcgtactgaaacaggcacaccttggaaaaccaaatattttattaaagagggagatggctgggtttatcataaaccactttggaaaataattccaacaacacaaccagcagagtgacacatactatctaaaactcgaccaaatgaggttcttctctgtttaccctaaatcctcccagaatggagtcattgcactgagtgacctgcttcctgattgcgcagactgaaactagctaaacctgaatgtacctactagggcaccataatactgcagcaagaccaaagtggtaaagaaacacagtggaccttttaccaacctgttcatgtgatgtgagcaataccatcttaaaacttgttacctgaatcagtagatgaatcttttatccagttcttgctcctaaagttaagtttgaatcccctatttttgcacaggggcagcagatacacacaacaatgagaactcagtgactttgatttctttgtagtgaaaagtgaagtctccgtttcagagtttgtgtctttctttctgtccataactgaagtattcactactcttgtaaaccaaccaagaggaggagaaagatgacccagaagtggattcagccattgtgcctgaaatcagtgtttaaaaaaaaaaatcaaccaggttgtggtaacaaggcattctatttcttcaaaaagactgtatgcctgtgtctgaggaacttacctattatccacctctgttggaactctcttttaaaaagtacatttatagattgatcagaattataaccatggagaattttttcttctgagcattttaatatacttgaaaacaacattgacttgaaaaatttcagaacatttttcagtacctagttttattaaatattacacttgagagacactttttaaaaatgtgttaatgtcaatatgatgagattttagcctttctccagaactaaggcattaaagaaaatagcaaatattaaaaaataaaactgttacttttttccttctttcttttcacctttaggttaatatccagtattatgtgttatccctttggataagtatgctttattttacctctgttaaaaattaaaataaatgattctattcatatttgtcagtaattcaaaacttatatgtgtaactgaacgcgcatgtaaggtatggttttatttattttttttttttttgaggaaatttaaatgctaaagaaacaacgaaatgaaaaggtatcaggaaaaaaagatcaggaagttgtattcaggtacaaatctttttttaaataagtattttgttgaggttgaagaattgctggcaattaaaagaatagagctaattatggctttcatcattcattcatgtatttattgagcacctacttattatggtgctcaacacttgttactgcaagctaccttaatttcccaagagtggtgccttactctgttttttctgatatggtcttccaatcagtgtgtgtaacatacctgttgtttatcagccattgtaggtggctgtgtctgttgcatcatcataagaagtttaagctttgtgctctgataaattgtgttctgttaaagaggttagtaggatgaaaacagcaaaacaataattttttcaacaaattgtaaattataagaaaaagagttggtttgtgtacaacaattttaatgattcccttgttcatttttgctgtgaaatgcactgaaaaaaatcctcaaaatgagttatagttcctgtgttgggaaaattgacaaataataaaactagagaacaaacaa

SEQ ID NO: 163128 - DNA, 4195 bp, Homo sapiens
  Payload ID: 12149
  Gene Symbol: OSBPL1A
  Gene Name: oxysterol binding protein-like 1A
  Uniprot ID: Q9BXW6
  ENST ID: ENST00000319481
  CDS Start-End: 208-3060
ctgcggggaggggcggcgccacctcgcgctccgccgtggtcccggcgccgggtcccggagacagacgttacgcgggctcgagcgtcctcggggagtgccagccagagttggtgacgaccacttcctcgacgtggggcgggcggacgggaagcctggggtcgtggccaccgcctcgggagctctgggagcccgggtgaccgcgtagaaatgaacacagaagcggagcaacagcttctccatcacgccagaaatggcaatgctgaagaagtaagacaactattagagaccatggcgaggaatgaagtgattgctgacattaattgcaaaggaagaagtaagtctaacttgggctggacacctctacatctggcatgctattttggacacagacaagtggtccaggatctgttgaaggctggtgcagaagtgaatgtgttgaatgacatgggagacacgccgcttcatcgagctgcctttacaggacgaaaggagttggtaatgcttctcttagaatataatgctgatactactattgttaatgggagtggacagacagcaaaagaagttactcatgctgaagaaatcagaagcatgcttgaagctgtagaaaggactcaacaaagaaagcttgaagaattacttttagcagcagcaagagaaggcaaaacaacagaactcacagctctgctcaacaggcccaatcctcctgatgttaactgttcggatcagttaggaaatacacccttgcattgtgcagcttaccgggcccataaacaatgtgccttaaagcttctaagaagtggagcagaccctaatctgaagaacaaaaatgatcagaaacctcttgaccttgcccagggtgctgaaatgaaacacattcttgttggtaataaggtcatctacaaagcattgaaacgatatgagggccctctctggaagagttcaagattttttggctggagattattctgggtagtgttagagcatggagtcctttcatggtataggaaacagcctgatgcagttcataatatttatcgccagggatgcaaacacctgactcaagcagtatgcacggtaaaatccactgatagctgcctcttctttattaaatgctttgatgacaccattcatggcttccgggttcctaagaatagccttcagcagtcaagagaggactggctggaagcaatagaagaacattctgcttacagcactcactactgttcccaggaccagctgactgatgaggaggaggaagatacggtttctgctgcagacctgaagaaatcattagagaaagcacagtcatgccaacagcgactagatagggaaatttccaactttctcaaaatgattaaggagtgtgacatggctaaagaaatgcttccatcatttcttcagaaagttgaagttgtctcagaagcttctagagaaacttgtgtagctttgactgattgccttaatctcttcaccaaacaagaaggggtgaggaattttaaattggaacaagagcaagaaaaaaacaaaatcttgtcagaagcactggagacgctggccactgaacatcatgaattagagcagtctctggtgaaaggctctccacccgccagcatccttagcgaggacgagttctatgatgcgctgtcagattccgagtccgaaaggtccctgagtagattggaagcagtgacagcacgctcctttgaagaggaaggagagcatttgggcagtagaaaacacagaatgtccgaagaaaaagactgtggtggcggagatgctctctccaatggcatcaagaaacacagaacaagtttgccttctcctatgttttccagaaatgacttcagtatctggagcatcctcagaaaatgtattggaatggaactatccaagatcacgatgccagttatatttaatgagcctctgagcttcctacagcgcctaactgaatacatggagcatacttacctcatccacaaggccagttcactctctgatcctgtggaaaggatgcagtgtgtagctgcgtttgctgtatctgctgttgcttctcagtgggaacggactggaaaacctttcaacccactgctgggagagacttatgaattagtgcgagatgaccttggatttagactcatctccgaacaggtcagccatcacccaccaatcagtgcatttcatgctgaaggattaaacaatgacttcatctttcatggctctatctatcccaaactgaaattctgggggaagagtgtagaagcagaacccaaaggaaccatcaccttggagctccttgaacacaatgaggcatatacatggacaaatcccacctgctgtgtgcataatatcattgtgggtaaactgtggatcgaacagtatggcaatgtggaaattataaaccacaagactggggacaaatgtgtgttgaattttaagccatgtggcctttttggtaaggaattacacaaagttgaaggctacattcaagataaaagcaaaaagaagctctgtgccctctatgggaagtggactgaatgtttatacagtgttgaccctgccacgtttgacgcttacaaaaaaaatgataagaaaaatacagaagagaagaagaacagcaaacagatgagcacctctgaggagttggatgaaatgccagtgccggattctgaaagtgtattcattatccctggaagcgttcttctatggcgaatagccccacggcctccaaattctgcccagatgtataattttactagttttgcaatggttttgaatgaagtagacaaagacatggagagtgtgattcccaagacagactgcaggttacggcctgacatcagagccatggaaaatggagagatagatcaagctagtgaagaaaaaaaacgacttgaggaaaaacaaagagcagcccgcaaaaacaggtccaagtcagaagaggactggaagacgaggtggttccatcaaggtcctaatccctacaatggagcacaggactggatttactctggcagctactgggacagaaattacttcaatttgcctgacatttattaaaatgcatacaagtcagggtgtttggctaatctacaaataagtcttaaacctatgtttttaaatttttttcccttggtttctacttatcttttaaaaaaaaaaatgaaaaaacactcatgagataactgcatttcacccaacaaaagcagggtataaggcgatattggtgatgaaagtcttaggaaaaatgcataattttgctataaaatgtacttatttggaatactattttatatagaggtaagagaacactgctggggaatatgctttttatggttgctgttgccatatttactgaaggtttatacctaaatgtaactttagctttatggaactatatagtaatcccaaatcaagttattttgaatatttttatgctgtcatgcttgaatgttttagatgtaacctttgacatatttagaactctcctcctatacaatgtttattctcagatatagaggttatgtcattttataaagacttcattgataagatggcttttattcatactaatcctcccaatgttaccccttccatcttccaagaagaaaaaaaatgcctgaatattcagaatagatatttctgatttgaaaattctaaagaattaaactggaaaagtatttcatttacttagtgctctgaatttacttttacagttttctgcagtcagtatcattaaaatggttaagtttacatttgaactgaaaatatgtataaaatctagcaattcacaaaaatgccctagaaatatagattttaatcaccattacataatgacaaaccttgttaaatgcttccacttccagtggcaaatgccactagggaaagtaagttgcactcatgtaagtatcaaactatataaaaggaggccttgtgcatttcaagtttgcaaagtacctgtgtacttaaaatatgtgtggagacctactgtacagtagttttgcccctttaattggggcacattcatcttaaatcttatagtatttatccacccaaaccccagactgagatactgctcccaggggcctaggtagctgccagtccgtgattttaattgctgtcttgaagttaacaagtgttataatgaaataatctacctgatgctaaataaaggctttagaatgttccccaaaag

SEQ ID NO: 163129 - DNA, 1869 bp, Homo sapiens
  Payload ID: 12149
  Gene Symbol: OSBPL1A
  Gene Name: oxysterol binding protein-like 1A
  Uniprot ID: Q9BXW6
  ENST ID: ENST00000357041
  CDS Start-End: 118-1824
aatgaatggagaagtcttctgaagtgacaccagtgccttatccctagaggaatatcagcatagaaagcacagtcatgccaacagcgactagatagggaaatttccaactttctcaaaatgattaaggagtgtgacatggctaaagaaatgcttccatcatttcttcagaaagttgaagttgtctcagaagcttctagagaaacttgtgtagctttgactgattgccttaatctcttcaccaaacaagaaggggtgaggaattttaaattggaacaagagcaagaaaaaaacaaaatcttgtcagaagcactggagacgctggccactgaacatcatgaattagagcagtctctggtgaaaggctctccacccgccagcatccttagcgaggacgagttctatgatgcgctgtcagattccgagtccgaaaggtccctgagtagattggaagcagtgacagcacgctcctttgaagaggaaggagagcatttgggcagtagaaaacacagaatgtccgaagaaaaagactgtggtggcggagatgctctctccaatggcatcaagaaacacagaacaagtttgccttctcctatgttttccagaaatgacttcagtatctggagcatcctcagaaaatgtattggaatggaactatccaagatcacgatgccagttatatttaatgagcctctgagcttcctacagcgcctaactgaatacatggagcatacttacctcatccacaaggccagttcactctctgatcctgtggaaaggatgcagtgtgtagctgcgtttgctgtatctgctgttgcttctcagtgggaacggactggaaaacctttcaacccactgctgggagagacttatgaattagtgcgagatgaccttggatttagactcatctccgaacaggtcagccatcacccaccaatcagtgcatttcatgctgaaggattaaacaatgacttcatctttcatggctctatctatcccaaactgaaattctgggggaagagtgtagaagcagaacccaaaggaaccatcaccttggagctccttgaacacaatgaggcatatacatggacaaatcccacctgctgtgtgcataatatcattgtgggtaaactgtggatcgaacagtatggcaatgtggaaattataaaccacaagactggggacaaatgtgtgttgaattttaagccatgtggcctttttggtaaggaattacacaaagttgaaggctacattcaagataaaagcaaaaagaagctctgtgccctctatgggaagtggactgaatgtttatacagtgttgaccctgccacgtttgacgcttacaaaaaaaatgataagaaaaatacagaagagaagaagaacagcaaacagatgagcacctctgaggagttggatgaaatgccagtgccggattctgaaagtgtattcattatccctggaagcgttcttctatggcgaatagccccacggcctccaaattctgcccagatgtataattttactagttttgcaatggttttgaatgaagtagacaaagacatggagagtgtgattcccaagacagactgcaggttacggcctgacatcagagccatggaaaatggagagatagatcaagctagtgaagaaaaaaaacgacttgaggaaaaacaaagagcagcccgcaaaaacaggtccaagtcagaagaggactggaagacgaggtggttccatcaaggtcctaatccctacaatggagcacaggactggatttactctggcagctactgggacagaaattacttcaatttgcctgacatttattaaaatgcatacaagtcagggtgtttggctaatctacaaataagtctt

SEQ ID NO: 163130 - DNA, 1887 bp, Homo sapiens
  Payload ID: 12149
  Gene Symbol: OSBPL1A
  Gene Name: oxysterol binding protein-like 1A
  ENST ID: ENST00000399441
  CDS Start-End: 219-521
gcgggctcgagcgtcctcggggagtgccagccagagttggtgacgaccacttcctcgacgtggggcgggcggacgggaagcctggggtcgtggccaccgcctcgggagctctgggagcccgggtgaccgcgtaggtcagtttctcgcggctgtccacgcctggagttcgaggccggttcccgcgctgacgggttcccgccgggctgcgctcgggagaaatgaacacagaagcggagcaacagcttctccatcacgccagaaatggcaatgctgaagaagtaagacaactattagagaccatggcgaggaatgaagtgattgctgacattaattgcaaaggaagaagtaagtctaacttgggctggacacctctacatctggcatgctattttggacacagacaagtggtccaggatctgttgaaggctggtgcagaagtgaatgtgttgaatgacatgggagacacgccgcttcatcgagctgcctttacaggacgaaagatctgttctcagggaagctgagatggagatgagtgggcagcaggtttatggagtgctcgtggcatcacacctgtgcacgagggtggggaagaagtggacaggagtggacaagtcaagtagtgctgccggctcaagcgatgcctcagcctttctgctgtgtgcgaagctttgcagaggagatgatgcttcaaagttgtccctgttggggatgagcagccaggcctttatacactgggacagtcagtcatggatacgtggatactctggaaaccctcatccctggaggtctgagcccctggataccatgcccttcttaggctggagttgctgcccttgtccatttaccataaaaattggacaagagaataccaggacacacctgagtttctcatcgtatgctaaacctgttcttccacgtacatccccaatgtgtacagccctacttttttctgctgatcaagttcaattacttctgctaagatggtgactattcttgcctgctggtccttggatgcaaggaccccaatgttcaggcagcctttggtgccttctagcatacgaatcagagcattatctttaggtgtggaataagctgccccaaaacctgttgaagccaaccaggcactgtgctcccttctgttatgggaagtgcaagatgcagtaatttattcttctgaggaagtgtcttgtcattgcccagaccagtgaacttctaaaaatttactgacatggaaaagctcctgaattcttcctaagttttacctcccacccactggatcagatatgtcttaccaaggctttgaacatcctagcctcgtggagaagaagcctcttctcctggttctgttagcatgatgttatgaaaggaaattaaattttgggaccccaaactcattttgccaaagggaaaaatcaagctgagaactgggtcatgcaaacctgcctcccccttttggttcctaaataaggtggctacaagaggaaaagctacatgcctcccccatattttgctcacaaggaaattcctagtgagcaatgcaaagtgatagcttatctttacaggtgcagtcacccaggcccaccacacgcaaatgcatatctaattgttcccctgccccattttgtctgtgttatgtagaatgcagattccctacgtttttcttctgccccgtttatgtcatcttatgtaaaaacatgcagattcatggagccagacaaaggcatgactatcttttcccacccacccccttacctgaaaattgtgtacttctcaatatcctgccctttcccctttaaatttgaagccctcaaaaatcatcttcagagaaagatgtctgtctcctgggtgcgtgtccttaactttggcaaataaatctaaaatgattga

SEQ ID NO: 163131 - DNA, 3317 bp, Homo sapiens
  Payload ID: 12149
  Gene Symbol: OSBPL1A
  Gene Name: oxysterol binding protein-like 1A
  Uniprot ID: Q9BXW6
  ENST ID: ENST00000399443
  CDS Start-End: 870-2183
ccagggccggtgtctccaggagagggccgagcgcacagcagctctaggacctcgcaggcgcctcggcgcggcactcacgtagagcccaaggagcagtccccgacctctcctcggagggccgtgcaggcttccccggcggtccctacctgcgcctccgcccgccagcggcgctggggaaggggaggagcggcccggacgctgcccgccgcgcgcagggagccgcccgccgcaggccttgccgccgcccgcccgcgctctccccgcgagccccggagggcgggtctgcggccgagccagcggcggcggaggggcagcgcagacctctgcggcccgggcgggcgcggcgcgggagtcctgggccgctggcgggcaacgcctctgcccgacctcgctggggaaggctggcgctgctgcccggccggagccaggggcaggctgcgcaaaggtgacttagggagaccttgcgggccgccctgggtcgcgcctcccggatcggctcgcctcggctcgactggaggggaggaggaggagcaggccgagcgcattcgcgctggagcttgcgaggagcgcagggtggagcgcgccagccggggtcctcggatctggcccaggtgaggaattttaaattggaacaagagcaagaaaaaaacaaaatcttgtcagaagcactggagacgctggccactgaacatcatgaattagagcagtctctggtgaaaggctctccacccgccagcatccttagcgaggacgagttctatgatgcgctgtcagattccgagtccgaaaggtccctgagtagattggaagcagtgacagcacgctcctttgaagaggaaggagagcatttgggcagtagaaaacacagaatgtccgaagaaaaagactgtggtggcggagatgctctctccaatggcatcaagaaacacagaacaagtttgccttctcctatgttttccagaaatgacttcagtatctggagcatcctcagaaaatgtattggaatggaactatccaagatcacgatgccagttatatttaatgagcctctgagcttcctacagcgcctaactgaatacatggagcatacttacctcatccacaaggccagttcactctctgatcctgtggaaaggatgcagtgtgtagctgcgtttgctgtatctgctgttgcttctcagtgggaacggactggaaaacctttcaacccactgctgggagagacttatgaattagtgcgagatgaccttggatttagactcatctccgaacaggtcagccatcacccaccaatcagtgcatttcatgctgaaggattaaacaatgacttcatctttcatggctctatctatcccaaactgaaattctgggggaagagtgtagaagcagaacccaaaggaaccatcaccttggagctccttgaacacaatgaggcatatacatggacaaatcccacctgctgtgtgcataatatcattgtgggtaaactgtggatcgaacagtatggcaatgtggaaattataaaccacaagactggggacaaatgtgtgttgaattttaagccatgtggcctttttggtaaggaattacacaaagttgaaggctacattcaagataaaagcaaaaagaagctctgtgccctctatgggaagtggactgaatgtttatacagtgttgaccctgccacgtttgacgcttacaaaaaaaatgataagaaaaatacagaagagaagaagaacagcaaacagatgagcacctctgaggagttggatgaaatgccagtgccggattctgaaagtgtattcattatccctggaagcgttcttctatggcgaatagccccacggcctccaaattctgcccagatgtataattttactagttttgcaatggttttgaatgaagtagacaaagacatggagagtgtgattcccaagacagactgcaggttacggcctgacatcagagccatggaaaatggagagatagatcaagctagtgaagaaaaaaaacgacttgaggaaaaacaaagagcagcccgcaaaaacaggtccaagtcagaagaggactggaagacgaggtggttccatcaaggtcctaatccctacaatggagcacaggactggatttactctggcagctactgggacagaaattacttcaatttgcctgacatttattaaaatgcatacaagtcagggtgtttggctaatctacaaataagtcttaaacctatgtttttaaatttttttcccttggtttctacttatcttttaaaaaaaaaaatgaaaaaacactcatgagataactgcatttcacccaacaaaagcagggtataaggcgatattggtgatgaaagtcttaggaaaaatgcataattttgctataaaatgtacttatttggaatactattttatatagaggtaagagaacactgctggggaatatgctttttatggttgctgttgccatatttactgaaggtttatacctaaatgtaactttagctttatggaactatatagtaatcccaaatcaagttattttgaatatttttatgctgtcatgcttgaatgttttagatgtaacctttgacatatttagaactctcctcctatacaatgtttattctcagatatagaggttatgtcattttataaagacttcattgataagatggcttttattcatactaatcctcccaatgttaccccttccatcttccaagaagaaaaaaaatgcctgaatattcagaatagatatttctgatttgaaaattctaaagaattaaactggaaaagtatttcatttacttagtgctctgaatttacttttacagttttctgcagtcagtatcattaaaatggttaagtttacatttgaactgaaaatatgtataaaatctagcaattcacaaaaatgccctagaaatatagattttaatcaccattacataatgacaaaccttgttaaatgcttccacttccagtggcaaatgccactagggaaagtaagttgcactcatgtaagtatcaaactatataaaaggaggccttgtgcatttcaagtttgcaaagtacctgtgtacttaaaatatgtgtggagacctactgtacagtagttttgcccctttaattggggcacattcatcttaaatcttatagtatttatccacccaaaccccagactgagatactgctcccaggggcctaggtagctgccagtccgtgattttaattgctgtcttgaagttaacaagtgttataatgaaataatctacctgatgctaaataaaggctttagaatgttccccaaaa

SEQ ID NO: 163132 - DNA, 587 bp, Homo sapiens
  Payload ID: 12149
  Gene Symbol: OSBPL1A
  Gene Name: oxysterol binding protein-like 1A
  ENST ID: ENST00000578055
  CDS Start-End: 323-469
gcgctggagcttgcgaggagcgcagggtggagcgcgccagccggggtcctcggatctggcccaggtgaggaattttaaattggaacaagagcaagaaaaaaacaaaatcttgtcagaagcactggagacgctggccactgaacatcatgaattagagcagtctctggtgaaaggctctccacccgccagcatccttagcgaggacgagttctatgatgcgctgtcagattccgagtccgaaaggtccctgagtagattggaagcagtgacagcacgctcctttgaagaggaaggagagcatttgggcagtagaaaacacagaatgtccgaagaaaaagactgtggtggcggagatgctctctccaatggcatcaagaaacacagaacaagtttgccttctcctatgttttccagaaatgacttcagtatctggagcatcctcagaaaatgtattggaatgacacaatgaggcatatacatggacaaatcccacctgctgtgtgcataatatcattgtgggtaaactgtggatcgaacagtatggcaatgtggaaattataaaccacaagactggggacaaatgtgtg

SEQ ID NO: 163133 - DNA, 690 bp, Homo sapiens
  Payload ID: 12149
  Gene Symbol: OSBPL1A
  Gene Name: oxysterol binding protein-like 1A
  ENST ID: ENST00000582645
  CDS Start-End: 204-359
ggggaggggcggcgccacctcgcgctccgccgtggtcccggcgccgggtcccggagacagacgttacgcgggctcgagcgtcctcggggagtgccagccagagttggtgacgaccacttcctcgacgtggggcgggcggacgggaagcctggggtcgtggccaccgcctcgggagctctgggagcccgggtgaccgcgtagaaatgaacacagaagcggagcaacagcttctccatcacgccagaaatggcaatgctgaagaagtaagacaactattagagaccatggcgaggaatgaagtgattgctgacattaattgcaaaggaagaagctggtgcagaagtgaatgtgttgaatgacatgggagacacgccgcttcatcgagctgcctttacaggacgaaagctgtagaaaggactcaacaaagaaagcttgaagaattacttttagcagcagcaagagaaggcaaaacaacagaactcacagctctgctcaacaggcccaatcctcctgatgttaactgttcggatcagttaggaaatacacccttgcattgtgcagcttaccgggcccataaacaatgtgccttaaagcttctaagaagtggagcagaccctaatctgaagaacaaaaatgatcagaaacctcttgaccttgcccagggtgctgaaatgaaacacattcttgttg

SEQ ID NO: 163134 - DNA, 1354 bp, Homo sapiens
  Payload ID: 12149
  Gene Symbol: OSBPL1A
  Gene Name: oxysterol binding protein-like 1A
  ENST ID: ENST00000578091
  CDS Start-End: 229-384
gatgcgcgttccaggggcgggctgcggggaggggcggcgccacctcgcgctccgccgtggtcccggcgccgggtcccggagacagacgttacgcgggctcgagcgtcctcggggagtgccagccagagttggtgacgaccacttcctcgacgtggggcgggcggacgggaagcctggggtcgtggccaccgcctcgggagctctgggagcccgggtgaccgcgtagaaatgaacacagaagcggagcaacagcttctccatcacgccagaaatggcaatgctgaagaagtaagacaactattagagaccatggcgaggaatgaagtgattgctgacattaattgcaaaggaagaagagttggtaatgcttctcttagaatataatgctgatactactattgttaatgggagtggacagacagcaaaagaagttactcatgctgaagaaatcagaagcatgcttgaagctgtagaaaggactcaacaaagaaagcttgaagaattacttttagcagcagcaagagaaggcaaaacaacagaactcacagctctgctcaacaggcccaatcctcctgatgttaactgttcggatcagttaggaaatacacccttgcattgtgcagcttaccgggcccataaacaatgtgccttaaagcttctaagaagtggagcagaccctaatctgaagaacaaaaatgatcagaaacctcttgaccttgcccagggtgctgaaatgaaacacattcttgttggtaataaggtcatctacaaagcattgaaacgatatgagggccctctctggaagagttcaagattttttggctggagattattctgggtagtgttagagcatggagtcctttcatggtataggaaacagcctgatgcagttcataatatttatcgccagggatgcaaacacctgactcaagcagtatgcacggtaaaatccactgatagctgcctcttctttattaaatgctttgatgacaccattcatggcttccgggttcctaagaatagccttcagcagtcaagagaggactggctggaagcaatagaagaacattctgcttacagcactcactactgttcccaggaccagctgactgatgaggaggaggaagatacggtttctgctgcagacctgaagaaatcattagagaaagcacagtcatgccaacagcgactagatagggaaatttccaactttctcaaaatgattaaggagtgtgacatggctaaagaaatgcttccatcatttcttcagaaagttgaagttgtctcagaagcttctagagaaacttgtgtagctttgactgattgccttaatctcttcaccaaacaagaaggg

SEQ ID NO: 163135 - DNA, 1291 bp, Homo sapiens
  Payload ID: 12149
  Gene Symbol: OSBPL1A
  Gene Name: oxysterol binding protein-like 1A
  ENST ID: ENST00000579851
  CDS Start-End: 172-321
tggtcccggcgccgggtcccggagacagacgttacgcgggctcgagcgtcctcggggagtgccagccagagttggtgacgaccacttcctcgacgtggggcgggcggacgggaagcctggggtcgtggccaccgcctcgggagctctgggagcccgggtgaccgcgtagaaatgaacacagaagcggagcaacagcttctccatcacgccagaaatggcaatgctgaagaagtaagacaactattagagaccatggcgaggaatgaagtgattgctgacattaattgcaaaggagttggtaatgcttctcttagaatataatgctgatactactattgttaatgggagtggacagacagcaaaagaagttactcatgctgaagaaatcagaagcatgcttgaagctgtagaaaggactcaacaaagaaagcttgaagaattacttttagcagcagcaagagaaggcaaaacaacagaactcacagctctgctcaacaggcccaatcctcctgatgttaactgttcggatcagttaggaaatacacccttgcattgtgcagcttaccgggcccataaacaatgtgccttaaagcttctaagaagtggagcagaccctaatctgaagaacaaaaatgatcagaaacctcttgaccttgcccagggtgctgaaatgaaacacattcttgttggtaataaggtcatctacaaagcattgaaacgatatgagggccctctctggaagagttcaagattttttggctggagattattctgggtagtgttagagcatggagtcctttcatggtataggaaacagcctgatgcagttcataatatttatcgccagggatgcaaacacctgactcaagcagtatgcacggtaaaatccactgatagctgcctcttctttattaaatgctttgatgacaccattcatggcttccgggttcctaagaatagccttcagcagtcaagagaggactggctggaagcaatagaagaacattctgcttacagcactcactactgttcccaggaccagctgactgatgaggaggaggaagatacggtttctgctgcagacctgaagaaatcattagagaaagcacagtcatgccaacagcgactagatagggaaatttccaactttctcaaaatgattaaggagtgtgacatggctaaagaaatgcttccatcatttcttcagaaagttgaagttgtctcagaagcttctagagaaacttgtgtagctttgactgattgccttaatctcttcaccaaacaagaaggg

SEQ ID NO: 163136 - DNA, 585 bp, Homo sapiens
  Payload ID: 12149
  Gene Symbol: OSBPL1A
  Gene Name: oxysterol binding protein-like 1A
  ENST ID: ENST00000584119
  CDS Start-End: 124-249
atcattaatgaatggagaagtcttctgaagtgacaccagtgccttatccctagaggaatatcagcatagaaagcacagtcatgccaacagcgactagatagggaaatttccaactttctcaaaatgattaaggagtgtgacatggctaaagattgcctgtatgacatgtcattcgtaatgatgaaatgcttccatcatttcttcagaaagttgaagttgtctcagaagcttctagagaaacttgtgtagctttgactgattgccttaatctcttcaccaaacaagaaggggtgaggaattttaaattggaacaagagcaagaaaaaaacaaaatcttgtcagaagcactggagacgctggccactgaacatcatgaattagagcagtctctggtgaaaggctctccacccgccagcatccttagcgaggacgagttctatgatgcgctgtcagattccgagtccgaaaggtccctgagtagattggaagcagtgacagcacgctcctttgaagaggaaggagagcatttgggcagtagaaaacacagaatgtccgaagaaaaagactgtggtggcggagatgctc

SEQ ID NO: 163137 - DNA, 880 bp, Homo sapiens
  Payload ID: 12149
  Gene Symbol: OSBPL1A
  Gene Name: oxysterol binding protein-like 1A
  ENST ID: ENST00000578013
  CDS Start-End: 1-858
tgtgtagctgcgtttgctgtatctgctgttgcttctcagtgggaacggactggaaaacctttcaacccactgctgggagagacttatgaattagtgcgacacaatgaggcatatacatggacaaatcccacctgctgtgtgcataatatcattgtgggtaaactgtggatcgaacagtatggcaatgtggaaattataaaccacaagactggggacaaatgtgtgttgaattttaagccatgtggcctttttggtaaggaattacacaaagttgaaggctacattcaagataaaagcaaaaagaagctctgtgccctctatgggaagtggactgaatgtttatacagtgttgaccctgccacgtttgacgcttacaaaaaaaatgataagaaaaatacagaagagaagaagaacagcaaacagatgagcacctctgaggagttggatgaaatgccagtgccggattctgaaagtgtattcattatccctggaagcgttcttctatggcgaatagccccacggcctccaaattctgcccagatgtataattttactagttttgcaatggttttgaatgaagtagacaaagacatggagagtgtgattcccaagacagactgcaggttacggcctgacatcagagccatggaaaatggagagatagatcaagctagtgaagaaaaaaaacgacttgaggaaaaacaaagagcagcccgcaaaaacaggtccaagtcagaagaggactggaagacgaggtggttccatcaaggtcctaatccctacaatggagcacaggactggatttactctggcagctactgggacagaaattacttcaatttgcctgacatttattaaaatgcatacaagtcagggtgtt

SEQ ID NO: 163138 - DNA, 4009 bp, Homo sapiens
  Payload ID: 12150
  Gene Symbol: OSBPL2
  Gene Name: oxysterol binding protein-like 2
  Uniprot ID: Q9H1P3
  ENST ID: ENST00000313733
  CDS Start-End: 242-1684
agtcggcgaggcggcgggccgcacttccgcctcggtgtcagtgggtcgcgggcctacggggcgggggcggggcggcagtgagctcggccggcaaccgagggacccgcgtccagatcttcagtgtctattggatttttccaagagaaagtttgtaaaattccttacactgtagatgtggatcagatacgatgattcagtagaagagcacatgtcaggggcagtggaggctggctgctgaaggatgaacggagaggaagaattctttgatgccgtcacaggctttgattctgataactcttctggggaattttcagaggcaaatcagaaagtcacgggaatgattgacttagacaccagcaaaaataataggattgggaaaactggggagaggccctctcaagagaacggaattcagaaacacaggacatcgctgccggctcccatgttcagcagaagcgacttcagcgtgtggaccatcctgaagaagtgtgttggcctggagctgtccaagatcacgatgccaatcgccttcaacgagcctctgagcttcttgcagcggatcacggagtacatggagcacgtgtacctcatccacagggcctcctgccagccccagcccctggagaggatgcagtctgtggctgcttttgctgtttcggctgtggcttcccagtgggagaggaccggcaaaccatttaatccactcttgggagaaacgtatgaattaatcagggaagatttaggattcagatttatatcggaacaggtcagtcaccacccccccatcagtgcgttccactcggaaggtctcaaccatgacttcctgttccatggctccatctaccccaagctcaagttctggggcaaaagcgtggaggcggagccccgaggcaccatcaccctggagctgctcaaacataatgaagcctacacctggaccaaccccacctgctgcgtccacaacgtcatcatcgggaagctgtggatagagcagtatgggacagtggagattttaaaccacagaactggacataagtgtgtgcttcactttaaaccgtgtggattatttggaaaagaacttcacaaggtggaaggacacattcaagacaaaaacaaaaagaagctctttatgatctatggcaaatggacggaatgtttgtggggcatagatcctgtttcgtatgaatccttcaagaagcaggagaggagaggtgaccacctgagaaaggccaagctggatgaagactccgggaaggctgacagcgacgtggctgacgacgtgcctgtggcccaggagaccgtgcaggtcattcctggcagcaagctgctctggaggatcaacacccggccccccaactctgcccagatgtataatttcaccagtttcactgtgagcctcaacgagctggagacaggcatggagaagaccctgccacccacggactgccgcctgcgccctgacatccgcggcatggagaatggcaacatggatctggccagccaggagaaggagcggctggaggagaagcagagagaagcacggagggagcgggccaaggaggaggcagagtggcagacgaggtggttctacccaggcaataacccctacactgggacccccgactggttgtatgcaggggattactttgagcggaatttctccgactgcccagatatctactgagggcctggaggggcctggggcccgggaccggaggctgacgaggctggacttcctcgagtggccactgtgagcctcgtcacagcagaaaccaacttttctaacgactgagttcgcggagatagcatcatccctgatcaaggatgtaattctaattaactgttgattgccaaacatttcactctgctgtgccgtctcttcataaagcttcacttgggatcatcgtcttcattaaggtttcaacagggaaattcttcacggcgcccttttatgtggcagaaatcagctggggcttgtttagcttccagcacactctcagtcatagcatgtgtagctaaaggaagtaatgggaaggggttcatgttctctttataatgcagtggcaaaaggttctgaaagccttttaaactcgaaccagtgggggaaagatggatcttgaagctaatcctgcagagagttttatagaggccagggattgccttctaaattatgataaaacagaagtgaagagtttcagagcatcagattgagtgaaaagttgtcagattctgtattttttaacaatcttcaataatgtaaagattacttttaaaatatttaagttaaaactacttgaatagtattttgctgaagagcaagatatgcattaatcaccggttttatactgtccaaaatgaagcatccccgtgacaaaccagagtgggcagaagcatcgagagcgtgacaggaaatcccaagactgcttccgcctcagaggcgtcccggctgcgattcgctgccctgttgtcagtgaggcctggctgtcaccgcacaccgcgtccgtgtctccagggggttcctttcttctcacacgtcgcgtgtacccatagcactcttgtgtttctgtttttcccagtatgcatgtttaaaatagaagtgacaagaatcacatccggttgtgtcctgtgggagggtcagaggcagaatctacttacagtggtgtaattaaagttatttaaccaaaaataggtatgtgtccatctcagcattcacctttatcaagtgactgatttttttttcttttctttccttttttttttttttttgagacggagtttcactcttgttgcccaggctggagtgcaatggcatgatctcggctcaccgcaacctccgcctcccgggttcaagcgattctcctgcctcagcctcccaagtagctgggattacaggcacgcgccaccacacctggctgattttgtatttttagtagacacgggttttcaccatgttggtcaggctggtctcaaactcccgacctcaagtagtctgcctgcctcaacctcccaaagtgctgggattacaggcgtgagccactgcgcctggccgtgactgattttttttcatgtagaattgtcaacacgagagatcacagtggagcactttgaaagaccgtcggttgtgtgcacgcacgcacacactcatgcacacgctgacacgcggttgcatggagtccaggttactcaggccggcacttctgagtgacaggtgccacctgcgtgtgtcttggcgtccacatcacacctgtgacggaagcacttctggaagtgaacactcgttttgaaagcttgattttgtagctttggaagctggaagcgatggtgtttggtgccgagtcctgtgtcatcctcggggcctatgagctccgtaccagccactcaaaagtgtctgaacagaaccgctccgtgactggtagctgggtctgaggattcaggattgtggcgttattcaaagaggagactttgaaattccccgatggctggaatgtggagcccaggtgcctctggtggagggtcatctgcttttccagactgtggttgtgaaccggctccttctccaagaaaggttgcaagctgagaacatccagaggtgagactcagacacattgaaagtgactgcatttagggaggtttaacgagttcttactgatcattccacttgttactggttaagataatttgcccacgggtttgtttccaagtcctcttctaggaccaggctcctggtatttcaggggctggttggctgcacagacagcccctcttctgctgtccttgaggacagacaccaaaccagaggtggaggaagaacggtaggaaggctgatggcaaaagcggctgtgtgtcgaggttattttaactttttactactttttgttactgtttctgcaaatgctaacacataaaccatgacctaacttttgtcaccttggatatctattgaatgttaaacatctctaataaagatggccaccacttaatgtgtggaaagtgatggccttctcgtggg

SEQ ID NO: 163139 - DNA, 3936 bp, Homo sapiens
  Payload ID: 12150
  Gene Symbol: OSBPL2
  Gene Name: oxysterol binding protein-like 2
  Uniprot ID: Q9H1P3
  ENST ID: ENST00000358053
  CDS Start-End: 206-1612
gtcagtgggtcgcgggcctacggggcgggggcggggcggcagtgagctcggccggcaaccgagggacccgcgtccagatcttcagtgtctattggatttttccaagagaaagtttgtaaaattccttacactgtagatgtggatcagatacgatgattcagtagaagagcacatgtcaggggcagtggaggctggctgctgaaggatgaacggagaggaagaattctttgatgccgtcacagaggcaaatcagaaagtcacgggaatgattgacttagacaccagcaaaaataataggattgggaaaactggggagaggccctctcaagagaacggaattcagaaacacaggacatcgctgccggctcccatgttcagcagaagcgacttcagcgtgtggaccatcctgaagaagtgtgttggcctggagctgtccaagatcacgatgccaatcgccttcaacgagcctctgagcttcttgcagcggatcacggagtacatggagcacgtgtacctcatccacagggcctcctgccagccccagcccctggagaggatgcagtctgtggctgcttttgctgtttcggctgtggcttcccagtgggagaggaccggcaaaccatttaatccactcttgggagaaacgtatgaattaatcagggaagatttaggattcagatttatatcggaacaggtcagtcaccacccccccatcagtgcgttccactcggaaggtctcaaccatgacttcctgttccatggctccatctaccccaagctcaagttctggggcaaaagcgtggaggcggagccccgaggcaccatcaccctggagctgctcaaacataatgaagcctacacctggaccaaccccacctgctgcgtccacaacgtcatcatcgggaagctgtggatagagcagtatgggacagtggagattttaaaccacagaactggacataagtgtgtgcttcactttaaaccgtgtggattatttggaaaagaacttcacaaggtggaaggacacattcaagacaaaaacaaaaagaagctctttatgatctatggcaaatggacggaatgtttgtggggcatagatcctgtttcgtatgaatccttcaagaagcaggagaggagaggtgaccacctgagaaaggccaagctggatgaagactccgggaaggctgacagcgacgtggctgacgacgtgcctgtggcccaggagaccgtgcaggtcattcctggcagcaagctgctctggaggatcaacacccggccccccaactctgcccagatgtataatttcaccagtttcactgtgagcctcaacgagctggagacaggcatggagaagaccctgccacccacggactgccgcctgcgccctgacatccgcggcatggagaatggcaacatggatctggccagccaggagaaggagcggctggaggagaagcagagagaagcacggagggagcgggccaaggaggaggcagagtggcagacgaggtggttctacccaggcaataacccctacactgggacccccgactggttgtatgcaggggattactttgagcggaatttctccgactgcccagatatctactgagggcctggaggggcctggggcccgggaccggaggctgacgaggctggacttcctcgagtggccactgtgagcctcgtcacagcagaaaccaacttttctaacgactgagttcgcggagatagcatcatccctgatcaaggatgtaattctaattaactgttgattgccaaacatttcactctgctgtgccgtctcttcataaagcttcacttgggatcatcgtcttcattaaggtttcaacagggaaattcttcacggcgcccttttatgtggcagaaatcagctggggcttgtttagcttccagcacactctcagtcatagcatgtgtagctaaaggaagtaatgggaaggggttcatgttctctttataatgcagtggcaaaaggttctgaaagccttttaaactcgaaccagtgggggaaagatggatcttgaagctaatcctgcagagagttttatagaggccagggattgccttctaaattatgataaaacagaagtgaagagtttcagagcatcagattgagtgaaaagttgtcagattctgtattttttaacaatcttcaataatgtaaagattacttttaaaatatttaagttaaaactacttgaatagtattttgctgaagagcaagatatgcattaatcaccggttttatactgtccaaaatgaagcatccccgtgacaaaccagagtgggcagaagcatcgagagcgtgacaggaaatcccaagactgcttccgcctcagaggcgtcccggctgcgattcgctgccctgttgtcagtgaggcctggctgtcaccgcacaccgcgtccgtgtctccagggggttcctttcttctcacacgtcgcgtgtacccatagcactcttgtgtttctgtttttcccagtatgcatgtttaaaatagaagtgacaagaatcacatccggttgtgtcctgtgggagggtcagaggcagaatctacttacagtggtgtaattaaagttatttaaccaaaaataggtatgtgtccatctcagcattcacctttatcaagtgactgatttttttttcttttctttccttttttttttttttttgagacggagtttcactcttgttgcccaggctggagtgcaatggcatgatctcggctcaccgcaacctccgcctcccgggttcaagcgattctcctgcctcagcctcccaagtagctgggattacaggcacgcgccaccacacctggctgattttgtatttttagtagacacgggttttcaccatgttggtcaggctggtctcaaactcccgacctcaagtagtctgcctgcctcaacctcccaaagtgctgggattacaggcgtgagccactgcgcctggccgtgactgattttttttcatgtagaattgtcaacacgagagatcacagtggagcactttgaaagaccgtcggttgtgtgcacgcacgcacacactcatgcacacgctgacacgcggttgcatggagtccaggttactcaggccggcacttctgagtgacaggtgccacctgcgtgtgtcttggcgtccacatcacacctgtgacggaagcacttctggaagtgaacactcgttttgaaagcttgattttgtagctttggaagctggaagcgatggtgtttggtgccgagtcctgtgtcatcctcggggcctatgagctccgtaccagccactcaaaagtgtctgaacagaaccgctccgtgactggtagctgggtctgaggattcaggattgtggcgttattcaaagaggagactttgaaattccccgatggctggaatgtggagcccaggtgcctctggtggagggtcatctgcttttccagactgtggttgtgaaccggctccttctccaagaaaggttgcaagctgagaacatccagaggtgagactcagacacattgaaagtgactgcatttagggaggtttaacgagttcttactgatcattccacttgttactggttaagataatttgcccacgggtttgtttccaagtcctcttctaggaccaggctcctggtatttcaggggctggttggctgcacagacagcccctcttctgctgtccttgaggacagacaccaaaccagaggtggaggaagaacggtaggaaggctgatggcaaaagcggctgtgtgtcgaggttattttaactttttactactttttgttactgtttctgcaaatgctaacacataaaccatgacctaacttttgtcaccttggatatctattgaatgttaaacatctctaataaagatggccaccacttaatgtgtggaaagtgatggccttctcgtgg

SEQ ID NO: 163140 - DNA, 3886 bp, Homo sapiens
  Payload ID: 12150
  Gene Symbol: OSBPL2
  Gene Name: oxysterol binding protein-like 2
  ENST ID: ENST00000439951
  CDS Start-End: 518-1630
agtcggcgaggcggcgggccgcacttccgcctcggtgtcagtgggtcgcgggcctacggggcgggggcggggcggcagtgagctcggccggcaaccgagggacccgcgtccagatcttcagtgtctattggatttttccaagagaaagtttgtaaaattccttacactgtagatgtggatcagatacgatgattcagtagaagagcacatgtcaggggcagtggaggctggctgctgaaggatgaacggagaggaagaattctttgatgccgtcacaggctttgattctgataactcttctggggaattttcagaggcaaatcagaaagtcacgggaatgattgacttagacaccagcaaaaataataggattgggaaaactggggagaggccctctcaagagaacggaattcagaaacacaggacatcgctgccggctcccatgttcagcagaagcgacttcagcgtgtggaccatcctgaagaagtgtgttggcctggagctgtccaagatcacgatgccaatcgccttcaacgagcctctgagcttcttgcagcggatcacggagtacatggagcacgtgtacctcatccacagggcctcctgccagccccagcccctggagaggatgcagtctgtggctgcttttgctgtttcggctgtggcttcccagtgggagaggaccggcaaaccatttaatccactcttgggagaaacgtatgaattaatcagggaagatttaggattcagatttatatcggaacaggtcagtcaccacccccccatcagtgcgttccactcggaaggtctcaaccatgacttcctgttccatggctccatctaccccaagctcaagttctggggcaaaagcgtggaggcggagccccgaggcaccatcaccctggagctgctcaaacataatgaagcctacacctggaccaaccccacctgctgcgtccacaacgtcatcatcgggaagctgtggatagagcagtatgggacagtggagattttaaaccacagaactggacataagtgtgtgcttcactttaaaccgtgtggattatttggaaaagaacttcacaaggtggaaggacacattcaagacaaaaacaaaaagaagctctttatgatctatggcaaatggacggaatgtttgtggggcatagatcctgtttcgtatgaatccttcaagaagcaggagaggagaggtgaccacctgagaaaggccaagctggatgaagactccgggaaggctgacagcgacgtggctgacgacgtgcctgtggcccaggagaccgtgcaggtcattcctggcagcaagctgctctggaggatcaacacccggccccccaactctgcccagatctggccagccaggagaaggagcggctggaggagaagcagagagaagcacggagggagcgggccaaggaggaggcagagtggcagacgaggtggttctacccaggcaataacccctacactgggacccccgactggttgtatgcaggggattactttgagcggaatttctccgactgcccagatatctactgagggcctggaggggcctggggcccgggaccggaggctgacgaggctggacttcctcgagtggccactgtgagcctcgtcacagcagaaaccaacttttctaacgactgagttcgcggagatagcatcatccctgatcaaggatgtaattctaattaactgttgattgccaaacatttcactctgctgtgccgtctcttcataaagcttcacttgggatcatcgtcttcattaaggtttcaacagggaaattcttcacggcgcccttttatgtggcagaaatcagctggggcttgtttagcttccagcacactctcagtcatagcatgtgtagctaaaggaagtaatgggaaggggttcatgttctctttataatgcagtggcaaaaggttctgaaagccttttaaactcgaaccagtgggggaaagatggatcttgaagctaatcctgcagagagttttatagaggccagggattgccttctaaattatgataaaacagaagtgaagagtttcagagcatcagattgagtgaaaagttgtcagattctgtattttttaacaatcttcaataatgtaaagattacttttaaaatatttaagttaaaactacttgaatagtattttgctgaagagcaagatatgcattaatcaccggttttatactgtccaaaatgaagcatccccgtgacaaaccagagtgggcagaagcatcgagagcgtgacaggaaatcccaagactgcttccgcctcagaggcgtcccggctgcgattcgctgccctgttgtcagtgaggcctggctgtcaccgcacaccgcgtccgtgtctccagggggttcctttcttctcacacgtcgcgtgtacccatagcactcttgtgtttctgtttttcccagtatgcatgtttaaaatagaagtgacaagaatcacatccggttgtgtcctgtgggagggtcagaggcagaatctacttacagtggtgtaattaaagttatttaaccaaaaataggtatgtgtccatctcagcattcacctttatcaagtgactgatttttttttcttttctttccttttttttttttttttgagacggagtttcactcttgttgcccaggctggagtgcaatggcatgatctcggctcaccgcaacctccgcctcccgggttcaagcgattctcctgcctcagcctcccaagtagctgggattacaggcacgcgccaccacacctggctgattttgtatttttagtagacacgggttttcaccatgttggtcaggctggtctcaaactcccgacctcaagtagtctgcctgcctcaacctcccaaagtgctgggattacaggcgtgagccactgcgcctggccgtgactgattttttttcatgtagaattgtcaacacgagagatcacagtggagcactttgaaagaccgtcggttgtgtgcacgcacgcacacactcatgcacacgctgacacgcggttgcatggagtccaggttactcaggccggcacttctgagtgacaggtgccacctgcgtgtgtcttggcgtccacatcacacctgtgacggaagcacttctggaagtgaacactcgttttgaaagcttgattttgtagctttggaagctggaagcgatggtgtttggtgccgagtcctgtgtcatcctcggggcctatgagctccgtaccagccactcaaaagtgtctgaacagaaccgctccgtgactggtagctgggtctgaggattcaggattgtggcgttattcaaagaggagactttgaaattccccgatggctggaatgtggagcccaggtgcctctggtggagggtcatctgcttttccagactgtggttgtgaaccggctccttctccaagaaaggttgcaagctgagaacatccagaggtgagactcagacacattgaaagtgactgcatttagggaggtttaacgagttcttactgatcattccacttgttactggttaagataatttgcccacgggtttgtttccaagtcctcttctaggaccaggctcctggtatttcaggggctggttggctgcacagacagcccctcttctgctgtccttgaggacagacaccaaaccagaggtggaggaagaacggtaggaaggctgatggcaaaagcggctgtgtgtcgaggttattttaactttttactactttttgttactgtttctgcaaatgctaacacataaaccatgacctaacttttgtcaccttggatatctattgaatgttaaacatctctaataaagatggccaccacttaatgtgtggaaagtgatggccttctcgtgggc

SEQ ID NO: 163141 - DNA, 450 bp, Homo sapiens
  Payload ID: 12150
  Gene Symbol: OSBPL2
  Gene Name: oxysterol binding protein-like 2
  ENST ID: ENST00000448156
  CDS Start-End: 1-231
aaaccatttaatccactcttgggagaaacgtatgaattaatcagggaagatttaggattcagatttatatcggaacaggtcagtcaccacccccccatcagtgcgttccactcggaaggtctcaaccatgacttcctgttccatggctccatctaccccaagctcaagttctggggcaaaagcgtggaggcggagccccgaggcaccatcaccctggagctgctcaagtgagtgtcgtgtcaaccaaagacacctcagagcaaaacacaagtctccaacaaatgccggccgctaagacccgacagacacagaccggatgctggcgtcctcctgggccaccagttctgagacgtgagtcttgccaagccactgcctgcagtcttgttgtaggcagcaggtcctaacaaatacatacagaaataagtaataaacgacaccttgcctgatgaa

SEQ ID NO: 163142 - DNA, 754 bp, Homo sapiens
  Payload ID: 12150
  Gene Symbol: OSBPL2
  Gene Name: oxysterol binding protein-like 2
  ENST ID: ENST00000622332
  CDS Start-End: 215-754
ccccgttctctcttcaggagaggctcagccagctccttcctggtcccggcacgtctctagtggcgccgactgacagtggcccaccaatcttcagtgtctattggatttttccaagagaaagtttgtaaaattccttacactgtagatgtggatcagatacgatgattcagtagaagagcacatgtcaggggcagtggaggctggctgctgaaggatgaacggagaggaagaattctttgatgccgtcacaggctttgattctgataactcttctggggaattttcagaggcaaatcagaaagtcacgggaatgattgacttagacaccagcaaaaataataggattgggaaaactggggagaggccctctcaagagaacggaattcagaaacacaggacatcgctgccggctcccatgttcagcagaagcgacttcagcgtgtggaccatcctgaagaagtgtgttggcctggagctgtccaagatcacgatgccaatcgccttcaacgagcctctgagcttcttgcagcggatcacggagtacatggagcacgtgtacctcatccacagggcctcctgccagccccagcccctggagaggatgcagtctgtggctgcttttgctgtttcggctgtggcttcccagtgggagaggaccggcaaaccatttaatccactcttgggagaaacgtatgaattaatcagggaagatttaggattcagatttatatcggaacaggtcagtcaccacccc

SEQ ID NO: 163143 - DNA, 582 bp, Homo sapiens
  Payload ID: 12150
  Gene Symbol: OSBPL2
  Gene Name: oxysterol binding protein-like 2
  ENST ID: ENST00000618509
  CDS Start-End: 515-582
aaaactaaaaatactctcctccccacagcagagaagccagggctgtcacgtcgcagaggagactggagagctgcggcggggaggggtcagctgcggccacgtgagggccaggcccctctctgactgcccaggctgcatccacacagaagattccatggctttccataaaagagagtgggagaatgtcctctctaaaggcctggggagtgcctggggagaggagacagcctcagctggggctcaccagccagcagctgccagccaggccagcaatgccaaggcacccggcgttcctggaagccaagccctgtttgatctaatggggcagctgtgggtgcagacccagataaagagataaacccagacccagaaacctgggggaggagatcttcagtgtctattggatttttccaagagaaagtttgtaaaattccttacactgtagatgtggatcagatacgatgattcagtagaagagcacatgtcaggggcagtggaggctggctgctgaaggatgaacggagaggaagaattctttgatgccgtcacaggctttgattctgataactcttctggggaatt

SEQ ID NO: 163144 - DNA, 6760 bp, Homo sapiens
  Payload ID: 12151
  Gene Symbol: OSBPL3
  Gene Name: oxysterol binding protein-like 3
  Uniprot ID: Q9H4L5
  ENST ID: ENST00000313367
  CDS Start-End: 453-3116
ggcgcgcgccgagaagttctgggcaaagtactcagaactggccgcgtgctggtggcgcccgccagccggcccgggagaggggacttgagcgcttcgcggccggtgcgcagcgcggctccggccccgcagtctgtctgcaagtggccatccccgcccccgactcctgcggccggtgcgggagctgtcagctgcacgttgcgggggtaccggagaagccggggttgccttctcccggttctgtgcgctaaccccggagcccggccccggggaactagggagcgtctccggctgcacagcgctcaggttttagggtttcctttgggccacccaaaatgttttttaaatactttggataagagctaaaccacctgccactggggacttccatactctcggctcccttgtcatctgatggcattttgattgtctcgaggccaagtgacttgctgtccatgatgagtgatgagaagaaccttggtgtgtcccaaaaattggtatcaccttcaaggagcacaagtagctgctcttccaagcaaggaagtcgacaggacagctgggaagtggtggaaggactgaggggggagatgaattacacccaggagccaccagttcagaaaggatttttgctgaaaaagaggaagtggcccttaaaaggctggcataagagattcttctatctggacaaaggaatcttgaaatatgccaagagccaaaccgatatagagagagagaagctgcatggctgcattgatgtcgggctctcagtgatgtctgtaaagaagtcatcaaaatgcatagaccttgacaccgaggagcacatctaccatctgaaggtcaagtcagaagaagtctttgatgagtgggtatcgaaacttcgccaccacagaatgtatcgtcagaatgaaattgccatgtttccacatgaagttaaccactttttctcagggtccaccatcacagactcttcatctggggtgtttgactccatttcaagtaggaagcgtagcagtatatcaaagcagaatttatttcaaactggaagcaatgtatcattttcttgtggtggtgagacacgagttccattatggttacagtcttcagaggacatggaaaaatgctccaaagacctggcgcactgtcatgcctacctggtagaaatgagccagctcctgcaaagcatggacgtcctgcatcggacatactcggcaccagctatcaacgccatccagggtggatcttttgaaagtcccaaaaaggaaaaaagatcgcacaggaggtggcggtccagagctattggcaaagatgctaaaggaacactgcaggtcccgaaacctttttctggcccagtaagactacactcctccaatcctaatttgtcaacactagattttggagaagagaaaaattattctgatggctctgaaacctcatcagagttttctaaaatgcaagaagatctgtgtcatattgcccataaagtttacttcactttaaggtcagcttttaatatcatgtcagcggagagagagaaactgaagcagctgatggagcaggatgcctcctcctccccgtctgctcaggtcattggtctgaagaacgccctgtcatccgccctagcacaaaacacagatcttaaagaacgcttacgcagaatccatgccgagtctctgctcctcgactcccccgctgtcgccaagtcgggtgacaatctggcagaggaaaactccagagatgaaaaccgagctctagttcatcagctttctaatgaaagtagactctccatcactgactccctttctgagttttttgatgctcaggaagttctgttatctccaagctcttcagaaaacgagatttctgatgatgactcatatgtcagtgacataagtgataatctttccttagataatctcagtaatgatttagataatgagagacagaccttggggcctgtccttgatagtggtcgggaagcgaagtcccggagaagaacgtgcctgccggcgccctgcccgagcagcagtaacatcagcctgtggaacatcctgaggaacaacatcgggaaggacctgtccaaggtggccatgccggtggagctgaacgagcccctgaacacgctgcagaggctctgcgaggagctggagtacagcgagctcctggacaaggccgcgcagattcccagccccctggaaaggatggtatatgtggcagcctttgccatatcagcgtatgcatctagctactaccgagctggaagcaagccatttaatccggttcttggagaaacatatgaatgtattcgggaggacaagggcttccagtttttttcagaacaggtcagccaccatccgcctatctctgcgtgtcatgctgagtctagaaattttgttttctggcaagatgtgagatggaaaaacaaattctggggcaaatccatggaaattgttccaattggcacaacccatgtgactctgccagtttttggggatcattttgagtggaacaaagtgacctcttgcatccataacatcttaagcgggcagaggtggattgagcactatggagagattgtcatcaagaacctgcatgatgattcctgctactgcaaagtgaattttataaaggcaaaatactggagcactaatgcccatgagattgaaggcacagtgtttgacaggagtggaaaagcggttcatcggctgtttgggaaatggcatgaaagcatctactgtggcggcggctcctcttctgcctgtgtatggagagcaaatcctatgccgaaaggctacgagcaatactatagcttcacacagtttgcgctggaattaaatgaaatggatccatcatcaaagtctttattgccacctactgacactcgatttaggccagaccagaggtttctagaggaagggaacttagaagaagctgaaatacaaaagcagaggattgaacaactgcagagagaaaggcggcgggtcttagaagaaaatcatgtggagcaccagcctcggtttttcaggaaatccgacgatgactcttgggtgagcaacggcacctatttggaacttagaaaagatcttggtttttccaaactggaccatcctgtcttatggtgaaaaagtaaagaagaaagataacattagtgtatttctcctgtgcttgccttctgaagtggcacaaacctgtgtttatatatttaaaagatactctaggatgatcacttgtgcttagcttagcattgtaactctttaagtctatattttcctcagtgcgtttctttacaatttcaaatgttaccctgattgtttatatgaatgtagaacaccttgacatttctttttatatataaactatttaataaaaatgaaagattgaatgttcatgtgtgggttaaaaaaagaagctttaacactaattttccaaaggttagggaagattccaattaaatttatgccttataaaattatgttgtagaaaaaaaatcaacctctcccaggtgcattaagaaataagaattcccagggttactcacccatgcgtaagctacccaagtttaatttggtagctgaaatatctttttgcctcagacagctcttgaattgctcatacagaacaattctgctggtgctggagtctgaagaatattttcatttgcattttagtggttagggagaggatataagattaatggaatgtatatttttatataagacgtatacggcaccttcttgaaaaggaagcatttgaacttgttcctccctatagttctattgccttatatgcaaaattgtaccctgttgctcagagaaattattcataagagaaaagaattccaattaattaaatatcacaatagcatcccagagagacagtaggaaatttctccttagtgagagctgagtccttgagaagttaagagactgtttcctgcttcccaccccaccccgttttttgtccctccgtttgatcacctccctgttgagtatggaatgtcccagtttaatataaaacatacagtttattccacacagcagtttgactttgtaaaagtttagcaaaataactgattgttttggataactcaacatgtttttcttaaatgctgttttagtattttctacctcttaataagcaccatattttagatcttgtataaaaagttgccatctgccttatagacaaatgtagagaattgatgttcttgctttgtgttgtgttctggtaaagctttaagtgagtgtcttacccctttcctatactttcttgttatccatatcattcttttgtgagttttgcagcagtcttgaataatacagattataactactgaaaggggaaccttcgtctttttaaatgtgttatttcacattacaataatatgtgtagtagttgaattgtgttatcaaagcatgtccaacttctgtccagatgacattaaaaccaaagcctaattgttaagcctcttattctaaagtccatagcaatgctatggaatatcaagtataatgatgtagtaaaaagatttctccagaaaacactttgagatacttaaagaaattcagagcatatcgaatgttatgaatgaagagtaaaataattacaggaaaagaatgcatgatttttcattgtcacaccaaataaccagttggacaatattgcattttcaaaatggagagttatttaaagtggatgtgtagccttctggaatctgcacgtgactggcattttaaaacaactcattaaatattggattcattttatcgagatgccaagatgaacacaatgtgaatatcatttccatttctaagcagttgaatgacacagtcagattctttggtgtatgctttgttctttccatctcaagcatttatccaaattctgctcacagacatgaggaagcaggctgtagatttaagggcactcaaggggaaaacaaatgtagtttccacagtgtgaggataaatgtagaatcgtggtaatattggctgttaaattggcctgctccagagactggctcaaaaaagaaagaagcaacgaaaacaaaatgcacagcctgaatggacgtagcactgtcatgtggcatttggaaaatctttaattatcctaatgttatttcacttgcccttatgctttattttagagtcccagggacaactggatgaaacattacgtctgtagtcatcttatttgagatgggggtgggaacgaattaaaatatgatagagaactatatgcagattttaaaatctagtcagtactagcatctataaagggcttttctgaaatttaaacagcttggtgatgcatcctgatattataagcttaaaactatcttgagggggaaatgacttcttttctccttctgtcccttttctcaaaagcatctttcccccaaatgtatgtctctaggacattttatagttttaagaggaagaaaacagaaacgtggcatcatttgggaagaaccaaggtagaatttaattttctggactttaaatctcctggttaaataatgctaatcactgtaccatttgagttacatgttttaacctcttttttttttctaattattccatccaaaatttctggtgaattacacagaaatttttggaaatgggactttgtgcaggtaaccaccctgcacttcaggtaatgttcctgtcacagctgtcgactaccccacgctgcaggaaatccattcagaaatgagctaacagtctccagtgtagcaggagagccagtcacttccctccccaggccccaaagcaccccaaggctggtattccttgagtcataggtattaataataaaagcctcaatgcagcttctccatgtagttcctctcctacaagccaggtggattctggtcctaactaaagagatgggagttcacctgagggcaagaagtacccaggatgcccaaacagccgcacaggtgtcctgtgcttcctgtgagacttcctgggggaaatatacaaactaatatattttttaatgtttacgtcatttacactgctgcttttctcatattctgcttttaattacttgtagtaaatcatttgtttgggcttcaagcactgtcttccatctgcatcttccagatttatcatgagtgatcttgttctactgttaaagatgtcaagcctaaaaagtaataaagtttttatttggctgttgaaccttgatgtagcccctactacatacactacaagttatgccttctggctactacagaatctccgcagaccttttagttatgagtagaagcaataagaaggtgtccttatggtcttaggaataatagttccaatgtattggcataatttgtttgaatgtctttattttgatattaacaccggcataaatctatttttgctaccagatgatagctattttcatttgctctattttcctctgcattgtactaatctgttactcagtgttagtcttcatttttctgtgttggaaacctgcgtcatgtaaatatctgcaaatcatgacagtctaaagtgcaaaccattttcagagactttggggaatgcagtgatcagaagtggctaatttattttatttctgattattttatccagagggtacttttttaatggatatttgtaaatcttccacttaaccactgaaaattattttgttttaatcccacccttccatccatacctctgcctccccaaaaagctcctattaatttgcttatccccctcatgtagctagttgaatgtgaataaataacatggaaaaaaag

SEQ ID NO: 163145 - DNA, 2707 bp, Homo sapiens
  Payload ID: 12151
  Gene Symbol: OSBPL3
  Gene Name: oxysterol binding protein-like 3
  Uniprot ID: Q9H4L5
  ENST ID: ENST00000396429
  CDS Start-End: 104-2659
tggataagagctaaaccacctgccactggggacttccatactctcggctcccttgtcatctgatggcattttgattgtctcgaggccaagtgacttgctgtccatgatgagtgatgagaagaaccttggtgtgtcccaaaaattggtatcaccttcaaggagcacaagtagctgctcttccaagcaaggaagtcgacaggacagctgggaagtggtggaaggactgaggggggagatgaattacacccaggagccaccagttcagaaaggatttttgctgaaaaagaggaagtggcccttaaaaggctggcataagagattcttctatctggacaaaggaatcttgaaatatgccaagagccaaaccgatatagagagagagaagctgcatggctgcattgatgtcgggctctcagtgatgtctgtaaagaagtcatcaaaatgcatagaccttgacaccgaggagcacatctaccatctgaaggtcaagtcagaagaagtctttgatgagtgggtatcgaaacttcgccaccacagaatgtatcgtcagaatgaaattgccatgtttccacatgaagttaaccactttttctcagggtccaccatcacagactcttcatctggggtgtttgactccatttcaagtaggaagcgtagcagtatatcaaagcagaatttatttcaaactggaagcaatgtatcattttcttgtggtggtgagacacgagttccattatggttacagtcttcagaggacatggaaaaatgctccaaagacctggcgcactgtcatgcctacctggtagaaatgagccagctcctgcaaagcatggacgtcctgcatcggacatactcggcaccagctatcaacgccatccagggtggatcttttgaaagtcccaaaaaggaaaaaagatcgcacaggaggtggcggtccagagctattggcaaagatgctaaaggaacactgcaggtcccgaaacctttttctggcccagtaagactacactcctccaatcctaatttgtcaacactagattttggagaagagaaaaattattctgatggctctgaaacctcatcagagttttctaaaatgcaagaagatctgtgtcatattgcccataaagtttacttcactttaaggtcagcttttaatatcatgtcagcggagagagagaaactgaagcagctgatggagcaggatgcctcctcctccccgtctgctcaggtcattggtctgaagaacgccctgtcatccgaaaactccagagatgaaaaccgagctctagttcatcagctttctaatgaaagtagactctccatcactgactccctttctgagttttttgatgctcaggaagttctgttatctccaagctcttcagaaaacgagatttctgatgatgactcatatgtcagtgacataagtgataatctttccttagataatctcagtaatgatttagataatgagagacagaccttggggcctgtccttgatagtggtcgggaagcgaagtcccggagaagaacgtgcctgccggcgccctgcccgagcagcagtaacatcagcctgtggaacatcctgaggaacaacatcgggaaggacctgtccaaggtggccatgccggtggagctgaacgagcccctgaacacgctgcagaggctctgcgaggagctggagtacagcgagctcctggacaaggccgcgcagattcccagccccctggaaaggatggtatatgtggcagcctttgccatatcagcgtatgcatctagctactaccgagctggaagcaagccatttaatccggttcttggagaaacatatgaatgtattcgggaggacaagggcttccagtttttttcagaacaggtcagccaccatccgcctatctctgcgtgtcatgctgagtctagaaattttgttttctggcaagatgtgagatggaaaaacaaattctggggcaaatccatggaaattgttccaattggcacaacccatgtgactctgccagtttttggggatcattttgagtggaacaaagtgacctcttgcatccataacatcttaagcgggcagaggtggattgagcactatggagagattgtcatcaagaacctgcatgatgattcctgctactgcaaagtgaattttataaaggcaaaatactggagcactaatgcccatgagattgaaggcacagtgtttgacaggagtggaaaagcggttcatcggctgtttgggaaatggcatgaaagcatctactgtggcggcggctcctcttctgcctgtgtatggagagcaaatcctatgccgaaaggctacgagcaatactatagcttcacacagtttgcgctggaattaaatgaaatggatccatcatcaaagtctttattgccacctactgacactcgatttaggccagaccagaggtttctagaggaagggaacttagaagaagctgaaatacaaaagcagaggattgaacaactgcagagagaaaggcggcgggtcttagaagaaaatcatgtggagcaccagcctcggtttttcaggaaatccgacgatgactcttgggtgagcaacggcacctatttggaacttagaaaagatcttggtttttccaaactggaccatcctgtcttatggtgaaaaagtaaagaagaaagataacattagtgtatttctcctgtgcttgcc

SEQ ID NO: 163146 - DNA, 2969 bp, Homo sapiens
  Payload ID: 12151
  Gene Symbol: OSBPL3
  Gene Name: oxysterol binding protein-like 3
  Uniprot ID: Q9H4L5
  ENST ID: ENST00000396431
  CDS Start-End: 141-2711
tttcctttgggccacccaaaatgttttttaaatactttggataagagctaaaccacctgccactggggacttccatactctcggctcccttgtcatctgatggcattttgattgtctcgaggccaagtgacttgctgtccatgatgagtgatgagaagaaccttggtgtgtcccaaaaattggtatcaccttcaaggagcacaagtagctgctcttccaagcaaggaagtcgacaggacagctgggaagtggtggaaggactgaggggggagatgaattacacccaggagccaccagttcagaaaggatttttgctgaaaaagaggaagtggcccttaaaaggctggcataagagattcttctatctggacaaaggaatcttgaaatatgccaagagccaaaccgatatagagagagagaagctgcatggctgcattgatgtcgggctctcagtgatgtctgtaaagaagtcatcaaaatgcatagaccttgacaccgaggagcacatctaccatctgaaggtcaagtcagaagaagtctttgatgagtgggtatcgaaacttcgccaccacagaatgtatcgtcagaatgaaattgccatgtttccacatgaagttaaccactttttctcagggtccaccatcacagactcttcatctggggtgtttgactccatttcaagtaggaagcgtagcagtatatcaaagcagaatttatttcaaactggaagcaatgtatcattttcttgtggtggtgagacacgagttccattatggttacagtcttcagaggacatggaaaaatgctccaaagacctggcgcactgtcatgcctacctggtagaaatgagccagctcctgcaaagcatggacgtcctgcatcggacatactcggcaccagctatcaacgccatccaggtcccgaaacctttttctggcccagtaagactacactcctccaatcctaatttgtcaacactagattttggagaagagaaaaattattctgatggctctgaaacctcatcagagttttctaaaatgcaagaagatctgtgtcatattgcccataaagtttacttcactttaaggtcagcttttaatatcatgtcagcggagagagagaaactgaagcagctgatggagcaggatgcctcctcctccccgtctgctcaggtcattggtctgaagaacgccctgtcatccgccctagcacaaaacacagatcttaaagaacgcttacgcagaatccatgccgagtctctgctcctcgactcccccgctgtcgccaagtcgggtgacaatctggcagaggaaaactccagagatgaaaaccgagctctagttcatcagctttctaatgaaagtagactctccatcactgactccctttctgagttttttgatgctcaggaagttctgttatctccaagctcttcagaaaacgagatttctgatgatgactcatatgtcagtgacataagtgataatctttccttagataatctcagtaatgatttagataatgagagacagaccttggggcctgtccttgatagtggtcgggaagcgaagtcccggagaagaacgtgcctgccggcgccctgcccgagcagcagtaacatcagcctgtggaacatcctgaggaacaacatcgggaaggacctgtccaaggtggccatgccggtggagctgaacgagcccctgaacacgctgcagaggctctgcgaggagctggagtacagcgagctcctggacaaggccgcgcagattcccagccccctggaaaggatggtatatgtggcagcctttgccatatcagcgtatgcatctagctactaccgagctggaagcaagccatttaatccggttcttggagaaacatatgaatgtattcgggaggacaagggcttccagtttttttcagaacaggtcagccaccatccgcctatctctgcgtgtcatgctgagtctagaaattttgttttctggcaagatgtgagatggaaaaacaaattctggggcaaatccatggaaattgttccaattggcacaacccatgtgactctgccagtttttggggatcattttgagtggaacaaagtgacctcttgcatccataacatcttaagcgggcagaggtggattgagcactatggagagattgtcatcaagaacctgcatgatgattcctgctactgcaaagtgaattttataaaggcaaaatactggagcactaatgcccatgagattgaaggcacagtgtttgacaggagtggaaaagcggttcatcggctgtttgggaaatggcatgaaagcatctactgtggcggcggctcctcttctgcctgtgtatggagagcaaatcctatgccgaaaggctacgagcaatactatagcttcacacagtttgcgctggaattaaatgaaatggatccatcatcaaagtctttattgccacctactgacactcgatttaggccagaccagaggtttctagaggaagggaacttagaagaagctgaaatacaaaagcagaggattgaacaactgcagagagaaaggcggcgggtcttagaagaaaatcatgtggagcaccagcctcggtttttcaggaaatccgacgatgactcttgggtgagcaacggcacctatttggaacttagaaaagatcttggtttttccaaactggaccatcctgtcttatggtgaaaaagtaaagaagaaagataacattagtgtatttctcctgtgcttgccttctgaagtggcacaaacctgtgtttatatatttaaaagatactctaggatgatcacttgtgcttagcttagcattgtaactctttaagtctatattttcctcagtgcgtttctttacaatttcaaatgttaccctgattgtttatatgaatgtagaacaccttgacatttctttttatatataaactatttaataaaaatgaaagattg

SEQ ID NO: 163147 - DNA, 3219 bp, Homo sapiens
  Payload ID: 12151
  Gene Symbol: OSBPL3
  Gene Name: oxysterol binding protein-like 3
  Uniprot ID: Q9H4L5
  ENST ID: ENST00000409759
  CDS Start-End: 104-1924
tggataagagctaaaccacctgccactggggacttccatactctcggctcccttgtcatctgatggcattttgattgtctcgaggccaagtgacttgctgtccatgatgagtgatgagaagaaccttggtgtgtcccaaaaattggtatcaccttcaaggagcacaagtagctgctcttccaagcaaggaagtcgacaggacagctgggaagtggtggaaggactgaggggggagatgaattacacccaggagccaccagttcagaaaggatttttgctgaaaaagaggaagtggcccttaaaaggctggcataagagattcttctatctggacaaaggaatcttgaaatatgccaagagccaaaccgatatagagagagagaagctgcatggctgcattgatgtcgggctctcagtgatgtctgtaaagaagtcatcaaaatgcatagaccttgacaccgaggagcacatctaccatctgaaggtcaagtcagaagaagtctttgatgagtgggtatcgaaacttcgccaccacagaatgtatcgtcagaatgaaattgccatgtttccacatgaagttaaccactttttctcagggtccaccatcacagactcttcatctggggtgtttgactccatttcaagtaggaagcgtagcagtatatcaaagcagaatttatttcaaactggaagcaatgtatcattttcttgtggtggtgagacacgagttccattatggttacagtcttcagaggacatggaaaaatgctccaaagacctggcgcactgtcatgcctacctggtagaaatgagccagctcctgcaaagcatggacgtcctgcatcggacatactcggcaccagctatcaacgccatccagggtggatcttttgaaagtcccaaaaaggaaaaaagatcgcacaggaggtggcggtccagagctattggcaaagatgctaaaggaacactgcaggtcccgaaacctttttctggcccagtaagactacactcctccaatcctaatttgtcaacactagattttggagaagagaaaaattattctgatggctctgaaacctcatcagagttttctaaaatgcaagaagatctgtgtcatattgcccataaagtttacttcactttaaggtcagcttttaatatcatgtcagcggagagagagaaactgaagcagctgatggagcaggatgcctcctcctccccgtctgctcaggtcattggtctgaagaacgccctgtcatccgaaaactccagagatgaaaaccgagctctagttcatcagctttctaatgaaagtagactctccatcactgactccctttctgagttttttgatgctcaggaagttctgttatctccaagctcttcagaaaacgagatttctgatgatgactcatatgtcagtgacataagtgataatctttccttagataatctcagtaatgatttagataatgagagacagaccttggggcctgtccttgatagtggtcgggaagcgaagtcccggagaagaacgtgcctgccggcgccctgcccgagcagcagtaacatcagcctgtggaacatcctgaggaacaacatcgggaaggacctgtccaaggtggccatgccggtggagctgaacgagcccctgaacacgctgcagaggctctgcgaggagctggagtacagcgagctcctggacaaggccgcgcagattcccagccccctggaaaggatggtgaggagtcagccttcccttgccactgtccagcctcggtccccaagccacgaggccattcacggggcccatcagagagacagcccctgttccctccggtttcattttgattgttccgtaaacaggttcattactcagagctgtctggcttcctccgcctggctgtttccagtcaccttgtgaggatttggagacggggttggggtgcttctccgtggcacttggtgcctggggtagttctgttctgtgggtttgtgcttcctctttctccagaagccttctggctgattgttccgatgtgcccggctggaaaacatgtctttagggctgtctgcatgtttatttttacttccctgggtggacagaatttaatttctcgagctgtttttctcatccagggtatatgtggcagcctttgccatatcagcgtatgcatctagctactaccgagctggaagcaagccatttaatccggttcttggagaaacatatgaatgtattcgggaggacaagggcttccagtttttttcagaacaggtcagccaccatccgcctatctctgcgtgtcatgctgagtctagaaattttgttttctggcaagatgtgagatggaaaaacaaattctggggcaaatccatggaaattgttccaattggcacaacccatgtgactctgccagtttttggggatcattttgagtggaacaaagtgacctcttgcatccataacatcttaagcgggcagaggtggattgagcactatggagagattgtcatcaagaacctgcatgatgattcctgctactgcaaagtgaattttataaaggcaaaatactggagcactaatgcccatgagattgaaggcacagtgtttgacaggagtggaaaagcggttcatcggctgtttgggaaatggcatgaaagcatctactgtggcggcggctcctcttctgcctgtgtatggagagcaaatcctatgccgaaaggctacgagcaatactatagcttcacacagtttgcgctggaattaaatgaaatggatccatcatcaaagtctttattgccacctactgacactcgatttaggccagaccagaggtttctagaggaagggaacttagaagaagctgaaatacaaaagcagaggattgaacaactgcagagagaaaggcggcgggtcttagaagaaaatcatgtggagcaccagcctcggtttttcaggaaatccgacgatgactcttgggtgagcaacggcacctatttggaacttagaaaagatcttggtttttccaaactggaccatcctgtcttatggtgaaaaagtaaagaagaaagataacattagtgtatttctcctgtgcttgccttctgaagtggcacaaacctgtgtttatatatttaaaagatactctaggatgatcacttgtgcttagcttagcattgtaactctttaagtctatattttcctcagtgcgtttc

SEQ ID NO: 163148 - DNA, 3490 bp, Homo sapiens
  Payload ID: 12151
  Gene Symbol: OSBPL3
  Gene Name: oxysterol binding protein-like 3
  Uniprot ID: Q9H4L5
  ENST ID: ENST00000409863
  CDS Start-End: 104-1939
tggataagagctaaaccacctgccactggggacttccatactctcggctcccttgtcatctgatggcattttgattgtctcgaggccaagtgacttgctgtccatgatgagtgatgagaagaaccttggtgtgtcccaaaaattggtatcaccttcaaggagcacaagtagctgctcttccaagcaaggaagtcgacaggacagctgggaagtggtggaaggactgaggggggagatgaattacacccaggagccaccagttcagaaaggatttttgctgaaaaagaggaagtggcccttaaaaggctggcataagagattcttctatctggacaaaggaatcttgaaatatgccaagagccaaaccgatatagagagagagaagctgcatggctgcattgatgtcgggctctcagtgatgtctgtaaagaagtcatcaaaatgcatagaccttgacaccgaggagcacatctaccatctgaaggtcaagtcagaagaagtctttgatgagtgggtatcgaaacttcgccaccacagaatgtatcgtcagaatgaaattgccatgtttccacatgaagttaaccactttttctcagggtccaccatcacagactcttcatctggggtgtttgactccatttcaagtaggaagcgtagcagtatatcaaagcagaatttatttcaaactggaagcaatgtatcattttcttgtggtggtgagacacgagttccattatggttacagtcttcagaggacatggaaaaatgctccaaagacctggcgcactgtcatgcctacctggtagaaatgagccagctcctgcaaagcatggacgtcctgcatcggacatactcggcaccagctatcaacgccatccaggtcccgaaacctttttctggcccagtaagactacactcctccaatcctaatttgtcaacactagattttggagaagagaaaaattattctgatggctctgaaacctcatcagagttttctaaaatgcaagaagatctgtgtcatattgcccataaagtttacttcactttaaggtcagcttttaatatcatgtcagcggagagagagaaactgaagcagctgatggagcaggatgcctcctcctccccgtctgctcaggtcattggtctgaagaacgccctgtcatccgccctagcacaaaacacagatcttaaagaacgcttacgcagaatccatgccgagtctctgctcctcgactcccccgctgtcgccaagtcgggtgacaatctggcagaggaaaactccagagatgaaaaccgagctctagttcatcagctttctaatgaaagtagactctccatcactgactccctttctgagttttttgatgctcaggaagttctgttatctccaagctcttcagaaaacgagatttctgatgatgactcatatgtcagtgacataagtgataatctttccttagataatctcagtaatgatttagataatgagagacagaccttggggcctgtccttgatagtggtcgggaagcgaagtcccggagaagaacgtgcctgccggcgccctgcccgagcagcagtaacatcagcctgtggaacatcctgaggaacaacatcgggaaggacctgtccaaggtggccatgccggtggagctgaacgagcccctgaacacgctgcagaggctctgcgaggagctggagtacagcgagctcctggacaaggccgcgcagattcccagccccctggaaaggatggtgaggagtcagccttcccttgccactgtccagcctcggtccccaagccacgaggccattcacggggcccatcagagagacagcccctgttccctccggtttcattttgattgttccgtaaacaggttcattactcagagctgtctggcttcctccgcctggctgtttccagtcaccttgtgaggatttggagacggggttggggtgcttctccgtggcacttggtgcctggggtagttctgttctgtgggtttgtgcttcctctttctccagaagccttctggctgattgttccgatgtgcccggctggaaaacatgtctttagggctgtctgcatgtttatttttacttccctgggtggacagaatttaatttctcgagctgtttttctcatccagggtatatgtggcagcctttgccatatcagcgtatgcatctagctactaccgagctggaagcaagccatttaatccggttcttggagaaacatatgaatgtattcgggaggacaagggcttccagtttttttcagaacaggtcagccaccatccgcctatctctgcgtgtcatgctgagtctagaaattttgttttctggcaagatgtgagatggaaaaacaaattctggggcaaatccatggaaattgttccaattggcacaacccatgtgactctgccagtttttggggatcattttgagtggaacaaagtgacctcttgcatccataacatcttaagcgggcagaggtggattgagcactatggagagattgtcatcaagaacctgcatgatgattcctgctactgcaaagtgaattttataaaggcaaaatactggagcactaatgcccatgagattgaaggcacagtgtttgacaggagtggaaaagcggttcatcggctgtttgggaaatggcatgaaagcatctactgtggcggcggctcctcttctgcctgtgtatggagagcaaatcctatgccgaaaggctacgagcaatactatagcttcacacagtttgcgctggaattaaatgaaatggatccatcatcaaagtctttattgccacctactgacactcgatttaggccagaccagaggtttctagaggaagggaacttagaagaagctgaaatacaaaagcagaggattgaacaactgcagagagaaaggcggcgggtcttagaagaaaatcatgtggagcaccagcctcggtttttcaggaaatccgacgatgactcttgggtgagcaacggcacctatttggaacttagaaaagatcttggtttttccaaactggaccatcctgtcttatggtgaaaaagtaaagaagaaagataacattagtgtatttctcctgtgcttgccttctgaagtggcacaaacctgtgtttatatatttaaaagatactctaggatgatcacttgtgcttagcttagcattgtaactctttaagtctatattttcctcagtgcgtttctttacaatttcaaatgttaccctgattgtttatatgaatgtagaacaccttgacatttctttttatatataaactatttaataaaaatgaaagattgaatgttcatgtgtgggttaaaaaaagaagctttaacactaattttccaaaggttagggaagattccaattaaatttatgccttataaaattatgttgtagaaaaaaaatcaacctctcccaggtgcattaagaaataagaattcccagggttactcacc

SEQ ID NO: 163149 - DNA, 3344 bp, Homo sapiens
  Payload ID: 12151
  Gene Symbol: OSBPL3
  Gene Name: oxysterol binding protein-like 3
  Uniprot ID: Q9H4L5
  ENST ID: ENST00000409452
  CDS Start-End: 104-2032
tggataagagctaaaccacctgccactggggacttccatactctcggctcccttgtcatctgatggcattttgattgtctcgaggccaagtgacttgctgtccatgatgagtgatgagaagaaccttggtgtgtcccaaaaattggtatcaccttcaaggagcacaagtagctgctcttccaagcaaggaagtcgacaggacagctgggaagtggtggaaggactgaggggggagatgaattacacccaggagccaccagttcagaaaggatttttgctgaaaaagaggaagtggcccttaaaaggctggcataagagattcttctatctggacaaaggaatcttgaaatatgccaagagccaaaccgatatagagagagagaagctgcatggctgcattgatgtcgggctctcagtgatgtctgtaaagaagtcatcaaaatgcatagaccttgacaccgaggagcacatctaccatctgaaggtcaagtcagaagaagtctttgatgagtgggtatcgaaacttcgccaccacagaatgtatcgtcagaatgaaattgccatgtttccacatgaagttaaccactttttctcagggtccaccatcacagactcttcatctggggtgtttgactccatttcaagtaggaagcgtagcagtatatcaaagcagaatttatttcaaactggaagcaatgtatcattttcttgtggtggtgagacacgagttccattatggttacagtcttcagaggacatggaaaaatgctccaaagacctggcgcactgtcatgcctacctggtagaaatgagccagctcctgcaaagcatggacgtcctgcatcggacatactcggcaccagctatcaacgccatccagggtggatcttttgaaagtcccaaaaaggaaaaaagatcgcacaggaggtggcggtccagagctattggcaaagatgctaaaggaacactgcaggtcccgaaacctttttctggcccagtaagactacactcctccaatcctaatttgtcaacactagattttggagaagagaaaaattattctgatggctctgaaacctcatcagagttttctaaaatgcaagaagatctgtgtcatattgcccataaagtttacttcactttaaggtcagcttttaatatcatgtcagcggagagagagaaactgaagcagctgatggagcaggatgcctcctcctccccgtctgctcaggtcattggtctgaagaacgccctgtcatccgccctagcacaaaacacagatcttaaagaacgcttacgcagaatccatgccgagtctctgctcctcgactcccccgctgtcgccaagtcgggtgacaatctggcagaggaaaactccagagatgaaaaccgagctctagttcatcagctttctaatgaaagtagactctccatcactgactccctttctgagttttttgatgctcaggaagttctgttatctccaagctcttcagaaaacgagatttctgatgatgactcatatgtcagtgacataagtgataatctttccttagataatctcagtaatgatttagataatgagagacagaccttggggcctgtccttgatagtggtcgggaagcgaagtcccggagaagaacgtgcctgccggcgccctgcccgagcagcagtaacatcagcctgtggaacatcctgaggaacaacatcgggaaggacctgtccaaggtggccatgccggtggagctgaacgagcccctgaacacgctgcagaggctctgcgaggagctggagtacagcgagctcctggacaaggccgcgcagattcccagccccctggaaaggatggtgaggagtcagccttcccttgccactgtccagcctcggtccccaagccacgaggccattcacggggcccatcagagagacagcccctgttccctccggtttcattttgattgttccgtaaacaggttcattactcagagctgtctggcttcctccgcctggctgtttccagtcaccttgtgaggatttggagacggggttggggtgcttctccgtggcacttggtgcctggggtagttctgttctgtgggtttgtgcttcctctttctccagaagccttctggctgattgttccgatgtgcccggctggaaaacatgtctttagggctgtctgcatgtttatttttacttccctgggtggacagaatttaatttctcgagctgtttttctcatccagggtatatgtggcagcctttgccatatcagcgtatgcatctagctactaccgagctggaagcaagccatttaatccggttcttggagaaacatatgaatgtattcgggaggacaagggcttccagtttttttcagaacaggtcagccaccatccgcctatctctgcgtgtcatgctgagtctagaaattttgttttctggcaagatgtgagatggaaaaacaaattctggggcaaatccatggaaattgttccaattggcacaacccatgtgactctgccagtttttggggatcattttgagtggaacaaagtgacctcttgcatccataacatcttaagcgggcagaggtggattgagcactatggagagattgtcatcaagaacctgcatgatgattcctgctactgcaaagtgaattttataaaggcaaaatactggagcactaatgcccatgagattgaaggcacagtgtttgacaggagtggaaaagcggttcatcggctgtttgggaaatggcatgaaagcatctactgtggcggcggctcctcttctgcctgtgtatggagagcaaatcctatgccgaaaggctacgagcaatactatagcttcacacagtttgcgctggaattaaatgaaatggatccatcatcaaagtctttattgccacctactgacactcgatttaggccagaccagaggtttctagaggaagggaacttagaagaagctgaaatacaaaagcagaggattgaacaactgcagagagaaaggcggcgggtcttagaagaaaatcatgtggagcaccagcctcggtttttcaggaaatccgacgatgactcttgggtgagcaacggcacctatttggaacttagaaaagatcttggtttttccaaactggaccatcctgtcttatggtgaaaaagtaaagaagaaagataacattagtgtatttctcctgtgcttgccttctgaagtggcacaaacctgtgtttatatatttaaaagatactctaggatgatcacttgtgcttagcttagcattgtaactctttaagtctatattttcctcagtgcgtttctttacaatttcaaatgt

SEQ ID NO: 163150 - DNA, 2614 bp, Homo sapiens
  Payload ID: 12151
  Gene Symbol: OSBPL3
  Gene Name: oxysterol binding protein-like 3
  Uniprot ID: Q9H4L5
  ENST ID: ENST00000409069
  CDS Start-End: 104-2566
tggataagagctaaaccacctgccactggggacttccatactctcggctcccttgtcatctgatggcattttgattgtctcgaggccaagtgacttgctgtccatgatgagtgatgagaagaaccttggtgtgtcccaaaaattggtatcaccttcaaggagcacaagtagctgctcttccaagcaaggaagtcgacaggacagctgggaagtggtggaaggactgaggggggagatgaattacacccaggagccaccagttcagaaaggatttttgctgaaaaagaggaagtggcccttaaaaggctggcataagagattcttctatctggacaaaggaatcttgaaatatgccaagagccaaaccgatatagagagagagaagctgcatggctgcattgatgtcgggctctcagtgatgtctgtaaagaagtcatcaaaatgcatagaccttgacaccgaggagcacatctaccatctgaaggtcaagtcagaagaagtctttgatgagtgggtatcgaaacttcgccaccacagaatgtatcgtcagaatgaaattgccatgtttccacatgaagttaaccactttttctcagggtccaccatcacagactcttcatctggggtgtttgactccatttcaagtaggaagcgtagcagtatatcaaagcagaatttatttcaaactggaagcaatgtatcattttcttgtggtggtgagacacgagttccattatggttacagtcttcagaggacatggaaaaatgctccaaagacctggcgcactgtcatgcctacctggtagaaatgagccagctcctgcaaagcatggacgtcctgcatcggacatactcggcaccagctatcaacgccatccaggtcccgaaacctttttctggcccagtaagactacactcctccaatcctaatttgtcaacactagattttggagaagagaaaaattattctgatggctctgaaacctcatcagagttttctaaaatgcaagaagatctgtgtcatattgcccataaagtttacttcactttaaggtcagcttttaatatcatgtcagcggagagagagaaactgaagcagctgatggagcaggatgcctcctcctccccgtctgctcaggtcattggtctgaagaacgccctgtcatccgaaaactccagagatgaaaaccgagctctagttcatcagctttctaatgaaagtagactctccatcactgactccctttctgagttttttgatgctcaggaagttctgttatctccaagctcttcagaaaacgagatttctgatgatgactcatatgtcagtgacataagtgataatctttccttagataatctcagtaatgatttagataatgagagacagaccttggggcctgtccttgatagtggtcgggaagcgaagtcccggagaagaacgtgcctgccggcgccctgcccgagcagcagtaacatcagcctgtggaacatcctgaggaacaacatcgggaaggacctgtccaaggtggccatgccggtggagctgaacgagcccctgaacacgctgcagaggctctgcgaggagctggagtacagcgagctcctggacaaggccgcgcagattcccagccccctggaaaggatggtatatgtggcagcctttgccatatcagcgtatgcatctagctactaccgagctggaagcaagccatttaatccggttcttggagaaacatatgaatgtattcgggaggacaagggcttccagtttttttcagaacaggtcagccaccatccgcctatctctgcgtgtcatgctgagtctagaaattttgttttctggcaagatgtgagatggaaaaacaaattctggggcaaatccatggaaattgttccaattggcacaacccatgtgactctgccagtttttggggatcattttgagtggaacaaagtgacctcttgcatccataacatcttaagcgggcagaggtggattgagcactatggagagattgtcatcaagaacctgcatgatgattcctgctactgcaaagtgaattttataaaggcaaaatactggagcactaatgcccatgagattgaaggcacagtgtttgacaggagtggaaaagcggttcatcggctgtttgggaaatggcatgaaagcatctactgtggcggcggctcctcttctgcctgtgtatggagagcaaatcctatgccgaaaggctacgagcaatactatagcttcacacagtttgcgctggaattaaatgaaatggatccatcatcaaagtctttattgccacctactgacactcgatttaggccagaccagaggtttctagaggaagggaacttagaagaagctgaaatacaaaagcagaggattgaacaactgcagagagaaaggcggcgggtcttagaagaaaatcatgtggagcaccagcctcggtttttcaggaaatccgacgatgactcttgggtgagcaacggcacctatttggaacttagaaaagatcttggtttttccaaactggaccatcctgtcttatggtgaaaaagtaaagaagaaagataacattagtgtatttctcctgtgcttgcc

SEQ ID NO: 163151 - DNA, 3088 bp, Homo sapiens
  Payload ID: 12151
  Gene Symbol: OSBPL3
  Gene Name: oxysterol binding protein-like 3
  Uniprot ID: Q9H4L5
  ENST ID: ENST00000409555
  CDS Start-End: 104-1831
tggataagagctaaaccacctgccactggggacttccatactctcggctcccttgtcatctgatggcattttgattgtctcgaggccaagtgacttgctgtccatgatgagtgatgagaagaaccttggtgtgtcccaaaaattggtatcaccttcaaggagcacaagtagctgctcttccaagcaaggaagtcgacaggacagctgggaagtggtggaaggactgaggggggagatgaattacacccaggagccaccagttcagaaaggatttttgctgaaaaagaggaagtggcccttaaaaggctggcataagagattcttctatctggacaaaggaatcttgaaatatgccaagagccaaaccgatatagagagagagaagctgcatggctgcattgatgtcgggctctcagtgatgtctgtaaagaagtcatcaaaatgcatagaccttgacaccgaggagcacatctaccatctgaaggtcaagtcagaagaagtctttgatgagtgggtatcgaaacttcgccaccacagaatgtatcgtcagaatgaaattgccatgtttccacatgaagttaaccactttttctcagggtccaccatcacagactcttcatctggggtgtttgactccatttcaagtaggaagcgtagcagtatatcaaagcagaatttatttcaaactggaagcaatgtatcattttcttgtggtggtgagacacgagttccattatggttacagtcttcagaggacatggaaaaatgctccaaagacctggcgcactgtcatgcctacctggtagaaatgagccagctcctgcaaagcatggacgtcctgcatcggacatactcggcaccagctatcaacgccatccaggtcccgaaacctttttctggcccagtaagactacactcctccaatcctaatttgtcaacactagattttggagaagagaaaaattattctgatggctctgaaacctcatcagagttttctaaaatgcaagaagatctgtgtcatattgcccataaagtttacttcactttaaggtcagcttttaatatcatgtcagcggagagagagaaactgaagcagctgatggagcaggatgcctcctcctccccgtctgctcaggtcattggtctgaagaacgccctgtcatccgaaaactccagagatgaaaaccgagctctagttcatcagctttctaatgaaagtagactctccatcactgactccctttctgagttttttgatgctcaggaagttctgttatctccaagctcttcagaaaacgagatttctgatgatgactcatatgtcagtgacataagtgataatctttccttagataatctcagtaatgatttagataatgagagacagaccttggggcctgtccttgatagtggtcgggaagcgaagtcccggagaagaacgtgcctgccggcgccctgcccgagcagcagtaacatcagcctgtggaacatcctgaggaacaacatcgggaaggacctgtccaaggtggccatgccggtggagctgaacgagcccctgaacacgctgcagaggctctgcgaggagctggagtacagcgagctcctggacaaggccgcgcagattcccagccccctggaaaggatggtgaggagtcagccttcccttgccactgtccagcctcggtccccaagccacgaggccattcacggggcccatcagagagacagcccctgttccctccggtttcattttgattgttccgtaaacaggttcattactcagagctgtctggcttcctccgcctggctgtttccagtcaccttgtgaggatttggagacggggttggggtgcttctccgtggcacttggtgcctggggtagttctgttctgtgggtttgtgcttcctctttctccagaagccttctggctgattgttccgatgtgcccggctggaaaacatgtctttagggctgtctgcatgtttatttttacttccctgggtggacagaatttaatttctcgagctgtttttctcatccagggtatatgtggcagcctttgccatatcagcgtatgcatctagctactaccgagctggaagcaagccatttaatccggttcttggagaaacatatgaatgtattcgggaggacaagggcttccagtttttttcagaacaggtcagccaccatccgcctatctctgcgtgtcatgctgagtctagaaattttgttttctggcaagatgtgagatggaaaaacaaattctggggcaaatccatggaaattgttccaattggcacaacccatgtgactctgccagtttttggggatcattttgagtggaacaaagtgacctcttgcatccataacatcttaagcgggcagaggtggattgagcactatggagagattgtcatcaagaacctgcatgatgattcctgctactgcaaagtgaattttataaaggcaaaatactggagcactaatgcccatgagattgaaggcacagtgtttgacaggagtggaaaagcggttcatcggctgtttgggaaatggcatgaaagcatctactgtggcggcggctcctcttctgcctgtgtatggagagcaaatcctatgccgaaaggctacgagcaatactatagcttcacacagtttgcgctggaattaaatgaaatggatccatcatcaaagtctttattgccacctactgacactcgatttaggccagaccagaggtttctagaggaagggaacttagaagaagctgaaatacaaaagcagaggattgaacaactgcagagagaaaggcggcgggtcttagaagaaaatcatgtggagcaccagcctcggtttttcaggaaatccgacgatgactcttgggtgagcaacggcacctatttggaacttagaaaagatcttggtttttccaaactggaccatcctgtcttatggtgaaaaagtaaagaagaaagataacattagtgtatttctcctgtgcttgccttctgaagtggcacaaacctgtgtttatatatttaaaagatactctaggatgatcacttgtgcttagcttagcat

SEQ ID NO: 163152 - DNA, 540 bp, Homo sapiens
  Payload ID: 12151
  Gene Symbol: OSBPL3
  Gene Name: oxysterol binding protein-like 3
  ENST ID: ENST00000441059
  CDS Start-End: 274-540
attatgtgcgtcgaggataagccaacctttataggtaagagtgctagtcattttatggactcataggatcactgaatttgaaagctagacaggatcgtcaggctgaaggaatcttggtaaatgggttttagggtttcctttgggccacccaaaatgttttttaaatactttggataagagctaaaccacctgccactggggacttccatactctcggctcccttgtcatctgatggcattttgattgtctcgaggccaagtgacttgctgtccatgatgagtgatgagaagaaccttggtgtgtcccaaaaattggtatcaccttcaaggagcacaagtagctgctcttccaagcaaggaagtcgacaggacagctgggaagtggtggaaggactgaggggggagatgaattacacccaggagccaccagttcagaaaggatttttgctgaaaaagaggaagtggcccttaaaaggctggcataagagattcttctatctggacaaaggaatcttgaaatatgccaagagccaaaccgat

SEQ ID NO: 163153 - DNA, 534 bp, Homo sapiens
  Payload ID: 12151
  Gene Symbol: OSBPL3
  Gene Name: oxysterol binding protein-like 3
  ENST ID: ENST00000415162
  CDS Start-End: 197-534
acctgtgcttgtcattatgtgcgtcgaggataagccaacctttataggttttagggtttcctttgggccacccaaaatgttttttaaatactttggataagagctaaaccacctgccactggggacttccatactctcggctcccttgtcatctgatggcattttgattgtctcgaggccaagtgacttgctgtccatgatgagtgatgagaagaaccttggtgtgtcccaaaaattggtatcaccttcaaggagcacaagtagctgctcttccaagcaaggaagtcgacaggacagctgggaagtggtggaaggactgaggggggagatgaattacacccaggagccaccagttcagaaaggatttttgctgaaaaagaggaagtggcccttaaaaggctggcataagagattcttctatctggacaaaggaatcttgaaatatgccaagagccaaaccgatatagagagagagaagctgcatggctgcattgatgtcgggctctcagtgatgtctgtaaagaagtcatcaaa

SEQ ID NO: 163154 - DNA, 568 bp, Homo sapiens
  Payload ID: 12151
  Gene Symbol: OSBPL3
  Gene Name: oxysterol binding protein-like 3
  ENST ID: ENST00000415952
  CDS Start-End: 386-568
agacatttcgcgagggggatggttccagaaagcgaagatctgagcgtggtgaatgaaatgtgaacagaatagctccggaaagagtctcagaaaccttgaattggggtcagtttggagactgaaaatgcgtcgagcgctgcaggtggtggttggcagggggatttaacactgtggagcccttactccgtcccaggcgctgagcccagcgagccacgcgcggtgcccagctcggtgaggttttagggtttcctttgggccacccaaaatgttttttaaatactttggataagagctaaaccacctgccactggggacttccatactctcggctcccttgtcatctgatggcattttgattgtctcgaggccaagtgacttgctgtccatgatgagtgatgagaagaaccttggtgtgtcccaaaaattggtatcaccttcaaggagcacaagtagctgctcttccaagcaaggaagtcgacaggacagctgggaagtggtggaaggactgaggggggagatgaattacacccaggagccaccagttcagaaaggatttttgctgaaaaag

SEQ ID NO: 163155 - DNA, 3889 bp, Homo sapiens
  Payload ID: 12152
  Gene Symbol: OSBPL5
  Gene Name: oxysterol binding protein-like 5
  Uniprot ID: Q9H0X9
  ENST ID: ENST00000263650
  CDS Start-End: 161-2800
tcctccctccgccgcgccctcgctccgcctcgcgcggggggaccatctgctggcatttcctgcagccaggcccgcgccgccagtggagcccccgcgcgcccggccggcccggagcaccgagctcgcggcacggtaggagaagcccccgagcgcccacagcatgaaggaggaggccttcctccggcgccgcttctccctgtgtccaccttcctccacccctcagaaagtcgacccccggaagctcacccggaacttgctcctcagcggagacaatgagctctacccactcagcccagggaaggacatggagcccaacggcccgtcgctgcccagggatgaagggcccccgaccccaagctctgccacgaaggtgccaccggcagagtacaggctgtgcaacgggtcagacaaggaatgtgtgtcccccaccgccagggtcaccaagaaggagactctcaaggcgcagaaggagaactaccggcaggagaagaagcgcgccacacggcagctgctcagcgctctgacagaccccagcgtggtcatcatggctgacagcctgaagatccgcggcaccctgaagagctggaccaagctgtggtgcgtgctgaagccgggggtgctgctcatctacaagacgcccaaggtgggccagtgggtgggcacggtgctgctgcactgctgcgagctcatcgagcggccctccaagaaggacggcttctgcttcaagctcttccacccgctggatcagtccgtctgggccgtgaagggccccaaaggtgagagcgtgggctccatcacacagcccctgcccagcagctacctgatcttcagggccgcctccgagtcagatggtcgctgctggctggacgccctggagctggccctgcgctgctctagcctactgagactgggcacctgcaagccgggccgagacggggagccagggacctcgccagacgcatcaccctcatcgctctgtgggctgccagcctcagccaccgtccacccagaccaagacctgttcccactgaacgggtcttccctggagaacgatgcattctcagacaagtcggagagagagaaccctgaggagtcagataccgagacccaggaccatagccggaagacggagagtggcagcgaccagtcagagacccctggggccccggtgcggagagggaccacctatgtggagcaggtccaggaggagctgggggagctgggcgaggcgtcccaggtggagacagtgtcagaggagaacaagagtctgatgtggaccctgctgaagcagctacggccaggcatggacctgtcccgcgtggtgctacccacgttcgtactggagccgcgctccttcctgaacaagctctccgactactactaccacgcagacctgctctccagggctgcggtggaggaggatgcctacagccgcatgaagctggtgctgcggtggtacctgtctggcttctacaagaagcccaagggaatcaagaagccgtacaaccccatcctgggggagaccttccgctgctgctggttccacccgcagactgacagccgcacattctacatagcagagcaggtgtcccaccacccgcccgtgtctgccttccacgtcagcaaccggaaggacggcttctgcatcagtggcagcatcacagccaagtccaggttttatgggaactcgctgtcggcgctgctggacggcaaagccacgctcaccttcctgaaccgagccgaggattacacccttaccatgccctacgcccactgcaaaggaatcctgtatggcacgatgaccctggagctgggtgggaaggtcaccatcgagtgtgcgaagaacaacttccaggcccagctggaattcaaactcaagcccttcttcgggggtagcaccagcatcaaccagatctcgggaaagatcacgtcgggagaggaagtcctggcgagcctcagtggccactgggacagggacgtgtttatcaaggaggaagggagcggaagcagtgcgcttttctggaccccgagcggggaggtccgcagacagaggctgaggcagcacacggtgccgctggaggagcagacggagctggagtccgagaggctctggcagcacgtcaccagggccatcagcaagggcgaccagcacagggccacacaggagaagtttgcactggaggaggcacagcggcagcgggcccgtgagcggcaggagagcctcatgccctggaagccgcagctgttccacctggaccccatcacccaggagtggcactaccgatacgaggaccacagcccctgggaccccctgaaggacatcgcccagtttgagcaagacgggatcctgcggaccttgcagcaggaggccgtggcccgccagaccaccttcctgggcagcccagggcccaggcacgagaggtctggcccagaccagcggcttcgcaaggccagcgaccagccctccggccacagccaggccacggagagcagcggatccacgcctgagtcctgcccagagctctcagacgaggagcaggatggtgactttgtccctggcggtgagagcccatgccctcggtgcaggaaggaggcgcggcggctgcaggccctgcacgaggccatcctctccatccgagaggcccagcaggagctgcacaggcacctctcggccatgctgagctccacggcacgggcagcacaggcaccgaccccaggcctcctgcagagcccccgatcctggttcctgctctgcgtgttcctggcgtgtcagctgttcattaaccacatcctcaaataggagccctgagggcagagctcctggccggtcctgagccctccctcccaggcacccagcactttaagcctgctccatggaggcagagaggcccggcaagcacagccactgtgacggggagtccaggcgcaggagggacccggggccacaaggcgctgcgggcccaggtgtgctgggcccctctcaggggcactggcctctctgcagggccttccgcccagcgctggccttaatgctaaagccaaatgcagcttctgctgtgcgacgcactcctggccatcttgccgtgtcaccccctgtccggcctccacttgccatgggggatggatggatttagggtgggagggcctgtgggggccctggacagtcacaccccagcagcagtgagtgggcaggtttggaggagccccgagtggcccaggagtccccccacacacagatgcataggcctgccttccggagaccctgtccacattgccgggaccaccctggtggggccactggtgggtgccagggacaggttagggccactctggggaaggcattttggttttttattccacgctgtgctgtttggatgggagccccacagaggcaggtcctggaaccaccccacccccacacctggacgctcgctctggtgggggcacacgcaggtggaggtggttgtgggtgcaggtgtgtgcaggggtgtggggggcgcaggggtgtggcttagctggccccgcacccaggccggggaggctcaagttcgccactttactcagaccgatgcacagtcttcccattttacacttttttaataaacataattgcaatattttaggtgggctgcgagctgcagtcagccttcacgtctggcctcagtccccgtgtcagtgccgctctgcgtgtgcgtgtgcgcgtgtgtgagcctctacacatatatatacgtacagagccttaaaccacatcgtggcggtgccgtctgagctgtagcgggtggctttgtttccagtttttgtacccgtgtccttgtctcccctcctcccccatctggggatgtgtctgtgttccacaccttgaaataaacagacacatacgtgttctctt

SEQ ID NO: 163156 - DNA, 2798 bp, Homo sapiens
  Payload ID: 12152
  Gene Symbol: OSBPL5
  Gene Name: oxysterol binding protein-like 5
  Uniprot ID: Q9H0X9
  ENST ID: ENST00000348039
  CDS Start-End: 159-2594
ctccctccgccgcgccctcgctccgcctcgcgcggggggaccatctgctggcatttcctgcagccaggcccgcgccgccagtggagcccccgcgcgcccggccggcccggagcaccgagctcgcggcacggtaggagaagcccccgagcgcccacagcatgaaggaggaggccttcctccggcgccgcttctccctgtgtccaccttcctccacccctcagaaagtcgacccccggaagctcacccggaacttgctcctcagcggagacaatgagctctacccactcagcccagggaaggacatggagcccaacggcccgtcgctgcccagggatgaagggcccccgaccccaagctctgccacgaaggtgccaccggcagagtacaggctgtgcaacgggtcagacaaggaatgtgtgtcccccaccgccagggtcaccaagaaggagactctcaaggcgcagaaggagaactaccggcaggagaagaagcgcgccacacggcagctgctcagcgctctgacagaccccagcgtggtcatcatggctgacagcctgaagggccccaaaggtgagagcgtgggctccatcacacagcccctgcccagcagctacctgatcttcagggccgcctccgagtcagatggtcgctgctggctggacgccctggagctggccctgcgctgctctagcctactgagactgggcacctgcaagccgggccgagacggggagccagggacctcgccagacgcatcaccctcatcgctctgtgggctgccagcctcagccaccgtccacccagaccaagacctgttcccactgaacgggtcttccctggagaacgatgcattctcagacaagtcggagagagagaaccctgaggagtcagataccgagacccaggaccatagccggaagacggagagtggcagcgaccagtcagagacccctggggccccggtgcggagagggaccacctatgtggagcaggtccaggaggagctgggggagctgggcgaggcgtcccaggtggagacagtgtcagaggagaacaagagtctgatgtggaccctgctgaagcagctacggccaggcatggacctgtcccgcgtggtgctacccacgttcgtactggagccgcgctccttcctgaacaagctctccgactactactaccacgcagacctgctctccagggctgcggtggaggaggatgcctacagccgcatgaagctggtgctgcggtggtacctgtctggcttctacaagaagcccaagggaatcaagaagccgtacaaccccatcctgggggagaccttccgctgctgctggttccacccgcagactgacagccgcacattctacatagcagagcaggtgtcccaccacccgcccgtgtctgccttccacgtcagcaaccggaaggacggcttctgcatcagtggcagcatcacagccaagtccaggttttatgggaactcgctgtcggcgctgctggacggcaaagccacgctcaccttcctgaaccgagccgaggattacacccttaccatgccctacgcccactgcaaaggaatcctgtatggcacgatgaccctggagctgggtgggaaggtcaccatcgagtgtgcgaagaacaacttccaggcccagctggaattcaaactcaagcccttcttcgggggtagcaccagcatcaaccagatctcgggaaagatcacgtcgggagaggaagtcctggcgagcctcagtggccactgggacagggacgtgtttatcaaggaggaagggagcggaagcagtgcgcttttctggaccccgagcggggaggtccgcagacagaggctgaggcagcacacggtgccgctggaggagcagacggagctggagtccgagaggctctggcagcacgtcaccagggccatcagcaagggcgaccagcacagggccacacaggagaagtttgcactggaggaggcacagcggcagcgggcccgtgagcggcaggagagcctcatgccctggaagccgcagctgttccacctggaccccatcacccaggagtggcactaccgatacgaggaccacagcccctgggaccccctgaaggacatcgcccagtttgagcaagacgggatcctgcggaccttgcagcaggaggccgtggcccgccagaccaccttcctgggcagcccagggcccaggcacgagaggtctggcccagaccagcggcttcgcaaggccagcgaccagccctccggccacagccaggccacggagagcagcggatccacgcctgagtcctgcccagagctctcagacgaggagcaggatggtgactttgtccctggcggtgagagcccatgccctcggtgcaggaaggaggcgcggcggctgcaggccctgcacgaggccatcctctccatccgagaggcccagcaggagctgcacaggcacctctcggccatgctgagctccacggcacgggcagcacaggcaccgaccccaggcctcctgcagagcccccgatcctggttcctgctctgcgtgttcctggcgtgtcagctgttcattaaccacatcctcaaataggagccctgagggcagagctcctggccggtcctgagccctccctcccaggcacccagcactttaagcctgctccatggaggcagagaggcccggcaagcacagccactgtgacggggagtccaggcgcaggagggacccggggccacaaggcgctgcgggcccaggtgtgctgggcccctctcaggggcactggcctctctgcag

SEQ ID NO: 163157 - DNA, 3619 bp, Homo sapiens
  Payload ID: 12152
  Gene Symbol: OSBPL5
  Gene Name: oxysterol binding protein-like 5
  Uniprot ID: Q9H0X9
  ENST ID: ENST00000389989
  CDS Start-End: 100-2535
atttcctgcagccaggcccgcgccgccagtggagcccccgcgcgcccggccggcccggagcaccgagctcgcggcacgaagcccccgagcgcccacagcatgaaggaggaggccttcctccggcgccgcttctccctgtgtccaccttcctccacccctcagaaagtcgacccccggaagctcacccggaacttgctcctcagcggagacaatgagctctacccactcagcccagggaaggacatggagcccaacggcccgtcgctgcccagggatgaagggcccccgaccccaagctctgccacgaaggtgccaccggcagagtacaggctgtgcaacgggtcagacaaggaatgtgtgtcccccaccgccagggtcaccaagaaggagactctcaaggcgcagaaggagaactaccggcaggagaagaagcgcgccacacggcagctgctcagcgctctgacagaccccagcgtggtcatcatggctgacagcctgaagggccccaaaggtgagagcgtgggctccatcacacagcccctgcccagcagctacctgatcttcagggccgcctccgagtcagatggtcgctgctggctggacgccctggagctggccctgcgctgctctagcctactgagactgggcacctgcaagccgggccgagacggggagccagggacctcgccagacgcatcaccctcatcgctctgtgggctgccagcctcagccaccgtccacccagaccaagacctgttcccactgaacgggtcttccctggagaacgatgcattctcagacaagtcggagagagagaaccctgaggagtcagataccgagacccaggaccatagccggaagacggagagtggcagcgaccagtcagagacccctggggccccggtgcggagagggaccacctatgtggagcaggtccaggaggagctgggggagctgggcgaggcgtcccaggtggagacagtgtcagaggagaacaagagtctgatgtggaccctgctgaagcagctacggccaggcatggacctgtcccgcgtggtgctacccacgttcgtactggagccgcgctccttcctgaacaagctctccgactactactaccacgcagacctgctctccagggctgcggtggaggaggatgcctacagccgcatgaagctggtgctgcggtggtacctgtctggcttctacaagaagcccaagggaatcaagaagccgtacaaccccatcctgggggagaccttccgctgctgctggttccacccgcagactgacagccgcacattctacatagcagagcaggtgtcccaccacccgcccgtgtctgccttccacgtcagcaaccggaaggacggcttctgcatcagtggcagcatcacagccaagtccaggttttatgggaactcgctgtcggcgctgctggacggcaaagccacgctcaccttcctgaaccgagccgaggattacacccttaccatgccctacgcccactgcaaaggaatcctgtatggcacgatgaccctggagctgggtgggaaggtcaccatcgagtgtgcgaagaacaacttccaggcccagctggaattcaaactcaagcccttcttcgggggtagcaccagcatcaaccagatctcgggaaagatcacgtcgggagaggaagtcctggcgagcctcagtggccactgggacagggacgtgtttatcaaggaggaagggagcggaagcagtgcgcttttctggaccccgagcggggaggtccgcagacagaggctgaggcagcacacggtgccgctggaggagcagacggagctggagtccgagaggctctggcagcacgtcaccagggccatcagcaagggcgaccagcacagggccacacaggagaagtttgcactggaggaggcacagcggcagcgggcccgtgagcggcaggagagcctcatgccctggaagccgcagctgttccacctggaccccatcacccaggagtggcactaccgatacgaggaccacagcccctgggaccccctgaaggacatcgcccagtttgagcaagacgggatcctgcggaccttgcagcaggaggccgtggcccgccagaccaccttcctgggcagcccagggcccaggcacgagaggtctggcccagaccagcggcttcgcaaggccagcgaccagccctccggccacagccaggccacggagagcagcggatccacgcctgagtcctgcccagagctctcagacgaggagcaggatggtgactttgtccctggcggtgagagcccatgccctcggtgcaggaaggaggcgcggcggctgcaggccctgcacgaggccatcctctccatccgagaggcccagcaggagctgcacaggcacctctcggccatgctgagctccacggcacgggcagcacaggcaccgaccccaggcctcctgcagagcccccgatcctggttcctgctctgcgtgttcctggcgtgtcagctgttcattaaccacatcctcaaataggagccctgagggcagagctcctggccggtcctgagccctccctcccaggcacccagcactttaagcctgctccatggaggcagagaggcccggcaagcacagccactgtgacggggagtccaggcgcaggagggacccggggccacaaggcgctgcgggcccaggtgtgctgggcccctctcaggggcactggcctctctgcagggccttccgcccagcgctggccttaatgctaaagccaaatgcagcttctgctgtgcgacgcactcctggccatcttgccgtgtcaccccctgtccggcctccacttgccatgggggatggatggatttagggtgggagggcctgtgggggccctggacagtcacaccccagcagcagtgagtgggcaggtttggaggagccccgagtggcccaggagtccccccacacacagatgcataggcctgccttccggagaccctgtccacattgccgggaccaccctggtggggccactggtgggtgccagggacaggttagggccactctggggaaggcattttggttttttattccacgctgtgctgtttggatgggagccccacagaggcaggtcctggaaccaccccacccccacacctggacgctcgctctggtgggggcacacgcaggtggaggtggttgtgggtgcaggtgtgtgcaggggtgtggggggcgcaggggtgtggcttagctggccccgcacccaggccggggaggctcaagttcgccactttactcagaccgatgcacagtcttcccattttacacttttttaataaacataattgcaatattttaggtgggctgcgagctgcagtcagccttcacgtctggcctcagtccccgtgtcagtgccgctctgcgtgtgcgtgtgcgcgtgtgtgagcctctacacatatatatacgtacagagccttaaaccacatcgtggcggtgccgtctgagctgtagcgggtggctttgtttccagtttttgtacccgtgtccttgtctcccctcctcccccatctggggatgtgtctgtgttccacaccttgaaataaacagacacatacgtgtt

SEQ ID NO: 163158 - DNA, 1731 bp, Homo sapiens
  Payload ID: 12152
  Gene Symbol: OSBPL5
  Gene Name: oxysterol binding protein-like 5
  ENST ID: ENST00000534454
  CDS Start-End: 1-1299
tacaaccccatcctgggggagaccttccgctgctgctggttccacccgcagactgacagccgcacattctacatagcagagcaggtgtcccaccacccgcccgtgtctgccttccacgtcagcaaccggaaggacggcttctgcatcagtggcagcatcacagccaagtccaggttttatgggaactcgctgtcggcgctgctggacggcaaagccacgctcaccttcctgaaccgagccgaggattacacccttaccatgccctacgcccactgcaaaggaatcctgtatggcacgatgaccctggagctgggtgggaaggtcaccatcgagtgtgcgaagaacaacttccaggcccagctggaattcaaactcaagcccttcttcgggggtagcaccagcatcaaccagatctcgggaaagatcacgtcgggagaggaagtcctggcgagcctcagtggccactgggacagggacgtgtttatcaaggaggaagggagcggaagcagtgcgcttttctggaccccgagcggggaggtccgcagacagaggctgaggcagcacacggtgccgctggaggagcagacggagctggagtccgagaggctctggcagcacgtcaccagggccatcagcaagggcgaccagcacagggccacacaggagaagtttgcactggaggaggcacagcggcagcgggcccgtgagcggcaggagagcctcatgccctggaagccgcagctgttccacctggaccccatcacccaggagtggcactaccgatacgaggaccacagcccctgggaccccctgaaggacatcgcccagtttgagcaagacgggatcctgcggaccttgcagcaggaggccgtggcccgccagaccaccttcctgggcagcccagggcccaggcacgagaggtctggcccagaccagcggcttcgcaaggccagcgaccagccctccggccacagccaggccacggagagcagcggatccacgcctgagtcctgcccagagctctcagacgaggagcaggatggtgactttgtccctggcggtgagagcccatgccctcggtgcaggaaggaggcgcggcggctgcaggccctgcacgaggccatcctctccatccgagaggcccagcaggagctgcacaggcacctctcggccatgctgagctccacggcacgggcagcacaggcaccgaccccaggcctcctgcagagcccccgatcctggttcctgctctgcgtgttcctggcgtgtcagctgttcattaaccacatcctcaaataggagccctgagggcagagctcctggccgtccccccacacacagatgcataggcctgccttccggagaccctgtccacattgccgggaccaccctggtggggccactggtgggtgccagggacaggttagggccactctggggaaggcattttggttttttattccacgctgtgctgtttggatgggagccccacagaggcaggtcctggaaccaccccacccccacacctggacgctcgctctggtgggggcacacgcaggtggaggtggttgtgggtgcaggtgtgtgcaggggtgtggggggcgcaggggtgtggcttagctggccccgcacccaggccggggaggctcaagttcgccactttactcagaccgatgcacagtcttcccattttacacttttttaataaacataattgcaatattttaggtg

SEQ ID NO: 163159 - DNA, 774 bp, Homo sapiens
  Payload ID: 12152
  Gene Symbol: OSBPL5
  Gene Name: oxysterol binding protein-like 5
  ENST ID: ENST00000533721
  CDS Start-End: 506-774
agaccgctgggctgcctcctgtcagaagccaactggagttagggtttggggtgactcctgggggtatggaggggtcacagggtgggcttacctgcccctccctcgtccctgggctgagcccagcccctccctcatccttgggctgagcgggtctgccccgccgaagcggctgggtggatttcctctcttgccgtttcgcaacttgctcccctctgtgtgtctgccccagtctcttcaaggtgccttttacaggaagacttctgtaagggtcccaccccacctgatacagcctcccaaagcctggagaagtgggccagcctttgggatcctagatagatgctcttgggtctgcctgcaccagggctgatccagatcccagactgaacagaaactctgctccccaaccccaggagtaaggcccctctgcacgtttttatcccacctccttggtacacagggccttgctgttccttgaacctgccagaagcccccgagcgcccacagcatgaaggaggaggccttcctccggcgccgcttctccctgtgtccaccttcctccacccctcagaaagtcgacccccggaagctcacccggaacttgctcctcagcggagacaatgagctctacccactcagcccagggaaggacatggagcccaacggcccgtcgctgcccagggatgaagggcccccgaccccaagctctgccacgaaggtgccaccggcagagtacaggctgtgcaacgggtcagacaaggaatgtgtgtcccccac

SEQ ID NO: 163160 - DNA, 706 bp, Homo sapiens
  Payload ID: 12152
  Gene Symbol: OSBPL5
  Gene Name: oxysterol binding protein-like 5
  ENST ID: ENST00000534157
  CDS Start-End: 498-706
atttcctccatgctctaggatgggaaggacaagagggcgtgactcttcccagagtcccatcatctctgatttaggaatggagcccttagggtgtctcacctcctcgggatgcctaatagtgtgtttggtgaatgcagatggacttaactggtccatagatcccctctcaccctgctgacacgaagacaaggatgaaggggaaagttgaggctcaacaactgaacagtattccttctaaatatgtacattcttagggattttaagtggaaaacagggaggagatttgagggataccccacctcggcaggcagctggtcaggctgcctgttgtgaccagcctggggtcgccttcccttcatccaaggccaggggagatggcaaaccttcagtaagcgctgccgtacctggcagagcagaagcaccaccccagcttggagacagcatgcccctgactgctggtcacggatggccccttgaagcccccgagcgcccacagcatgaaggaggaggccttcctccggcgccgcttctccctgtgtccaccttcctccacccctcagaaagtcgacccccggaagctcacccggaacttgctcctcagcggagacaatgagctctacccactcagcccagggaaggacatggagcccaacggcccgtcgctgcccagggatgaagggcccccgaccccaagctctgccacgaa

SEQ ID NO: 163161 - DNA, 2733 bp, Homo sapiens
  Payload ID: 12152
  Gene Symbol: OSBPL5
  Gene Name: oxysterol binding protein-like 5
  Uniprot ID: Q9H0X9
  ENST ID: ENST00000525498
  CDS Start-End: 62-2434
aagcctggccacgccaccatgcctgggtcctcactcccactgctctcttgcagggaaggacatggagcccaacggcccgtcgctgcccagggatgaagggcccccgaccccaagctctgccacgaaggtgccaccggcagagtacaggctgtgcaacgggtcagacaaggaatgtgtgtcccccaccgccagggtcaccaagaaggagactctcaaggcgcagaaggagaactaccggcaggagaagaagcgcgccacacggcagctgctcagcgctctgacagaccccagcgtggtcatcatggctgacagcctgaagatccgcggcaccctgaagagctggaccaagctgtggtgcgtgctgaagccgggggtgctgctcatctacaagacgcccaagggccccaaaggtgagagcgtgggctccatcacacagcccctgcccagcagctacctgatcttcagggccgcctccgagtcagatggtcgctgctggctggacgccctggagctggccctgcgctgctctagcctactgagactgggcacctgcaagccgggccgagacggggagccagggacctcgccagacgcatcaccctcatcgctctgtgggctgccagcctcagccaccgtccacccagaccaagacctgttcccactgaacgggtcttccctggagaacgatgcattctcagacaagtcggagagagagaaccctgaggagtcagataccgagacccaggaccatagccggaagacggagagtggcagcgaccagtcagagacccctggggccccggtgcggagagggaccacctatgtggagcaggtccaggaggagctgggggagctgggcgaggcgtcccaggtggagacagtgtcagaggagaacaagagtctgatgtggaccctgctgaagcagctacggccaggcatggacctgtcccgcgtggtgctacccacgttcgtactggagccgcgctccttcctgaacaagctctccgactactactaccacgcagacctgctctccagggctgcggtggaggaggatgcctacagccgcatgaagctggtgctgcggtggtacctgtctggcttctacaagaagcccaagggaatcaagaagccgtacaaccccatcctgggggagaccttccgctgctgctggttccacccgcagactgacagccgcacattctacatagcagagcaggtgtcccaccacccgcccgtgtctgccttccacgtcagcaaccggaaggacggcttctgcatcagtggcagcatcacagccaagtccaggttttatgggaactcgctgtcggcgctgctggacggcaaagccacgctcaccttcctgaaccgagccgaggattacacccttaccatgccctacgcccactgcaaaggaatcctgtatggcacgatgaccctggagctgggtgggaaggtcaccatcgagtgtgcgaagaacaacttccaggcccagctggaattcaaactcaagcccttcttcgggggtagcaccagcatcaaccagatctcgggaaagatcacgtcgggagaggaagtcctggcgagcctcagtggccactgggacagggacgtgtttatcaaggaggaagggagcggaagcagtgcgcttttctggaccccgagcggggaggtccgcagacagaggctgaggcagcacacggtgccgctggaggagcagacggagctggagtccgagaggctctggcagcacgtcaccagggccatcagcaagggcgaccagcacagggccacacaggagaagtttgcactggaggaggcacagcggcagcgggcccgtgagcggcaggagagcctcatgccctggaagccgcagctgttccacctggaccccatcacccaggagtggcactaccgatacgaggaccacagcccctgggaccccctgaaggacatcgcccagtttgagcaagacgggatcctgcggaccttgcagcaggaggccgtggcccgccagaccaccttcctgggcagcccagggcccaggcacgagaggtctggcccagaccagcggcttcgcaaggccagcgaccagccctccggccacagccaggccacggagagcagcggatccacgcctgagtcctgcccagagctctcagacgaggagcaggatggtgactttgtccctggcggtgagagcccatgccctcggtgcaggaaggaggcgcggcggctgcaggccctgcacgaggccatcctctccatccgagaggcccagcaggagctgcacaggcacctctcggccatgctgagctccacggcacgggcagcacaggcaccgaccccaggcctcctgcagagcccccgatcctggttcctgctctgcgtgttcctggcgtgtcagctgttcattaaccacatcctcaaataggagccctgagggcagagctcctggccggtcctgagccctccctcccaggcacccagcactttaagcctgctccatggaggcagagaggcccggcaagcacagccactgtgacggggagtccaggcgcaggagggacccggggccacaaggcgctgcgggcccaggtgtgctgggcccctctcaggggcactggcctctctgcagggccttccgcccagcgctggccttaatgctaaagccaaatgcagcttctgctgtgcgacgcactcctggccatcttgccgtgtcaccccctgtcc

SEQ ID NO: 163162 - DNA, 554 bp, Homo sapiens
  Payload ID: 12152
  Gene Symbol: OSBPL5
  Gene Name: oxysterol binding protein-like 5
  ENST ID: ENST00000526122
  CDS Start-End: 182-554
tgaccacccaccaccaggctcccagggcccaggccctcctcaccctgcctcagaagtcccctgagagggggacttcttagccaggggcacccccaccatgtggctctgaagccccttccggggcggtgacctcctgctgcccctccttccttccttccagaagcccccgagcgcccacagcatgaaggaggaggccttcctccggcgccgcttctccctgtgtccaccttcctccacccctcagaaagtcgacccccggaagctcacccggaacttgctcctcagcggagacaatgagctctacccactcagcccagggaaggacatggagcccaacggcccgtcgctgcccagggatgaagggcccccgaccccaagctctgccacgaaggtgccaccggcagagtacaggctgtgcaacgggtcagacaaggaatgtgtgtcccccaccgccagggtcaccaagaaggagactctcaaggcgcagaaggagaactaccggcaggagaagaagcgcgccacacggcagctgctcagcgctctgacagacccca

SEQ ID NO: 163163 - DNA, 2182 bp, Homo sapiens
  Payload ID: 12152
  Gene Symbol: OSBPL5
  Gene Name: oxysterol binding protein-like 5
  ENST ID: ENST00000471998
  CDS Start-End: 107-454
atttcctgcagccaggcccgcgccgccagtggagcccccgcgcgcccggccggcccggagcaccgagctcgcggcacggtaggagaagcccccgagcgcccacagcatgaaggaggaggccttcctccggcgccgcttctccctgtgtccaccttcctccacccctcagaaagtcgacccccggaagctcacccggaacttgctcctcagcggagacaatgagctctacccactcagcccagggaaggacatggagcccaacggcccgtcgctgcccagggatgaagggcccccgaccccaagctctgccacgaaggtgccaccggcagagtacaggctgtgcaacgggtcagacaaggaatgtgtgtcccccaccgccagggtcaccaagaaggagactctcaaggcgcagaaggagaactaccggcaggagaagaaccgcgctccttcctgaacaagctctccgactactactaccacgcagacctgctctccagggctgcggtggaggaggatgcctacagccgcatgaagctggtgctgcggtggtacctgtctggcttctacaagaagcccaagggaatcaagaagccgtacaaccccatcctgggggagaccttccgctgctgctggttccacccgcagactgacagccgcacattctacatagcagagcaggtgtcccaccacccgcccgtgtctgccttccacgtcagcaaccggaaggacggcttctgcatcagtggcagcatcacagccaagtccaggttttatgggaactcgctgtcggcgctgctggacggcaaagccacgctcaccttcctgaaccgagccgaggattacacccttaccatgccctacgcccactgcaaaggaatcctgtatggcacgatgaccctggagctgggtgggaaggtcaccatcgagtgtgcgaagaacaacttccaggcccagctggaattcaaactcaagcccttcttcgggggtagcaccagcatcaaccagatctcgggaaagatcacgtcgggagaggaagtcctggcgagcctcagtggccactgggacagggacgtgtttatcaaggaggaagggagcggaagcagtgcgcttttctggaccccgagcggggaggtccgcagacagaggctgaggcagcacacggtgccgctggaggagcagacggagctggagtccgagaggctctggcagcacgtcaccagggccatcagcaagggcgaccagcacagggccacacaggagaagtttgcactggaggaggcacagcggcagcgggcccgtgagcggcaggagagcctcatgccctggaagccgcagctgttccacctggaccccatcacccaggagtggcactaccgatacgaggaccacagcccctgggaccccctgaaggacatcgcccagtttgagcaagacgggatcctgcggaccttgcagcaggaggccgtggcccgccagaccaccttcctgggcagcccagggcccaggcacgagaggtctggcccagaccagcggcttcgcaaggccagcgaccagccctccggccacagccaggccacggagagcagcggatccacgcctgagtcctgcccagagctctcagacgaggagcaggatggtgactttgtccctggcggtgagagcccatgccctcggtgcaggaaggaggcgcggcggctgcaggccctgcacgaggccatcctctccatccgagaggcccagcaggagctgcacaggcacctctcggccatgctgagctccacggcacgggcagcacaggcaccgaccccaggcctcctgcagagcccccgatcctggttcctgctctgcgtgttcctggcgtgtcagctgttcattaaccacatcctcaaataggagccctgagggcagagctcctggccggtcctgagccctccctcccaggcacccagcactttaagcctgctccatggaggcagagaggcccggcaagcacagccactgtgacggggagtccaggcgcaggagggacccggggccacaaggcgctgcgggcccaggtgtgctgggcccctctcaggggcactggcctctctgcagggccttccgcccagcgctggccttaatgctaaagccaaatgcagcttctgctgtgcgacgcactcctggccatcttgccgtgtca

SEQ ID NO: 163164 - DNA, 575 bp, Homo sapiens
  Payload ID: 12152
  Gene Symbol: OSBPL5
  Gene Name: oxysterol binding protein-like 5
  ENST ID: ENST00000530372
  CDS Start-End: 282-575
agcacataaggggcagggacaacgggctcagatgtctggggctcctcttgtgttctgatggctcctgagacggggagaaacggcgacagtttcctgggttcaggaagggagaggaggcgcctcgcaccctggctagggtgggctgggggcctgcacccctaagttggagaaccccacgaagctgaccccactcaccgctgcccaccccgccaagcctcctggccattttcagcggagtgtcccgacctctggccgcccggaagcccccgagcgcccacagcatgaaggaggaggccttcctccggcgccgcttctccctgtgtccaccttcctccacccctcagaaagtcgacccccggaagctcacccggaacttgctcctcagcggagacaatgagctctacccactcagcccagggaaggacatggagcccaacggcccgtcgctgcccagggatgaagggcccccgaccccaagctctgccacgaaggtgccaccggcagagtacaggctgtgcaacgggtcagacaaggaatgtgtgtcccccaccgccagggtcaccaagaaggagact

SEQ ID NO: 163165 - DNA, 554 bp, Homo sapiens
  Payload ID: 12152
  Gene Symbol: OSBPL5
  Gene Name: oxysterol binding protein-like 5
  ENST ID: ENST00000533234
  CDS Start-End: 136-554
ctcgctccgcctcgcgcggggggaccatctgctggcatttcctgcagccaggcccgcgccgccagtggagcccccgcgcgcccggccggcccggagcaccgagctcgcggcacgaagcccccgagcgcccacagcatgaaggaggaggccttcctccggcgccgcttctccctgtgtccaccttcctccacccctcagaaagtcgacccccggaagctcacccggaacttgctcctcagcggagacaatgagctctacccactcagcccagggaaggacatggagcccaacggcccgtcgctgcccagggatgaagggcccccgaccccaagctctgccacgaaggtgccaccggcagagtacaggctgtgcaacgggtcagacaaggaatgtgtgtcccccaccgccagggtcaccaagaaggagactctcaaggcgcagaaggagaactaccggcaggagaagaagcgcgccacacggcagctgctcagcgctctgacagaccccagcgtggtcatcatggctgacagcctgaagatccgcggcaccctgaa

SEQ ID NO: 163166 - DNA, 2653 bp, Homo sapiens
  Payload ID: 12152
  Gene Symbol: OSBPL5
  Gene Name: oxysterol binding protein-like 5
  ENST ID: ENST00000478260
  CDS Start-End: 563-1564
aaaacaaagaaagacgtattaatttttttaaacatacgggatgccatcatgggtgctggtgccctctgtgttctgggtgccatcctgggacgcagcagtgagcgagaagatgcctgccctcaggagcccaatgccagagcgggaactgcagagtcaagtgaagcacgatgcatgtctcacagggctggtggcctcccaggaggctggaacaggaggcgacacctgacatgagcaaaggccctggcgaggacagagcccccttagtgggggagacggcccctgagggaccaggcgtgcctcccaggctccgtgcctcccaggctccgcacctcccaggctccgcacccccaccagcctctccctgtggggttctgctcccagcgcctcctgtccttctcaccctcccagggactgacacaggcctcccagggatcggtgctgctgggtcgggactcagggatcggtgctgctgggtcggtactcagcagggcctggggctcagcagggctggggccgcctggcccctgacactggctgcatttcaggaatcctgtatggcacgatgaccctggagctgggtgggaaggtcaccatcgagtgtgcgaagaacaacttccaggcccagctggaattcaaactcaagcccttcttcgggggtagcaccagcatcaaccagatctcgggaaagatcacgtcgggagaggaagtcctggcgagcctcagtggccactgggacagggacgtgtttatcaaggaggaagggagcggaagcagtgcgcttttctggaccccgagcggggaggtccgcagacagaggctgaggcagcacacggtgccgctggaggagcagacggagctggagtccgagaggctctggcagcacgtcaccagggccatcagcaagggcgaccagcacagggccacacaggagaagtttgcactggaggaggcacagcggcagcgggcccgtgagcggcaggagagcctcatgccctggaagccgcagctgttccacctggaccccatcacccaggagtggcactaccgatacgaggaccacagcccctgggaccccctgaaggacatcgcccagtttgagcaagacgggatcctgcggaccttgcagcaggaggccgtggcccgccagaccaccttcctgggcagcccagggcccaggcacgagaggtctggcccagaccagcggcttcgcaaggccagcgaccagccctccggccacagccaggccacggagagcagcggatccacgcctgagtcctgcccagagctctcagacgaggagcaggatggtgactttgtccctggcggtgagagcccatgccctcggtgcaggaaggaggcgcggcggctgcaggccctgcacgaggccatcctctccatccgagaggcccagcaggagctgcacaggcacctctcggccatgctgagctccacggcacgggcagcacaggcaccgaccccaggcctcctgcagagcccccgatcctggttcctgctctgcgtgttcctggcgtgtcagctgttcattaaccacatcctcaaataggagccctgagggcagagctcctggccggtcctgagccctccctcccaggcacccagcactttaagcctgctccatggaggcagagaggcccggcaagcacagccactgtgacggggagtccaggcgcaggagggacccggggccacaaggcgctgcgggcccaggtgtgctgggcccctctcaggggcactggcctctctgcagggccttccgcccagcgctggccttaatgctaaagccaaatgcagcttctgctgtgcgacgcactcctggccatcttgccgtgtcaccccctgtccggcctccacttgccatgggggatggatggatttagggtgggagggcctgtgggggccctggacagtcacaccccagcagcagtgagtgggcaggtttggaggagccccgagtggcccaggagtccccccacacacagatgcataggcctgccttccggagaccctgtccacattgccgggaccaccctggtggggccactggtgggtgccagggacaggttagggccactctggggaaggcattttggttttttattccacgctgtgctgtttggatgggagccccacagaggcaggtcctggaaccaccccacccccacacctggacgctcgctctggtgggggcacacgcaggtggaggtggttgtgggtgcaggtgtgtgcaggggtgtggggggcgcaggggtgtggcttagctggccccgcacccaggccggggaggctcaagttcgccactttactcagaccgatgcacagtcttcccattttacacttttttaataaacataattgcaatattttaggtgggctgcgagctgcagtcagccttcacgtctggcctcagtccccgtgtcagtgccgctctgcgtgtgcgtgtgcgcgtgtgtgagcctctacacatatatatacgtacagagccttaaaccacatcgtggcggtgccgtctgagctgtagcgggtggctttgtttccagtttttgtacccgtgtccttgtctcccctcctcccccatctggggatgtgtctgtgttccacaccttgaaataaacagacacatacgtgttctctt

SEQ ID NO: 163167 - DNA, 10513 bp, Homo sapiens
  Payload ID: 12153
  Gene Symbol: OSBPL6
  Gene Name: oxysterol binding protein-like 6
  Uniprot ID: Q9BZF3
  ENST ID: ENST00000190611
  CDS Start-End: 377-3181
ccgcggcgccaccgctcgccctccaggttctgccacttgctgggaaaacagcaacagaaggatattaaggagccacccctataatttacccagatagccccagcaaggtcaaagacatatcatgtcccaaggagaaaagctgcaggcatctgaggataaatcactgtgaaacagctttgaccataaagctgacttggaagactttgactccaaggtgcaaggtggtttggacaccctcaatattgcctgctcttttctagtcaaacctgattcatgaaatggaatgaagctgaaaaatcatctacttctttgtttgtggatttgagagaagattgggatggtcttaagtgcataaaacgagactctaactgcagcgatgagttcagatgagaagggcatttcccctgctcataaaacatccactccaacccatagaagtgcctcctcttcaacatcctcccaaagggacagtaggcagagtattcacatactggagaggactgcttcctctagcaccgagccctctgtaagtcggcaattgctagaaccggagccagtccccctctccaaggaagctgacagctgggaaattatagaagggctgaaaataggccaaaccaatgtccagaaaccagacaaacatgagggctttatgctgaagaaaagaaaatggcctttaaaaggctggcacaagcgtttttttgtcctggataatggaatgttaaagtattcaaaggcaccactcgatattcagaaaggaaaggtccatgggagcatagatgtgggactctcagtcatgtcaattaaaaagaaagctcgaagaatagaccttgacaccgaagagcacatctatcatttgaaggtgaaatcccaggactggtttgatgcatgggtctccaaactgcgacatcatcggttgtatcgtcagaatgaaattgtgagatcaccaagagatgctagttttcacatatttccttcaacgtccacagctgaatcctcaccagctgctaatgtttctgtaatggatggaaagatgcaaccaaacagctttccgtggcagtcccctttaccatgcagcaatagcctccctgcaacgtgcacaactggccagagtaaagtggcagcctggttacaggactcggaagagatggacaggtgtgcagaagatcttgcacattgccagtcaaaccttgtggaacttagcaaactcctgcaaaatttggaaatacttcagagaactcagtcggcacctaactttactgacatgcaggctaactgtgtagatatttcaaagaaagacaagcgggtcacaagacgatggagaacaaaaagtgtcagcaaagatacaaaaatacaactgcaggttcctttcagtgctaccatgtcaccagttcgcttgcattcctccaaccccaacctttgtgcagatattgaatttcagactccccctagccacctcactgaccctctggaaagttcaacagattatacaaagctgcaagaagaattttgtctaatcgcacagaaagtgcattctcttttgaagtctgcatttaatagcatagctatagagaaggagaagctgaagcagatggtttccgagcaggatcacagtaaaggccacagcacgcagatggcacggctccgacagtcactgtctcaggcactcaaccagaatgctgaactaaggagtcggttgaacagaatacattcagagtctattatttgtgatcaggttgtcagtgtaaatattattcctagccctgatgaggctggtgagcaaatccatgtcagtctccccttatcacagcaagtagccaatgagagccgcctctccatgtcagagtctgtttctgagttctttgatgcccaagaggtgctcctctctgcaagttcgtcagagaatgaggcttcagatgatgagtcttacatcagtgatgtgagtgataatatatctgaagacaacaccagtgttgcagacaatatttctcggcaaatcctgaatggggagcttacaggaggggccttccgaaatgggcgtcgagcatgcctgccagctccttgtcctgacaccagtaacattaacctgtggaatatcttgaggaacaacattggtaaagacctgtctaaagtctctatgcctgtggagctaaacgagccgctcaacaccctgcagcacctctgtgaggaaatggaatacagcgagctcctggacaaggcttcggaaactgatgatccatatgagcgcatggttctcgttgccgcatttgcagtttcaggatactgctccacctatttcagagcaggaagtaagccattcaacccagtccttggggagacttatgaatgcattagagaagacaagggattccgctttttctcagaacaggttagccatcatccacccatttctgcctgtcactgtgaatcaaagaattttgtgttttggcaagatatcagatggaaaaacaagttctgggggaagtcgatggaaatcctgcctgttggaacactgaatgtcatgcttccaaagtatggagattactatgtgtggaataaagtcaccacttgcatacacaacatcctcagtgggagaagatggatagaacattatggagaagtaaccatcagaaataccaaaagcagtgtttgcatttgcaaactcacatttgtcaaggtgaattattggaattctaacatgaatgaagtccagggggtggtgatagatcaggaggggaaggcggtgtaccggctgtttggaaagtggcatgaaggactctactgtggtgtggccccctctgcaaagtgcatttggagaccaggttccatgccaacaaactatgagctgtactatggcttcacaaggtttgctattgagctcaatgagttagatccagtactaaaagatctccttccaccaacagacgcccggttccggccagatcaaagatttttggaagaaggaaatttagaagctgcagcatcagagaagcaaagagtagaggaactccagagatctcggagacgatatatggaagaaaacaatcttgaacatataccaaaattttttaaaaaagttattgatgccaatcaaagagaagcctgggtttctaacgacacctactgggagcttcgaaaggaccctgggtttagcaaagtagacagccctgttctttggtagactgggaatgtagagctagccaacatatcacattctgaatgaataaataactatgcacaattatgtttcttatagctatgtgtggtttctgggtcaactgaaaacctaccatttgcttttctattcatctttataatggactttcagaagtgcattagacaaggcccctaaccactttgggatcctttctgttttgctgcaaccatattccttaaaaaaaaaaaaaaaaaaaaaaaaaaaatccacaccgtccttggaaagcagaataaaaggagcagaatataaaatccaaagtctgaccagtttgtaaagaaaaacaaatggtaactggtgcttaaagctgatcaagaaagttaacaacaacatagaaaccacacgattgttccactgtctggaagcaccatcccctatcgcaggactcctgggccacaagcagtcggtcagtgcagacttcaagtgtgtctgtttgatgtggtgtgattgtgctggccttgtcgaaaaagatgtgatgcttctcagaacctgttccatctgtatgccattgttcatgccttaagaaatgcaaagatgtacaataaatcatttttaaaatgtgtgctcataggtttatgtgaagaacagattttttgaatcatggcatgattcactttctcaatcaggacaattatgagactaacttaaatgggttttttaaaagtgaacaacacgtgctttactctgataagtcagttaccatatggtatgtctgaagggaaagaaggaaaagacgtgctaagtagatctctgtatttacgtggctcgttaatttcctgtcctgcgtccagataataaaccatccctcttccacctaacctcacagtgtgccctattatttggaaaaatctgtctttgatttggacatttggtcatcagtgttaaaaccttaaaaggaaataacaaaaagcatatggaattcctgtgtgggcttagtagtactataaatgtaattgtttttgagtgaagcaccatgtaatccatgtctcaatcccatgcccgctccactgacactagtcgaattccactgagaacagaagcaagaataatagtagtttatttgcattgtttaaatgaattctatgcaaaatcatatttcaaattttcatcaagtgattccatatggtacatggctacatattaagcatttaccttgctattggcagagatatgaaacttaagctaaggaatgtatccatcccaaagcaggaaagcagaagtgtgttttgcatacttcaggatttgtttttcctccactaatatacagaggcttttgcagaaaacttgcatcagtattcctgtttctgcacgtaggtgactatataaatgcctgtatgttttttttaaaatatctcctcagagattttcctagggaattataaaattacatatattttattgttagttagatgtttattcttggattcttaccattagaatttaagtgttatttaaaactctgatacagttacagacactttacattttattatgaggtgttgattttagtggtatttctcctcagcaaagcattcctaataatggctaatacaccatcaaatgaaaaactgctgatgagagtgtaagagaaagcgctaacgtttccactagatggcgcaatattttatttatccaaaactcctcccttgcatctgagtttttatgttatgtgtacagtctgcattagcttagaatggaatttcattctcaggtaaattttcgaatccatcaccagatctaagcattctgcttcaacaataccctctctattcctctcattcccattttaaatccataggtggcttgccctgcggcagtaaaatcttccccttgatattgattctttttctgctcattcatcttgatgttctttttctgcatcctgagatacatgtcgttaattttaataagaatcctattgacttcctcacgggagtctgttctcctatggttgataaagctttaaatactatttaaagtggttctggtctgtacttactagcacttccctgaacagtctcaaaatagcctaaacataagaaaacaatcctgcaaagtaaaggtttttacaagcagagatgaaggaaagggagcagcagctgaccatcagatgtggtatcaggtagctggaagaggatccaggacccatcagggaagcaacgactgtacttagcaatttgggttataattacaaaaaagaaaaaatagtagaaaggatctttaccagacagtaaggtcatggtacaaatcaggtgagtgaatgttggtcagaggtagcctgacactctgatgaggacttcaagatgagaatgagaaaaatgtctattaaaatcactacatttgataatatctcagatttagaatctcttttgggattcagatagtctgattattccaattcaagtgttcagttaagttttagttactattcctataatacccaattcactaatatcatatctcctgtggaatattcattggtgcgatggcctcatccccttttttactttttattgacatggtggttataaaatgaagagacttactctattggaattttcatctacgtagtatttgggctgtcaagactaaatagcaaaagggtagaatattagatcattctcttaataagacctgatttattccttaggatgttatacaaacctttttatttcaggcctactttcttgttttttcctaaaaggatctaggatagaggagaacataatatgcctgtatacttctcccatggtttattcataagctgcttcatctcattggagatggtcattgaggagagcagtaataagtgacgatgattctgaggacttggctagactgagcggatcaatggcacacaccagcactggtagaggctgaccagaagctcatcgattccatatgctgtcacccagggtgcagatttactctcttttgctgttattttattgtttttcttaaattaagccattgtttttcatggattatttttaaaatacctaccccataattttcaggcaattgtaaaaataaaccttatttaagataacttttaatggtacatatcaactatatgtggggaaaaaatgcaattttctgggcaagagaaaccaaaggattttcaatatatgagatgccaggttgtcaattttctaaaccttttcctctagattattctggccctaggcctttcagcaaccccactaatcaattattagatcctgccccaaggagcagtggcttgggggctggatttagggaggaaaacctgattaaactgttttgcttagtactggttacagctgtagctggagaagagtttataatcataaagtacatttttgttattaccttgtggattttaattatccatcttgtctaatcttgttctctgtcatcctagataatgaggtgtttgtgggagcagagctctgcacacaccaggggatgtaataaatgtttgcacttggcccagtatattatgaatgtggcacagtaaataaagtttgtgtacaaaatactagtttatttctatgggagccattatgttcaggatatataaaatgtatctaattaaacaattttgaatctattttgtgctctagaaatgttcttttggggaaagatggaaagaaatgtataaatggagttaagattaaagtatttggggttttttttccccaaaagcttcccagttgtttagaaataatactatccaaagtaggattcggtcctgtaagtcctaactgaatttcttttgtaaaactgatacgtttaaactgtacattgcataatcattctgttaaactaaacctttgtttaatacataattgtaagagcatatatttgttattgaattgaaagactttttttgtagcttttgcttttaaagaagatggcaaattatctaagaaagacttagctttattacgtccaaaatgagatctaaagaaggaggtctttaaaaattgttgtgatggaccaacatgtccaacatcttaagcaaatgaagcttcatgattaaggcagcttacagataagtggaaaagaacttacctgtcatatgcatccttttgttttccaaaacaacatctgatttagttcattttctccagccttgctcctaacatagtgaaaggcatagatacacatgtatgttcttttacactgtgtcattgtttgtaaaatatacagtatttatgtacagtttcagagacattcaatattgaaaaccacttcagttagcctcctagtgaatactattaatttttcatggattacatattaccatatgaccccataaatacattttattagttactttggtatcttcaaattggtaagaaaaaaacataaaacaaaaatgttcttattttctgcaatttttttttctagccattccttcctcccaaatagaagtgagggcaattgtagagagaggaatattaagttttcataaagcaaagtatcatcttatttgtgttccacctgtttcttctaacacttaattcataaagtgagcaattgaacttcttaatactgttagagaatatgctagaactattacttcttttatcttagacacccactttcccttaattctcatctatttagttttttaataaaattgttgctagaatttttttgtcttttcaagttctttttttgttaattttattgatattgctgtacttttttttttttttttgagacagagtcttgagtgctctgtcacccaggctggagcgcaatggcacaatctcggctcactgcagcctccgcctcccaggttcaagggattcttgtgcctcagcctcccgagtagctgggtttacaggcgtgtgccacccacctagctaatttttgtattttagttagagacgggggttttgccatgttggccaggctggtctcgaactcctgacctcaagtgtttcacccgcctcagccccccaaagtgctgggattacaggtgtgagcaaccgcgcctggactcaagttctttttaaagcttgattaaggtataaccgacatataatacacttcgcatatttgaacagtacttgatacagtttgatgtatgtatatacccttgacataatcaaaatagtgaacatatctatcatccccaaaagtttcccctgcccctttgtaatccttccccatcctctatcctgaggcaaccattgatctgcttttattatttttaaaagttagcgtattttcttatatgtattgcatatgggatttttctagaaggccacgtgcatatgcaccctccccttccattaccccagtatccgccatcaagtagtaacatgttgtaacagaaagaatcccattaagtcctagttctggtagcccggtacaaattttagattttcccccaaaaatgaaaaaaaattatttaaaaaatttagatttgaaatgcttagaaaacaatcatttatttttttatgtcaaaatgtccaagtaaattaatggattaatttccatgcttctggtgatgtaacaccacttggtggtggcgctgaggaaaccctgggaagtgtttttctcttctgtgtaatgaaagactcactgacaaagccgtcggtatccagaatgactgctcttgaaatgatattttgatgatgatgatcagggaagtagcctatgctgatttatttatcatccccccaccccaaccccacttttgtgtcacaaacatttgaaacacccagtgctcaagaatgctgcttttccaattctgctaatatcctctctccccatctggaaacaaagttactaaacctagttttgaaaaagcaatggaaatgaaagtgtccagtgaacttactggcagttgtgcaagttgaaagcttattccttacatcctgagcctaaaagccttattccttatatccggagcctaaaagtttgctcaaaagtagaaaactttccagacaagatcacatacaaaatggttaacatgaaatgctaatgaagaaacaaggcaagaatgaatacaagagaaatggaatctggggaaaaaagtaggttctctaactggggcagggatcttgcttcttgggggcatatggttggatcccaggtgggccacgaaaatcatcttggatatttgtttacaggctgattcctgagtttccctccaaagattctgagtccacagatctagggtgtggaccgagaatcctcattgtaacaagcaccctctgcccccgggacattttaaggtagatggagaactaaggtgagagtgtgccagctaaatactctttcctttgtccctgtgcctcagtcttttttgtttgttttttttcatgtgacactcagtaggaaagtctagttcaagaaccggaaactgagccgggcatggtggtgcgcacctgtagtcccagctactcaggaggctgaggcaggaggatggcttgagcctgacgcccatgccgctgtgagctatgattgcaccactgccctgagcctggacgacagagcaagttcctgtcttaaaaaaaaaagtaataaaaaagacatttaaaaaaaaattagagctcagtgacctgtgactcactttgccactttgtcattttcttgacttctgtcccaacgccagccctgtaatatggagataaagagtggggaggacagaactctgaaacctaaaaggcaagatttttgctaaaccggagaacgtaaaaatacattcctagaggcaatctaaccagccagataaccagaagtttactcttcaaagccaagaatcagtacccccacctcaccttccattctctcttaggctttgtctatgtctctaaggggagtttttcagttgactgatgaggtcctgactggtagggaaagcctgcagggaaatcctgtggcaaagcacactcttgatcacctacttaacaagaaggtctagcaggacattcttgatccaggtcagcttcttccctgaaaataatacatatttttaatttctgtttgaaaaaactccactgtgaaattactctgcttatattagaaggtatgaagacagtagttatgtactgttcgtttgcatacggtcattttgagatagaaaaattaaatttttttaggaaaagaatttcaagcaactttctacgaaaatacagcttgtggttaaatttcctaatgaaagaggaattattcactgaaaaatttgtctaatctgtgccacctcaaaataagaattgtgcctcttcaatgaatgttgtatatgagaatgttacatttgtaacagcacaggaaactcaataaattataaatgaatta

SEQ ID NO: 163168 - DNA, 2999 bp, Homo sapiens
  Payload ID: 12153
  Gene Symbol: OSBPL6
  Gene Name: oxysterol binding protein-like 6
  Uniprot ID: Q9BZF3
  ENST ID: ENST00000315022
  CDS Start-End: 121-2937
tttccacttgctgctcaggaggtattgagatcaatgaacactaacctgaggagcatatttttaccaaattaaagagctacagtgaaatatgtgttccaggttcctggttttaagctaaatatgcatcagttatctctgatcaggggaaacagagggcggagtattcacatactggagaggactgcttcctctagcaccgagccctctgtaagtcggcaattgctagaaccggagccagtccccctctccaaggaagctgacagctgggaaattatagaagggctgaaaataggccaaaccaatgtccagaaaccagacaaacatgagggctttatgctgaagaaaagaaaatggcctttaaaaggctggcacaagcgtttttttgtcctggataatggaatgttaaagtattcaaaggcaccactcgatattcagaaaggaaaggtccatgggagcatagatgtgggactctcagtcatgtcaattaaaaagaaagctcgaagaatagaccttgacaccgaagagcacatctatcatttgaaggtgaaatcccaggactggtttgatgcatgggtctccaaactgcgacatcatcggttgtatcgtcagaatgaaattgtgagatcaccaagagatgctagttttcacatatttccttcaacgtccacagctgaatcctcaccagctgctaatgtttctgtaatggatggaaagatgcaaccaaacagctttccgtggcagtcccctttaccatgcagcaatagcctccctgcaacgtgcacaactggccagagtaaagtggcagcctggttacaggactcggaagagatggacaggtgtgcagaagatcttgcacattgccagtcaaaccttgtggaacttagcaaactcctgcaaaatttggaaatacttcagagaactcagtcggcacctaactttactgacatgcaggctaactgtgtagatatttcaaagaaagacaagcgggtcacaagacgatggagaacaaaaagtgtcagcaaagatacaaaaatacaactgcaggaagggccacccgcgaagggccagttcagcacaactcggcgccggcagaggctagcggcagcagtggctacaacagttcctttcagtgctaccatgtcaccagttcgcttgcattcctccaaccccaacctttgtgcagatattgaatttcagactccccctagccacctcactgaccctctggaaagttcaacagattatacaaagctgcaagaagaattttgtctaatcgcacagaaagtgcattctcttttgaagtctgcatttaatagcatagctatagagaaggagaagctgaagcagatggtttccgagcaggatcacagtaaaggccacagcacgcagatggcacggctccgacagtcactgtctcaggcactcaaccagaatgctgaactaaggagtcggttgaacagaatacattcagagtctattatttgtgatcaggttgtcagtgtaaatattattcctagccctgatgaggctggtgagcaaatccatgtcagtctccccttatcacagcaagtagccaatgagagccgcctctccatgtcagagtctgtttctgagttctttgatgcccaagaggtgctcctctctgcaagttcgtcagagaatgaggcttcagatgatgagtcttacatcagtgatgtgagtgataatatatctgaagacaacaccagtgttgcagacaatatttctcggcaaatcctgaatggggagcttacaggaggggccttccgaaatgggcgtcgagcatgcctgccagctccttgtcctgacaccagtaacattaacctgtggaatatcttgaggaacaacattggtaaagacctgtctaaagtctctatgcctgtggagctaaacgagccgctcaacaccctgcagcacctctgtgaggaaatggaatacagcgagctcctggacaaggcttcggaaactgatgatccatatgagcgcatggttctcgttgccgcatttgcagtttcaggatactgctccacctatttcagagcaggaagtaagccattcaacccagtccttggggagacttatgaatgcattagagaagacaagggattccgctttttctcagaacaggttagccatcatccacccatttctgcctgtcactgtgaatcaaagaattttgtgttttggcaagatatcagatggaaaaacaagttctgggggaagtcgatggaaatcctgcctgttggaacactgaatgtcatgcttccaaagtatggagattactatgtgtggaataaagtcaccacttgcatacacaacatcctcagtgggagaagatggatagaacattatggagaagtaaccatcagaaataccaaaagcagtgtttgcatttgcaaactcacatttgtcaaggtgaattattggaattctaacatgaatgaagtccagggggtggtgatagatcaggaggggaaggcggtgtaccggctgtttggaaagtggcatgaaggactctactgtggtgtggccccctctgcaaagtgcatttggagaccaggttccatgccaacaaactatgagctgtactatggcttcacaaggtttgctattgagctcaatgagttagatccagtactaaaagatctccttccaccaacagacgcccggttccggccagatcaaagatttttggaagaaggaaatttagaagctgcagcatcagagaagcaaagagtagaggaactccagagatctcggagacgatatatggaagaaaacaatcttgaacatataccaaaattttttaaaaaagttattgatgccaatcaaagagaagcctgggtttctaacgacacctactgggagcttcgaaaggaccctgggtttagcaaagtagacagccctgttctttggtagactgggaatgtagagctagccaacatatcacattctgaatgaataaataactatgcacaatt

SEQ ID NO: 163169 - DNA, 2217 bp, Homo sapiens
  Payload ID: 12153
  Gene Symbol: OSBPL6
  Gene Name: oxysterol binding protein-like 6
  Uniprot ID: Q9BZF3
  ENST ID: ENST00000357080
  CDS Start-End: 526-2052
gccgccgccgctgtcggtgctggagatcgcggctcggtgcaggcggcgcccatgcctcctctcctccactagcccgcgcgccagtccgcctgccggggccggctctccgcctcctgcctcccgtcgcagccgcgcagccgccgcagagtccgcggcgccaccgctcgccctccaggttctgccacttgctgggaaaacagcaacagaaggatattaaggagccacccctataatttacccagatagccccagcaaggtcaaagacatatcatgtcccaaggagaaaagctgcaggcatctgaggataaatcactgtgaaacagctttgaccataaagctgacttggaagactttgactccaaggtgcaaggtggtttggacaccctcaatattgcctgctcttttctagtcaaacctgattcatgaaatggaatgaagctgaaaaatcatctacttctttgtttgtggatttgagagaagattgggatggtcttaagtgcataaaacgagactctaactgcagcgatgagttcagatgagaagggcatttcccctgctcataaaacatccactccaacccatagaagtgcctcctcttcaacatcctcccaaagggacagtaggcagagtattcacatactggagaggactgcttcctctagcaccgagccctctgtaagtcggcaattgctagaaccggagccagtccccctctccaaggaagctgacagctgggaaattatagaagggctgaaaataggccaaaccaatgtccagaaaccagacaaacatgagggctttatgctgaagaaaagaaaatggcctttaaaaggctggcacaagcgtttttttgtcctggataatggaatgttaaagtattcaaaggcaccactcgatattcagaaaggaaaggtccatgggagcatagatgtgggactctcagtcatgtcaattaaaaagaaagctcgaagaatagaccttgacaccgaagagcacatctatcatttgaaggtgaaatcccaggactggtttgatgcatgggtctccaaactgcgacatcatcggttgtatcgtcagaatgaaattgtgagatcaccaagagatgctagttttcacatatttccttcaacgtccacagctgaatcctcaccagctgctaatgtttctgtaatggatggaaagatgcaaccaaacagctttccgtggcagtcccctttaccatgcagcaatagcctccctgcaacgtgcacaactggccagagtaaagtggcagcctggttacaggactcggaagagatggacaggtgtgcagaagatcttgcacattgccagtcaaaccttgtggaacttagcaaactcctgcaaaatttggaaatacttcagagaactcagtcggcacctaactttactgacatgcaggttcctttcagtgctaccatgtcaccagttcgcttgcattcctccaaccccaacctttgtgcagatattgaatttcagactccccctagccacctcactgaccctctggaaagttcaacagattatacaaagctgcaagaagaattttgtctaatcgcacagaaagtgcattctcttttgaagtctgcatttaatagcatagctatagagaaggagaagctgaagcagatggtttccgagcaggatcacagtaaaggccacagcacgcagatggcacggctccgacagtcactgtctcaggctggtgagcaaatccatgtcagtctccccttatcacagcaagtagccaatgagagccgcctctccatgtcagagtctgtttctgagttctttgatgcccaagaggtgctcctctctgcaagttcgtcagagaatgaggcttcagatgatgagtcttacatcagtgatgtgagtgataatatatctgaagacaacaccagtgttgcagacaatatttctcggcaaagtatgcatcatttgagcttccaggttgttctatctacatgccaaattgcaacacgaagacttaatgaacaggcattccccctcccacgccacccccacccctgctaattgttcttttggcagctgattgttcaatacattctattttgtatgatctcttgaggtaaatggttgaaaaaatctgttaggtaaatagttaagagaaaacgtttttcctctttctcaaaccaacagcttgagtccttcttattaaatgtatttaattttttaaaa

SEQ ID NO: 163170 - DNA, 7114 bp, Homo sapiens
  Payload ID: 12153
  Gene Symbol: OSBPL6
  Gene Name: oxysterol binding protein-like 6
  Uniprot ID: Q9BZF3
  ENST ID: ENST00000359685
  CDS Start-End: 545-3241
ctggaggcgcagcacggtcgccgccgccgctgtcggtgctggagatcgcggctcggtgcaggcggcgcccatgcctcctctcctccactagcccgcgcgccagtccgcctgccggggccggctctccgcctcctgcctcccgtcgcagccgcgcagccgccgcagagtccgcggcgccaccgctcgccctccaggttctgccacttgctgggaaaacagcaacagaaggatattaaggagccacccctataatttacccagatagccccagcaaggtcaaagacatatcatgtcccaaggagaaaagctgcaggcatctgaggataaatcactgtgaaacagctttgaccataaagctgacttggaagactttgactccaaggtgcaaggtggtttggacaccctcaatattgcctgctcttttctagtcaaacctgattcatgaaatggaatgaagctgaaaaatcatctacttctttgtttgtggatttgagagaagattgggatggtcttaagtgcataaaacgagactctaactgcagcgatgagttcagatgagaagggcatttcccctgctcataaaacatccactccaacccatagaagtgcctcctcttcaacatcctcccaaagggacagtaggcagagtattcacatactggagaggactgcttcctctagcaccgagccctctgtaagtcggcaattgctagaaccggagccagtccccctctccaaggaagctgacagctgggaaattatagaagggctgaaaataggccaaaccaatgtccagaaaccagacaaacatgagggctttatgctgaagaaaagaaaatggcctttaaaaggctggcacaagcgtttttttgtcctggataatggaatgttaaagtattcaaaggcaccactcgatattcagaaaggaaaggtccatgggagcatagatgtgggactctcagtcatgtcaattaaaaagaaagctcgaagaatagaccttgacaccgaagagcacatctatcatttgaaggtgaaatcccaggactggtttgatgcatgggtctccaaactgcgacatcatcggttgtatcgtcagaatgaaattgtgagatcaccaagagatgctagttttcacatatttccttcaacgtccacagctgaatcctcaccagctgctaatgtttctgtaatggatggaaagatgcaaccaaacagctttccgtggcagtcccctttaccatgcagcaatagcctccctgcaacgtgcacaactggccagagtaaagtggcagcctggttacaggactcggaagagatggacaggtgtgcagaagatcttgcacattgccagtcaaaccttgtggaacttagcaaactcctgcaaaatttggaaatacttcagagaactcagtcggcacctaactttactgacatgcaggctaactgtgtagatatttcaaagaaagacaagcgggtcacaagacgatggagaacaaaaagtgtcagcaaagatacaaaaatacaactgcaggttcctttcagtgctaccatgtcaccagttcgcttgcattcctccaaccccaacctttgtgcagatattgaatttcagactccccctagccacctcactgaccctctggaaagttcaacagattatacaaagctgcaagaagaattttgtctaatcgcacagaaagtgcattctcttttgaagtctgcatttaatagcatagctatagagaaggagaagctgaagcagatggtttccgagcaggatcacagtaaaggccacagcacgcagatggcacggctccgacagtcactgtctcaggctggtgagcaaatccatgtcagtctccccttatcacagcaagtagccaatgagagccgcctctccatgtcagagtctgtttctgagttctttgatgcccaagaggtgctcctctctgcaagttcgtcagagaatgaggcttcagatgatgagtcttacatcagtgatgtgagtgataatatatctgaagacaacaccagtgttgcagacaatatttctcggcaaatcctgaatggggagcttacaggaggggccttccgaaatgggcgtcgagcatgcctgccagctccttgtcctgacaccagtaacattaacctgtggaatatcttgaggaacaacattggtaaagacctgtctaaagtctctatgcctgtggagctaaacgagccgctcaacaccctgcagcacctctgtgaggaaatggaatacagcgagctcctggacaaggcttcggaaactgatgatccatatgagcgcatggttctcgttgccgcatttgcagtttcaggatactgctccacctatttcagagcaggaagtaagccattcaacccagtccttggggagacttatgaatgcattagagaagacaagggattccgctttttctcagaacaggttagccatcatccacccatttctgcctgtcactgtgaatcaaagaattttgtgttttggcaagatatcagatggaaaaacaagttctgggggaagtcgatggaaatcctgcctgttggaacactgaatgtcatgcttccaaagtatggagattactatgtgtggaataaagtcaccacttgcatacacaacatcctcagtgggagaagatggatagaacattatggagaagtaaccatcagaaataccaaaagcagtgtttgcatttgcaaactcacatttgtcaaggtgaattattggaattctaacatgaatgaagtccagggggtggtgatagatcaggaggggaaggcggtgtaccggctgtttggaaagtggcatgaaggactctactgtggtgtggccccctctgcaaagtgcatttggagaccaggttccatgccaacaaactatgagctgtactatggcttcacaaggtttgctattgagctcaatgagttagatccagtactaaaagatctccttccaccaacagacgcccggttccggccagatcaaagatttttggaagaaggaaatttagaagctgcagcatcagagaagcaaagagtagaggaactccagagatctcggagacgatatatggaagaaaacaatcttgaacatataccaaaattttttaaaaaagttattgatgccaatcaaagagaagcctgggtttctaacgacacctactgggagcttcgaaaggaccctgggtttagcaaagtagacagccctgttctttggtagactgggaatgtagagctagccaacatatcacattctgaatgaataaataactatgcacaattatgtttcttatagctatgtgtggtttctgggtcaactgaaaacctaccatttgcttttctattcatctttataatggactttcagaagtgcattagacaaggcccctaaccactttgggatcctttctgttttgctgcaaccatattccttaaaaaaaaaaaaaaaaaaaaaaaaaaaatccacaccgtccttggaaagcagaataaaaggagcagaatataaaatccaaagtctgaccagtttgtaaagaaaaacaaatggtaactggtgcttaaagctgatcaagaaagttaacaacaacatagaaaccacacgattgttccactgtctggaagcaccatcccctatcgcaggactcctgggccacaagcagtcggtcagtgcagacttcaagtgtgtctgtttgatgtggtgtgattgtgctggccttgtcgaaaaagatgtgatgcttctcagaacctgttccatctgtatgccattgttcatgccttaagaaatgcaaagatgtacaataaatcatttttaaaatgtgtgctcataggtttatgtgaagaacagattttttgaatcatggcatgattcactttctcaatcaggacaattatgagactaacttaaatgggttttttaaaagtgaacaacacgtgctttactctgataagtcagttaccatatggtatgtctgaagggaaagaaggaaaagacgtgctaagtagatctctgtatttacgtggctcgttaatttcctgtcctgcgtccagataataaaccatccctcttccacctaacctcacagtgtgccctattatttggaaaaatctgtctttgatttggacatttggtcatcagtgttaaaaccttaaaaggaaataacaaaaagcatatggaattcctgtgtgggcttagtagtactataaatgtaattgtttttgagtgaagcaccatgtaatccatgtctcaatcccatgcccgctccactgacactagtcgaattccactgagaacagaagcaagaataatagtagtttatttgcattgtttaaatgaattctatgcaaaatcatatttcaaattttcatcaagtgattccatatggtacatggctacatattaagcatttaccttgctattggcagagatatgaaacttaagctaaggaatgtatccatcccaaagcaggaaagcagaagtgtgttttgcatacttcaggatttgtttttcctccactaatatacagaggcttttgcagaaaacttgcatcagtattcctgtttctgcacgtaggtgactatataaatgcctgtatgttttttttaaaatatctcctcagagattttcctagggaattataaaattacatatattttattgttagttagatgtttattcttggattcttaccattagaatttaagtgttatttaaaactctgatacagttacagacactttacattttattatgaggtgttgattttagtggtatttctcctcagcaaagcattcctaataatggctaatacaccatcaaatgaaaaactgctgatgagagtgtaagagaaagcgctaacgtttccactagatggcgcaatattttatttatccaaaactcctcccttgcatctgagtttttatgttatgtgtacagtctgcattagcttagaatggaatttcattctcaggtaaattttcgaatccatcaccagatctaagcattctgcttcaacaataccctctctattcctctcattcccattttaaatccataggtggcttgccctgcggcagtaaaatcttccccttgatattgattctttttctgctcattcatcttgatgttctttttctgcatcctgagatacatgtcgttaattttaataagaatcctattgacttcctcacgggagtctgttctcctatggttgataaagctttaaatactatttaaagtggttctggtctgtacttactagcacttccctgaacagtctcaaaatagcctaaacataagaaaacaatcctgcaaagtaaaggtttttacaagcagagatgaaggaaagggagcagcagctgaccatcagatgtggtatcaggtagctggaagaggatccaggacccatcagggaagcaacgactgtacttagcaatttgggttataattacaaaaaagaaaaaatagtagaaaggatctttaccagacagtaaggtcatggtacaaatcaggtgagtgaatgttggtcagaggtagcctgacactctgatgaggacttcaagatgagaatgagaaaaatgtctattaaaatcactacatttgataatatctcagatttagaatctcttttgggattcagatagtctgattattccaattcaagtgttcagttaagttttagttactattcctataatacccaattcactaatatcatatctcctgtggaatattcattggtgcgatggcctcatccccttttttactttttattgacatggtggttataaaatgaagagacttactctattggaattttcatctacgtagtatttgggctgtcaagactaaatagcaaaagggtagaatattagatcattctcttaataagacctgatttattccttaggatgttatacaaacctttttatttcaggcctactttcttgttttttcctaaaaggatctaggatagaggagaacataatatgcctgtatacttctcccatggtttattcataagctgcttcatctcattggagatggtcattgaggagagcagtaataagtgacgatgattctgaggacttggctagactgagcggatcaatggcacacaccagcactggtagaggctgaccagaagctcatcgattccatatgctgtcacccagggtgcagatttactctcttttgctgttattttattgtttttcttaaattaagccattgtttttcatggattatttttaaaatacctaccccataattttcaggcaattgtaaaaataaaccttatttaagataacttttaatggtacatatcaactatatgtggggaaaaaatgcaattttctgggcaagagaaaccaaaggattttcaatatatgagatgccaggttgtcaattttctaaaccttttcctctagattattctggccctaggcctttcagcaaccccactaatcaattattagatcctgccccaaggagcagtggcttgggggctggatttagggaggaaaacctgattaaactgttttgcttagtactggttacagctgtagctggagaagagtttataatcataaagtacatttttgttattaccttgtggattttaattatccatcttgtctaatcttgttctctgtcatcctagataatgaggtgtttgtgggagcagagctctgcacacaccaggggatgtaataaatgtttgcacttggcccagtatattatgaatgtggcacagtaaataaagtttgtgtacaaaatactagtttatttctatgggagccattatgttcaggatatataaaatgtatctaattaaacaattttgaatctattttgtgctctagaaatgttcttttggggaaagatggaaagaaatgtataaatggagttaagattaaagtatttggggttttttttccccaaaagcttcccagttgtttagaaataatactatccaaagtaggattcggtcctgtaagtcctaactgaatttcttttgtaaaactgatacgtttaaactgtacattgcataatcattctgttaaactaaacctttgtttaatacataattgtaagagc

SEQ ID NO: 163171 - DNA, 3637 bp, Homo sapiens
  Payload ID: 12153
  Gene Symbol: OSBPL6
  Gene Name: oxysterol binding protein-like 6
  Uniprot ID: Q9BZF3
  ENST ID: ENST00000392505
  CDS Start-End: 545-3424
ctggaggcgcagcacggtcgccgccgccgctgtcggtgctggagatcgcggctcggtgcaggcggcgcccatgcctcctctcctccactagcccgcgcgccagtccgcctgccggggccggctctccgcctcctgcctcccgtcgcagccgcgcagccgccgcagagtccgcggcgccaccgctcgccctccaggttctgccacttgctgggaaaacagcaacagaaggatattaaggagccacccctataatttacccagatagccccagcaaggtcaaagacatatcatgtcccaaggagaaaagctgcaggcatctgaggataaatcactgtgaaacagctttgaccataaagctgacttggaagactttgactccaaggtgcaaggtggtttggacaccctcaatattgcctgctcttttctagtcaaacctgattcatgaaatggaatgaagctgaaaaatcatctacttctttgtttgtggatttgagagaagattgggatggtcttaagtgcataaaacgagactctaactgcagcgatgagttcagatgagaagggcatttcccctgctcataaaacatccactccaacccatagaagtgcctcctcttcaacatcctcccaaagggacagtaggcagagtattcacatactggagaggactgcttcctctagcaccgagccctctgtaagtcggcaattgctagaaccggagccagtccccctctccaaggaagctgacagctgggaaattatagaagggctgaaaataggccaaaccaatgtccagaaaccagacaaacatgagggctttatgctgaagaaaagaaaatggcctttaaaaggctggcacaagcgtttttttgtcctggataatggaatgttaaagtattcaaaggcaccactcgatattcagaaaggaaaggtccatgggagcatagatgtgggactctcagtcatgtcaattaaaaagaaagctcgaagaatagaccttgacaccgaagagcacatctatcatttgaaggtgaaatcccaggactggtttgatgcatgggtctccaaactgcgacatcatcggttgtatcgtcagaatgaaattgtgagatcaccaagagatgctagttttcacatatttccttcaacgtccacagctgaatcctcaccagctgctaatgtttctgtaatggatggaaagatgcaaccaaacagctttccgtggcagtcccctttaccatgcagcaatagcctccctgcaacgtgcacaactggccagagtaaagtggcagcctggttacaggactcggaagagatggacaggtgtgcagaagatcttgcacattgccagtcaaaccttgtggaacttagcaaactcctgcaaaatttggaaatacttcagagaactcagtcggcacctaactttactgacatgcaggctaactgtgtagatatttcaaagaaagacaagcgggtcacaagacgatggagaacaaaaagtgtcagcaaagatacaaaaatacaactgcaggaagggccacccgcgaagggccagttcagcacaactcggcgccggcagaggctagcggcagcagtggctacaacagttcctttcagtgctaccatgtcaccagttcgcttgcattcctccaaccccaacctttgtgcagatattgaatttcagactccccctagccacctcactgaccctctggaaagttcaacagattatacaaagctgcaagaagaattttgtctaatcgcacagaaagtgcattctcttttgaagtctgcatttaatagcatagctatagagaaggagaagctgaagcagatggtttccgagcaggatcacagtaaaggccacagcacgcagatggcacggctccgacagtcactgtctcaggcactcaaccagaatgctgaactaaggagtcggttgaacagaatacattcagagtctattatttgtgatcaggttgtcagtgtaaatattattcctagccctgatgaggctggtgagcaaatccatgtcagtctccccttatcacagcaagtagccaatgagagccgcctctccatgtcagagtctgtttctgagttctttgatgcccaagaggtgctcctctctgcaagttcgtcagagaatgaggcttcagatgatgagtcttacatcagtgatgtgagtgataatatatctgaagacaacaccagtgttgcagacaatatttctcggcaaatcctgaatggggagcttacaggaggggccttccgaaatgggcgtcgagcatgcctgccagctccttgtcctgacaccagtaacattaacctgtggaatatcttgaggaacaacattggtaaagacctgtctaaagtctctatgcctgtggagctaaacgagccgctcaacaccctgcagcacctctgtgaggaaatggaatacagcgagctcctggacaaggcttcggaaactgatgatccatatgagcgcatggttctcgttgccgcatttgcagtttcaggatactgctccacctatttcagagcaggaagtaagccattcaacccagtccttggggagacttatgaatgcattagagaagacaagggattccgctttttctcagaacaggttagccatcatccacccatttctgcctgtcactgtgaatcaaagaattttgtgttttggcaagatatcagatggaaaaacaagttctgggggaagtcgatggaaatcctgcctgttggaacactgaatgtcatgcttccaaagtatggagattactatgtgtggaataaagtcaccacttgcatacacaacatcctcagtgggagaagatggatagaacattatggagaagtaaccatcagaaataccaaaagcagtgtttgcatttgcaaactcacatttgtcaaggtgaattattggaattctaacatgaatgaagtccagggggtggtgatagatcaggaggggaaggcggtgtaccggctgtttggaaagtggcatgaaggactctactgtggtgtggccccctctgcaaagtgcatttggagaccaggttccatgccaacaaactatgagctgtactatggcttcacaaggtttgctattgagctcaatgagttagatccagtactaaaagatctccttccaccaacagacgcccggttccggccagatcaaagatttttggaagaaggaaatttagaagctgcagcatcagagaagcaaagagtagaggaactccagagatctcggagacgatatatggaagaaaacaatcttgaacatataccaaaattttttaaaaaagttattgatgccaatcaaagagaagcctgggtttctaacgacacctactgggagcttcgaaaggaccctgggtttagcaaagtagacagccctgttctttggtagactgggaatgtagagctagccaacatatcacattctgaatgaataaataactatgcacaattatgtttcttatagctatgtgtggtttctgggtcaactgaaaacctaccatttgcttttctattcatctttataatggactttcagaagtgcattagacaaggcccctaaccactttgggatcctttctgttttgctgcaaccatattcctt

SEQ ID NO: 163172 - DNA, 3273 bp, Homo sapiens
  Payload ID: 12153
  Gene Symbol: OSBPL6
  Gene Name: oxysterol binding protein-like 6
  Uniprot ID: Q9BZF3
  ENST ID: ENST00000409631
  CDS Start-End: 351-3047
gttctgccacttgctgggaaaacagcaacagaaggatattaaggagccacccctataatttacccagatagccccagcaaggtcaaagacatatcatgtcccaaggagaaaagctgcaggcatctgaggataaatcactgtgaaacagctttgaccataaagctgacttggaagactttgactccaaggtgcaaggtggtttggacaccctcaatattgcctgctcttttctagtcaaacctgattcatgaaatggaatgaagctgaaaaatcatctacttctttgtttgtggatttgagagaagattgggatggtcttaagtgcataaaacgagactctaactgcagcgatgagttcagatgagaagggcatttcccctgctcataaaacatccactccaacccatagaagtgcctcctcttcaacatcctcccaaagggacagtaggcagagtattcacatactggagaggactgcttcctctagcaccgagccctctgtaagtcggcaattgctagaaccggagccagtccccctctccaaggaagctgacagctgggaaattatagaagggctgaaaataggccaaaccaatgtccagaaaccagacaaacatgagggctttatgctgaagaaaagaaaatggcctttaaaaggctggcacaagcgtttttttgtcctggataatggaatgttaaagtattcaaaggcaccactcgatattcagaaaggaaaggtccatgggagcatagatgtgggactctcagtcatgtcaattaaaaagaaagctcgaagaatagaccttgacaccgaagagcacatctatcatttgaaggtgaaatcccaggactggtttgatgcatgggtctccaaactgcgacatcatcggttgtatcgtcagaatgaaattgtgagatcaccaagagatgctagttttcacatatttccttcaacgtccacagctgaatcctcaccagctgctaatgtttctgtaatggatggaaagatgcaaccaaacagctttccgtggcagtcccctttaccatgcagcaatagcctccctgcaacgtgcacaactggccagagtaaagtggcagcctggttacaggactcggaagagatggacaggtgtgcagaagatcttgcacattgccagtcaaaccttgtggaacttagcaaactcctgcaaaatttggaaatacttcagagaactcagtcggcacctaactttactgacatgcaggctaactgtgtagatatttcaaagaaagacaagcgggtcacaagacgatggagaacaaaaagtgtcagcaaagatacaaaaatacaactgcaggttcctttcagtgctaccatgtcaccagttcgcttgcattcctccaaccccaacctttgtgcagatattgaatttcagactccccctagccacctcactgaccctctggaaagttcaacagattatacaaagctgcaagaagaattttgtctaatcgcacagaaagtgcattctcttttgaagtctgcatttaatagcatagctatagagaaggagaagctgaagcagatggtttccgagcaggatcacagtaaaggccacagcacgcagatggcacggctccgacagtcactgtctcaggctggtgagcaaatccatgtcagtctccccttatcacagcaagtagccaatgagagccgcctctccatgtcagagtctgtttctgagttctttgatgcccaagaggtgctcctctctgcaagttcgtcagagaatgaggcttcagatgatgagtcttacatcagtgatgtgagtgataatatatctgaagacaacaccagtgttgcagacaatatttctcggcaaatcctgaatggggagcttacaggaggggccttccgaaatgggcgtcgagcatgcctgccagctccttgtcctgacaccagtaacattaacctgtggaatatcttgaggaacaacattggtaaagacctgtctaaagtctctatgcctgtggagctaaacgagccgctcaacaccctgcagcacctctgtgaggaaatggaatacagcgagctcctggacaaggcttcggaaactgatgatccatatgagcgcatggttctcgttgccgcatttgcagtttcaggatactgctccacctatttcagagcaggaagtaagccattcaacccagtccttggggagacttatgaatgcattagagaagacaagggattccgctttttctcagaacaggttagccatcatccacccatttctgcctgtcactgtgaatcaaagaattttgtgttttggcaagatatcagatggaaaaacaagttctgggggaagtcgatggaaatcctgcctgttggaacactgaatgtcatgcttccaaagtatggagattactatgtgtggaataaagtcaccacttgcatacacaacatcctcagtgggagaagatggatagaacattatggagaagtaaccatcagaaataccaaaagcagtgtttgcatttgcaaactcacatttgtcaaggtgaattattggaattctaacatgaatgaagtccagggggtggtgatagatcaggaggggaaggcggtgtaccggctgtttggaaagtggcatgaaggactctactgtggtgtggccccctctgcaaagtgcatttggagaccaggttccatgccaacaaactatgagctgtactatggcttcacaaggtttgctattgagctcaatgagttagatccagtactaaaagatctccttccaccaacagacgcccggttccggccagatcaaagatttttggaagaaggaaatttagaagctgcagcatcagagaagcaaagagtagaggaactccagagatctcggagacgatatatggaagaaaacaatcttgaacatataccaaaattttttaaaaaagttattgatgccaatcaaagagaagcctgggtttctaacgacacctactgggagcttcgaaaggaccctgggtttagcaaagtagacagccctgttctttggtagactgggaatgtagagctagccaacatatcacattctgaatgaataaataactatgcacaattatgtttcttatagctatgtgtggtttctgggtcaactgaaaacctaccatttgcttttctattcatctttataatggactttcagaagtgcattagacaaggcccctaaccactttgggatcctttctgttttgctgcaaccatattccttaaaaaaaaaaaaa

SEQ ID NO: 163173 - DNA, 3427 bp, Homo sapiens
  Payload ID: 12153
  Gene Symbol: OSBPL6
  Gene Name: oxysterol binding protein-like 6
  Uniprot ID: Q9BZF3
  ENST ID: ENST00000409045
  CDS Start-End: 503-3214
agatcgcggctcggtgcaggcggcgcccatgcctcctctcctccactagcccgcgcgccagtccgcctgccggggccggctctccgcctcctgcctcccgtcgcagccgcgcagccgccgcagagtccgcggcgccaccgctcgccctccaggttctgccacttgctgggaaaacagcaacagaaggatattaaggagccacccctataatttacccagatagccccagcaaggtcaaagacatatcatgtcccaaggagaaaagctgcaggcatctgaggataaatcactgtgaaacagctttgaccataaagctgacttggaagactttgactccaaggtgcaaggtggtttggacaccctcaatattgcctgctcttttctagtcaaacctgattcatgaaatggaatgaagctgaaaaatcatctacttctttgtttgtggatttgagagaagattgggatggtcttaagtgcataaaacgagactctaactgcagcgatgagttcagatgagaagggcatttcccctgctcataaaacatccactccaacccatagaagtgcctcctcttcaacatcctcccaaagggacagtaggcagagtattcacatactggagaggactgcttcctctagcaccgagccctctgtaagtcggcaattgctagaaccggagccagtccccctctccaaggaagctgacagctgggaaattatagaagggctgaaaataggccaaaccaatgtccagaaaccagacaaacatgagggctttatgctgaagaaaagaaaatggcctttaaaaggctggcacaagcgtttttttgtcctggataatggaatgttaaagtattcaaaggcaccactcgatattcagaaaggaaaggtccatgggagcatagatgtgggactctcagtcatgtcaattaaaaagaaagctcgaagaatagaccttgacaccgaagagcacatctatcatttgaaggtgaaatcccaggactggtttgatgcatgggtctccaaactgcgacatcatcggttgtatcgtcagaatgaaattgtgagatcaccaagagatgctagttttcacatatttccttcaacgtccacagctgaatcctcaccagctgctaatgtttctgtaatggatggaaagatgcaaccaaacagctttccgtggcagtcccctttaccatgcagcaatagcctccctgcaacgtgcacaactggccagagtaaagtggcagcctggttacaggactcggaagagatggacaggtgtgcagaagatcttgcacattgccagtcaaaccttgtggaacttagcaaactcctgcaaaatttggaaatacttcagagaactcagtcggcacctaactttactgacatgcaggttcctttcagtgctaccatgtcaccagttcgcttgcattcctccaaccccaacctttgtgcagatattgaatttcagactccccctagccacctcactgaccctctggaaagttcaacagattatacaaagctgcaagaagaattttgtctaatcgcacagaaagtgcattctcttttgaagtctgcatttaatagcatagctatagagaaggagaagctgaagcagatggtttccgagcaggatcacagtaaaggccacagcacgcagatggcacggctccgacagtcactgtctcaggcactcaaccagaatgctgaactaaggagtcggttgaacagaatacattcagagtctattatttgtgatcaggttgtcagtgtaaatattattcctagccctgatgaggctggtgagcaaatccatgtcagtctccccttatcacagcaagtagccaatgagagccgcctctccatgtcagagtctgtttctgagttctttgatgcccaagaggtgctcctctctgcaagttcgtcagagaatgaggcttcagatgatgagtcttacatcagtgatgtgagtgataatatatctgaagacaacaccagtgttgcagacaatatttctcggcaaatcctgaatggggagcttacaggaggggccttccgaaatgggcgtcgagcatgcctgccagctccttgtcctgacaccagtaacattaacctgtggaatatcttgaggaacaacattggtaaagacctgtctaaagtctctatgcctgtggagctaaacgagccgctcaacaccctgcagcacctctgtgaggaaatggaatacagcgagctcctggacaaggcttcggaaactgatgatccatatgagcgcatggttctcgttgccgcatttgcagtttcaggatactgctccacctatttcagagcaggaagtaagccattcaacccagtccttggggagacttatgaatgcattagagaagacaagggattccgctttttctcagaacaggttagccatcatccacccatttctgcctgtcactgtgaatcaaagaattttgtgttttggcaagatatcagatggaaaaacaagttctgggggaagtcgatggaaatcctgcctgttggaacactgaatgtcatgcttccaaagtatggagattactatgtgtggaataaagtcaccacttgcatacacaacatcctcagtgggagaagatggatagaacattatggagaagtaaccatcagaaataccaaaagcagtgtttgcatttgcaaactcacatttgtcaaggtgaattattggaattctaacatgaatgaagtccagggggtggtgatagatcaggaggggaaggcggtgtaccggctgtttggaaagtggcatgaaggactctactgtggtgtggccccctctgcaaagtgcatttggagaccaggttccatgccaacaaactatgagctgtactatggcttcacaaggtttgctattgagctcaatgagttagatccagtactaaaagatctccttccaccaacagacgcccggttccggccagatcaaagatttttggaagaaggaaatttagaagctgcagcatcagagaagcaaagagtagaggaactccagagatctcggagacgatatatggaagaaaacaatcttgaacatataccaaaattttttaaaaaagttattgatgccaatcaaagagaagcctgggtttctaacgacacctactgggagcttcgaaaggaccctgggtttagcaaagtagacagccctgttctttggtagactgggaatgtagagctagccaacatatcacattctgaatgaataaataactatgcacaattatgtttcttatagctatgtgtggtttctgggtcaactgaaaacctaccatttgcttttctattcatctttataatggactttcagaagtgcattagacaaggcccctaaccactttgggatcctttctgttttgctgcaaccatattcctt

SEQ ID NO: 163174 - DNA, 3640 bp, Homo sapiens
  Payload ID: 12154
  Gene Symbol: OSBPL7
  Gene Name: oxysterol binding protein-like 7
  Uniprot ID: Q9BZF2
  ENST ID: ENST00000007414
  CDS Start-End: 193-2721
tgccactgctcagcgcggtgaggagggagccggtgactcggagacggtgactcagaggcagagcggcgcaagggccaaggagtactggcgtccatggaccctggggaccccgtcaggagcaggtgacatccttccccttccaccctgctccctgctctacatccccagcagggagtggcctctcccttctccatggacttccaagagagggacccgcccttcctgcctgagagcgctcagtcctcaaagcccagcagtgctcagcaggcctctgagctgtgggaggtggtggaggagcctcgggtcaggctggggacagagggtgtcatgcctgagaggcaggaaggtcacctgctcaagaagaggaagtggcctctgaagggctggcacaagagatactttgtgctcgaggacgggatccttcattatgcaacaacccggcaagacatcaccaaggggaagctccatggctccatcgatgtccggctgtcggtcatgtccatcaacaaaaaggcccagcgcattgaccttgacactgaagacaacatctaccacctcaagatcaaatcccaggacctattccagagctgggtggcgcagctgcgtgcccaccgcctagcccaccgcctggacatgccccgtggctcactgcccagtactgctcaccggaaggttcctggtgcccagcttccaacagcagctactgcctcagccctacctgggcttggaccgcgggagaaagtgtcttcctggctgagggacagtgatgggctggaccgctgctctcatgagctctctgagtgtcaggggaagctccaggaactacacaggctcctccagagcctggagtccctgcaccgaatcccctcagcccctgttatccccacacaccaggcctcagtgacaaccgaaagacccaagaaggggaaacggacaagccgcatgtggtgcacccagagctttgccaaggatgacaccattggacgggttggtcgtctccatggctctgttcccaacctgtctcgctacctggagtctcgggactcctcgggcacccgtgggctgccacccacagactatgcccacctgcagcgcagcttctgggccctggcccagaaggtgcacagctccctcagcagcgtcctggccgccctcaccatggaacgggaccaactgagggacatgcaccagggctcagagttgtcaagaatgggggtctctgaggcctccactggccagaggcgcctccactcactgtccacctcctccgacaccacggcggactctttcagctccctcaaccctgaggagcaagaagctctgtacatgaaggggcgcgagctcaccccccagctatcgcagaccagcatcctgtcccttgctgattcccacacggagttcttcgatgcctgcgaggttctcctctccgccagctcttctgagaatgagggctcagaggaggaggagtcctgtaccagtgaaatcaccaccagcctgtctgaggagatgctggacctcaggggagctgagcgctgtcagaaaggggggtgtgttccagggagacccatggggccaccccgccgtcgctgcctgccggcggccagcgggcctggggctgacgtgagcctgtggaacattctgcgcaacaacatcggcaaagacctgtccaaggtgtcaatgcctgtgcagctcaacgagccgctcaacactctgcagcggctctgcgaggagctggagtacagcagcctcctggaccaggccagccgcatcgccgacccctgcgagcgcatggtgtacatcgcagcctttgctgtctcggcctactcctccacataccaccgagccggctgcaagcccttcaaccctgtcctgggggagacctacgagtgtgagcggcctgaccgaggcttccgcttcatcagtgagcaggtctcccaccacccccctatctcggcctgccatgcagagtctgagaacttcgccttctggcaagatatgaagtggaagaacaagttctggggcaaatccctggagattgtgcctgtgggaacagtcaacgtcagcctgcccaggtttggggaccactttgagtggaacaaggtgacatcctgcattcacaatgtcctgagtggtcagcgctggatcgagcactatggggaggtgctcatccgaaacacacaggacagctcctgccactgcaagatcaccttctgcaaggccaagtactggagttccaatgtccacgaggtgcagggcgctgtgctcagtcggagtggccgtgtcctccaccgactctttgggaagtggcacgaggggctgtaccggggacccacgccaggtggccagtgcatctggaaacccaactcaatgccccccgaccatgagcgaaacttcggcttcacccagtttgccttggagctgaatgagctgacagcagagctgaaacggtcgctgccttccaccgacacgagactccggccagaccagaggtacctggaggaggggaacatacaggccgctgaggcccagaagagaaggatcgagcagctgcagcgagacaggcgcaaagtcatggaggaaaacaacatcgtacaccaggctcgcttcttcaggcggcagacggatagcagcgggaaagagtggtgggtgaccaacaatacctactggaggctgcgggccgagccaggctatgggaacatggatggggccgtgctctggtagccctggccccgggggcaggaggctctggttcctcactcctcctgcctccaccccctaccatggacacatgggtgaggccgggctccccgcctcactgcccttgagaccaaaggggcagccctggccctccctcccctctgctggccagagggtctgcatctcagcccacccccaaccccaccgtttggggtgagaagcagaatctgtgcttccccagtctccttgccccagacaaccagcatgtaagacccttcccgcttcaccattccgattcctgtcccctttggggtacttgggggagactctggctcccaggatctgttccctatttcagtgccttcctaggacacaggggactccttgacgctccccaggctttctgtgcccaggcctctgtccccagcggtgaggttgcagtgagtgaaggagaggaggtgatctgttctccctccccttctgcccatctccagcatcttcttccccttccctggccctgcagggccttctccagctccctttggttagtccctggccatccctcctgtcctggatcccttctccctaactgcaaaatgcctgcagcttccagctccttcgtccctgatcctcaagcggttccctcccgtctcagctcagcggatcccccagagtggaggaggcctctccatgaggaggggagcagcccaaggcacctgtcctctgacccaccggcagcgagtgcgcaggtgtgagtgtaagttcatgtaggagagtgtatgcgtgtgcgcctgtgccctgcttgcaggcaagcagggctccctcatgtagccccgccttccccctgctgggggtccaccacatcgctgctctttctcacagtctgcctctgatgagggcgaattgctatgacattccaagctccaataaagactgtcccaga

SEQ ID NO: 163175 - DNA, 3349 bp, Homo sapiens
  Payload ID: 12154
  Gene Symbol: OSBPL7
  Gene Name: oxysterol binding protein-like 7
  Uniprot ID: Q9BZF2
  ENST ID: ENST00000392507
  CDS Start-End: 257-2785
ggggagatccggctagaggggaggctctgacatctccttccttcctggttcctgcagcagctgctgccactgctcagcgcggtgaggagggagccggtgactcggagacggtgactcagaggcagagcggcgcaagggccaaggagtactggcgtccatggaccctggggaccccgtcaggagcaggtgacatccttccccttccaccctgctccctgctctacatccccagcagggagtggcctctcccttctccatggacttccaagagagggacccgcccttcctgcctgagagcgctcagtcctcaaagcccagcagtgctcagcaggcctctgagctgtgggaggtggtggaggagcctcgggtcaggctggggacagagggtgtcatgcctgagaggcaggaaggtcacctgctcaagaagaggaagtggcctctgaagggctggcacaagagatactttgtgctcgaggacgggatccttcattatgcaacaacccggcaagacatcaccaaggggaagctccatggctccatcgatgtccggctgtcggtcatgtccatcaacaaaaaggcccagcgcattgaccttgacactgaagacaacatctaccacctcaagatcaaatcccaggacctattccagagctgggtggcgcagctgcgtgcccaccgcctagcccaccgcctggacatgccccgtggctcactgcccagtactgctcaccggaaggttcctggtgcccagcttccaacagcagctactgcctcagccctacctgggcttggaccgcgggagaaagtgtcttcctggctgagggacagtgatgggctggaccgctgctctcatgagctctctgagtgtcaggggaagctccaggaactacacaggctcctccagagcctggagtccctgcaccgaatcccctcagcccctgttatccccacacaccaggcctcagtgacaaccgaaagacccaagaaggggaaacggacaagccgcatgtggtgcacccagagctttgccaaggatgacaccattggacgggttggtcgtctccatggctctgttcccaacctgtctcgctacctggagtctcgggactcctcgggcacccgtgggctgccacccacagactatgcccacctgcagcgcagcttctgggccctggcccagaaggtgcacagctccctcagcagcgtcctggccgccctcaccatggaacgggaccaactgagggacatgcaccagggctcagagttgtcaagaatgggggtctctgaggcctccactggccagaggcgcctccactcactgtccacctcctccgacaccacggcggactctttcagctccctcaaccctgaggagcaagaagctctgtacatgaaggggcgcgagctcaccccccagctatcgcagaccagcatcctgtcccttgctgattcccacacggagttcttcgatgcctgcgaggttctcctctccgccagctcttctgagaatgagggctcagaggaggaggagtcctgtaccagtgaaatcaccaccagcctgtctgaggagatgctggacctcaggggagctgagcgctgtcagaaaggggggtgtgttccagggagacccatggggccaccccgccgtcgctgcctgccggcggccagcgggcctggggctgacgtgagcctgtggaacattctgcgcaacaacatcggcaaagacctgtccaaggtgtcaatgcctgtgcagctcaacgagccgctcaacactctgcagcggctctgcgaggagctggagtacagcagcctcctggaccaggccagccgcatcgccgacccctgcgagcgcatggtgtacatcgcagcctttgctgtctcggcctactcctccacataccaccgagccggctgcaagcccttcaaccctgtcctgggggagacctacgagtgtgagcggcctgaccgaggcttccgcttcatcagtgagcaggtctcccaccacccccctatctcggcctgccatgcagagtctgagaacttcgccttctggcaagatatgaagtggaagaacaagttctggggcaaatccctggagattgtgcctgtgggaacagtcaacgtcagcctgcccaggtttggggaccactttgagtggaacaaggtgacatcctgcattcacaatgtcctgagtggtcagcgctggatcgagcactatggggaggtgctcatccgaaacacacaggacagctcctgccactgcaagatcaccttctgcaaggccaagtactggagttccaatgtccacgaggtgcagggcgctgtgctcagtcggagtggccgtgtcctccaccgactctttgggaagtggcacgaggggctgtaccggggacccacgccaggtggccagtgcatctggaaacccaactcaatgccccccgaccatgagcgaaacttcggcttcacccagtttgccttggagctgaatgagctgacagcagagctgaaacggtcgctgccttccaccgacacgagactccggccagaccagaggtacctggaggaggggaacatacaggccgctgaggcccagaagagaaggatcgagcagctgcagcgagacaggcgcaaagtcatggaggaaaacaacatcgtacaccaggctcgcttcttcaggcggcagacggatagcagcgggaaagagtggtgggtgaccaacaatacctactggaggctgcgggccgagccaggctatgggaacatggatggggccgtgctctggtagccctggccccgggggcaggaggctctggttcctcactcctcctgcctccaccccctaccatggacacatgggtgaggccgggctccccgcctcactgcccttctgcccatctccagcatcttcttccccttccctggccctgcagggccttctccagctccctttggttagtccctggccatccctcctgtcctggatcccttctccctaactgcaaaatgcctgcagcttccagctccttcgtccctgatcctcaagcggttccctcccgtctcagctcagcggatcccccagagtggaggaggcctctccatgaggaggggagcagcccaaggcacctgtcctctgacccaccggcagcgagtgcgcaggtgtgagtgtaagttcatgtaggagagtgtatgcgtgtgcgcctgtgccctgcttgcaggcaagcagggctccctcatgtagccccgccttccccctgctgggggtccaccacatcgctgctctttctcacagtctgcctctgatgagggcgaattgctatgacattccaagctccaataaagactgtcccag

SEQ ID NO: 163176 - DNA, 4104 bp, Homo sapiens
  Payload ID: 12154
  Gene Symbol: OSBPL7
  Gene Name: oxysterol binding protein-like 7
  ENST ID: ENST00000579728
  CDS Start-End: 581-1843
ggctggggagttttctgcaagatcatggcagagaagtctctgagctacggtggcagggtggaggggtcctgaaggcagaggcagctggattgaggaggtctcgcttgtccagtctctgaacccctctgtctcttcttggagcctcttctgtcactcccttgcttcacctctgagcactcccagggaagcctctaaagaaagcactgaatgtttcttggagccccagagtatgtgcccaaggcggggctgggcatatgtcttgtggttttccctgggcacctgcccgtctgctgtgtgctagttcactctcagggcagtgtccatatcaggtgaaaatgggtggggtcgggacagaggggcagacttgggagaggcttggcaggtgagcagagggtatgttggggagcccttatctcagagggtgtgggaggggctggaggtggggaaggtgatagcagagtttgcgttaagggggtctttctcttgcttcaaggaccccgtcaggagcaggtgacatccttccccttccaccctgctccctgctctacatccccagcagggagtggcctctcccttctccatggacttccaagagagggacccgcccttcctgcctgagagcgctcagtcctcaaagcccagcagtgctcagcaggcctctgagctgtgggaggtggtggaggagcctcgggtcaggctggggacagagggtgtcatgcctgagaggcaggaaggtcacctgctcaagaagaggaagtggcctctgaagggctggcacaagagatactttgtgctcgaggacgggatccttcattatgcaacaacccggcaagacatcaccaaggggaagctccatggctccatcgatgtccggctgtcggtcatgtccatcaacaaaaaggcccagcgcattgaccttgacactgaagacaacatctaccacctcaagatcaaatcccaggacctattccagagctgggtggcgcagctgcgtgcccaccgcctagcccaccgcctggacatgccccgtggctcactgcccagtactgctcaccggaaggttcctggtgcccagcttccaacagcagctactgcctcagccctacctgggcttggaccgcgggagaaagtgtcttcctggctgagggacagtgatgggctggaccgctgctctcatgagctctctgagtgtcaggggaagctccaggaactacacaggctcctccagagcctggagtccctgcaccgaatcccctcagcccctgttatccccacacaccaggcctcagtgacaaccgaaagacccaagaaggggaaacggacaagccgcatgtggtgcacccagagctttgccaaggatgacaccattggacgggttggtcgtctccatggctctgttcccaacctgtctcgctacctggagtctcgggactcctcgggcacccgtgggctgccacccacagactatgcccacctgcagcgcagcttctgggccctggcccagaaggtgcacagctccctcagcagcgtcctggccgccctcaccatggaacgggaccaactgagggacatgcaccagggctcagagttgtcaagaatgggggtctctgaggcctccactggccagaggcgcctccactcactgtccacctcctccgacaccacggcggactctttcagctccctcaaccctgaggagcaagaagctctgtacatgaaggggcgcgagctcaccccccagctatcgcagaccagcatcctgtcccttgctgattcccacacggagttcttcgatgcctgcgaggttctcctctccgccagctcttctgagaatgagggctagttgggcagattcttgccaggccctgggcactgcccagctgcccgggggaggcccagtctgcccggcctgtcatctgtcctggcccagggctcagaggaggaggagtcctgtaccagtgaaatcaccaccagcctgtctgaggagatgctggacctcaggggagctgagcgctgtcagaaagggagacccatggggccaccccgccgtcgctgcctgccggcggccagcgggcctggggctgacgtgagcctgtggaacattctgcgcaacaacatcggcaaagacctgtccaaggtgtcaatgcctgtgcagctcaacgagccgctcaacactctgcagcggctctgcgaggagctggagtacagcagcctcctggaccaggccagccgcatcgccgacccctgcgagcgcatggtgtacatcgcagcctttgctgtctcggcctactcctccacataccaccgagccggctgcaagcccttcaaccctgtcctgggggagacctacgagtgtgagcggcctgaccgaggcttccgcttcatcagtgagcaggtctcccaccacccccctatctcggcctgccatgcagagtctgagaacttcgccttctggcaagatatgaagtggaagaacaagttctggggcaaatccctggagattgtgcctgtgggaacagtcaacgtcagcctgcccaggtttggggaccactttgagtggaacaaggtgacatcctgcattcacaatgtcctgagtggtcagcgctggatcgagcactatggggaggtgctcatccgaaacacacaggacagctcctgccactgcaagatcaccttctgcaaggccaagtactggagttccaatgtccacgaggtgcagggcgctgtgctcagtcggagtggccgtgtcctccaccgactctttgggaagtggcacgaggggctgtaccggggacccacgccaggtggccagtgcatctggaaacccaactcaatgccccccgaccatgagcgaaacttcggcttcacccagtttgccttggagctgaatgagctgacagcagagctgaaacggtcgctgccttccaccgacacgagactccggccagaccagaggtacctggaggaggggaacatacaggccgctgaggcccagaagagaaggatcgagcagctgcagcgagacaggcgcaaagtcatggaggaaaacaacatcgtacaccaggctcgcttcttcaggcggcagacggatagcagcgggaaagagtggtgggtgaccaacaatacctactggaggctgcgggccgagccaggctatgggaacatggatggggccgtgctctggtagccctggccccgggggcaggaggctctggttcctcactcctcctgcctccaccccctaccatggacacatgggtgaggccgggctccccgcctcactgcccttgagaccaaaggggcagccctggccctccctcccctctgctggccagagggtctgcatctcagcccacccccaaccccaccgtttggggtgagaagcagaatctgtgcttccccagtctccttgccccagacaaccagcatgtaagacccttcccgcttcaccattccgattcctgtcccctttggggtacttgggggagactctggctcccaggatctgttccctatttcagtgccttcctaggacacaggggactccttgacgctccccaggctttctgtgcccaggcctctgtccccagcggtgaggttgcagtgagtgaaggagaggaggtgatctgttctccctccccttctgcccatctccagcatcttcttccccttccctggccctgcagggccttctccagctccctttggttagtccctggccatccctcctgtcctggatcccttctccctaactgcaaaatgcctgcagcttccagctccttcgtccctgatcctcaagcggttccctcccgtctcagctcagcggatcccccagagtggaggaggcctctccatgaggaggggagcagcccaaggcacctgtcctctgacccaccggcagcgagtgcgcaggtgtgagtgtaagttcatgtaggagagtgtatgcgtgtgcgcctgtgccctgcttgcaggcaagcagggctccctcatgtagccccgccttccccctgctgggggtccaccacatcgctgctctttctcacagtctgcctctgatgagggcgaattgctatgacattccaagctccaataaagactgtccca

SEQ ID NO: 163177 - DNA, 430 bp, Homo sapiens
  Payload ID: 12154
  Gene Symbol: OSBPL7
  Gene Name: oxysterol binding protein-like 7
  ENST ID: ENST00000578461
  CDS Start-End: 1-60
cggggacccacgccaggtggccagtgcatctggaaacccatttgccttggagctgaatgagctgacagcagagctgaaacggtcgctgccttccaccgacacgagactccggccagaccagaggtacctggaggaggggaacatacaggccgctgaggcccagaagagaaggatcgagcagctgcagcgagacaggcgcaaagtcatggaggaaaacaacatcgtacaccaggctcgcttcttcaggcggcagacggatagcagcgggaaagagtggtgggtgaccaacaatacctactggaggctgcgggccgagccaggctatgggaacatggatggggccgtgctctggtagccctggccccgggggcaggaggctctggttcctcactcctcctgcctccaccccctaccatggacacatgggtga

SEQ ID NO: 163178 - DNA, 2836 bp, Homo sapiens
  Payload ID: 12154
  Gene Symbol: OSBPL7
  Gene Name: oxysterol binding protein-like 7
  Uniprot ID: Q9BZF2
  ENST ID: ENST00000613735
  CDS Start-End: 203-1276
cagcagctgctgccactgctcagcgcggtgaggagggagccggtgactcggagacggtgactcagaggcagagcggcgcaagggccaaggagtactggcgtccatggaccctggggaccccgtcaggagcaggtgacatccttccccttccaccctgctccctgctctacatccccagcagggagtggcctctcccttctccatggacttccaagagagggacccgcccttcctgcctgagagcgctcagtcctcaaagcccagcagtgctcagcaggcctctgagctgtgggaggtggtggaggagcctcgggtcaggctggggacagagggtgtcatgcctgagaggcaggaaggtcacctgctcaagaagaggaagtggcctctgaagggctggcacaagagatactttgtgctcgaggacgggatccttcattatgcaacaacccggcaagacatcaccaaggggaagctccatggctccatcgatgtccggctgtcggtcatgtccatcaacaaaaaggcccagcgcattgaccttgacactgaagacaacatctaccacctcaagatcaaatcccaggacctattccagagctgggtggcgcagctgcgtgcccaccgcctagcccaccgcctggacatgccccgtggctcactgcccagtactgctcaccggaaggttcctggtgcccagcttccaacagcagctactgcctcagccctacctgggcttggaccgcgggagaaagtgtcttcctggctgagggacagtgatgggctggaccgctgctctcatgagctctctgagtgtcaggggaagctccaggaactacacaggctcctccagagcctggagtccctgcaccgaatcccctcagcccctgttatccccacacaccaggcctcagtgacaaccgaaagacccaagaaggggaaacggacaagccgcatgtggtgcacccagagctttgccaaggatgacaccattggacgggttggtcgtctccatggctctgttcccaacctgtctcgctacctggagtctcgggactcctcgggcacccgtgggctgccacccacagactatgcccacctgcagcgcagcttctgggccctggcccagaaggtgcacagctccctcagcagcgtcctggccgccctcaccatggaacgggaccaactgagggacatgcaccagggctcagagttgtcaagaatgggggtgaggcctgggggacagggtgactggtgcggggagagggcttcaagctgaggactgccagcctggggtccgatagcagatctgggtcagggtggggggttggcagaggcagtctctgcagagatgcggcaaggtggggaggacctcatcctcctggcaccgtgtccctcaccctctccctgcaggtctctgaggcctccactggccagaggcgcctccactcactgtccacctcctccgacaccacggcggactctttcagctccctcaaccctgaggagcaagaagctctgtaccggggacccacgccaggtggccagtgcatctggaaacccaactcaatgccccccgaccatgagcgaaacttcggcttcacccagtttgccttggagctgaatgagctgacagcagagctgaaacggtcgctgccttccaccgacacgagactccggccagaccagaggtacctggaggaggggaacatacaggccgctgaggcccagaagagaaggatcgagcagctgcagcgagacaggcgcaaagtcatggaggaaaacaacatcgtacaccaggctcgcttcttcaggcggcagacggatagcagcgggaaagagtggtgggtgaccaacaatacctactggaggctgcgggccgagccaggctatgggaacatggatggggccgtgctctggtagccctggccccgggggcaggaggctctggttcctcactcctcctgcctccaccccctaccatggacacatgggtgaggccgggctccccgcctcactgcccttgagaccaaaggggcagccctggccctccctcccctctgctggccagagggtctgcatctcagcccacccccaaccccaccgtttggggtgagaagcagaatctgtgcttccccagtctccttgccccagacaaccagcatgtaagacccttcccgcttcaccattccgattcctgtcccctttggggtacttgggggagactctggctcccaggatctgttccctatttcagtgccttcctaggacacaggggactccttgacgctccccaggctttctgtgcccaggcctctgtccccagcggtgaggttgcagtgagtgaaggagaggaggtgatctgttctccctccccttctgcccatctccagcatcttcttccccttccctggccctgcagggccttctccagctccctttggttagtccctggccatccctcctgtcctggatcccttctccctaactgcaaaatgcctgcagcttccagctccttcgtccctgatcctcaagcggttccctcccgtctcagctcagcggatcccccagagtggaggaggcctctccatgaggaggggagcagcccaaggcacctgtcctctgacccaccggcagcgagtgcgcaggtgtgagtgtaagttcatgtaggagagtgtatgcgtgtgcgcctgtgccctgcttgcaggcaagcagggctccctcatgtagccccgccttccccctgctgggggtccaccacatcgctgctctttctcacagtctgcctctgatgagggcgaattgctatgacattccaagctccaataaagactgtccc

SEQ ID NO: 163179 - DNA, 7239 bp, Homo sapiens
  Payload ID: 12155
  Gene Symbol: OSBPL8
  Gene Name: oxysterol binding protein-like 8
  Uniprot ID: Q9BZF1
  ENST ID: ENST00000261183
  CDS Start-End: 481-3150
cactagaatgtgaaggatcttcgcggttctgggtgcccagaaaggcggcgacgcggcggatgacaacattaggccgcgacgcgctcctggccaggcggcggctgtagtgttagctttggacgccgcagtagccgctgccggtagcaagccgactgagggaaggtgggggtccgcccgggctggtggacctcggggccgaaagttcccgccccgctcgggggctgagccggcagtgcctccgcggccgctgggcagcgcccttcgtccaggctcgcgccccagctgccgccgacgacagcggccgagagaagttggggtctgactagacgcttacggggcctcggaccccggcgccgcggcgacctcggaggaaccggctccttgcgtcccgcctccctgggagctccgcacgggatttgcagatttacagaatggctgcacattaatggaaagagaagcataaacctatcttctttcattatggagggaggtttggcagatggagaacctgatcgaacttcgcttcttggtgatagcaaagatgtccttgggccatcaactgttgtagcaaacagtgacgaatctcagcttctgacaccaggaaagatgagtcagcgccaaggaaaagaagcttatccaacgccaaccaaagatttgcatcagccatctcttagtccagcaagtcctcatagccagggttttgaaagagggaaggaagatatttctcaaaataaagatgaatcttcactttctatgtcaaagagcaagtctgaatctaaactttataatggctcagagaaggacagttcaacttcaagcaaactcacaaaaaaagaatctcttaaggtacaaaagaaaaattaccgagaagaaaagaaaagagccacaaaggagctgctcagtacaatcacagatccttctgttattgttatggctgattggttaaagattcgtggtactctaaagagctggaccaagttatggtgtgtgttgaaacctggggtgctactgatctataaaacccaaaaaaatggtcagtgggtaggaacagttcttctgaatgcctgtgaaatcattgaacgtccatcaaaaaaggatggcttttgtttcaaacttttccatcctttggagcaatctatttgggcagtgaagggtccaaaaggtgaagcggttggatccattactcaacccttacctagcagttatttgatcatccgagctacttcagagtcagatggaaggtgctggatggatgctttggagttggctttgaaatgttctagtcttcttaaacgtacaatgatcagagaaggaaaggaacatgacctgagcgtttcatcagatagcacacatgtgactttctatggcttactacgtgctaacaatctccacagtggtgataacttccagttaaatgatagtgaaattgaacgacaacattttaaggaccaagatatgtattctgataaatctgataaagaaaatgatcaagaacatgatgagtctgataatgaggtgatggggaaaagtgaagaaagtgacacagatacatcagaaagacaagatgactcatatatcgaacctgagcctgttgagcctttaaaggagactacctacactgaacagagccatgaagaacttggagaggcaggtgaggcttctcaaacagaaactgtatctgaagaaaacaaaagccttatctggacactattgaaacaagtccgtcctggcatggacctatccaaggtggttctgcctacatttattttggaaccccgttctttcctggataaactttcagattactactatcatgcagatttcctatctgaggcagctcttgaagaaaatccttatttccgtttgaagaaagtagtgaaatggtatttgtcaggattctataaaaagccaaagggactgaagaaaccttataatcctatacttggcgagactttccgttgtttatggattcatcccagaacaaacagcaaaactttttatattgctgaacaggtgtcccatcatccaccaatatctgccttttatgttagtaatcgaaaagatggattttgccttagcggtagtatcctggctaagtctaagttttatggaaactcattatctgcaatattagagggagaagcacggttaactttcttgaatagaggtgaagattatgtaatgacaatgccatacgctcattgtaaaggaattctttatggtacaatgacactggagcttggtggaacagtcaatattacatgtcaaaaaactggatacagtgcaatacttgaatttaaactaaagccattcctagggagtagtgactgtgttaatcaaatatcagggaaacttaaactgggaaaagaagtcctagctactttggaaggtcattgggatagtgaagtttttattactgataaaaagactgataattcagaggttttctggaatccaacacctgacattaagcaatggagattaataaggcacactgtaaaatttgaagaacagggagattttgaatcagagaaactctggcaacgggtaactcgagccataaatgccaaagaccaaactgaagctacccaagagaagtatgttttggaagaagctcaaagacaagctgccagggatcggaaaacaaaaaatgaagagtggtcttgcaaattatttgaacttgatccactcacaggagaatggcattacaagtttgcagatacccgaccatgggacccacttaatgatatgatacagtttgaaaaagatggtgttattcagaccaaagtgaaacatcgtactccaatggttagcgtccccaaaatgaaacataagccaaccaggcaacagaagaaagtagcaaaaggctattcctccccagaacctgacattcaagactcctctggaagtgaagctcaatcagtaaaaccaagtacaagaagaaagaaaggaatagaactgggagacattcagagttccatcgaatctataaaacaaacacaggaagaaattaaaagaaatattatggctcttcgaaatcatttagtttcaagcacaccggccacggattattttctgcaacaaaaagactacttcatcattttcctcctgattttgcttcaagtcataataaacttcatgttcaagtagaagttctctaccattgaatcagtgaactagaaagatctgatttggcctgggaccagtgttcaagttggtttggtctttattaaaaatcacaatattccgaaaacaaaaaaacctaggagataaatgtagaggtattgacttttcgtatcttttatcttcacactgaaacaagagctatcctatttgattattaaagtgagctatgtgttaagtgccaggacatttctagcttttgtgagaatgtgtctacatatgagtataataaacccacatgtatacacaattgtctcttatgtactcctacctgacagtagtctttgtattctatagtatgttctgagatataatgttaacattgttcataacaaaaaatgctatcaatcttataaatatatgtaatctattttcttcataaaacaggcacaaaagttttatcagtaaggaattacagattgagaaatgatggaataatagacataattaattcaatacactactgttaaaatcatttgcaaagcactcagctcaattatcttcttagaaagaaagaaaaagtatgaatggtcaaaatgaatacatcgagagagataaatggcaaattgcttttttaaaagtttacataagttttttttaacccctagaatttaatatttgtagatgcaggtaaatatatatacttacgtgtatatcagtataaaaacactggtgtgcaattaattggattgattataataccaccttaagcacttgctgaaaaaagtgtggtcaaaattgattgctgtccttttgtcttatttttgtttttcttaagtcagctggttcataacataggccaaattctagagatgtttatagagcatttgaagtgctgataatttatgttttttcattatgaaaacttattttagctttagactccagtgtgttcagtgaataagtagaatataaaaaaatataaccagtattttacttcaaaagccaaaaagaggcaataagaaaagacactttgtggtggcctttatgtgtgcattaaaattggtttctgtaaaacgtgtaataagttgagtatctacgaagagtatcaagttctgaagtttaatttttttattatcctcctctcttcttagtaacttctttctgtggcaaaaccacaattctttaagattcctattgttcaggctaaggcaaatttttttgtttgtttcttcagtttaatattttgattttgtgtttttacgtaaatatttatattccttgaaagcaatttttgccaaggtagttcagtttaggaatatgttgttctaaaatatgtcttagaatcctgaaagcatagattttgaaatgtttttttaatgaaaatgaaggtcagagagaataattgccctgaccacatttgcctttcagtaggaggaggctgtgaaatagtaaaattataatcgtttatgccatgataaatacaagattggtaaataaatacattgattggtaaattatgagaatcaaaatgataaaaagagcctgcttttttccctaaccaatatagctatcttaagtatccttaggtttctgtgaagaaccatttcccatgttttcttggcaaaataatgctgtattccatatgtacatgtgaaatgatgttttaaattgataaaagcttaaataagatctacctatacccagtattttcatgatattagaacaaatgggtttttggttatattttatatttgtcaatataatttttgtattcacattctgttacactctgcctattcattgatatatgatattctgtaaatattgtacaatttgatcttttttatggtttaaattagttaattacatacaaattgattggcttatcacaaaaatcatttcatcagtaaaccttgttaacattttgtactggtgacccacctcttaggactttggtcttatccacgtgtatgttgttttcatttggtccaaataatattttatttgtatgggtatcttctaagactaaataggtagttgtgttctttatttttaaaatttctttttagagcaaatgttatgggttcttacccaaagagtcaaaaactatttcttaagaaagagcagagttattcatgactgttctttatacactaaaagcatgcatctaatctaatagtcctcttattatgcttttagttgtatgagtctctttctatgaactgaacacaaaactcaggaattggtggcttaattttagatcagtgcttgtactaggcttagttatatgaatctttataacacataattactaactttgtagccatatatgtaattgactttgaatgttatttacctgaaattaatcttccttcacacatggaccgtaaacggttcccagttgtctgagagcctcatgagggtttctaggatttatgaccttatgaccagtttttttcatttaccaagattttattttcctacatgaaaatttaattgagtaataattattcacatgtgcattttctttttagctgttaaatgtactatgccatcatccaccatttagtaaaatgtagctggcccaggacatgtaaaaaaaaaaaaaaaacaacaacaataaatagggcatgtgaaatgttaagttacagcaatagatattttatttgtatttcatgttagtacttttttgttttatatcacttataaaggtacagtgtactctttgtcacagctcagttggtaaccgcattccattgaaaagttggccttgtaaaatacaactctcatttaatattcatgcttttgtgcctttaagaaaatattttttgtcattttttgtgttacagaactataatgtgattcaaggtgtttataggcttgtcataaaagggtcatttctgtgtgttactttctttttatatagctatagtatatttaaacaataatactatcttttataggggtttgtctatttacctattctttactcagacattgatgtagacttgtcagattattctgagtattgttaacagtgccttttcgatggaatcacactttttggctgtcaccttgtgccatatacacacaaaattttgtggaaggcagttttaactttctgaagaatatctgtcaaaatttaagaaaacaaatgtataaaattccattttttccagtgtttagcatttctagtaagcagtgaggttgtttgacatacagtgatgatggcattattgataagccatacatgagactgcagattatattgaatcatattaaatgtacagaaataaaatattagatttatatcaaattttccaatttgaaccagtggggaaaatcccacagaaatcagtaagtttacatttcaatttctatcttatttgactaagtggaaagagattctttaaaatgtataacctgccattatgtaatttggtttcattttattctacctgttgtgtgagtttagtatatttaatttactttttgttactctttacatactgtttatttttgttagtttttaattgaagatggactgttgaaattgtataggaccagtgtcttattaatatgattaatatatttagaagagccacgtgaaacccatgacaaaatgaatgtgaatattctttctaaaaatttagaaaatgttatctttttgcatttattatgtaaaactgttttacagtatcaaaatttttcacttaaagaaaaaaaatgccatgaaacatttgaactgatgagccacagaacttcagttgaaatttttttcactttttagcatgctaaatatacatctgagtttaaatgttctgtttaatggccattcataaattcaagcactaccactggtcagttttgtgtgatagaataaaaatatgttacctgcagtgtaagtacagcacactgtcaaattcttttccttaaggtgcacagtaaatgtacagatagttataggccactgttttgtaatgtagtacatttctaatctattattcctaacctattataactgtttgcagaaagaaaagaatttttctaataatctgtaaaattatgctaacttctacaagtaggcttctaaataaaatttttaaaaagagc

SEQ ID NO: 163180 - DNA, 7047 bp, Homo sapiens
  Payload ID: 12155
  Gene Symbol: OSBPL8
  Gene Name: oxysterol binding protein-like 8
  Uniprot ID: Q9BZF1
  ENST ID: ENST00000393249
  CDS Start-End: 412-2955
cgccccagctgccgccgacgacagcggccgagagaagttggggtctgactagacgcttacggggcctcggaccccggcgccgcggcgacctcggaggaaccggctccttgcgtcccgcctccctgggagctccgcacggcaatctccattggtgctactgcgtttaaagaactgtggctaacctccaagagactgaagctggtaattaaacattcctatccttgcctgaagcagtcttttgcaggaacatttgaggatttgcagatttacagaatggctgcacattaatggaaagagaagcataaacctatcttctttcattatggagggaggtttggcagatggagaacctgatcgaacttcgctgttgtagcaaacagtgacgaatctcagcttctgacaccaggaaagatgagtcagcgccaaggaaaagaagcttatccaacgccaaccaaagatttgcatcagccatctcttagtccagcaagtcctcatagccagggttttgaaagagggaaggaagatatttctcaaaataaagatgaatcttcactttctatgtcaaagagcaagtctgaatctaaactttataatggctcagagaaggacagttcaacttcaagcaaactcacaaaaaaagaatctcttaaggtacaaaagaaaaattaccgagaagaaaagaaaagagccacaaaggagctgctcagtacaatcacagatccttctgttattgttatggctgattggttaaagattcgtggtactctaaagagctggaccaagttatggtgtgtgttgaaacctggggtgctactgatctataaaacccaaaaaaatggtcagtgggtaggaacagttcttctgaatgcctgtgaaatcattgaacgtccatcaaaaaaggatggcttttgtttcaaacttttccatcctttggagcaatctatttgggcagtgaagggtccaaaaggtgaagcggttggatccattactcaacccttacctagcagttatttgatcatccgagctacttcagagtcagatggaaggtgctggatggatgctttggagttggctttgaaatgttctagtcttcttaaacgtacaatgatcagagaaggaaaggaacatgacctgagcgtttcatcagatagcacacatgtgactttctatggcttactacgtgctaacaatctccacagtggtgataacttccagttaaatgatagtgaaattgaacgacaacattttaaggaccaagatatgtattctgataaatctgataaagaaaatgatcaagaacatgatgagtctgataatgaggtgatggggaaaagtgaagaaagtgacacagatacatcagaaagacaagatgactcatatatcgaacctgagcctgttgagcctttaaaggagactacctacactgaacagagccatgaagaacttggagaggcaggtgaggcttctcaaacagaaactgtatctgaagaaaacaaaagccttatctggacactattgaaacaagtccgtcctggcatggacctatccaaggtggttctgcctacatttattttggaaccccgttctttcctggataaactttcagattactactatcatgcagatttcctatctgaggcagctcttgaagaaaatccttatttccgtttgaagaaagtagtgaaatggtatttgtcaggattctataaaaagccaaagggactgaagaaaccttataatcctatacttggcgagactttccgttgtttatggattcatcccagaacaaacagcaaaactttttatattgctgaacaggtgtcccatcatccaccaatatctgccttttatgttagtaatcgaaaagatggattttgccttagcggtagtatcctggctaagtctaagttttatggaaactcattatctgcaatattagagggagaagcacggttaactttcttgaatagaggtgaagattatgtaatgacaatgccatacgctcattgtaaaggaattctttatggtacaatgacactggagcttggtggaacagtcaatattacatgtcaaaaaactggatacagtgcaatacttgaatttaaactaaagccattcctagggagtagtgactgtgttaatcaaatatcagggaaacttaaactgggaaaagaagtcctagctactttggaaggtcattgggatagtgaagtttttattactgataaaaagactgataattcagaggttttctggaatccaacacctgacattaagcaatggagattaataaggcacactgtaaaatttgaagaacagggagattttgaatcagagaaactctggcaacgggtaactcgagccataaatgccaaagaccaaactgaagctacccaagagaagtatgttttggaagaagctcaaagacaagctgccagggatcggaaaacaaaaaatgaagagtggtcttgcaaattatttgaacttgatccactcacaggagaatggcattacaagtttgcagatacccgaccatgggacccacttaatgatatgatacagtttgaaaaagatggtgttattcagaccaaagtgaaacatcgtactccaatggttagcgtccccaaaatgaaacataagccaaccaggcaacagaagaaagtagcaaaaggctattcctccccagaacctgacattcaagactcctctggaagtgaagctcaatcagtaaaaccaagtacaagaagaaagaaaggaatagaactgggagacattcagagttccatcgaatctataaaacaaacacaggaagaaattaaaagaaatattatggctcttcgaaatcatttagtttcaagcacaccggccacggattattttctgcaacaaaaagactacttcatcattttcctcctgattttgcttcaagtcataataaacttcatgttcaagtagaagttctctaccattgaatcagtgaactagaaagatctgatttggcctgggaccagtgttcaagttggtttggtctttattaaaaatcacaatattccgaaaacaaaaaaacctaggagataaatgtagaggtattgacttttcgtatcttttatcttcacactgaaacaagagctatcctatttgattattaaagtgagctatgtgttaagtgccaggacatttctagcttttgtgagaatgtgtctacatatgagtataataaacccacatgtatacacaattgtctcttatgtactcctacctgacagtagtctttgtattctatagtatgttctgagatataatgttaacattgttcataacaaaaaatgctatcaatcttataaatatatgtaatctattttcttcataaaacaggcacaaaagttttatcagtaaggaattacagattgagaaatgatggaataatagacataattaattcaatacactactgttaaaatcatttgcaaagcactcagctcaattatcttcttagaaagaaagaaaaagtatgaatggtcaaaatgaatacatcgagagagataaatggcaaattgcttttttaaaagtttacataagttttttttaacccctagaatttaatatttgtagatgcaggtaaatatatatacttacgtgtatatcagtataaaaacactggtgtgcaattaattggattgattataataccaccttaagcacttgctgaaaaaagtgtggtcaaaattgattgctgtccttttgtcttatttttgtttttcttaagtcagctggttcataacataggccaaattctagagatgtttatagagcatttgaagtgctgataatttatgttttttcattatgaaaacttattttagctttagactccagtgtgttcagtgaataagtagaatataaaaaaatataaccagtattttacttcaaaagccaaaaagaggcaataagaaaagacactttgtggtggcctttatgtgtgcattaaaattggtttctgtaaaacgtgtaataagttgagtatctacgaagagtatcaagttctgaagtttaatttttttattatcctcctctcttcttagtaacttctttctgtggcaaaaccacaattctttaagattcctattgttcaggctaaggcaaatttttttgtttgtttcttcagtttaatattttgattttgtgtttttacgtaaatatttatattccttgaaagcaatttttgccaaggtagttcagtttaggaatatgttgttctaaaatatgtcttagaatcctgaaagcatagattttgaaatgtttttttaatgaaaatgaaggtcagagagaataattgccctgaccacatttgcctttcagtaggaggaggctgtgaaatagtaaaattataatcgtttatgccatgataaatacaagattggtaaataaatacattgattggtaaattatgagaatcaaaatgataaaaagagcctgcttttttccctaaccaatatagctatcttaagtatccttaggtttctgtgaagaaccatttcccatgttttcttggcaaaataatgctgtattccatatgtacatgtgaaatgatgttttaaattgataaaagcttaaataagatctacctatacccagtattttcatgatattagaacaaatgggtttttggttatattttatatttgtcaatataatttttgtattcacattctgttacactctgcctattcattgatatatgatattctgtaaatattgtacaatttgatcttttttatggtttaaattagttaattacatacaaattgattggcttatcacaaaaatcatttcatcagtaaaccttgttaacattttgtactggtgacccacctcttaggactttggtcttatccacgtgtatgttgttttcatttggtccaaataatattttatttgtatgggtatcttctaagactaaataggtagttgtgttctttatttttaaaatttctttttagagcaaatgttatgggttcttacccaaagagtcaaaaactatttcttaagaaagagcagagttattcatgactgttctttatacactaaaagcatgcatctaatctaatagtcctcttattatgcttttagttgtatgagtctctttctatgaactgaacacaaaactcaggaattggtggcttaattttagatcagtgcttgtactaggcttagttatatgaatctttataacacataattactaactttgtagccatatatgtaattgactttgaatgttatttacctgaaattaatcttccttcacacatggaccgtaaacggttcccagttgtctgagagcctcatgagggtttctaggatttatgaccttatgaccagtttttttcatttaccaagattttattttcctacatgaaaatttaattgagtaataattattcacatgtgcattttctttttagctgttaaatgtactatgccatcatccaccatttagtaaaatgtagctggcccaggacatgtaaaaaaaaaaaaaaaacaacaacaataaatagggcatgtgaaatgttaagttacagcaatagatattttatttgtatttcatgttagtacttttttgttttatatcacttataaaggtacagtgtactctttgtcacagctcagttggtaaccgcattccattgaaaagttggccttgtaaaatacaactctcatttaatattcatgcttttgtgcctttaagaaaatattttttgtcattttttgtgttacagaactataatgtgattcaaggtgtttataggcttgtcataaaagggtcatttctgtgtgttactttctttttatatagctatagtatatttaaacaataatactatcttttataggggtttgtctatttacctattctttactcagacattgatgtagacttgtcagattattctgagtattgttaacagtgccttttcgatggaatcacactttttggctgtcaccttgtgccatatacacacaaaattttgtggaaggcagttttaactttctgaagaatatctgtcaaaatttaagaaaacaaatgtataaaattccattttttccagtgtttagcatttctagtaagcagtgaggttgtttgacatacagtgatgatggcattattgataagccatacatgagactgcagattatattgaatcatattaaatgtacagaaataaaatattagatttatatcaaattttccaatttgaaccagtggggaaaatcccacagaaatcagtaagtttacatttcaatttctatcttatttgactaagtggaaagagattctttaaaatgtataacctgccattatgtaatttggtttcattttattctacctgttgtgtgagtttagtatatttaatttactttttgttactctttacatactgtttatttttgttagtttttaattgaagatggactgttgaaattgtataggaccagtgtcttattaatatgattaatatatttagaagagccacgtgaaacccatgacaaaatgaatgtgaatattctttctaaaaatttagaaaatgttatctttttgcatttattatgtaaaactgttttacagtatcaaaatttttcacttaaagaaaaaaaatgccatgaaacatttgaactgatgagccacagaacttcagttgaaatttttttcactttttagcatgctaaatatacatctgagtttaaatgttctgtttaatggccattcataaattcaagcactaccactggtcagttttgtgtgatagaataaaaatatgttacctgcagtgtaagtacagcacactgtcaaattcttttccttaaggtgcacagtaaatgtacagatagttataggccactgttttgtaatgtagtacatttctaatctattattcctaacctattataactgtttgcagaaagaaaagaatttttctaataatctgtaaaattatgctaacttctacaagtaggcttctaaataaaatttttaaaaagagcaaa

SEQ ID NO: 163181 - DNA, 3157 bp, Homo sapiens
  Payload ID: 12155
  Gene Symbol: OSBPL8
  Gene Name: oxysterol binding protein-like 8
  Uniprot ID: Q9BZF1
  ENST ID: ENST00000393250
  CDS Start-End: 561-3104
cactagaatgtgaaggatcttcgcggttctgggtgcccagaaaggcggcgacgcggcggatgacaacattaggccgcgacgcgctcctggccaggcggcggctgtagtgttagctttggacgccgcagtagccgctgccggtagcaagccgactgagggaaggtgggggtccgcccgggctggtggacctcggggccgaaagttcccgccccgctcgggggctgagccggcagtgcctccgcggccgctgggcagcgcccttcgtccaggctcgcgccccagctgccgccgacgacagcggccgagagaagttggggtctgactagacgcttacggggcctcggaccccggcgccgcggcgacctcggaggaaccggctccttgcgtcccgcctccctgggagctccgcacgggatttgcagatttacagaatggctgcacattaatggaaagagaagcataaacctatcttctttcattatggagggaggtttggcagatggagaacctgatcgaacttcgcaaacagtgacgaatctcagcttctgacaccaggaaagatgagtcagcgccaaggaaaagaagcttatccaacgccaaccaaagatttgcatcagccatctcttagtccagcaagtcctcatagccagggttttgaaagagggaaggaagatatttctcaaaataaagatgaatcttcactttctatgtcaaagagcaagtctgaatctaaactttataatggctcagagaaggacagttcaacttcaagcaaactcacaaaaaaagaatctcttaaggtacaaaagaaaaattaccgagaagaaaagaaaagagccacaaaggagctgctcagtacaatcacagatccttctgttattgttatggctgattggttaaagattcgtggtactctaaagagctggaccaagttatggtgtgtgttgaaacctggggtgctactgatctataaaacccaaaaaaatggtcagtgggtaggaacagttcttctgaatgcctgtgaaatcattgaacgtccatcaaaaaaggatggcttttgtttcaaacttttccatcctttggagcaatctatttgggcagtgaagggtccaaaaggtgaagcggttggatccattactcaacccttacctagcagttatttgatcatccgagctacttcagagtcagatggaaggtgctggatggatgctttggagttggctttgaaatgttctagtcttcttaaacgtacaatgatcagagaaggaaaggaacatgacctgagcgtttcatcagatagcacacatgtgactttctatggcttactacgtgctaacaatctccacagtggtgataacttccagttaaatgatagtgaaattgaacgacaacattttaaggaccaagatatgtattctgataaatctgataaagaaaatgatcaagaacatgatgagtctgataatgaggtgatggggaaaagtgaagaaagtgacacagatacatcagaaagacaagatgactcatatatcgaacctgagcctgttgagcctttaaaggagactacctacactgaacagagccatgaagaacttggagaggcaggtgaggcttctcaaacagaaactgtatctgaagaaaacaaaagccttatctggacactattgaaacaagtccgtcctggcatggacctatccaaggtggttctgcctacatttattttggaaccccgttctttcctggataaactttcagattactactatcatgcagatttcctatctgaggcagctcttgaagaaaatccttatttccgtttgaagaaagtagtgaaatggtatttgtcaggattctataaaaagccaaagggactgaagaaaccttataatcctatacttggcgagactttccgttgtttatggattcatcccagaacaaacagcaaaactttttatattgctgaacaggtgtcccatcatccaccaatatctgccttttatgttagtaatcgaaaagatggattttgccttagcggtagtatcctggctaagtctaagttttatggaaactcattatctgcaatattagagggagaagcacggttaactttcttgaatagaggtgaagattatgtaatgacaatgccatacgctcattgtaaaggaattctttatggtacaatgacactggagcttggtggaacagtcaatattacatgtcaaaaaactggatacagtgcaatacttgaatttaaactaaagccattcctagggagtagtgactgtgttaatcaaatatcagggaaacttaaactgggaaaagaagtcctagctactttggaaggtcattgggatagtgaagtttttattactgataaaaagactgataattcagaggttttctggaatccaacacctgacattaagcaatggagattaataaggcacactgtaaaatttgaagaacagggagattttgaatcagagaaactctggcaacgggtaactcgagccataaatgccaaagaccaaactgaagctacccaagagaagtatgttttggaagaagctcaaagacaagctgccagggatcggaaaacaaaaaatgaagagtggtcttgcaaattatttgaacttgatccactcacaggagaatggcattacaagtttgcagatacccgaccatgggacccacttaatgatatgatacagtttgaaaaagatggtgttattcagaccaaagtgaaacatcgtactccaatggttagcgtccccaaaatgaaacataagccaaccaggcaacagaagaaagtagcaaaaggctattcctccccagaacctgacattcaagactcctctggaagtgaagctcaatcagtaaaaccaagtacaagaagaaagaaaggaatagaactgggagacattcagagttccatcgaatctataaaacaaacacaggaagaaattaaaagaaatattatggctcttcgaaatcatttagtttcaagcacaccggccacggattattttctgcaacaaaaagactacttcatcattttcctcctgattttgcttcaagtcataataaacttcatgttcaagtagaagttctctaccattgaatcagtgaactagaaagatctgatttggcctgggac

SEQ ID NO: 163182 - DNA, 542 bp, Homo sapiens
  Payload ID: 12155
  Gene Symbol: OSBPL8
  Gene Name: oxysterol binding protein-like 8
  ENST ID: ENST00000548341
  CDS Start-End: 72-542
gaagaaaatgggtgtggaaattcttggcttatgaagaaggctgttgtcacattgatttaaatgaaaaacggatgcttcttggtgatagcaaagatgtccttgggccatcaactgttgtagcaaacagtgacgaatctcagcttctgacaccaggaaagatgagtcagcgccaaggaaaagaagcttatccaacgccaaccaaagatttgcatcagccatctcttagtccagcaagtcctcatagccagggttttgaaagagggaaggaagatatttctcaaaataaagatgaatcttcactttctatgtcaaagagcaagtctgaatctaaactttataatggctcagagaaggacagttcaacttcaagcaaactcacaaaaaaagaatctcttaaggtacaaaagaaaaattaccgagaagaaaagaaaagagccacaaaggagctgctcagtacaatcacagatccttctgttattgttatggctgattggttaaagattcgtggtactctaaagagctggaccaagttatggtgtgtg

SEQ ID NO: 163183 - DNA, 363 bp, Homo sapiens
  Payload ID: 12155
  Gene Symbol: OSBPL8
  Gene Name: oxysterol binding protein-like 8
  ENST ID: ENST00000547544
  CDS Start-End: 206-363
gagaagttggggtctgactagacgcttacggggcctcggaccccggcgccgcggcgacctcggaggaaccggctccttgcgtcccgcctccctgggagctccgcacggcaatctccattggtgctactgcgtttaaaggatttgcagatttacagaatggctgcacattaatggaaagagaagcataaacctatcttctttcattatggagggaggtttggcagatggagaacctgatcgaacttcgcttcttggtgatagcaaagatgtccttgggccatcaacaaacagtgacgaatctcagcttctgacaccaggaaagatgagtcagcgccaaggaaaagaagcttatccaacgccaac

SEQ ID NO: 163184 - DNA, 561 bp, Homo sapiens
  Payload ID: 12155
  Gene Symbol: OSBPL8
  Gene Name: oxysterol binding protein-like 8
  ENST ID: ENST00000550628
  CDS Start-End: 477-561
agaatgtgaaggatcttcgcggttctgggtgcccagaaaggcggcgacgcggcggatgacaacattaggccgcgacgcgctcctggccaggcggcggctgtagtgttagctttggacgccgcagtagccgctgccggtagcaagccgactgagggaaggtgggggtccgcccgggctggtggacctcggggccgaaagttcccgccccgctcgggggctgagccggcagtgcctccgcggccgctgggcagcgcccttcgtccaggctcgcgccccagctgccgccgacgacagcggccgagagaagttggggtctgactagacgcttacggggcctcggaccccggcgccgcggcgacctcggaggaaccggctccttgcgtcccgcctccctgggagctccgcacgggatttgcagatttacagaatggctgcacattaatggaaagagaagcataaacctatcttctttcattatggagggaggtttggcagatggagaacctgatcgaacttcgtctgaatctaaactttataatggctcagagaaggacagttcaa

SEQ ID NO: 163185 - DNA, 531 bp, Homo sapiens
  Payload ID: 12155
  Gene Symbol: OSBPL8
  Gene Name: oxysterol binding protein-like 8
  ENST ID: ENST00000551927
  CDS Start-End: 357-531
gcggccgctgggcagcgcccttcgtccaggctcgcgccccagctgccgccgacgacagcggccgagagaagttggggtctgactagacgcttacggggcctcggaccccggcgccgcggcgacctcggaggaaccggctccttgcgtcccgcctccctgggagctccgcacggcaatctccattggtgctactgcgtttaaagaactgtggctaacctccaagagactgaagctggtaattaaacattcctatccttgcctgaagcagtcttttgcaggaacatttgaggatttgcagatttacagaatggctgcacattaatggaaagagaagcataaacctatcttctttcattatggagggaggtttggcagatggagaacctgatcgaacttcgcttcttggtgatagcaaagatgtccttgggccatcaactgttgtagcaaacagtgacgaatctcagcttctgacaccaggaaagatgagtcagcgccaaggaaaagaagcttatccaacgccaaccaaagatt

SEQ ID NO: 163186 - DNA, 2698 bp, Homo sapiens
  Payload ID: 12155
  Gene Symbol: OSBPL8
  Gene Name: oxysterol binding protein-like 8
  ENST ID: ENST00000546946
  CDS Start-End: 615-2698
tgttggaatccatcaacgttgtgcttgaaagagtatctttccttatgaatgtttaatcatggctgaggcaagctgtagattagatataaatctagaagcttcagggaagataaaaagcattatgtttatatccatctttgaagtaagtaaaagctgggaaggaaggagtcggaagaggtgggaagtgtggccggatagtacagaaacataatggatatgataaaaggattgcatttctgagaagagaaaatgactttattgcttcatcttgaattgctaagtattgatcttgttttgttttcctaaagcagcaattcagtgcagggtggtttgataaaaaggtaaaacattagtagaatagcctttcatgtttatcagttcctttttttaaaaaatcagcagcatggtttaatgctttttctgtcaggctttctctatctgtttattgctgatttgacagtctttggtccttctcctttgctgttaaatgtgtgtgttctttgtttgtgctggtgggttttgctacagttggatgtgagagaaaagcctgtctttgccatattggtctaattagcctttgggtgagcatatacattaaatagaccttctgagctatgaaagaagagagctcacaacgtagattttcttcctgtactggggttttgcctgttttatttcctccccggattgatggccgaaagcttgttcggaatgcttcatttggaggatacaatgaactttctccttcattgccaggttttgaaagagggaaggaagatatttctcaaaataaagatgaatcttcactttctatgtcaaagagcaagtctgaatctaaactttataatggctcagagaaggacagttcaacttcaagcaaactcacaaaaaaagaatctcttaaggtacaaaagaaaaattaccgagaagaaaagaaaagagccacaaaggagctgctcagtacaatcacagatccttctgttattgttatggctgattggttaaagattcgtggtactctaaagagctggaccaagttatggtgtgtgttgaaacctggggtgctactgatctataaaacccaaaaaaatggtcagtgggtaggaacagttcttctgaatgcctgtgaaatcattgaacgtccatcaaaaaaggatggcttttgtttcaaacttttccatcctttggagcaatctatttgggcagtgaagggtccaaaaggtgaagcggttggatccattactcaacccttacctagcagttatttgatcatccgagctacttcagagtcagatggaaggtgctggatggatgctttggagttggctttgaaatgttctagtcttcttaaacgtacaatgatcagagaaggaaaggaacatgacctgagcgtttcatcagatagcacacatgtgactttctatggcttactacgtgctaacaatctccacagtggtgataacttccagttaaatgatagtgaaattgaacgacaacattttaaggaccaagatatgtattctgataaatctgataaagaaaatgatcaagaacatgatgagtctgataatgaggtgatggggaaaagtgaagaaagtgacacagatacatcagaaagacaagatgactcatatatcgaacctgagcctgttgagcctttaaaggagactacctacactgaacagagccatgaagaacttggagaggcaggtgaggcttctcaaacagaaactgtatctgaagaaaacaaaagccttatctggacactattgaaacaagtccgtcctggcatggacctatccaaggtggttctgcctacatttattttggaaccccgttctttcctggataaactttcagattactactatcatgcagatttcctatctgaggcagctcttgaagaaaatccttatttccgtttgaagaaagtagtgaaatggtatttgtcaggattctataaaaagccaaagggactgaagaaaccttataatcctatacttggcgagactttccgttgtttatggattcatcccagaacaaacagcaaaactttttatattgctgaacaggtgtcccatcatccaccaatatctgccttttatgttagtaatcgaaaagatggattttgccttagcggtagtatcctggctaagtctaagttttatggaaactcattatctgcaatattagagggagaagcacggttaactttcttgaatagaggtgaagattatgtaatgacaatgccatacgctcattgtaaaggaattctttatggtacaatgacactggagcttggtggaacagtcaatattacatgtcaaaaaactggatacagtgcaatacttgaatttaaactaaagccattcctagggagtagtgactgtgttaatcaaatatcagggaaacttaaactgggaaaagaagtcctagctactttggaaggtcattgggatagtgaagtttttattactgataaaaagactgataattcagaggttttctggaatccaacacctgacattaagcaatggagattaataaggcacactgtaaaatttgaagaacagggagattttgaatcagagaaactctggcaacgggtaactcgagccataaatgccaaagaccaaactgaagctacccaagagaagtatgttttggaagaagctcaaagacaagctgccagggatcg

SEQ ID NO: 163187 - DNA, 588 bp, Homo sapiens
  Payload ID: 12155
  Gene Symbol: OSBPL8
  Gene Name: oxysterol binding protein-like 8
  ENST ID: ENST00000549646
  CDS Start-End: 465-588
atcttcgcggttctgggtgcccagaaaggcggcgacgcggcggatgacaacattaggccgcgacgcgctcctggccaggcggcggctgtagtgttagctttggacgccgcagtagccgctgccggtagcaagccgactgagggaaggtgggggtccgcccgggctggtggacctcggggccgaaagttcccgccccgctcgggggctgagccggcagtgcctccgcggccgctgggcagcgcccttcgtccaggctcgcgccccagctgccgccgacgacagcggccgagagaagttggggtctgactagacgcttacggggcctcggaccccggcgccgcggcgacctcggaggaaccggctccttgcgtcccgcctccctgggagctccgcacgggatttgcagatttacagaatggctgcacattaatggaaagagaagcataaacctatcttctttcattatggagggaggtttggcagatggagaacctgatcgaacttcggttttgaaagagggaaggaagatatttctcaaaataaagatgaatcttcactttctatgtcaaagagcaagtctgaatctaa

SEQ ID NO: 163188 - DNA, 902 bp, Homo sapiens
  Payload ID: 12155
  Gene Symbol: OSBPL8
  Gene Name: oxysterol binding protein-like 8
  ENST ID: ENST00000553139
  CDS Start-End: 569-902
actagaatgtgaaggatcttcgcggttctgggtgcccagaaaggcggcgacgcggcggatgacaacattaggccgcgacgcgctcctggccaggcggcggctgtagtgttagctttggacgccgcagtagccgctgccggtagcaagccgactgagggaaggtgggggtccgcccgggctggtggacctcggggccgaaagttcccgccccgctcgggggctgagccggcagtgcctccgcggccgctgggcagcgcccttcgtccaggctcgcgccccagctgccgccgacgacagcggccgagagaagttggggtctgactagacgcttacggggcctcggaccccggcgccgcggcgacctcggaggaaccggctccttgcgtcccgcctccctgggagctccgcacgggatttgcagatttacagaatggctgcacattaatggaaagagaagcataaacctatcttctttcattatggagggaggtttggcagatggagaacctgatcgaacttcgctgttgtagcaaacagtgacgaatctcagcttctgacaccaggaaagatgagtcagcgccaaggaaaagaagcttatccaacgccaaccaaagatttgcatcagccatctcttagtccagcaagtcctcatagccagggttttgaaagagggaaggaagatatttctcaaaataaagatgaatcttcactttctatgtcaaagagcaagtctgaatctaaactttataatggctcagagaaggacagttcaacttcaagcaaactcacaaaaaaagaatctcttaaggtacaaaagaaaaattaccgagaagaaaagaaaagagccacaaaggagctgctcagtacaatcacagatccttctgttattgttatggctgatt

SEQ ID NO: 163189 - DNA, 732 bp, Homo sapiens
  Payload ID: 12155
  Gene Symbol: OSBPL8
  Gene Name: oxysterol binding protein-like 8
  ENST ID: ENST00000549570
  CDS Start-End: 503-732
gcggctgtagtgttagctttggacgccgcagtagccgctgccggtagcaagccgactgagggaaggtgggggtccgcccgggctggtggacctcggggccgaaagttcccgccccgctcgggggctgagccggcagtgcctccgcggccgctgggcagcgcccttcgtccaggctcgcgccccagctgccgccgacgacagcggccgagagaagttggggtctgactagacgcttacggggcctcggaccccggcgccgcggcgacctcggaggaaccggctccttgcgtcccgcctccctgggagctccgcacggcaatctccattggtgctactgcgtttaaaggatttgcagatttacagaatggctgcacattaatggaaagagaagcataaacctatcttctttcattatggagggaggtttggcagatggagaacctgatcgaacttcgctgttgtagcaaacagtgacgaatctcagcttctgacaccaggaaagatgagtcagcgccaaggaaaagaagcttatccaacgccaaccaaagatttgcatcagccatctcttagtccagcaagtcctcatagccagggttttgaaagagggaaggaagatatttctcaaaataaagatgaatcttcactttctatgtcaaagagcaagtctgaatctaaactttataatggctcagagaaggacagttcaacttcaagcaaactcacaaaaaaaga

SEQ ID NO: 163190 - DNA, 2583 bp, Homo sapiens
  Payload ID: 12155
  Gene Symbol: OSBPL8
  Gene Name: oxysterol binding protein-like 8
  ENST ID: ENST00000547540
  CDS Start-End: 420-2583
gacaacattaggccgcgacgcgctcctggccaggcggcggctgtagtgttagctttggacgccgcagtagccgctgccggtagcaagccgactgagggaaggtgggggtccgcccgggctggtggacctcggggccgaaagttcccgccccgctcgggggctgagccggcagtgcctccgcggccgctgggcagcgcccttcgtccaggctcgcgccccagctgccgccgacgacagcggccgagagaagttggggtctgactagacgcttacggggcctcggaccccggcgccgcggcgacctcggaggaaccggctccttgcgtcccgcctccctgggagctccgcacgggatttgcagatttacagaatggctgcacattaatggaaagagaagcataaacctatcttctttcattatggagggaggtttggcagatggagaacctgatcgaacttcgcttcttggtgatagcaaagatgtccttgggccatcaactgttgtagcaaacagtgacgaatctcagcttctgacaccaggaaagatgagtcagcgccaaggaaaagaagcttatccaacgccaaccaaagatttgcatcagccatctcttagtccagcaagtcctcatagccagggttttgaaagagggaaggaagatatttctcaaaataaagatgaatcttcactttctatgtcaaagagcaagtctgaatctaaactttataatggctcagagaaggacagttcaacttcaagcaaactcacaaaaaaagaatctcttaaggtacaaaagaaaaattaccgagaagaaaagaaaagagccacaaaggagctgctcagtacaatcacagatccttctgttattgttatggctgattggttaaagattcgtggtactctaaagagctggaccaagttatggtgtgtgttgaaacctggggtgctactgatctataaaacccaaaaaaatggtcagtgggtaggaacagttcttctgaatgcctgtgaaatcattgaacgtccatcaaaaaaggatggcttttgtttcaaacttttccatcctttggagcaatctatttgggcagtgaagggtccaaaaggtgaagcggttggatccattactcaacccttacctagcagttatttgatcatccgagctacttcagagtcagatggaaggtgctggatggatgctttggagttggctttgaaatgttctagtcttcttaaacgtacaatgatcagagaaggaaaggaacatgacctgagcgtttcatcagatagcacacatgtgactttctatggcttactacgtgctaacaatctccacagtggtgataacttccagttaaatgatagtgaaattgaacgacaacattttaaggaccaagatatgtattctgataaatctgataaagaaaatgatcaagaacatgatgagtctgataatgaggtgatggggaaaagtgaagaaagtgacacagatacatcagaaagacaagatgactcatatatcgaacctgagcctgttgagcctttaaaggagactacctacactgaacagagccatgaagaacttggagaggcaggtgaggcttctcaaacagaaactgtatctgaagaaaacaaaagccttatctggacactattgaaacaagtccgtcctggcatggacctatccaaggtggttctgcctacatttattttggaaccccgttctttcctggataaactttcagattactactatcatgcagatttcctatctgaggcagctcttgaagaaaatccttatttccgtttgaagaaagtagtgaaatggtatttgtcaggattctataaaaagccaaagggactgaagaaaccttataatcctatacttggcgagactttccgttgtttatggattcatcccagaacaaacagcaaaactttttatattgctgaacaggtgtcccatcatccaccaatatctgccttttatgttagtaatcgaaaagatggattttgccttagcggtagtatcctggctaagtctaagttttatggaaactcattatctgcaatattagagggagaagcacggttaactttcttgaatagaggtgaagattatgtaatgacaatgccatacgctcattgtaaaggaattctttatggtacaatgacactggagcttggtggaacagtcaatattacatgtcaaaaaactggatacagtgcaatacttgaatttaaactaaagccattcctagggagtagtgactgtgttaatcaaatatcagggaaacttaaactgggaaaagaagtcctagctactttggaaggtcattgggatagtgaagtttttattactgataaaaagactgataattcagaggttttctggaatccaacacctgacattaagcaatggagattaataaggcacactgtaaaatttgaagaacagggagattttgaatcagagaaactctggcaacgggtaactcgagccataaatgccaaagaccaaactgaagctacccaagagaagtatgttttggaagaagctcaaagacaagctgccagggatcggaaaa

SEQ ID NO: 163191 - DNA, 7239 bp, Homo sapiens; identical to SEQ ID NO: 163179
  Payload ID: 12155
  Gene Symbol: OSBPL8
  Gene Name: oxysterol binding protein-like 8
  Uniprot ID: Q9BZF1
  ENST ID: ENST00000611266
  CDS Start-End: 607-3150

SEQ ID NO: 163192 - DNA, 2721 bp, Homo sapiens
  Payload ID: 12156
  Gene Symbol: OSBPL9
  Gene Name: oxysterol binding protein-like 9
  Uniprot ID: Q96SU4
  ENST ID: ENST00000361556
  CDS Start-End: 161-2041
gaagggggtgaagggggtgtcccgggggacgggctgaacctcagtcaggaccgcctgcaccgcagtccggggatcgggtcgaggggagaagaaaaaggggtgctcgggagcagcccccggctacctcccctggaggcacagagggcgggggccttggcgaatggctttcttgctggccacttgcggaggtttggattcaggatttgttcctagtgtccaagattttgataagaaacttacagaagctgatgcttacctacaaatcttgattgaacaattaaagctttttgatgacaagcttcaaaactgcaaagaagatgaacagagaaagaaaattgaaactctcaaagagacaacaaatagcatggtagaatcaattaaacactgcattgtgttgctgcagattgccaaaagtactattaatcccgtagatgcaatatatcaacctagtcctttggaacctgtgatcagcacaatgccttcccagactgtgttacctccagaacctgttcagttgtgtaagtcagagcagcgtccatcttccctaccagttggacctgtgttggctaccttgggacatcatcagactcctacaccaaatagtacaggcagtggccattcaccaccgagtagcagtctcacttctccaagccacgtgaacttgtctccaaatacagtcccagagttctcttactccagcagtgaagatgaattttatgatgctgatgaattccatcaaagtggctcatccccaaagcgcttaatagattcttctggatctgcctcagtcctgacacacagcagctcgggaaatagtctaaaacgcccagataccacagaatcacttaattcttccttgtccaatggaacaagtgatgctgacctgtttgattcacatgatgacagagatgatgatgcggaggcagggtctgtggaggagcacaagagcgttatcatgcatctcttgtcgcaggttagacttggaatggatcttactaaggtagttcttccaacgtttattcttgaaagaagatctcttttagaaatgtatgcagacttttttgcacatccggacctgtttgtgagcattagtgaccagaaggatcccaaggatcgaatggttcaggttgtgaaatggtacctctcagcctttcatgcgggaaggaaaggatcagttgccaaaaagccatacaatcccattttgggcgagatttttcagtgtcattggacattaccaaatgatactgaagagaacacagaactagtttcagaaggaccagttccctgggtttccaaaaacagtgtaacatttgtggctgagcaggtttcccatcatccacccatttcagccttttatgctgagtgttttaacaagaagatacaattcaatgctcatatctggaccaaatcaaaattccttgggatgtcaattggggtgcacaacatagggcagggctgtgtctcatgtctagactatgatgaacattacattctcacattccccaatggctatggaaggtctatcctcacagtgccctgggtggaattaggaggagaatgcaatattaattgttccaaaacaggctatagtgcaaatatcatcttccacactaaacccttctatgggggcaagaagcacagaattactgccgagattttttctccaaatgacaagaagtctttttgctcaattgaaggggaatggaatggtgtgatgtatgcaaaatatgcaacaggggaaaatacagtctttgtagataccaagaagttgcctataatcaagaagaaagtgaggaagttggaagatcagaacgagtatgaatcccgcagcctttggaaggatgtcactttcaacttaaaaatcagagacattgatgcagcaactgaagcaaagcacaggcttgaagaaagacaaagagcagaagcccgagaaaggaaggagaaggaaattcagtgggagacaaggttatttcatgaagatggagaatgctgggtttatgatgaaccattactgaaacgtcttggtgctgccaagcattaggttggaagatgcaaagtttatacctgatgatcagggcagtaggcataattcagcaacaaacaatcttcctttgggagaaacctgttcattccaatcttctaattacagtggttcctatctcagggatactggactttctgacgcagatgaacaattaaggggaaaagcttcccttttccctctgtggcagttacgattttgacttcagtcctgagaaaaacttcaggttttgaaaatcagatgatgtcttctccttttccaaacaccacacgttgaaagcatttataaatccaagtctgaaactctgcgctctagtactgctgttaagatacacaacttgtttcttagttcatataatctcgggatacacacacacacacacatatatatacacacacatacgtatacacacacatacatatatataaatatacctgatgccagatttttttcataaatattctgcctactgtaaatatgggttcctctgagttgttttagaaaattagcgcaatgtattaaaatcaagtgttaggaaatttcatggtcttacctacaataacttttattttggaattgaactattattaaattgtatctaatcctggattacagtttaattaattattcttagtgcttaaggcttcataaagtaatttttccaaccttttttttaaaaa

SEQ ID NO: 163193 - DNA, 3352 bp, Homo sapiens
  Payload ID: 12156
  Gene Symbol: OSBPL9
  Gene Name: oxysterol binding protein-like 9
  Uniprot ID: Q96SU4
  ENST ID: ENST00000371714
  CDS Start-End: 501-2672
atgattataagcttcctgaggcctccctagaagctgagcagatggcagaaccatgcttcctgtaaatcctgcagaatcaagaaggaactgagtctctaagatggaggatatacaactgacaagtagtaaagtcaagatacacagccagacagtgtctcagtctggcatccaactcaggctggagtgcagtgacatgatcttggctcactgcagtcttgacctcctgggctcaagcaatcctcctgcctcagcttcctgagtagattataaataatcttaatagcagtattcacgtttgcattctcgcatccgtggcatggagtcctacacacaataggcgccctaagaaagcgtgtttgacttgatcgctggagcatctgccggcaccgcccaggacccgcccaggacccgccccgccccctgcggccccgccccccgcatgctgaatgccatataggcgagtgacgtcaggccgtttgttgtcattggcggctcccaagatggcgtccatcatggaagggccgctgagcaaatggactaacgtgatgaagggctggcagtaccgttggttcgtgctggactacaatgcaggactgctctcctactacacgtccaaggacaaaatgatgagaggctctcgcagaggatgtgttagactcagaggagctgtgattggtatagacgatgaggacgacagcaccttcacaataactgttgatcagaaaaccttccatttccaggcccgtgatgctgatgagcgagagaagtggatccatgccttagaagaaacaattcttcgacatactctccagcttcaaggtttggattcaggatttgttcctagtgtccaagattttgataagaaacttacagaagctgatgcttacctacaaatcttgattgaacaattaaagctttttgatgacaagcttcaaaactgcaaagaagatgaacagagaaagaaaattgaaactctcaaagagacaacaaatagcatggtagaatcaattaaacactgcattgtgttgctgcagattgccaaaagtactattaatcccgtagatgcaatatatcaacctagtcctttggaacctgtgatcagcacaatgccttcccagactgtgttacctccagaacctgttcagttgtgtaagtcagagcagcgtccatcttccctaccagttggacctgtgttggctaccttgggacatcatcagactcctacaccaaatagtacaggcagtggccattcaccaccgagtagcagtctcacttctccaagccacgtgaacttgtctccaaatacagtcccagagttctcttactccagcagtgaagatgaattttatgatgctgatgaattccatcaaagtggctcatccccaaagcgcttaatagattcttctggatctgcctcagtcctgacacacagcagctcgggaaatagtctaaaacgcccagataccacagaatcacttaattcttccttgtccaatggaacaagtgatgctgacctgtttgattcacatgatgacagagatgatgatgcggaggcagggtctgtggaggagcacaagagcgttatcatgcatctcttgtcgcaggttagacttggaatggatcttactaaggtagttcttccaacgtttattcttgaaagaagatctcttttagaaatgtatgcagacttttttgcacatccggacctgtttgtgagcattagtgaccagaaggatcccaaggatcgaatggttcaggttgtgaaatggtacctctcagcctttcatgcgggaaggaaaggatcagttgccaaaaagccatacaatcccattttgggcgagatttttcagtgtcattggacattaccaaatgatactgaagagaacacagaactagtttcagaaggaccagttccctgggtttccaaaaacagtgtaacatttgtggctgagcaggtttcccatcatccacccatttcagccttttatgctgagtgttttaacaagaagatacaattcaatgctcatatctggaccaaatcaaaattccttgggatgtcaattggggtgcacaacatagggcagggctgtgtctcatgtctagactatgatgaacattacattctcacattccccaatggctatggaaggtctatcctcacagtgccctgggtggaattaggaggagaatgcaatattaattgttccaaaacaggctatagtgcaaatatcatcttccacactaaacccttctatgggggcaagaagcacagaattactgccgagattttttctccaaatgacaagaagtctttttgctcaattgaaggggaatggaatggtgtgatgtatgcaaaatatgcaacaggggaaaatacagtctttgtagataccaagaagttgcctataatcaagaagaaagtgaggaagttggaagatcagaacgagtatgaatcccgcagcctttggaaggatgtcactttcaacttaaaaatcagagacattgatgcagcaactgaagcaaagcacaggcttgaagaaagacaaagagcagaagcccgagaaaggaaggagaaggaaattcagtgggagacaaggttatttcatgaagatggagaatgctgggtttatgatgaaccattactgaaacgtcttggtgctgccaagcattaggttggaagatgcaaagtttatacctgatgatcagggcagtaggcataattcagcaacaaacaatcttcctttgggagaaacctgttcattccaatcttctaattacagtggttcctatctcagggatactggactttctgacgcagatgaacaattaaggggaaaagcttcccttttccctctgtggcagttacgattttgacttcagtcctgagaaaaacttcaggttttgaaaatcagatgatgtcttctccttttccaaacaccacacgttgaaagcatttataaatccaagtctgaaactctgcgctctagtactgctgttaagatacacaacttgtttcttagttcatataatctcgggatacacacacacacacacatatatatacacacacatacgtatacacacacatacatatatataaatatacctgatgccagatttttttcataaatattctgcctactgtaaatatgggttcctctgagttgttttagaaaattagcgcaatgtattaaaatcaagtgttaggaaatttcatggtcttacctacaataacttttattttggaattgaactattattaaattgtatctaatcctggattacagtttaattaattattcttagtgcttaaggcttcataaagtaatttttccaaccttttttttaaaaa

SEQ ID NO: 163194 - DNA, 2670 bp, Homo sapiens
  Payload ID: 12156
  Gene Symbol: OSBPL9
  Gene Name: oxysterol binding protein-like 9
  ENST ID: ENST00000435274
  CDS Start-End: 20-370
gtcattggcggctcccaagatggcgtccatcatggaagggccgctgagcaaatggactaacgtgatgaagggctggcagtaccgttggttcgtgctggactacaatgcaggactgctctcctactacacgtccaaggacaaaatgatgagaggctctcgcagaggatgtgttagactcagaggagctgtgattggtatagacgatgaggacgacagcaccttcacaataactgttgatcagaaaaccttccatttccagggtgagctgaaagaagagattctttctcttcatagtcccatctgcttcttttcttctcttttgggttgtttgctggatgacttgaatggttttgcaactgatcctgcatgaacgagtgcataggaacattctggatgaagtggtactgcaggttaggcagggatttgtatctgcaatggatgtagatcgatttgaaacgactgtggatctggctgcagttggagatgaaaattttaaaggataaaaatcagtgaagggagagagtaatgggctgctgctgctgctggcttgtgtttacagaagcccgtgatgctgatgagcgagagaagtggatccatgccttagaagaaacaattcttcgacatactctccagcttcaaggtttggattcaggatttgttcctagtgtccaagattttgataagaaacttacagaagctgatgcttacctacaaatcttgattgaacaattaaagctttttgatgacaagcttcaaaactgcaaagaagatgaacagagaaagaaaattgaaactctcaaagagacaacaaatagcatggtagaatcaattaaacactgcattgtgttgctgcagattgccaaaagtactattaatcccgtagatgcaatatatcaacctagtcctttggaacctgtgatcagcacaatgccttcccagactgtgttacctccagaacctgttcagttgtgtaagtcagagcagcgtccatcttccctaccagttggacctgtgttggctaccttgggacatcatcagactcctacaccaaatagtacaggcagtggccattcaccaccgagtagcagtctcacttctccaagccacgtgaacttgtctccaaatacagtcccagagttctcttactccagcagtgaagatgaattttatgatgctgatgaattccatcaaagtggctcatccccaaagcgcttaatagattcttctggatctgcctcagtcctgacacacagcagctcgggaaatagtctaaaacgcccagataccacagaatcacttaattcttccttgtccaatggaacaagtgatgctgacctgtttgattcacatgatgacagagatgatgatgcggaggcagggtctgtggaggagcacaagagcgttatcatgcatctcttgtcgcaggttagacttggaatggatcttactaaggtagttcttccaacgtttattcttgaaagaagatctcttttagaaatgtatgcagacttttttgcacatccggacctgtttgtgagcattagtgaccagaaggatcccaaggatcgaatggttcaggttgtgaaatggtacctctcagcctttcatgcgggaaggaaaggatcagttgccaaaaagccatacaatcccattttgggcgagatttttcagtgtcattggacattaccaaatgatactgaagagaacacagaactagtttcagaaggaccagttccctgggtttccaaaaacagtgtaacatttgtggctgagcaggtttcccatcatccacccatttcagccttttatgctgagtgttttaacaagaagatacaattcaatgctcatatctggaccaaatcaaaattccttgggatgtcaattggggtgcacaacatagggcagggctgtgtctcatgtctagactatgatgaacattacattctcacattccccaatggctatggaaggtctatcctcacagtgccctgggtggaattaggaggagaatgcaatattaattgttccaaaacaggctatagtgcaaatatcatcttccacactaaacccttctatgggggcaagaagcacagaattactgccgagattttttctccaaatgacaagaagtctttttgctcaattgaaggggaatggaatggtgtgatgtatgcaaaatatgcaacaggggaaaatacagtctttgtagataccaagaagttgcctataatcaagaagaaagtgaggaagttggaagatcagaacgagtatgaatcccgcagcctttggaaggatgtcactttcaacttaaaaatcagagacattgatgcagcaactgaagcaaagcacaggcttgaagaaagacaaagagcagaagcccgagaaaggaaggagaaggaaattcagtgggagacaaggttatttcatgaagatggagaatgctgggtttatgatgaaccattactgaaacgtcttggtgctgccaagcattaggttggaagatgcaaagtttatacctgatgatcagggcagtaggcataattcagcaacaaacaatcttcctttgggagaaacctgttcattccaatcttctaattacagtggttcctatctcagggatactggactttctgacgcagatgaacaattaaggggaaaagcttccctttt

SEQ ID NO: 163195 - DNA, 2893 bp, Homo sapiens
  Payload ID: 12156
  Gene Symbol: OSBPL9
  Gene Name: oxysterol binding protein-like 9
  Uniprot ID: Q96SU4
  ENST ID: ENST00000428468
  CDS Start-End: 3-2213
agatggcgtccatcatggaagggccgctgagcaaatggactaacgtgatgaagggctggcagtaccgttggttcgtgctggactacaatgcaggactgctctcctactacacgtccaaggacaaaatgatgagaggctctcgcagaggatgtgttagactcagaggagctgtgattggtatagacgatgaggacgacagcaccttcacaataactgttgatcagaaaaccttccatttccaggcccgtgatgctgatgagcgagagaagtggatccatgccttagaagaaacaattcttcgacatactctccagcttcaaggtttggattcaggatttgttcctagtgtccaagattttgataagaaacttacagaagctgatgcttacctacaaatcttgattgaacaattaaagctttttgatgacaagcttcaaaactgcaaagaagatgaacagagaaagaaaattgaaactctcaaagagacaacaaatagcatggtagaatcaattaaacactgcattgtgttgctgcagattgccaaagaccagagtaatgcggagaagcacgcagatggaatgataagtactattaatcccgtagatgcaatatatcaacctagtcctttggaacctgtgatcagcacaatgccttcccagactgtgttacctccagaacctgttcagttgtgtaagtcagagcagcgtccatcttccctaccagttggacctgtgttggctaccttgggacatcatcagactcctacaccaaatagtacaggcagtggccattcaccaccgagtagcagtctcacttctccaagccacgtgaacttgtctccaaatacagtcccagagttctcttactccagcagtgaagatgaattttatgatgctgatgaattccatcaaagtggctcatccccaaagcgcttaatagattcttctggatctgcctcagtcctgacacacagcagctcgggaaatagtctaaaacgcccagataccacagaatcacttaattcttccttgtccaatggaacaagtgatgctgacctgtttgattcacatgatgacagagatgatgatgcggaggcagggtctgtggaggagcacaagagcgttatcatgcatctcttgtcgcaggttagacttggaatggatcttactaaggtagttcttccaacgtttattcttgaaagaagatctcttttagaaatgtatgcagacttttttgcacatccggacctgtttgtgagcattagtgaccagaaggatcccaaggatcgaatggttcaggttgtgaaatggtacctctcagcctttcatgcgggaaggaaaggatcagttgccaaaaagccatacaatcccattttgggcgagatttttcagtgtcattggacattaccaaatgatactgaagagaacacagaactagtttcagaaggaccagttccctgggtttccaaaaacagtgtaacatttgtggctgagcaggtttcccatcatccacccatttcagccttttatgctgagtgttttaacaagaagatacaattcaatgctcatatctggaccaaatcaaaattccttgggatgtcaattggggtgcacaacatagggcagggctgtgtctcatgtctagactatgatgaacattacattctcacattccccaatggctatggaaggtctatcctcacagtgccctgggtggaattaggaggagaatgcaatattaattgttccaaaacaggctatagtgcaaatatcatcttccacactaaacccttctatgggggcaagaagcacagaattactgccgagattttttctccaaatgacaagaagtctttttgctcaattgaaggggaatggaatggtgtgatgtatgcaaaatatgcaacaggggaaaatacagtctttgtagataccaagaagttgcctataatcaagaagaaagtgaggaagttggaagatcagaacgagtatgaatcccgcagcctttggaaggatgtcactttcaacttaaaaatcagagacattgatgcagcaactgaagcaaagcacaggcttgaagaaagacaaagagcagaagcccgagaaaggaaggagaaggaaattcagtgggagacaaggttatttcatgaagatggagaatgctgggtttatgatgaaccattactgaaacgtcttggtgctgccaagcattaggttggaagatgcaaagtttatacctgatgatcagggcagtaggcataattcagcaacaaacaatcttcctttgggagaaacctgttcattccaatcttctaattacagtggttcctatctcagggatactggactttctgacgcagatgaacaattaaggggaaaagcttcccttttccctctgtggcagttacgattttgacttcagtcctgagaaaaacttcaggttttgaaaatcagatgatgtcttctccttttccaaacaccacacgttgaaagcatttataaatccaagtctgaaactctgcgctctagtactgctgttaagatacacaacttgtttcttagttcatataatctcgggatacacacacacacacacatatatatacacacacatacgtatacacacacatacatatatataaatatacctgatgccagatttttttcataaatattctgcctactgtaaatatgggttcctctgagttgttttagaaaattagcgcaatgtattaaaatcaagtgttaggaaatttcatggtcttacctacaataacttttattttggaattgaactattattaaattgtatctaatcctggattacagtttaattaattattcttagtgcttaaggcttcataaagtaatttttccaaccttttttttaaaaa

SEQ ID NO: 163196 - DNA, 2940 bp, Homo sapiens
  Payload ID: 12156
  Gene Symbol: OSBPL9
  Gene Name: oxysterol binding protein-like 9
  Uniprot ID: Q96SU4
  ENST ID: ENST00000447887
  CDS Start-End: 20-2260
gtcattggcggctcccaagatggcgtccatcatggaagggccgctgagcaaatggactaacgtgatgaagggctggcagtaccgttggttcgtgctggactacaatgcaggactgctctcctactacacgtccaaggacaaaatgatgagaggctctcgcagaggatgtgttagactcagaggagctgtgattggtatagacgatgaggacgacagcaccttcacaataactgttgatcagaaaaccttccatttccaggcccgtgatgctgatgagcgagagaagtggatccatgccttagaagaaacaattcttcgacatactctccagcttcaaatcagtaccacacttgcttttttccagtcttctggtatctctccagttcttgaattttcaaaaataattggtttggattcaggatttgttcctagtgtccaagattttgataagaaacttacagaagctgatgcttacctacaaatcttgattgaacaattaaagctttttgatgacaagcttcaaaactgcaaagaagatgaacagagaaagaaaattgaaactctcaaagagacaacaaatagcatggtagaatcaattaaacactgcattgtgttgctgcagattgccaaaagtactattaatcccgtagatgcaatatatcaacctagtcctttggaacctgtgatcagcacaatgccttcccagactgtgttacctccagaacctgttcagttgtgtaagtcagagcagcgtccatcttccctaccagttggacctgtgttggctaccttgggacatcatcagactcctacaccaaatagtacaggcagtggccattcaccaccgagtagcagtctcacttctccaagccacgtgaacttgtctccaaatacagtcccagagttctcttactccagcagtgaagatgaattttatgatgctgatgaattccatcaaagtggctcatccccaaagcgcttaatagattcttctggatctgcctcagtcctgacacacagcagctcgggaaatagtctaaaacgcccagataccacagaatcacttaattcttccttgtccaatggaacaagtgatgctgacctgtttgattcacatgatgacagagatgatgatgcggaggcagggtctgtggaggagcacaagagcgttatcatgcatctcttgtcgcaggttagacttggaatggatcttactaaggtagttcttccaacgtttattcttgaaagaagatctcttttagaaatgtatgcagacttttttgcacatccggacctgtttgtgagcattagtgaccagaaggatcccaaggatcgaatggttcaggttgtgaaatggtacctctcagcctttcatgcgggaaggaaaggatcagttgccaaaaagccatacaatcccattttgggcgagatttttcagtgtcattggacattaccaaatgatactgaagagaacacagaactagtttcagaaggaccagttccctgggtttccaaaaacagtgtaacatttgtggctgagcaggtttcccatcatccacccatttcagccttttatgctgagtgttttaacaagaagatacaattcaatgctcatatctggaccaaatcaaaattccttgggatgtcaattggggtgcacaacatagggcagggctgtgtctcatgtctagactatgatgaacattacattctcacattccccaatggctatggaaggtctatcctcacagtgccctgggtggaattaggaggagaatgcaatattaattgttccaaaacaggctatagtgcaaatatcatcttccacactaaacccttctatgggggcaagaagcacagaattactgccgagattttttctccaaatgacaagaagtctttttgctcaattgaaggggaatggaatggtgtgatgtatgcaaaatatgcaacaggggaaaatacagtctttgtagataccaagaagttgcctataatcaagaagaaagtgaggaagttggaagatcagaacgagtatgaatcccgcagcctttggaaggatgtcactttcaacttaaaaatcagagacattgatgcagcaactgaagcaaagcacaggcttgaagaaagacaaagagcagaagcccgagaaaggaaggagaaggaaattcagtgggagacaaggttatttcatgaagatggagaatgctgggtttatgatgaaccattactgaaacgtcttggtgctgccaagcattaggttggaagatgcaaagtttatacctgatgatcagggcagtaggcataattcagcaacaaacaatcttcctttgggagaaacctgttcattccaatcttctaattacagtggttcctatctcagggatactggactttctgacgcagatgaacaattaaggggaaaagcttcccttttccctctgtggcagttacgattttgacttcagtcctgagaaaaacttcaggttttgaaaatcagatgatgtcttctccttttccaaacaccacacgttgaaagcatttataaatccaagtctgaaactctgcgctctagtactgctgttaagatacacaacttgtttcttagttcatataatctcgggatacacacacacacacacatatatatacacacacatacgtatacacacacatacatatatataaatatacctgatgccagatttttttcataaatattctgcctactgtaaatatgggttcctctgagttgttttagaaaattagcgcaatgtattaaaatcaagtgttaggaaatttcatggtcttacctacaataacttttattttggaattgaactattattaaattgtatctaatcctggattacagtttaattaattattcttagtgcttaaggcttcataaagtaatttttccaaccttttttttaaaaa

SEQ ID NO: 163197 - DNA, 2842 bp, Homo sapiens
  Payload ID: 12156
  Gene Symbol: OSBPL9
  Gene Name: oxysterol binding protein-like 9
  Uniprot ID: Q96SU4
  ENST ID: ENST00000453295
  CDS Start-End: 3-2162
agatggcgtccatcatggaagggccgctgagcaaatggactaacgtgatgaagggctggcagtaccgttggttcgtgctggactacaatgcaggactgctctcctactacacgggagctgtgattggtatagacgatgaggacgacagcaccttcacaataactgttgatcagaaaaccttccatttccaggcccgtgatgctgatgagcgagagaagtggatccatgccttagaagaaacaattcttcgacatactctccagcttcaaggtttggattcaggatttgttcctagtgtccaagattttgataagaaacttacagaagctgatgcttacctacaaatcttgattgaacaattaaagctttttgatgacaagcttcaaaactgcaaagaagatgaacagagaaagaaaattgaaactctcaaagagacaacaaatagcatggtagaatcaattaaacactgcattgtgttgctgcagattgccaaagaccagagtaatgcggagaagcacgcagatggaatgataagtactattaatcccgtagatgcaatatatcaacctagtcctttggaacctgtgatcagcacaatgccttcccagactgtgttacctccagaacctgttcagttgtgtaagtcagagcagcgtccatcttccctaccagttggacctgtgttggctaccttgggacatcatcagactcctacaccaaatagtacaggcagtggccattcaccaccgagtagcagtctcacttctccaagccacgtgaacttgtctccaaatacagtcccagagttctcttactccagcagtgaagatgaattttatgatgctgatgaattccatcaaagtggctcatccccaaagcgcttaatagattcttctggatctgcctcagtcctgacacacagcagctcgggaaatagtctaaaacgcccagataccacagaatcacttaattcttccttgtccaatggaacaagtgatgctgacctgtttgattcacatgatgacagagatgatgatgcggaggcagggtctgtggaggagcacaagagcgttatcatgcatctcttgtcgcaggttagacttggaatggatcttactaaggtagttcttccaacgtttattcttgaaagaagatctcttttagaaatgtatgcagacttttttgcacatccggacctgtttgtgagcattagtgaccagaaggatcccaaggatcgaatggttcaggttgtgaaatggtacctctcagcctttcatgcgggaaggaaaggatcagttgccaaaaagccatacaatcccattttgggcgagatttttcagtgtcattggacattaccaaatgatactgaagagaacacagaactagtttcagaaggaccagttccctgggtttccaaaaacagtgtaacatttgtggctgagcaggtttcccatcatccacccatttcagccttttatgctgagtgttttaacaagaagatacaattcaatgctcatatctggaccaaatcaaaattccttgggatgtcaattggggtgcacaacatagggcagggctgtgtctcatgtctagactatgatgaacattacattctcacattccccaatggctatggaaggtctatcctcacagtgccctgggtggaattaggaggagaatgcaatattaattgttccaaaacaggctatagtgcaaatatcatcttccacactaaacccttctatgggggcaagaagcacagaattactgccgagattttttctccaaatgacaagaagtctttttgctcaattgaaggggaatggaatggtgtgatgtatgcaaaatatgcaacaggggaaaatacagtctttgtagataccaagaagttgcctataatcaagaagaaagtgaggaagttggaagatcagaacgagtatgaatcccgcagcctttggaaggatgtcactttcaacttaaaaatcagagacattgatgcagcaactgaagcaaagcacaggcttgaagaaagacaaagagcagaagcccgagaaaggaaggagaaggaaattcagtgggagacaaggttatttcatgaagatggagaatgctgggtttatgatgaaccattactgaaacgtcttggtgctgccaagcattaggttggaagatgcaaagtttatacctgatgatcagggcagtaggcataattcagcaacaaacaatcttcctttgggagaaacctgttcattccaatcttctaattacagtggttcctatctcagggatactggactttctgacgcagatgaacaattaaggggaaaagcttcccttttccctctgtggcagttacgattttgacttcagtcctgagaaaaacttcaggttttgaaaatcagatgatgtcttctccttttccaaacaccacacgttgaaagcatttataaatccaagtctgaaactctgcgctctagtactgctgttaagatacacaacttgtttcttagttcatataatctcgggatacacacacacacacacatatatatacacacacatacgtatacacacacatacatatatataaatatacctgatgccagatttttttcataaatattctgcctactgtaaatatgggttcctctgagttgttttagaaaattagcgcaatgtattaaaatcaagtgttaggaaatttcatggtcttacctacaataacttttattttggaattgaactattattaaattgtatctaatcctggattacagtttaattaattattcttagtgcttaaggcttcataaagtaatttttccaaccttttttttaaaaa

SEQ ID NO: 163198 - DNA, 595 bp, Homo sapiens
  Payload ID: 12156
  Gene Symbol: OSBPL9
  Gene Name: oxysterol binding protein-like 9
  ENST ID: ENST00000533884
  CDS Start-End: 143-382
gtcccgggggacgggctgaacctcagtcaggaccgcctgcaccgcagtccggggatcgggtcgaggggagaagaaaaaggggtgctcgggagcagcccccggctacctcccctggaggcacagagggcgggggccttggcgaatggctttcttgctggccacttgcggaggtttggattcaggatttgttcctagtgtccaagattttgataagaaacttacagaagctgatgcttacctacaaatcttgattgaacaattaaagctttttgatgacaagcttcaaaactgcaaagaagatgaacagagaaagaaaattgaaactctcaaagagacaacaaatagatgggattctgctatgttgcctaggctggtctcctagcctcaagcgatcctccttccttggcctaccaaagcagtgggattacagagcatggtagaatcaattaaacactgcattgtgttgctgcagattgccaaagaccagagtaatgcggagaagcacgcagatggaatgataagtactattaatcccgtagatgcaatatatcaacctagtcctttggaacctgtgatcagcacaatgccttcccag

SEQ ID NO: 163199 - DNA, 2529 bp, Homo sapiens
  Payload ID: 12156
  Gene Symbol: OSBPL9
  Gene Name: oxysterol binding protein-like 9
  Uniprot ID: Q96SU4
  ENST ID: ENST00000486942
  CDS Start-End: 173-1849
cggcccctacccctgagtccccggggtcccggccgccaggccggagcgcgaatgtcgtgctcaccctgcctccttcccgccgccccctgggctttttgatgacaagcttcaaaactgcaaagaagatgaacagagaaagaaaattgaaactctcaaagagacaacaaatagcatggtagaatcaattaaacactgcattgtgttgctgcagattgccaaaagtactattaatcccgtagatgcaatatatcaacctagtcctttggaacctgtgatcagcacaatgccttcccagactgtgttacctccagaacctgttcagttgtgtaagtcagagcagcgtccatcttccctaccagttggacctgtgttggctaccttgggacatcatcagactcctacaccaaatagtacaggcagtggccattcaccaccgagtagcagtctcacttctccaagccacgtgaacttgtctccaaatacagtcccagagttctcttactccagcagtgaagatgaattttatgatgctgatgaattccatcaaagtggctcatccccaaagcgcttaatagattcttctggatctgcctcagtcctgacacacagcagctcgggaaatagtctaaaacgcccagataccacagaatcacttaattcttccttgtccaatggaacaagtgatgctgacctgtttgattcacatgatgacagagatgatgatgcggaggcagggtctgtggaggagcacaagagcgttatcatgcatctcttgtcgcaggttagacttggaatggatcttactaaggtagttcttccaacgtttattcttgaaagaagatctcttttagaaatgtatgcagacttttttgcacatccggacctgtttgtgagcattagtgaccagaaggatcccaaggatcgaatggttcaggttgtgaaatggtacctctcagcctttcatgcgggaaggaaaggatcagttgccaaaaagccatacaatcccattttgggcgagatttttcagtgtcattggacattaccaaatgatactgaagagaacacagaactagtttcagaaggaccagttccctgggtttccaaaaacagtgtaacatttgtggctgagcaggtttcccatcatccacccatttcagccttttatgctgagtgttttaacaagaagatacaattcaatgctcatatctggaccaaatcaaaattccttgggatgtcaattggggtgcacaacatagggcagggctgtgtctcatgtctagactatgatgaacattacattctcacattccccaatggctatggaaggtctatcctcacagtgccctgggtggaattaggaggagaatgcaatattaattgttccaaaacaggctatagtgcaaatatcatcttccacactaaacccttctatgggggcaagaagcacagaattactgccgagattttttctccaaatgacaagaagtctttttgctcaattgaaggggaatggaatggtgtgatgtatgcaaaatatgcaacaggggaaaatacagtctttgtagataccaagaagttgcctataatcaagaagaaagtgaggaagttggaagatcagaacgagtatgaatcccgcagcctttggaaggatgtcactttcaacttaaaaatcagagacattgatgcagcaactgaagcaaagcacaggcttgaagaaagacaaagagcagaagcccgagaaaggaaggagaaggaaattcagtgggagacaaggttatttcatgaagatggagaatgctgggtttatgatgaaccattactgaaacgtcttggtgctgccaagcattaggttggaagatgcaaagtttatacctgatgatcagggcagtaggcataattcagcaacaaacaatcttcctttgggagaaacctgttcattccaatcttctaattacagtggttcctatctcagggatactggactttctgacgcagatgaacaattaaggggaaaagcttcccttttccctctgtggcagttacgattttgacttcagtcctgagaaaaacttcaggttttgaaaatcagatgatgtcttctccttttccaaacaccacacgttgaaagcatttataaatccaagtctgaaactctgcgctctagtactgctgttaagatacacaacttgtttcttagttcatataatctcgggatacacacacacacacacatatatatacacacacatacgtatacacacacatacatatatataaatatacctgatgccagatttttttcataaatattctgcctactgtaaatatgggttcctctgagttgttttagaaaattagcgcaatgtattaaaatcaagtgttaggaaatttcatggtcttacctacaataacttttattttggaattgaactattattaaattgtatctaatcctggattacagtttaattaattattcttagtgcttaaggcttcataaagtaatttttccaaccttttttttaaaaa

SEQ ID NO: 163200 - DNA, 779 bp, Homo sapiens
  Payload ID: 12156
  Gene Symbol: OSBPL9
  Gene Name: oxysterol binding protein-like 9
  ENST ID: ENST00000528603
  CDS Start-End: 1-105
gaatcaattaaacactgcattgtgttgctgcagattgccaaagaccagagtaatgcggagaagcacgcagatggaatgatactatattgtgtttctttattttagagtactattaatcccgtagatgcaatatatcaacctagtcctttggaacctgtgatcagcacaatgccttcccagactgtgttacctccagaacctgttcagttgtgtaagtcagagcagcgtccatcttccctaccagttggacctgtgttggctaccttgggacatcatcagactcctacaccaaatagtacaggcagtggccattcaccaccgagtagcagtctcacttctccaagccacgtgaacttgtctccaaatacagtcccagagttctcttactccagcagtgaagatgaattttatgatgctgatgaattccatcaaagtggctcatccccaaagcgcttaatagattcttctggatctgcctcagtcctgacacacagcagctcgggaaatagtctaaaacgcccagataccacagaatcacttaattcttccttgtccaatggaacaagtgatgctgacctgtttgattcacatgatgacagagatgatgatgcggaggcagggtctgtggaggagcacaagagcgttatcatgcatctcttgtcgcaggttagacttggaatggatcttactaaggtagttcttccaacgtttattcttgaaagaagatctcttttagaaatgtatgcagacttttttgcacatccggacctgtttgtgag

SEQ ID NO: 163201 - DNA, 581 bp, Homo sapiens
  Payload ID: 12156
  Gene Symbol: OSBPL9
  Gene Name: oxysterol binding protein-like 9
  ENST ID: ENST00000532975
  CDS Start-End: 254-581
atcaaggtgaaactccggggaccaggctccacagctgccataaactggatggcacgttagaagccggtgggtgtagggtttggattcaggatttgttcctagtgtccaagattttgataagaaacttacagaagctgatgcttacctacaaatcttgattgaacaattaaagctttttgatgacaagcttcaaaactgcaaagaagatgaacagagaaagaaaattgaaactctcaaagagacaacaaatagcatggtagaatcaattaaacactgcattgtgttgctgcagattgccaaaagtactattaatcccgtagatgcaatatatcaacctagtcctttggaacctgtgatcagcacaatgccttcccagactgtgttacctccagaacctgttcagttgtgtaagtcagagcagcgtccatcttccctaccagttggacctgtgttggctaccttgggacatcatcagactcctacaccaaatagtacaggcagtggccattcaccaccgagtagcagtctcacttctccaagccacgtgaacttgtctccaaatacagtcccagagttctctt

SEQ ID NO: 163202 - DNA, 2210 bp, Homo sapiens
  Payload ID: 12156
  Gene Symbol: OSBPL9
  Gene Name: oxysterol binding protein-like 9
  Uniprot ID: Q96SU4
  ENST ID: ENST00000531828
  CDS Start-End: 495-2210
ggggggtgaagggggtgaagggggtgtcccgggggacgggctgaacctcagtcaggaccgcctgcaccgcagtccggggatcgggtcgaggggagaagaaaaaggggtgctcgggagcagcccccggctacctcccctggaggcacagagggcgggggccttggcgaatggctttcttgctggccacttgcggagtgagtagaccccgagggtctgggagaggggccggcccctacccctgagtccccggggtcccggccgccaggccggagcgcgaatgtcgtgctcaccctgcctccttcccgccgccccctgggggtttggattcaggatttgttcctagtgtccaagattttgataagaaacttacagaagctgatgcttacctacaaatcttgattgaacaattaaagctttttgatgacaagcttcaaaactgcaaagaagatgaacagagaaagaaaattgaaactctcaaagagacaacaaatagcatggtagaatcaattaaacactgcattgtgttgctgcagattgccaaagaccagagtaatgcggagaagcacgcagatggaatgataagtactattaatcccgtagatgcaatatatcaacctagtcctttggaacctgtgatcagcacaatgccttcccagactgtgttacctccagaacctgttcagttgtgtaagtcagagcagcgtccatcttccctaccagttggacctgtgttggctaccttgggacatcatcagactcctacaccaaatagtacaggcagtggccattcaccaccgagtagcagtctcacttctccaagccacgtgaacttgtctccaaatacagtcccagagttctcttactccagcagtgaagatgaattttatgatgctgatgaattccatcaaagtggctcatccccaaagcgcttaatagattcttctggatctgcctcagtcctgacacacagcagctcgggaaatagtctaaaacgcccagataccacagaatcacttaattcttccttgtccaatggaacaagtgatgctgacctgtttgattcacatgatgacagagatgatgatgcggaggcagggtctgtggaggagcacaagagcgttatcatgcatctcttgtcgcaggttagacttggaatggatcttactaaggtagttcttccaacgtttattcttgaaagaagatctcttttagaaatgtatgcagacttttttgcacatccggacctgtttgtgagcattagtgaccagaaggatcccaaggatcgaatggttcaggttgtgaaatggtacctctcagcctttcatgcgggaaggaaaggatcagttgccaaaaagccatacaatcccattttgggcgagatttttcagtgtcattggacattaccaaatgatactgaagagaacacagaactagtttcagaaggaccagttccctgggtttccaaaaacagtgtaacatttgtggctgagcaggtttcccatcatccacccatttcagccttttatgctgagtgttttaacaagaagatacaattcaatgctcatatctggaccaaatcaaaattccttgggatgtcaattggggtgcacaacatagggcagggctgtgtctcatgtctagactatgatgaacattacattctcacattccccaatggctatggaaggtctatcctcacagtgccctgggtggaattaggaggagaatgcaatattaattgttccaaaacaggctatagtgcaaatatcatcttccacactaaacccttctatgggggcaagaagcacagaattactgccgagattttttctccaaatgacaagaagtctttttgctcaattgaaggggaatggaatggtgtgatgtatgcaaaatatgcaacaggggaaaatacagtctttgtagataccaagaagttgcctataatcaagaagaaagtgaggaagttggaagatcagaacgagtatgaatcccgcagcctttggaaggatgtcactttcaacttaaaaatcagagacattgatgcagcaactgaagcaaagcacaggcttgaagaaagacaaagagcagaagcccgagaaaggaaggagaaggaaattcagtgggagacaaggttatttcatgaagatggagaatgctgggtttatgatgaaccattactgaaacgtcttggtgctgccaagcattag

SEQ ID NO: 163203 - DNA, 2755 bp, Homo sapiens
  Payload ID: 12156
  Gene Symbol: OSBPL9
  Gene Name: oxysterol binding protein-like 9
  Uniprot ID: Q96SU4
  ENST ID: ENST00000462759
  CDS Start-End: 399-2075
agaaaaaggggtgctcgggagcagcccccggctacctcccctggaggcacagagggcgggggccttggcgaatggctttcttgctggccacttgcggagtgagtagaccccgagggtctgggagaggggccggcccctacccctgagtccccggggtcccggccgccaggccggagcgcgaatgtcgtgctcaccctgcctccttcccgccgccccctgggggtttggattcaggatttgttcctagtgtccaagattttgataagaaacttacagaagctgatgcttacctacaaatcttgattgaacaattaaagctttttgatgacaagcttcaaaactgcaaagaagatgaacagagaaagaaaattgaaactctcaaagagacaacaaatagcatggtagaatcaattaaacactgcattgtgttgctgcagattgccaaaagtactattaatcccgtagatgcaatatatcaacctagtcctttggaacctgtgatcagcacaatgccttcccagactgtgttacctccagaacctgttcagttgtgtaagtcagagcagcgtccatcttccctaccagttggacctgtgttggctaccttgggacatcatcagactcctacaccaaatagtacaggcagtggccattcaccaccgagtagcagtctcacttctccaagccacgtgaacttgtctccaaatacagtcccagagttctcttactccagcagtgaagatgaattttatgatgctgatgaattccatcaaagtggctcatccccaaagcgcttaatagattcttctggatctgcctcagtcctgacacacagcagctcgggaaatagtctaaaacgcccagataccacagaatcacttaattcttccttgtccaatggaacaagtgatgctgacctgtttgattcacatgatgacagagatgatgatgcggaggcagggtctgtggaggagcacaagagcgttatcatgcatctcttgtcgcaggttagacttggaatggatcttactaaggtagttcttccaacgtttattcttgaaagaagatctcttttagaaatgtatgcagacttttttgcacatccggacctgtttgtgagcattagtgaccagaaggatcccaaggatcgaatggttcaggttgtgaaatggtacctctcagcctttcatgcgggaaggaaaggatcagttgccaaaaagccatacaatcccattttgggcgagatttttcagtgtcattggacattaccaaatgatactgaagagaacacagaactagtttcagaaggaccagttccctgggtttccaaaaacagtgtaacatttgtggctgagcaggtttcccatcatccacccatttcagccttttatgctgagtgttttaacaagaagatacaattcaatgctcatatctggaccaaatcaaaattccttgggatgtcaattggggtgcacaacatagggcagggctgtgtctcatgtctagactatgatgaacattacattctcacattccccaatggctatggaaggtctatcctcacagtgccctgggtggaattaggaggagaatgcaatattaattgttccaaaacaggctatagtgcaaatatcatcttccacactaaacccttctatgggggcaagaagcacagaattactgccgagattttttctccaaatgacaagaagtctttttgctcaattgaaggggaatggaatggtgtgatgtatgcaaaatatgcaacaggggaaaatacagtctttgtagataccaagaagttgcctataatcaagaagaaagtgaggaagttggaagatcagaacgagtatgaatcccgcagcctttggaaggatgtcactttcaacttaaaaatcagagacattgatgcagcaactgaagcaaagcacaggcttgaagaaagacaaagagcagaagcccgagaaaggaaggagaaggaaattcagtgggagacaaggttatttcatgaagatggagaatgctgggtttatgatgaaccattactgaaacgtcttggtgctgccaagcattaggttggaagatgcaaagtttatacctgatgatcagggcagtaggcataattcagcaacaaacaatcttcctttgggagaaacctgttcattccaatcttctaattacagtggttcctatctcagggatactggactttctgacgcagatgaacaattaaggggaaaagcttcccttttccctctgtggcagttacgattttgacttcagtcctgagaaaaacttcaggttttgaaaatcagatgatgtcttctccttttccaaacaccacacgttgaaagcatttataaatccaagtctgaaactctgcgctctagtactgctgttaagatacacaacttgtttcttagttcatataatctcgggatacacacacacacacacatatatatacacacacatacgtatacacacacatacatatatataaatatacctgatgccagatttttttcataaatattctgcctactgtaaatatgggttcctctgagttgttttagaaaattagcgcaatgtattaaaatcaagtgttaggaaatttcatggtcttacctacaataacttttattttggaattgaactattattaaattgtatctaatcctggattacagtttaattaattattcttagtgcttaaggcttcataaagtaatttttccaaccttttttttaaaaa

SEQ ID NO: 163204 - DNA, 530 bp, Homo sapiens
  Payload ID: 12156
  Gene Symbol: OSBPL9
  Gene Name: oxysterol binding protein-like 9
  ENST ID: ENST00000531061
  CDS Start-End: 1-350
tagatgcaatatatcaacctagtcctttggaacctgtgatcagcacaatgccttcccagactgtgttacctccagaacctgttcagttgtgtaagtcagagcagcgtccatcttccctaccagttggacctgtgttggctaccttgggacatcatcagactcctacaccaaatagtacaggcagtggccattcaccaccgagtagcagtctcacttctccaagccacgtgaacttgtctccaaatacagtcccagagttctcttactccagcagtgaagatgaattttatgatgctgatgaattccatcaaagtggctcatccccaaagcgcttaatagaacctgtttgattcacatgatgacagagatgatgatgcggaggcagggtctgtggaggagcacaagagcgttatcatgcatctcttgtcgcaggttagacttggaatggatcttactaaggtagttcttccaacgtttattcttgaaagaagatctcttttagaaatgtatgcagacttttttgcacatcc

SEQ ID NO: 163205 - DNA, 1012 bp, Homo sapiens
  Payload ID: 12156
  Gene Symbol: OSBPL9
  Gene Name: oxysterol binding protein-like 9
  ENST ID: ENST00000489990
  CDS Start-End: 1-591
gcgtccatcatggaagggccgctgagcaaatggactaacgtgatgaagggctggcagtaccgttggttcgtgctggactacaatgcaggactgctctcctactacacgtccaaggacaaaatgatgagaggctctcgcagaggatgtgttagactcagaggagctgtgattggtatagacgatgaggacgacagcaccttcacaataactgttgatcagaaaaccttccatttccaggcccgtgatgctgatgagcgagagaagtggatccatgccttagaagaaacaattcttcgacatactctccagcttcaaggtttggattcaggatttgttcctagtgtccaagattttgataagaaacttacagaagctgatgcttacctacaaatcttgattgaacaattaaagctttttgatgacaagcttcaaaactgcaaagaagatgaacagagaaagaaaattgaaactctcaaagagacaacaaatagcatggtagaatcaattaaacactgcattgtgttgctgcagattgccaaagcagtggccattcaccaccgagtagcagtctcacttctccaagccacgtgaacttgtctccaaatacagtcccagagttctcttactccagcagtgaagatgaattttatgatgctgatgaattccatcaaagtggctcatccccaaagcgcttaatagattcttctggatctgcctcagtcctgacacacagcagctcgggaaatagtctaaaacgcccagataccacagaatcacttaattcttccttgtccaatggaacaagtgatgctgacctgtttgattcacatgatgacagagatgatgatgcggaggcagggtctgtggaggagcacaagagcgttatcatgcatctcttgtcgcaggttagacttggaatggatcttactaaggtagttcttccaacgtttattcttgaaagaagatctcttttagaaatgtatgcagacttttttgcacatccggacctgtt

SEQ ID NO: 163206 - DNA, 563 bp, Homo sapiens
  Payload ID: 12156
  Gene Symbol: OSBPL9
  Gene Name: oxysterol binding protein-like 9
  ENST ID: ENST00000527631
  CDS Start-End: 288-563
ggacgccctcccgccgctgcgcacccctcccgcgagctgccagctccctcggcctctccacccaaaactggcccaaccgccaatcgtctgcctctcacctcctacagcagggtttggattcaggatttgttcctagtgtccaagattttgataagaaacttacagaagctgatgcttacctacaaatcttgattgaacaattaaagctttttgatgacaagcttcaaaactgcaaagaagatgaacagagaaagaaaattgaaactctcaaagagacaacaaatagcatggtagaatcaattaaacactgcattgtgttgctgcagattgccaaagaccagagtaatgcggagaagcacgcagatggaatgataagtactattaatcccgtagatgcaatatatcaacctagtcctttggaacctgtgatcagcacaatgccttcccagactgtgttacctccagaacctgttcagttgtgtaagtcagagcagcgtccatcttccctaccagttggacctgtgttggctaccttgggacatcatcagactcctacaccaaat

SEQ ID NO: 163207 - DNA, 630 bp, Homo sapiens
  Payload ID: 12156
  Gene Symbol: OSBPL9
  Gene Name: oxysterol binding protein-like 9
  ENST ID: ENST00000481937
  CDS Start-End: 533-630
agtcaggaccgcctgcaccgcagtccggggatcgggtcgaggggagaagaaaaaggggtgctcgggagcagcccccggctacctcccctggaggcacagagggcgggggccttggcgaatggctttcttgctggccacttgcggagtgagtagaccccgagggtctgggagaggggccggcccctacccctgagtccccggggtcccggccgccaggccggagcgcgaatgtcgtgctcaccctgcctccttcccgccgccccctgggggtttggattcaggatttgttcctagtgtccaagattttgataagaaacttacagaagctgatgcttacctacaaatcttgattgaacaattaaagctttttgatgacaagcttcaaaactgcaaagaagatgaacagagaaagaaaattgaaactctcaaagagacaacaaatagatgggattctgctatgttgcctaggctggtctcctagcctcaagcgatcctccttccttggcctaccaaagcagtgggattacagagcatggtagaatcaattaaacactgcattgtgttgctgcagattgccaaagaccagagtaatgcggagaagcacgcagatggaatgatagtaagtttaat

SEQ ID NO: 163208 - DNA, 2831 bp, Homo sapiens
  Payload ID: 12156
  Gene Symbol: OSBPL9
  Gene Name: oxysterol binding protein-like 9
  ENST ID: ENST00000495776
  CDS Start-End: 1-223
gtcattggcggctcccaagatggcgtccatcatggaagggccgctgagcaaatggactaacgtgatgaagggctggcagtaccgttggttcgtgctggactacaatgcaggactgctctcctactacacgtccaaggacaaaatgatgagaggctctcgcagaggatgtgttagactcagacccgtgatgctgatgagcgagagaagtggatccatgccttagaagaaacaattcttcgacatactctccagcttcaaggtttggattcaggatttgttcctagtgtccaagattttgataagaaacttacagaagctgatgcttacctacaaatcttgattgaacaattaaagctttttgatgacaagcttcaaaactgcaaagaagatgaacagagaaagaaaattgaaactctcaaagagacaacaaatagcatggtagaatcaattaaacactgcattgtgttgctgcagattgccaaagaccagagtaatgcggagaagcacgcagatggaatgataagtactattaatcccgtagatgcaatatatcaacctagtcctttggaacctgtgatcagcacaatgccttcccagactgtgttacctccagaacctgttcagttgtgtaagtcagagcagcgtccatcttccctaccagttggacctgtgttggctaccttgggacatcatcagactcctacaccaaatagtacaggcagtggccattcaccaccgagtagcagtctcacttctccaagccacgtgaacttgtctccaaatacagtcccagagttctcttactccagcagtgaagatgaattttatgatgctgatgaattccatcaaagtggctcatccccaaagcgcttaatagattcttctggatctgcctcagtcctgacacacagcagctcgggaaatagtctaaaacgcccagataccacagaatcacttaattcttccttgtccaatggaacaagtgatgctgacctgtttgattcacatgatgacagagatgatgatgcggaggcagggtctgtggaggagcacaagagcgttatcatgcatctcttgtcgcaggttagacttggaatggatcttactaaggtagttcttccaacgtttattcttgaaagaagatctcttttagaaatgtatgcagacttttttgcacatccggacctgtttgtgagcattagtgaccagaaggatcccaaggatcgaatggttcaggttgtgaaatggtacctctcagcctttcatgcgggaaggaaaggatcagttgccaaaaagccatacaatcccattttgggcgagatttttcagtgtcattggacattaccaaatgatactgaagagaacacagaactagtttcagaaggaccagttccctgggtttccaaaaacagtgtaacatttgtggctgagcaggtttcccatcatccacccatttcagccttttatgctgagtgttttaacaagaagatacaattcaatgctcatatctggaccaaatcaaaattccttgggatgtcaattggggtgcacaacatagggcagggctgtgtctcatgtctagactatgatgaacattacattctcacattccccaatggctatggaaggtctatcctcacagtgccctgggtggaattaggaggagaatgcaatattaattgttccaaaacaggctatagtgcaaatatcatcttccacactaaacccttctatgggggcaagaagcacagaattactgccgagattttttctccaaatgacaagaagtctttttgctcaattgaaggggaatggaatggtgtgatgtatgcaaaatatgcaacaggggaaaatacagtctttgtagataccaagaagttgcctataatcaagaagaaagtgaggaagttggaagatcagaacgagtatgaatcccgcagcctttggaaggatgtcactttcaacttaaaaatcagagacattgatgcagcaactgaagcaaagcacaggcttgaagaaagacaaagagcagaagcccgagaaaggaaggagaaggaaattcagtgggagacaaggttatttcatgaagatggagaatgctgggtttatgatgaaccattactgaaacgtcttggtgctgccaagcattaggttggaagatgcaaagtttatacctgatgatcagggcagtaggcataattcagcaacaaacaatcttcctttgggagaaacctgttcattccaatcttctaattacagtggttcctatctcagggatactggactttctgacgcagatgaacaattaaggggaaaagcttcccttttccctctgtggcagttacgattttgacttcagtcctgagaaaaacttcaggttttgaaaatcagatgatgtcttctccttttccaaacaccacacgttgaaagcatttataaatccaagtctgaaactctgcgctctagtactgctgttaagatacacaacttgtttcttagttcatataatctcgggatacacacacacacacacatatatatacacacacatacgtatacacacacatacatatatataaatatacctgatgccagatttttttcataaatattctgcctactgtaaatatgggttcctctgagttgttttagaaaattagcgcaatgtattaaaatcaagtgttaggaaatttcatggtcttacctacaataacttttattttggaattgaactattattaaattgtatctaatcctggattacagtttaattaattattcttagtgcttaaggcttcataaagtaatttttccaaccttttttttaaaaa

SEQ ID NO: 163209 - DNA, 663 bp, Homo sapiens
  Payload ID: 12156
  Gene Symbol: OSBPL9
  Gene Name: oxysterol binding protein-like 9
  ENST ID: ENST00000526917
  CDS Start-End: 94-333
cggggatcgggtcgaggggagaagaaaaaggggtgctcgggagcagcccccggctacctcccctggaggcacagagggcgggggccttggcgaatggctttcttgctggccacttgcggaggtttggattcaggatttgttcctagtgtccaagattttgataagaaacttacagaagctgatgcttacctacaaatcttgattgaacaattaaagctttttgatgacaagcttcaaaactgcaaagaagatgaacagagaaagaaaattgaaactctcaaagagacaacaaatagatgggattctgctatgttgcctaggctggtctcctagcctcaagcgatcctccttccttggcctaccaaagcagtgggattacagagcatggtagaatcaattaaacactgcattgtgttgctgcagattgccaaaagtactattaatcccgtagatgcaatatatcaacctagtcctttggaacctgtgatcagcacaatgccttcccagactgtgttacctccagaacctgttcagttgtgtaagtcagagcagcgtccatcttccctaccagttggacctgtgttggctaccttgggacatcatcagactcctacaccaaatagtacaggcagtggccattcaccaccgagtagcagtctcact

SEQ ID NO: 163210 - DNA, 575 bp, Homo sapiens
  Payload ID: 12156
  Gene Symbol: OSBPL9
  Gene Name: oxysterol binding protein-like 9
  ENST ID: ENST00000534040
  CDS Start-End: 254-379
atcaaggtgaaactccggggaccaggctccacagctgccataaactggatggcacgttagaagccggtgggtgtagggtttggattcaggatttgttcctagtgtccaagattttgataagaaacttacagaagctgatgcttacctacaaatcttgattgaacaattaaagctttttgatgacaagcttcaaaactgcaaagaagatgaacagagaaagaaaattgaaactctcaaagagacaacaaatagcatggtagaatcaattaaacactgcattgtgttgctgcagattgccaaaagtacaatcttggtgaggaatttgctcgtcttaccacttgtattagtctgcatgggctgccataacaaaataccatagactgggtggcttaaagaacagaagtttattttctcaccgttctggaagccagaagtccaagatcaacattctggcctgttcagtttctgatgagggtccttctcttggcctgtagatagccatgtcttcacatagtctttccttgagtactattaatcccgtagatgcaatatatcaacctagtcctttggaacct

SEQ ID NO: 163211 - DNA, 863 bp, Homo sapiens
  Payload ID: 12156
  Gene Symbol: OSBPL9
  Gene Name: oxysterol binding protein-like 9
  ENST ID: ENST00000625138
  CDS Start-End: 1-390
gagattttttctccaaatgacaagaagtctttttgctcaattgaaggggaatggaatggtgtgatgtatgcaaaatatgcaacaggggaaaatacagtctttgtagataccaagaagttgcctataatcaagaagaaagtgaggaagttggaagatcagaacgagtatgaatcccgcagcctttggaaggatgtcactttcaacttaaaaatcagagacattgatgcagcaactgaagcaaagcacaggcttgaagaaagacaaagagcagaagcccgagaaaggaaggagaaggaaattcagtgggagacaaggttatttcatgaagatggagaatgctgggtttatgatgaaccattactgaaacgtcttggtgctgccaagcattagggatgagttctcactgtgttgcctggactggtctcgaaatcctgaccttaagtaatgcttctgccttggcctcccaaaatgctgaaattacaggcgtgagccatcattcccagcccagcagtcttcatcttaagaagaaagctgcccagcatcagaggggtcaggttcccttctaaacagaatatgataatgctggcctgccaaaactacagcttcccctttaggaaagaactatggcaattccagagttcacaactgcattcagacctggcctacagagcatctcacactcactgtgcttgtgacattcccttgtaccaggccctccacaaagagctgggatttgaattctttgacgaagctcagcagagactcaagggaaaggccgtccatcaaagcctggtacttgtcaatcatagaccaacgggcatattccaagattaaaagccgtacatctctgtacagagggcaga

SEQ ID NO: 163212 - DNA, 4364 bp, Homo sapiens
  Payload ID: 12157
  Gene Symbol: OXTR
  Gene Name: oxytocin receptor
  Uniprot ID: P30559
  ENST ID: ENST00000316793
  CDS Start-End: 626-1795
atttgttaaggctctgggaccaacgctgggcgaaccagctccgctccggaggggtctgcgcggctggcctcgcccgccccctagcggacccgtgcgatagtgcagcctcagccccagcgcacagcgccgcatccagacgctgtccgcgcgcgcagcctgggaggcgctcctcgctcgcctcctgtacccatccagcgaccagccaggctgcggcgaggggattccaaccgaggctccagtgagagacctcagcttagcatcacattaggtgcagccggcaggccatcccaactcgggccgggagcgcacgcgtcactggggccgtcagtcgccgtgcaacttccccggggggagtcaactttaggttcgcctgcggactcggtgcagtggaagccgctgaacatcccgaggaactggcacgctgggggctctgggcttgtggccggtagaggattcccgctcatttgcagtggctcagaggagggtggacccagcagatccgtccgtggagtctccaggagtggagccccgggcgcccctacaccctccgacacgccggatccggcccagccgcgccaagccgtaaagggctcgaaggccggggcgcaccgctgccgccagggtcatggagggcgcgctcgcagccaactggagcgccgaggcagccaacgccagcgccgcgccgccgggggccgagggcaaccgcaccgccggacccccgcggcgcaacgaggccctggcgcgcgtggaggtggcggtgctgtgtctcatcctgctcctggcgctgagcgggaacgcgtgtgtgctgctggcgctgcgcaccacacgccagaagcactcgcgcctcttcttcttcatgaagcacctaagcatcgccgacctggtggtggcagtgtttcaggtgctgccgcagttgctgtgggacatcaccttccgcttctacgggcccgacctgctgtgccgcctggtcaagtacttgcaggtggtgggcatgttcgcctccacctacctgctgctgctcatgtccctggaccgctgcctggccatctgccagccgctgcgctcgctgcgccgccgcaccgaccgcctggcagtgctcgccacgtggctcggctgcctggtggccagcgcgccgcaggtgcacatcttctctctgcgcgaggtggctgacggcgtcttcgactgctgggccgtcttcatccagccctggggacccaaggcctacatcacatggatcacgctagctgtctacatcgtgccggtcatcgtgctcgctgcctgctacggccttatcagcttcaagatctggcagaacttgcggctcaagaccgctgcagcggcggcggccgaggcgccagagggcgcggcggctggcgatggggggcgcgtggccctggcgcgtgtcagcagcgtcaagctcatctccaaggccaagatccgcacggtcaagatgactttcatcatcgtgctggccttcatcgtgtgctggacgcctttcttcttcgtgcagatgtggagcgtctgggatgccaacgcgcccaaggaagcctcggccttcatcatcgtcatgctcctggccagcctcaacagctgctgcaacccctggatctacatgctgttcacgggccacctcttccacgaactcgtgcagcgcttcctgtgctgctccgccagctacctgaagggcagacgcctgggagagacgagtgccagcaaaaagagcaactcgtcctcctttgtcctgagccatcgcagctccagccagaggagctgctcccagccatccacggcgtgacccaccagccagggccagggctgcagcctgaggctcaggctgtgctggcataagtgctctgctcctaggtgatggcgtatgtttgtgtataaggtacctatcagtttgtatccctcccctccttggggtggcttcagtggggtggagagtggcctccatgatggaagatgataggggactcagccatcagacaacaccctggcctcctacacgtacttctaccaccctgaacccactgctgccctgggcagtgagtggcttgttttttctcctggacttgtaatttcactccagtatatttttacttcttcattctgggatattgtgaaaagcggtaaatataggattggtgaccaattgggtcaggaagtccagtgttctggacttggggtaagcagtggggttgggacctcagatgggaagggtggtgctaagatcctcctgacctcaaagtgtatttgcctttaagcgaacaaatgctggggtccttggggaccagcttgtcagagggtagccctaagagaaggggattaccttgtaagaccatctggcgcagtggacctattagaacttgggttaaaaatgtttaagaagctaatgtttaagaagcatttgggaaagaaaaagaaataaatgtatccagataggaaaagaagaagtaaaactatttgcagatgacacagttttgtatatagaaaatcctaaggaactcacacacacacacacacacacacacgcacacagctattagaactaataagcaagttccgcaaggtttcaagatacaagatcaatatacaaaaatgaattgtatttctttatactagcaacaaacaatatgaaaacgaagttaaataattccatttataataccatcagaaagaataaaataggaatcaacttaacaaaacaagtgcaagactgaaaactacaaaattggaaagaaattaaagaaggcttaaataaatggaaagacatcctgtgttcatggatcagacttagtattgttaagatggcaatactatcctaactgacatgcagattcagtgcaatccttatgaaaatcatagctggcttctttacagaaattgataagctagtcccaaaattcataaagaaatgcaagggacccagaatatccaaataagccttgaaaaagaacaaagttggtggattcacacttcctgatttcataatttacgataaaggtaatcagctcagtgtgttactggtttaaggatagacatacggagcagaataaagagtacagatatgaacacttatacttacggtcaattgatttttgacaaggttcccaagacaattcaatagagaaaggagagtcttttcaacaaatggcaccgagacaatgatatgcaagtgcaaaagaatgaggttggacctttactcacactatgtgcaaaaatcaactcaaaacgcatccaagatctaaatataagagctgaaactataaaatcttagaaagaaacataggcatagatctttgtaaccttgaattaggcagtggtttcttagatatgataccaaagacacaagcaaccaatggaaaaataggtaaattggacttaatcaagatttgaagcttttgtgattgaaaagaccctatcaagaaggtgaaaagataacctgcagaatgggagaaaatatttgcgagtcatatatatgataaggggcttgtatctggaatatataaataactcttataacacaacaataaggagaaaaataaatcaatttaaaaaatgggctaacggtttgaatagacatttctccaaagaagatatgcaaatggctactaagcacatgaaaaaatactcaacattattattcattagggaaatgcaagtcaaaatcacaatgagattccagtttacaatcactaggatggctacaataaaaagatggacaagaacgagtgtcggtgaggatgtagagaaactggtagaaatttaaattgttggtgggaatgtaaatggtgcacctgctttgaaaaacagtttggcagtacctcaaaaagttaaacgtagagtgaccatatgacccaggaatgccactcctaggtatttacccaagagaaatgaaaacgtacatacacacaaaaacttgtacaccaatgttcatagcaacattatttgtaatagccaaaaagtggaaacaacccaaatgtctaccaactgatgaatgggaaataaaatgtggtctgtccacgcaatggaacattattagactctaaaaagaaatgaagtactcacacatgccacaacatggatgagccttgaaaacttgctaagtgaaagaagccaggtgcaaaagcccacatattgtctgactgcattgaaatgcaatgtctaaaatggacgaatctatatagagtgaatatagattagcgtttgccagggcctggaggctgtgagagatgaggcatgactactaagggtttggggtttctttttcgggtgatgaaaatgttctgaaattagtggtgattgtgcacgattttgagaatgtactaaaaaccaatgaactttaaaaaataaaaataaacaaa

SEQ ID NO: 163213 - DNA, 600 bp, Homo sapiens
  Payload ID: 12157
  Gene Symbol: OXTR
  Gene Name: oxytocin receptor
  ENST ID: ENST00000449615
  CDS Start-End: 325-600
tggagattccctcggggaggtgatttggttttagattcccactcccggaggaacgttgctgattttgaccctcccttctcccccagtggaagccgctgaacatcccgaggaactggcacgctgggggctctgggcttgtggccggtagaggattcccgctcatttgcagtggctcagaggagggtggacccagcagatccgtccgtggagtctccaggagtggagccccgggcgcccctacaccctccgacacgccggatccggcccagccgcgccaagccgtaaagggctcgaaggccggggcgcaccgctgccgccagggtcatggagggcgcgctcgcagccaactggagcgccgaggcagccaacgccagcgccgcgccgccgggggccgagggcaaccgcaccgccggacccccgcggcgcaacgaggccctggcgcgcgtggaggtggcggtgctgtgtctcatcctgctcctggcgctgagcgggaacgcgtgtgtgctgctggcgctgcgcaccacacgccagaagcactcgcgcctcttcttcttcatgaagcacctaagcatcgccgacctggtggtggcagtgtttcag

SEQ ID NO: 163214 - DNA, 743 bp, Homo sapiens
  Payload ID: 12157
  Gene Symbol: OXTR
  Gene Name: oxytocin receptor
  ENST ID: ENST00000431493
  CDS Start-End: 614-743
aaaataaacccatttgttaaggctctgggaccaacgctgggcgaaccagctccgctccggaggggtctgcgcggctggcctcgcccgccccctagcggacccgtgcgatagtgcagcctcagccccagcgcacagcgccgcatccagacgctgtccgcgcgcgcagcctgggaggcgctcctcgctcgcctcctgtacccatccagcgaccagccaggctgcggcgaggggattccaaccgaggctccagtgagagacctcagcttagcatcacattaggtgcagccggcaggccatcccaactcgggccgggagcgcacgcgtcactggggccgtcagtcgccgtgcaacttccccggggggagtcaactttagtggaagccgctgaacatcccgaggaactggcacgctgggggctctgggcttgtggccggtagaggattcccgctcatttgcagtggctcagaggagggtggacccagcagatccgtccgtggagtctccaggagtggagccccgggcgcccctacaccctccgacacgccggatccggcccagccgcgccaagccgtaaagggctcgaaggccggggcgcaccgctgccgccagggtcatggagggcgcgctcgcagccaactggagcgccgaggcagccaacgccagcgccgcgccgccgggggccgagggcaaccgcaccgccggacccccgcggcgcaacgaggccctggcgcgcgtggaggtgg

SEQ ID NO: 163215 - DNA, 513 bp, Homo sapiens
  Payload ID: 12158
  Gene Symbol: OXT
  Gene Name: oxytocin/neurophysin I prepropeptide
  Uniprot ID: P01178
  ENST ID: ENST00000217386
  CDS Start-End: 37-414
accagtcacggaccctggacccagcgcacccgcaccatggccggccccagcctcgcttgctgtctgctcggcctcctggcgctgacctccgcctgctacatccagaactgccccctgggaggcaagagggccgcgccggacctcgacgtgcgcaagtgcctcccctgcggccccgggggcaaaggccgctgcttcgggcccaatatctgctgcgcggaagagctgggctgcttcgtgggcaccgccgaagcgctgcgctgccaggaggagaactacctgccgtcgccctgccagtccggccagaaggcgtgcgggagcgggggccgctgcgcggtcttgggcctctgctgcagcccggacggctgccacgccgaccctgcctgcgacgcggaagccaccttctcccagcgctgaaacttgatggctccgaacaccctcgaagcgcgccactcgcttcccccatagccaccccagaaatggtgaaaataaaataaagcaggtttttctcctcta

SEQ ID NO: 163216 - DNA, 665 bp, Homo sapiens
  Payload ID: 12159
  Gene Symbol: PAGE1
  Gene Name: P antigen family, member 1 (prostate associated)
  Uniprot ID: O75459
  ENST ID: ENST00000376150
  CDS Start-End: 134-574
gcccacgtggagaacgccagggagctgtgagagtgtgcagtcgcgttcctgctgtccggacacttttttcctctactgagactcatctggtagatccgcaggccagtcctcccaggggctgaagttgtgaaatatgggttttctaagaagattaatctatcggcgtagaccaatgatctatgtagaatcttctgaggagtccagtgatgagcaacctgacgaagtggaatcaccaactcaaagtcaggattctacacctgctgaagagagagaggatgagggagcatctgcagctcaagggcaggagcctgaagctgatagccaggaactggttcagccaaagactgggtgtgagcttggagatggtcctgataccaagagggtgtgcctgcgaaatgaagagcagatgaaactgcccgcagaagggccagagcctgaagcggatagccaggaacaggttcacccgaagactgggtgtgagcgcggagatggtcctgatgtccaggagttgggcctgccaaatccagaggaggtgaaaacacctgaggaagatgaagggcaatcacagccttaaaagaagacacgctgaaatggttcaggctgctcctgtgttggaaatttgaccattaaaattctcccaataaagctttacagccttctgcaaa

SEQ ID NO: 163217 - DNA, 456 bp, Homo sapiens
  Payload ID: 12160
  Gene Symbol: PAGE2
  Gene Name: P antigen family, member 2 (prostate associated)
  ENST ID: ENST00000374965
  CDS Start-End: 61-345
tcttcattctttccgccatcttgattctttctcactgaccaagactcagccgtgggaaatatgagtgagcttctaagagcaagatcccaatcctcagaaagaggaaatgaccaagagtcttcccagccggttggatctgtgattgtccaggagcccactgaggaaaaacgtcaagaagaggaaccaccaactgataatcaggggcctgacatggaagcttttcaacaggaactggctctgcttaagatagaggatgagcctggagatggtcctgatgtcagggagggtattatgcccacttttgatctcactaaagtgctggaagcaggtgatgcgcaaccataggtttcaagcaagacaaatgaagactgaaaccaagaacgttattcttaatctggaaatttgactgataatattctcttaataaagttttaagttttctgcaaagaatcctta

SEQ ID NO: 163218 - DNA, 551 bp, Homo sapiens
  Payload ID: 12160
  Gene Symbol: PAGE2
  Gene Name: P antigen family, member 2 (prostate associated)
  Uniprot ID: Q7Z2X7
  ENST ID: ENST00000374968
  CDS Start-End: 105-440
tgcccgtcttgtgtccgcacagaggtctgcaaggagagagagtgtcttcattctttccgccatcttgattctttctcactgaccaagactcagccgtgggaaatatgagtgagcttctaagagcaagatcccaatcctcagaaagaggaaatgaccaagagtcttcccagccggttggatctgtgattgtccaggagcccactgaggaaaaacgtcaagaagaggaaccaccaactgataatcagggtattgcacctagtggggagattgaaaatcaagcagtgcctgcttttcaagggcctgacatggaagcttttcaacaggaactggctctgcttaagatagaggatgagcctggagatggtcctgatgtcagggagggtattatgcccacttttgatctcactaaagtgctggaagcaggtgatgcgcaaccataggtttcaagcaagacaaatgaagactgaaaccaagaacgttattcttaatctggaaatttgactgataatattctcttaataaagttttaagttttctgcaaagaatcctta

SEQ ID NO: 163219 - DNA, 311 bp, Homo sapiens
  Payload ID: 12160
  Gene Symbol: PAGE2
  Gene Name: P antigen family, member 2 (prostate associated)
  ENST ID: ENST00000449097
  CDS Start-End: 119-311
agttgtgagagaatgtgtggaggagccagctggctttggacaggtcctgcggcacagtctgtggcttctgagggaaaagggcctcggggccgtcatccagctcctcccagtgggaaatatgagtgagcttctaagagcaagatcccaatcctcagaaagaggaaatgaccaagagtcttcccagccggttggatctgtgattgtccaggagcccactgaggaaaaacgtcaagaagaggaaccaccaactgataatcagggtattgcacctagtggggagattgaaaatcaagcagtgcctgcttttcaag

SEQ ID NO: 163220 - DNA, 493 bp, Homo sapiens
  Payload ID: 12161
  Gene Symbol: PAGE2B
  Gene Name: P antigen family, member 2B
  Uniprot ID: Q5JRK9
  ENST ID: ENST00000374971
  CDS Start-End: 53-388
ctttccgccatcttgattctttgtcactgaccgagactcagccgtgggaaatatgagtgagcatgtgagaacaagatcccaatcctcagaaagaggaaatgaccaagagtcttcccagccagttggatctgtgattgtccaggagcccactgaggaaaaacgtcaagaagaggaaccaccaactgataatcagggtattgcacctagtggggagatcgaaaatgaaggagcacctgccgttcaagggcctgacatggaagcttttcaacaggaactggctctgcttaagatagaggatgagcctggagatggtcctgatgtcagggaggggattatgcccacttttgatctcactaaagtgctggaagcaggtgatgcgcaaccataggtttcaagcaagacaaatgaagactgaaaccaagaacgttattcttaatctggaaatttgactgataatattctcttaataaagttttaagttttctgcaaagaa

SEQ ID NO: 163221 - DNA, 456 bp, Homo sapiens
  Payload ID: 12161
  Gene Symbol: PAGE2B
  Gene Name: P antigen family, member 2B
  ENST ID: ENST00000374974
  CDS Start-End: 61-345
tcttcattctttccgccatcttgattctttgtcactgaccgagactcagccgtgggaaatatgagtgagcatgtgagaacaagatcccaatcctcagaaagaggaaatgaccaagagtcttcccagccagttggatctgtgattgtccaggagcccactgaggaaaaacgtcaagaagaggaaccaccaactgataatcaggggcctgacatggaagcttttcaacaggaactggctctgcttaagatagaggatgagcctggagatggtcctgatgtcagggaggggattatgcccacttttgatctcactaaagtgctggaagcaggtgatgcgcaaccataggtttcaagcaagacaaatgaagactgaaaccaagaacgttattcttaatctggaaatttgactgataatattctcttaataaagttttaagttttctgcaaagaatcctta

SEQ ID NO: 163222 - DNA, 745 bp, Homo sapiens
  Payload ID: 12162
  Gene Symbol: PAGE3
  Gene Name: P antigen family, member 3 (prostate associated)
  Uniprot ID: Q5JUK9
  ENST ID: ENST00000374951
  CDS Start-End: 310-651
cttcattctttctcactgactgggactcagctggtaggtccgcagatcagtcctcctgggaatttagttgtgagtgaatgtgaaggggagccagcgggctttggacaggtcctgcggcacagaaaccacagtccgtggcttctgagagaaaagggcctcgccgtcgacgtccggctcctcccaggtcgcgacgccccatgggcctttgtcgtcgtttctgggccaggacgacggaggaaggtggaccgtagaggggaggaatcacgtgaagatggggcgagtgctgggcgtgctgttggagagtgaaacatgagtggacatcaaagaacaagatccagatctagagaaagaagagatgatcaagactctaatcatccagtaggggctgtggttgcccaggagctgcccagtaatgaccagcttcaacaagaggaaccaccaattgaaagtcaggattatacacctggtcaagagagagacgagggagcactggacttccaagtgctaggcctggcagcctatctctgggaactgactcggtcaaagactgggggtgaacgtggagatggtcctaatgtcaagggagaatttctgccaaatctggagcctgttaaaataccagaagcaggtgaagggcaaccatcggtttaaatgaagacaagctgaaaccatacatgcagtctttatgttggaaacttcaccagtaaaattctctcaataaagtttcacaattgtctgcaaagaa

SEQ ID NO: 163223 - DNA, 577 bp, Homo sapiens
  Payload ID: 12162
  Gene Symbol: PAGE3
  Gene Name: P antigen family, member 3 (prostate associated)
  Uniprot ID: Q5JUK9
  ENST ID: ENST00000519203
  CDS Start-End: 208-549
gcacagaaaccacagtccgtggcttctgagagaaaagggcctcgccgtcgacgtccggctcctcccaggtcgcgacgccccatgggcctttgtcgtcgtttctgggccaggacgacggaggaaggtggaccgtagaggggaggaatcacgtgaagatggggcgagtgctgggcgtgctgttggagtatgccactttcagagtgaaacatgagtggacatcaaagaacaagatccagatctagagaaagaagagatgatcaagactctaatcatccagtaggggctgtggttgcccaggagctgcccagtaatgaccagcttcaacaagaggaaccaccaattgaaagtcaggattatacacctggtcaagagagagacgagggagcactggacttccaagtgctaggcctggcagcctatctctgggaactgactcggtcaaagactgggggtgaacgtggagatggtcctaatgtcaagggagaatttctgccaaatctggagcctgttaaaataccagaagcaggtgaagggcaaccatcggtttaaatgaagacaagctgaaaccatacatgca

SEQ ID NO: 163224 - DNA, 499 bp, Homo sapiens
  Payload ID: 12163
  Gene Symbol: PAGE4
  Gene Name: P antigen family, member 4 (prostate associated)
  Uniprot ID: O60829
  ENST ID: ENST00000218068
  CDS Start-End: 80-388
gccacttctcttcccttcattcttcgccaggctctctgctgactcaagttcttcagttcacgatcttctagttgcagcgatgagtgcacgagtgagatcaagatccagaggaagaggagatggtcaggaggctcccgatgtggttgcattcgtggctcccggtgaatctcagcaagaggaaccaccaactgacaatcaggatattgaacctggacaagagagagaaggaacacctccgatcgaagaacgtaaagtagaaggtgattgccaggaaatggatctggaaaagactcggagtgagcgtggagatggctctgatgtaaaagagaagactccacctaatcctaagcatgctaagactaaagaagcaggagatgggcagccataagttaaaaagaagacaagctgaagctacacacatggctgatgtcacattgaaaatgtgactgaaaatttgaaaattctctcaataaagtttgagttttctctgaagaagtca

SEQ ID NO: 163225 - DNA, 487 bp, Homo sapiens
  Payload ID: 12163
  Gene Symbol: PAGE4
  Gene Name: P antigen family, member 4 (prostate associated)
  Uniprot ID: O60829
  ENST ID: ENST00000376141
  CDS Start-End: 68-376
tgacactgctgaggtctaaacaaggaggcagaagtagtcttcagttcacgatcttctagttgcagcgatgagtgcacgagtgagatcaagatccagaggaagaggagatggtcaggaggctcccgatgtggttgcattcgtggctcccggtgaatctcagcaagaggaaccaccaactgacaatcaggatattgaacctggacaagagagagaaggaacacctccgatcgaagaacgtaaagtagaaggtgattgccaggaaatggatctggaaaagactcggagtgagcgtggagatggctctgatgtaaaagagaagactccacctaatcctaagcatgctaagactaaagaagcaggagatgggcagccataagttaaaaagaagacaagctgaagctacacacatggctgatgtcacattgaaaatgtgactgaaaatttgaaaattctctcaataaagtttgagttttctctgaagaagtca

SEQ ID NO: 163226 - DNA, 741 bp, Homo sapiens
  Payload ID: 12164
  Gene Symbol: PAGE5
  Gene Name: P antigen family, member 5 (prostate associated)
  Uniprot ID: Q96GU1
  ENST ID: ENST00000289619
  CDS Start-End: 246-638
aggcagagctctgcaaggagaggttgtgtcttcgttctttccgccatcttcgttctttccaacatcttcgttctttctcactgaccgagactcagccggtaggtctgcagagtggtcttcctggtaatttagttgtgagtgaatgtgtggaggagccagcgggcttaggacaggtcccgtggcacagtccgtggctttgagggaaaagggcctcgcggtggtcctccgccttcccccaggtcctgatgcaggcgccatgggccggtaatcgtggctgggctggaacgagggaggaagtgagagatatgagtgagcatgtaacaagatcccaatcctcagaaagaggaaatgaccaagagtcttcccagccagttggacctgtgattgtccagcagcccactgaggaaaaacgtcaagaagaggaaccaccaactgataatcagggtattgcacctagtggggagatcaaaaatgaaggagcacctgctgttcaagggactgatgtggaagcttttcaacaggaactggctctgcttaagatagaggatgcacctggagatggtcctgatgtcagggaggggactctgcccacttttgatcccactaaagtgctggaagcaggtgaagggcaactataggtttaaaccaagacaaatgaagactgaaaccaagaatattgttcttatgctggaaatttgactgctaacattctcttaataaagttttacagttttctgcaaa

SEQ ID NO: 163227 - DNA, 428 bp, Homo sapiens
  Payload ID: 12164
  Gene Symbol: PAGE5
  Gene Name: P antigen family, member 5 (prostate associated)
  ENST ID: ENST00000374952
  CDS Start-End: 42-323
cttcgttctttctcactgaccgagactcagccgtgagagatatgagtgagcatgtaacaagatcccaatcctcagaaagaggaaatgaccaagagtcttcccagccagttggacctgtgattgtccagcagcccactgaggaaaaacgtcaagaagaggaaccaccaactgataatcaggggactgatgtggaagcttttcaacaggaactggctctgcttaagatagaggatgcacctggagatggtcctgatgtcagggaggggactctgcccacttttgatcccactaaagtgctggaagcaggtgaagggcaactataggtttaaaccaagacaaatgaagactgaaaccaagaatattgttcttatgctggaaatttgactgctaacattctcttaataaagttttacagttttctgcaaaga

SEQ ID NO: 163228 - DNA, 540 bp, Homo sapiens
  Payload ID: 12164
  Gene Symbol: PAGE5
  Gene Name: P antigen family, member 5 (prostate associated)
  Uniprot ID: Q96GU1
  ENST ID: ENST00000374955
  CDS Start-End: 105-437
gcagagctctgcaaggagaggttgtgtcttcgttctttccgccatcttcgttctttccaacatcttcgttctttctcactgaccgagactcagccgtgagagatatgagtgagcatgtaacaagatcccaatcctcagaaagaggaaatgaccaagagtcttcccagccagttggacctgtgattgtccagcagcccactgaggaaaaacgtcaagaagaggaaccaccaactgataatcagggtattgcacctagtggggagatcaaaaatgaaggagcacctgctgttcaagggactgatgtggaagcttttcaacaggaactggctctgcttaagatagaggatgcacctggagatggtcctgatgtcagggaggggactctgcccacttttgatcccactaaagtgctggaagcaggtgaagggcaactataggtttaaaccaagacaaatgaagactgaaaccaagaatattgttcttatgctggaaatttgactgctaacattctcttaataaagttttacagttttctgcaaa

SEQ ID NO: 163229 - DNA, 2543 bp, Homo sapiens
  Payload ID: 12165
  Gene Symbol: PAK1
  Gene Name: p21 protein (Cdc42/Rac)-activated kinase 1
  Uniprot ID: Q13153
  ENST ID: ENST00000278568
  CDS Start-End: 531-2192
cctcccgcggctgcagccggagccgaaggtggtggctgcacagtagacgccccctcacggcttcccccacacgctcccgccccctcgctcgcccatcgcgcttccctcacaggctctgcagtcctcccccacagacgccttcccccttggactctcattcccttttccacggagccccgcgctttcgtgagccccctcgaggaacctggtctccgcatccagttaccacctcctgcctcagaggccatctgagcccttcgcacctcgcccctcagtccccccttccccccccgcccgcgtcgcctcgctccctcccgcccccccatcatcccttccctcgcagttcccctgtcctgaggggagccccgccacgggcagcgcggcggcggcggcaggagggagaaagtgaagcggtagctcgcgcacactcgcgccctcactcccggctaggcggcacccaccgccgggaggaggaggaggagccgagaggagctgagcgagcgcggaagtagctgctgctggtggtgacaatgtcaaataacggcctagacattcaagacaaacccccagcccctccgatgagaaataccagcactatgattggagccggcagcaaagatgctggaaccctaaaccatggttctaaacctctgcctccaaacccagaggagaagaaaaagaaggaccgattttaccgatccattttacctggagataaaacaaataaaaagaaagagaaagagcggccagagatttctctcccttcagattttgaacacacaattcatgtcggttttgatgctgtcacaggggagtttacgggaatgccagagcagtgggcccgcttgcttcagacatcaaatatcactaagtcggagcagaagaaaaacccgcaggctgttctggatgtgttggagttttacaactcgaagaagacatccaacagccagaaatacatgagctttacagataagtcagctgaggattacaattcttctaatgccttgaatgtgaaggctgtgtctgagactcctgcagtgccaccagtttcagaagatgaggatgatgatgatgatgatgctaccccaccaccagtgattgctccacgcccagagcacacaaaatctgtatacacacggtctgtgattgaaccacttcctgtcactccaactcgggacgtggctacatctcccatttcacctactgaaaataacaccactccaccagatgctttgacccggaatactgagaagcagaagaagaagcctaaaatgtctgatgaggagatcttggagaaattacgaagcatagtgagtgtgggcgatcctaagaagaaatatacacggtttgagaagattggacaaggtgcttcaggcaccgtgtacacagcaatggatgtggccacaggacaggaggtggccattaagcagatgaatcttcagcagcagcccaagaaagagctgattattaatgagatcctggtcatgagggaaaacaagaacccaaacattgtgaattacttggacagttacctcgtgggagatgagctgtgggttgttatggaatacttggctggaggctccttgacagatgtggtgacagaaacttgcatggatgaaggccaaattgcagctgtgtgccgtgagtgtctgcaggctctggagttcttgcattcgaaccaggtcattcacagagacatcaagagtgacaatattctgttgggaatggatggctctgtcaagctaactgactttggattctgtgcacagataaccccagagcagagcaaacggagcaccatggtaggaaccccatactggatggcaccagaggttgtgacacgaaaggcctatgggcccaaggttgacatctggtccctgggcatcatggccatcgaaatgattgaaggggagcctccatacctcaatgaaaaccctctgagagccttgtacctcattgccaccaatgggaccccagaacttcagaacccagagaagctgtcagctatcttccgggactttctgaaccgctgtctcgagatggatgtggagaagagaggttcagctaaagagctgctacaggtgagaaaactgaggtttcaagtgtttagtaacttttccatgatagctgcatcaattcctgaagattgccaagcccctctccagcctcactccactgattgctgcagctaaggaggcaacaaagaacaatcactaaaaccacactcaccccagcctcattgtgccaagccttctgtgagataaatgcacatttcagaaattccaactcctgatgccctcttctccttgccttgcttctcccatttcctgatctagcactcctcaagactttgatccttggaaaccgtgtgtccagcattgaagagaactgcaactgaatgactaatcagatgatggccatttctaaataaggaatttcctcccaattcatggatatgagggtggtttatgattaagggtttatataaataaatgtttctagtcttccgtgtgtcaaaatcctcacctccttcataaccatct

SEQ ID NO: 163230 - DNA, 3737 bp, Homo sapiens
  Payload ID: 12165
  Gene Symbol: PAK1
  Gene Name: p21 protein (Cdc42/Rac)-activated kinase 1
  Uniprot ID: Q13153
  ENST ID: ENST00000356341
  CDS Start-End: 533-2170
gccctcccgcggctgcagccggagccgaaggtggtggctgcacagtagacgccccctcacggcttcccccacacgctcccgccccctcgctcgcccatcgcgcttccctcacaggctctgcagtcctcccccacagacgccttcccccttggactctcattcccttttccacggagccccgcgctttcgtgagccccctcgaggaacctggtctccgcatccagttaccacctcctgcctcagaggccatctgagcccttcgcacctcgcccctcagtccccccttccccccccgcccgcgtcgcctcgctccctcccgcccccccatcatcccttccctcgcagttcccctgtcctgaggggagccccgccacgggcagcgcggcggcggcggcaggagggagaaagtgaagcggtagctcgcgcacactcgcgccctcactcccggctaggcggcacccaccgccgggaggaggaggaggagccgagaggagctgagcgagcgcggaagtagctgctgctggtggtgacaatgtcaaataacggcctagacattcaagacaaacccccagcccctccgatgagaaataccagcactatgattggagccggcagcaaagatgctggaaccctaaaccatggttctaaacctctgcctccaaacccagaggagaagaaaaagaaggaccgattttaccgatccattttacctggagataaaacaaataaaaagaaagagaaagagcggccagagatttctctcccttcagattttgaacacacaattcatgtcggttttgatgctgtcacaggggagtttacgggaatgccagagcagtgggcccgcttgcttcagacatcaaatatcactaagtcggagcagaagaaaaacccgcaggctgttctggatgtgttggagttttacaactcgaagaagacatccaacagccagaaatacatgagctttacagataagtcagctgaggattacaattcttctaatgccttgaatgtgaaggctgtgtctgagactcctgcagtgccaccagtttcagaagatgaggatgatgatgatgatgatgctaccccaccaccagtgattgctccacgcccagagcacacaaaatctgtatacacacggtctgtgattgaaccacttcctgtcactccaactcgggacgtggctacatctcccatttcacctactgaaaataacaccactccaccagatgctttgacccggaatactgagaagcagaagaagaagcctaaaatgtctgatgaggagatcttggagaaattacgaagcatagtgagtgtgggcgatcctaagaagaaatatacacggtttgagaagattggacaaggtgcttcaggcaccgtgtacacagcaatggatgtggccacaggacaggaggtggccattaagcagatgaatcttcagcagcagcccaagaaagagctgattattaatgagatcctggtcatgagggaaaacaagaacccaaacattgtgaattacttggacagttacctcgtgggagatgagctgtgggttgttatggaatacttggctggaggctccttgacagatgtggtgacagaaacttgcatggatgaaggccaaattgcagctgtgtgccgtgagtgtctgcaggctctggagttcttgcattcgaaccaggtcattcacagagacatcaagagtgacaatattctgttgggaatggatggctctgtcaagctaactgactttggattctgtgcacagataaccccagagcagagcaaacggagcaccatggtaggaaccccatactggatggcaccagaggttgtgacacgaaaggcctatgggcccaaggttgacatctggtccctgggcatcatggccatcgaaatgattgaaggggagcctccatacctcaatgaaaaccctctgagagccttgtacctcattgccaccaatgggaccccagaacttcagaacccagagaagctgtcagctatcttccgggactttctgaaccgctgtctcgagatggatgtggagaagagaggttcagctaaagagctgctacagcatcaattcctgaagattgccaagcccctctccagcctcactccactgattgctgcagctaaggaggcaacaaagaacaatcactaaaaccacactcaccccagcctcattgtgccaagccttctgtgagataaatgcacatttcagaaattccaactcctgatgccctcttctccttgccttgcttctcccatttcctgatctagcactcctcaagactttgatccttggaaaccgtgtgtccagcattgaagagaactgcaactgaatgactaatcagatgatggccatttctaaataaggaatttcctcccaattcatggatatgagggtggtttatgattaagggtttatataaataaatgtttctagtcttccgtgtgtcaaaatcctcacctccttcataaccatctcccacaattaattcttgactatataaatttatggtttgataatattatcaatttgtaatcaattgagatttctttagtgcttgcttttctgtgactcaactgcccagacacctcattgtacttgaaaactggaacagcttgggaatgccatggggtttgataatctgccagggacatgaagaggctcagcttcctggaccatgactttggctcagctgatcctgacatgggagaacaaccacatttttctttgtgtgtgcttctagcagctgttcgggaggaccttgacccaatagtgttcccatgctgtttcttgtgaaatgctctcggctatgtagcagcttttgattccctgcataccctaggctgctgcccctatcctgtcccttgtttataacattgagaggttttctagggcacatactgagtgagagcagtgttgagaagtcggggaaaatggtgactacttttagagcaaggctgggcatcagcacctgtccagctctacttgtgtgatgtttcaggaactcagcccctttttctgcctaggataaggagctgaaagattaacttggatcttctaatggtccaaatcttttggtcacaataaagagtctccaaattagagactgcatgttagttctggatggatttggtggcctgacatgataccctgccagctgtgaggggaccccgtttttaagatgcatggccaagctctctgcaaatggaaatgcttacactgggtgttggggatgtttgctacctcctgctatttttgtggttttggttctcccactatggtaggacccctggccagcattgtggcttgtcatgtcagccccattgactaccttctcatgctctgaggtactactgcctctgcagcacaaatttctatttctgtcaataaaaggagatgaaaatattctattggagtatgcctttcttttttctcttcgttttttctttccttttctaattttttatatgaaataatgagtagtttcttcctgaaccatttgagagtggtaagttgcagatagaatgcccctttaccactatatacctgaatgtgtattctttctttttaacacttttattttaaatataaattaagagaaatgggccaaaaccatttgtattgtttaaagaataattataaacacacttgtatccaccaaatcaagaaatggaacactgacagtaagaaccttctctatcttgtccttcctttctca

SEQ ID NO: 163231 - DNA, 878 bp, Homo sapiens
  Payload ID: 12165
  Gene Symbol: PAK1
  Gene Name: p21 protein (Cdc42/Rac)-activated kinase 1
  ENST ID: ENST00000533285
  CDS Start-End: 1-733
tgcttcaggcaccgtgtacacagcaatggatgtggccacaggacaggaggtggccattaagcagatgaatcttcagcagcagcccaagaaagagctgattattaatgagatcctggtcatgagggaaaacaagaacccaaacattgtgaattacttggacagttacctcgtgggagatgagctgtgggttgttatggaatacttggctggaggctccttgacagatgtggtgacagaaacttgcatggatgaaggccaaattgcagctgtgtgccgtgagtgtctgcaggctctggagttcttgcattcgaaccaggtcattcacagagacatcaagagtgacaatattctgttgggaatggatggctctgtcaagctaactgactttggattctgtgcacagataaccccagagcagagcaaacggagcaccatggtaggaaccccatactggatggcaccagaggttgtgacacgaaaggcctatgggcccaaggttgacatctggtccctgggcatcatggccatcgaaatgattgaaggggagcctccatacctcaatgaaaaccctctgagagccttgtacctcattgccaccaatgggaccccagaacttcagaacccagagaagctgtcagctatcttccgggactttctgaaccgctgtctcgagatggatgtggagaagagaggttcagctaaagagctgctacaggctttggtatcaggatgatgctggcctcataaaatgagttagggaggattccctctttttctgttgattggaatagtttcagaaggaatggtaccatttcctccttgtacctctggtacaattcggctgtgaatccatctggtcctggactctttttggttgg

SEQ ID NO: 163232 - DNA, 1047 bp, Homo sapiens
  Payload ID: 12165
  Gene Symbol: PAK1
  Gene Name: p21 protein (Cdc42/Rac)-activated kinase 1
  ENST ID: ENST00000527457
  CDS Start-End: 1-503
caaatatcactaagtcggagcagaagaaaaacccgcaggctgttctggatgtgttggagttttacaactcgaagaagacatccaacagccagaaatacatgagctttacagataagtcagctgaggattacaattcttctaatgccttgaatgtgaaggctgtgtctgagactcctgcagtgccaccagtttcagaagatgaggatgatgatgatgatgatgctaccccaccaccagtgattgctccacgcccagagcacacaaaatctgtatacacacggtctgtgattgaaccacttcctgtcactccaactcgggacgtggctacatctcccatttcacctactgaaaataacaccactccaccagatgctttgacccggaatactgagaagcagaagaagaagcctaaaatgtctgatgaggagatcttggagaaattacttacctcgtgggagatgagctgtgggttgttatggaatacttggctggaggctccttgacagatgtggtgacagaaacttgcatggatgaaggccaaattgcagctgtgtgccgtgagctgactttggattctgtgcacagataaccccagagcagagcaaacggagcaccatggtaggaaccccatactggatggcaccagaggttgtgacacgaaaggcctatgggcccaaggttgacatctggtccctgggcatcatggccatcgaaatgattgaaggggagcctccatacctcaatgaaaaccctctgagagccttgtacctcattgccaccaatgggaccccagaacttcagaacccagagaagctgtcagctatcttccgggactttctgaaccgctgtctcgagatggatgtggagaagagaggttcagctaaagagctgctacagcatcaattcctgaagattgccaagcccctctccagcctcactccactgattgctgcagctaaggaggcaacaaagaacaatcactaaaaccacactcaccccagcctcattgtgccaagccttctgtgagataaatgcacatttcagaaa

SEQ ID NO: 163233 - DNA, 559 bp, Homo sapiens
  Payload ID: 12165
  Gene Symbol: PAK1
  Gene Name: p21 protein (Cdc42/Rac)-activated kinase 1
  ENST ID: ENST00000524847
  CDS Start-End: 263-559
tcatcccttccctcgcagttcccctgtcctgaggggagccccgccacgggcagcgcggcggcggcggcaggagggagaaagtgaagcggtagctcgcgcacactcgcgccctcactcccggctaggcggcacccaccgccgggaggaggaggaggagccgagaggagctgagcgagcgcggaagatgacatacccctcattcttcagagctcagtctcctgtcaagtctttcttcctttattagctgctgctggtggtgacaatgtcaaataacggcctagacattcaagacaaacccccagcccctccgatgagaaataccagcactatgattggagccggcagcaaagatgctggaaccctaaaccatggttctaaacctctgcctccaaacccagaggagaagaaaaagaaggaccgattttaccgatccattttacctggagataaaacaaataaaaagaaagagaaagagcggccagagatttctctcccttcagattttgaacacacaattcatgtcggttttgatgctgtcacaggggagtttacgggaatg

SEQ ID NO: 163234 - DNA, 581 bp, Homo sapiens
  Payload ID: 12165
  Gene Symbol: PAK1
  Gene Name: p21 protein (Cdc42/Rac)-activated kinase 1
  ENST ID: ENST00000528592
  CDS Start-End: 314-581
acctcgggagctggcggctgagctgccaggagcccagcccagctgaatcgagcggagccggtggagcaggggccttgtgggtacccggttgggcagggagaggtgcggctctgcgacggaaacaatcgccagagatgccggggctagccttccccaccaggatggatagaatggtgctatctgagctgttataatgttggcctcatgcctagctttatattgcagcacgtctgaggcattggtttttcatccttccaaacttttggtctacagagactattagaagattaagtagctgctgctggtggtgacaatgtcaaataacggcctagacattcaagacaaacccccagcccctccgatgagaaataccagcactatgattggagccggcagcaaagatgctggaaccctaaaccatggttctaaacctctgcctccaaacccagaggagaagaaaaagaaggaccgattttaccgatccattttacctggagataaaacaaataaaaagaaagagaaagagcggccagagatttctctcccttcagattttgaacacacaattcatgtcggttttg

SEQ ID NO: 163235 - DNA, 1878 bp, Homo sapiens
  Payload ID: 12165
  Gene Symbol: PAK1
  Gene Name: p21 protein (Cdc42/Rac)-activated kinase 1
  ENST ID: ENST00000528203
  CDS Start-End: 236-1603
gagcccagcccagctgaatcgagcggagccggtggagcaggggccttgtgggtacccggttgggcagggagaggtgcggctctgcgacggaaacaatcgccagagatgccggggctagccttccccaccagcaaataaaaagaaagagaaagagcggccagagatttctctcccttcagattttgaacacacaattcatgtcggttttgatgctgtcacaggggagtttacgggaatgccagagcagtgggcccgcttgcttcagacatcaaatatcactaagtcggagcagaagaaaaacccgcaggctgttctggatgtgttggagttttacaactcgaagaagacatccaacagccagaaatacatgagctttacagataagtcagctgaggattacaattcttctaatgccttgaatgtgaaggctgtgtctgagactcctgcagtgccaccagtttcagaagatgaggatgatgatgatgatgatgctaccccaccaccagtgattgctccacgcccagagcacacaaaatctgtatacacacggtctgtgattgaaccacttcctgtcactccaactcgggacgtggctacatctcccatttcacctactgaaaataacaccactccaccagatgctttgacccggaatactgagaagcagaagaagaagcctaaaatgtctgatgaggagatcttggagaaattacgaagcatagtgagtgtgggcgatcctaagaagaaatatacacggtttgagaagattggacaaggtgcttcaggcaccgtgtacacagcaatggatgtggccacaggacaggaggtggccattaagcagatgaatcttcagcagcagcccaagaaagagctgattattaatgagatcctggtcatgagggaaaacaagaacccaaacattgtgaattacttggacagttacctcgtgggagatgagctgtgggttgttatggaatacttggctggaggctccttgacagatgtggtgacagaaacttgcatggatgaaggccaaattgcagctgtgtgccgtgagtgtctgcaggctctggagttcttgcattcgaaccaggtcattcacagagacatcaagagtgacaatattctgttgggaatggatggctctgtcaagctaactgactttggattctgtgcacagataaccccagagcagagcaaacggagcaccatggtaggaaccccatactggatggcaccagaggttgtgacacgaaaggcctatgggcccaaggttgacatctggtccctgggcatcatggccatcgaaatgattgaaggggagcctccatacctcaatgaaaaccctctgagagccttgtacctcattgccaccaatgggaccccagaacttcagaacccagagaagctgtcagctatcttccgggactttctgaaccgctgtctcgagatggatgtggagaagagaggttcagctaaagagctgctacaggtgagaaaactgaggtttcaagtgtttagtaacttttccatgatagctgcatcaattcctgaagattgccaagcccctctccagcctcactccactgattgctgcagctaaggaggcaacaaagaacaatcactaaaaccacactcaccccagcctcattgtgccaagccttctgtgagataaatgcacatttcagaaattccaactcctgatgccctcttctccttgccttgcttctcccatttcctgatctagcactcctcaagactttgatccttggaaaccgtgtgtccagcattgaagagaactgcaactgaatgactaatcagatgatggccatttctaaataaggaatttcctcccaattcatggatatgagggtggtt

SEQ ID NO: 163236 - DNA, 3001 bp, Homo sapiens
  Payload ID: 12165
  Gene Symbol: PAK1
  Gene Name: p21 protein (Cdc42/Rac)-activated kinase 1
  ENST ID: ENST00000530617
  CDS Start-End: 313-1881
tgctttgcagaaaaggagaagcgcgcggcttcctcccgcctccttccctcctttcttcccccgccccttctgtttcgccaaccccgacgcggcgccttcgctgccgccctgcgagagcgcgagcgtgctgcacctcgggagctggcggctgagctgccaggagcccagcccagctgaatcgagcggagccggtggagcaggggccttgtgggtacccggttgggcagggagaggtgcggctctgcgacggaaacaatcgccagagatgccggggctagccttccccaccagtagctgctgctggtggtgacaatgtcaaataacggcctagacattcaagacaaacccccagcccctccgatgagaaataccagcactatgattggagccggcagcaaagatgctggaaccctaaaccatggttctaaacctctgcctccaaacccagaggagaagaaaaagaaggaccgattttaccgatccattttacctggagataaaacaaataaaaagaaagagaaagagcggccagagatttctctcccttcagattttgaacacacaattcatgtcggttttgatgctgtcacaggggagtttacgggaatgccagagcagtgggcccgcttgcttcagacatcaaatatcactaagtcggagcagaagaaaaacccgcaggctgttctggatgtgttggagttttacaactcgaagaagacatccaacagccagaaatacatgagctttacagataagtcagctgaggattacaattcttctaatgccttgaatgtgaaggctgtgtctgagactcctgcagtgccaccagtttcagaagatgaggatgatgatgatgatgatgctaccccaccaccagtgattgctccacgcccagagcacacaaaatctgtatacacacggtctgtgattgaaccacttcctgtcactccaactcgggacgtggctacatctcccatttcacctactgaaaataacaccactccaccagatgctttgacccggaatactgagaagcagaagaagaagcctaaaatgtctgatgaggagatcttggagaaattacgaagcatagtgagtgtgggcgatcctaagaagaaatatacacggtttgagaagattggacaaggtgcttcaggcaccgtgtacacagcaatggatgtggccacaggacaggaggtggccattaagcagatgaatcttcagcagcagcccaagaaagagctgattattaatgagatcctggtcatgagggaaaacaagaacccaaacattgtgaattacttggacagttacctcgtgggagatgagctgtgggttgttatggaatacttggctggaggctccttgacagatgtggtgacagaaacttgcatggatgaaggccaaattgcagctgtgtgccgtgagtgtctgcaggctctggagttcttgcattcgaaccaggtcattcacagagacatcaagagtgacaatattctgttgggaatggatggctctgtcaagctaactgactttggattctgtgcacagataaccccagagcagagcaaacggagcaccatggtaggaaccccatactggatggcaccagaggttgtgacacgaaaggcctatgggcccaaggttgacatctggtccctgggcatcatggccatcgaaatgattgaaggggagcctccatacctcaatgaaaaccctctgagagccttgtacctcattgccaccaatgggaccccagaacttcagaacccagagaagctgtcagctatcttccgggactttctgaaccgctgtctcgagatggatgtggagaagagaggttcagctaaagagctgctacagcactcctcaagactttgatccttggaaaccgtgtgtccagcattgaagagaactgcaactgaatgactaatcagatgatggccatttctaaataaggaatttcctcccaattcatggatatgagggtggtttatgattaagggtttatataaataaatgtttctagtcttccgtgtgtcaaaatcctcacctccttcataaccatctcccacaattaattcttgactatataaatttatggtttgataatattatcaatttgtaatcaattgagatttctttagtgcttgcttttctgtgactcaactgcccagacacctcattgtacttgaaaactggaacagcttgggaatgccatggggtttgataatctgccagggacatgaagaggctcagcttcctggaccatgactttggctcagctgatcctgacatgggagaacaaccacatttttctttgtgtgtgcttctagcagctgttcgggaggaccttgacccaatagtgttcccatgctgtttcttgtgaaatgctctcggctatgtagcagcttttgattccctgcataccctaggctgctgcccctatcctgtcccttgtttataacattgagaggttttctagggcacatactgagtgagagcagtgttgagaagtcggggaaaatggtgactacttttagagcaaggctgggcatcagcacctgtccagctctacttgtgtgatgtttcaggaactcagcccctttttctgcctaggataaggagctgaaagattaacttggatcttctaatggtccaaatcttttggtcacaataaagagtctccaaattagagactgcatgttagttctggatggatttggtggcctgacatgataccctgccagctgtgaggggaccccgtttttaagatgcatggccaagctctctgcaaatggaaatgcttacactgggtgttggggatgtttgctacctcctgctatttttgtggttttggttctcccactatggtaggacccctggccagcattgtggcttgtcatgtcagccccattgactaccttctcatgctctgaggtactactgcctctgcagcacaaatttctatttctgtcaataaaaggagatgaaaatattc

SEQ ID NO: 163237 - DNA, 576 bp, Homo sapiens
  Payload ID: 12165
  Gene Symbol: PAK1
  Gene Name: p21 protein (Cdc42/Rac)-activated kinase 1
  ENST ID: ENST00000529248
  CDS Start-End: 257-574
gagcgtgctgcacctcgggagctggcggctgagctgccaggagcccagcccagctgaatcgagcggagccggtggagcaggggccttgtgggtacccggttgggcagggagaggtgcggctctgcgacggaaacaatcgccagagatgccggggctagccttccccaccagcacgtctgaggcattggtttttcatccttccaaacttttggtctacagagactattagaagattaagctgctgctggtggtgacaatgtcaaataacggcctagacattcaagacaaacccccagcccctccgatgagaaataccagcactatgattggagccggcagcaaagatgctggaaccctaaaccatggttctaaacctctgcctccaaacccagaggagaagaaaaagaaggaccgattttaccgatccattttacctggagataaaacaaataaaaagaaagagaaagagcggccagagatttctctcccttcagattttgaacacacaattcatgtcggttttgatgctgtcacaggggagtttacgggaatgccagagcagtgggcccgcttgct

SEQ ID NO: 163238 - DNA, 502 bp, Homo sapiens
  Payload ID: 12165
  Gene Symbol: PAK1
  Gene Name: p21 protein (Cdc42/Rac)-activated kinase 1
  ENST ID: ENST00000526968
  CDS Start-End: 425-502
acacgacatcggatagttttcaaattcagcccttgacaacgagctcatagatgcggtggtgctttgttaacctgaaaaggaccctcagcgccggaagttagccgtctttctccatcctgactactacagtagccctcccagaaatcgtcccaaaattgtctgatagaaaggctgcacggaaacaacccgccacggacagcggaccgagaacagtgacgcgacgcgatgacgtcacgcagcaagcgggtgattccccagcctctggcgtcacgcgccgatgacgtaatcccaggcgttcgccctcatgcgggccagggtttggcctcgctcccacggcacgtctgaggcattggtttttcatccttccaaacttttggtctacagagactattagaagattaagtagctgctgctggtggtgacaatgtcaaataacggcctagacattcaagacaaacccccagcccctccgatgagaaataccagcactatgattggagcc

SEQ ID NO: 163239 - DNA, 450 bp, Homo sapiens
  Payload ID: 12165
  Gene Symbol: PAK1
  Gene Name: p21 protein (Cdc42/Rac)-activated kinase 1
  ENST ID: ENST00000528633
  CDS Start-End: 261-450
acctcgggagctggcggctgagctgccaggagcccagcccagctgaatcgagcggagccggtggagcaggggccttgtgggtacccggttgggcagggagaggtgcggctctgcgacggaaacaatcgccagagatgccggggctagccttccccaccaggttggtggcgatacaaaaattgaaactggcctcagttgttgctctcaaatgcagatcaaggaatgtggacgctcatgtgtagctgctgctggtggtgacaatgtcaaataacggcctagacattcaagacaaacccccagcccctccgatgagaaataccagcactatgattggagccggcagcaaagatgctggaaccctaaaccatggttctaaacctctgcctccaaacccagaggagaagaaaaagaaggaccgattttaccgatccattttacctggagataaaa

SEQ ID NO: 163240 - DNA, 576 bp, Homo sapiens
  Payload ID: 12165
  Gene Symbol: PAK1
  Gene Name: p21 protein (Cdc42/Rac)-activated kinase 1
  ENST ID: ENST00000527535
  CDS Start-End: 1-57
aaatctttattggagtccatgggatgctctcagtctttgtggccattaagcagatgaatcttcagcagcagcccaagaaagagctgattattaatgagatcctggtcatgagggaaaacaagaacccaaacattgtgaattacttggacagttacctcgtgggagatgagctgtgggttgttatggaatacttggctggaggctccttgacagatgtggtgacagaaacttgcatggatgaaggccaaattgcagctgtgtgccgtgagtgtctgcaggctctggagttcttgcattcgaaccaggtcattcacagagacatcaagagtgacaatattctgttgggaatggatggctctgtcaagctaactgactttggattctgtgcacagataaccccagagcagagcaaacggagcaccatggtaggaaccccatactggatggcaccagaggttgtgacacgaaaggcctatgggcccaaggttgacatctggtccctgggcatcatggccatcgaaatgattgaaggggagcctccatacctcaatgaaaaccctctgagagccttgtacc

SEQ ID NO: 163241 - DNA, 6139 bp, Homo sapiens
  Payload ID: 12166
  Gene Symbol: PAK2
  Gene Name: p21 protein (Cdc42/Rac)-activated kinase 2
  Uniprot ID: Q13177
  ENST ID: ENST00000327134
  CDS Start-End: 323-1897
gtcttcctcccccagggttgtggccacgcgcagcggcggcggttgttccgcttcccctccggcccgggccgtcgccattgccgaaggctccctcccctcccctccctggcgtgcgcaggactccgccgccgctgggcctagcggtagcagcggctgctccagcgcggcgtctcttcccgccccgcttccccttccctcccctcccctccccgcaccgcgcgctagcccggggcggctccgcagcccgccgggagctctgaccgaggcgcctcgctggggcggggaccttgccttgcccggggccatttcataattctgaatcatgtctgataacggagaactggaagataagcctccagcacctcctgtgcgaatgagcagcaccatctttagcactggaggcaaagaccctttgtcagccaatcacagtttgaaacctttgccctctgttccagaagagaaaaagcccaggcataaaatcatctccatattctcaggcacagagaaaggaagtaaaaagaaagaaaaggaacggccagaaatttctcctccatctgattttgagcacaccatccatgttggctttgatgctgttactggagaattcactggcatgccagaacagtgggctcgattactacagacctccaatatcaccaaactagagcaaaagaagaatcctcaggctgtgctggatgtcctaaagttctacgactccaacacagtgaagcagaaatatctgagctttactcctcctgagaaagatggctttccttctggaacaccagcactgaatgccaagggaacagaagcacccgcagtagtgacagaggaggaggatgatgatgaagagactgctcctcccgttattgccccgcgaccggatcatacgaaatcaatttacacacggtctgtaattgaccctgttcctgcaccagttggtgattcacatgttgatggtgctgccaagtctttagacaaacagaaaaagaagactaagatgacagatgaagagattatggagaaattaagaactatcgtgagcataggtgaccctaagaaaaaatatacaagatatgaaaaaattggacaaggggcttctggtacagttttcactgctactgacgttgcactgggacaggaggttgctatcaaacaaattaatttacagaaacagccaaagaaggaactgatcattaacgagattctggtgatgaaagaattgaaaaatcccaacatcgttaactttttggacagttacctggtaggagatgaattgtttgtggtcatggaataccttgctggggggtcactcactgatgtggtaacagaaacgtgcatggatgaagcacagattgctgctgtatgcagagagtgtttacaggcattggagtttttacatgctaatcaagtgatccacagagacatcaaaagtgacaatgtacttttgggaatggaaggatctgttaagctcactgactttggtttctgtgcccagatcacccctgagcagagcaaacgcagtaccatggtcggaacgccatactggatggcaccagaggtggttacacggaaagcttatggccctaaagtcgacatatggtctctgggtatcatggctattgagatggtagaaggagagcctccatacctcaatgaaaatcccttgagggccttgtacctaatagcaactaatggaaccccagaacttcagaatccagagaaactttccccaatatttcgggatttcttaaatcgatgtttggaaatggatgtggaaaaaaggggttcagccaaagaattattacagcatcctttcctgaaactggccaaaccgttatctagcttgacaccactgatcatggcagctaaagaagcaatgaagagtaaccgttaacatcactgctgtggcctcatactcttttttccattttctacaagaagccttttagtatatgaaaattattactctttttggggtttaaagaaatggtctgcataacctgaatgaaagaagcaaatgactattctctgaagacaaccaagagaaaattgcaaaaagacaagtatgacttttatatgaaccccttctttagggtccagaaggaattgtggactgaatcactagccttaggtctttcagcaaacagcctatcagggccatttatcatgtgtgagatttgcattttactttgctgactttgttgtaatagatcccattcattgtcccctttggggtatttccaatacttgaatggcagattggagtttttcagagtatgtgtttcatctgctagtctttctctccttcatagcttttcttttcctggacttgctccttttgagttgcttttgcgtttctcatgcctaggcaagtgtaatagaaattatgtagctccttatgttggcaaaggagctctatatagtttcactttgtataaaagttaggaccagctgttgttacatgtaatattttagttcagaacttgacctgaaggaagggaagaaaagtatgtgatttttaccttttttaacaaatgtgaaaaagtcagttttagaaatttcgtggtagtaagttcggcatttgttacatgtatagagagaagactaataatctctatttataactaaatcattgagatagaaaaagattcccattgactgtagacttcttcccattttgtcttcccttctgcctgtttccccttcaggcttggctctaggaaccaaagtgatttgttgttgttccaacctgggctttgtgactttggttagtgccactaccttcttccctcctttcccccttcaatttggaaataaatttctgtatatgttgcaattttaggtttaggtttgttctttttctttttcattaatcctctctcacctcacagataccccctcccatggcaaataatataataaccagtgaattttcaggaatttaaaaattagcttttttccacttaaaggagaaaaatatttgggactagcagcagaggcagtaagagatgtgaaccttggtgagctctgatacagtgagaagagattatactcatgaaagagaatgttagtgttacagagaagcagccgatagcaaatcgactgtagagacttggcggcggtggcattgccccaggtcgtcagcagtgtggtattatctatgagaacttgagcgacagagtatttcttgatgaatttatagatcatttgagatgttgagttactttagtttagttttgttttgttttttcaaataagtagagactattgtaaaaaacgagaaaggaaaatgaaatgtgcgtgttgatagcaataatttgtttcttttaaagattctaaaaggtctgagacctgtagcattaattatttgagtgccctcccttctcccctcccctcccttttctcttctcttttttcctctcctcttcttctcctttattcattgttttgcttttggagtgggtgttgttcaagtatctgtggtttggttctggcattttgttcccaccatccccttcccccattaacttcccccctgcttgccatcctgcagtagtataaatcatgaataaaaaataattttgctgttgtagtatacattggagaaactggcaggttttatttccattattttatttccactatatctatgataagatgcaattataaggagagaagtgactgttttttattgataaggcaagattttcagaaaaatgagtaaaataattaatgaaacatatttagagcacttaatggtctctgttttcaatataattcttgatttcatttttctctggaatatattggccttctacagctattactgaattatagaaactggtttatttctggcagaaagctgcagtgccacctgagttccaaattttaccattctttgtaaacagttggatggattatgataaagaagatgctaccaatgaaatagaaaaccaacgagatgagaagactgtgatcctcatgtactcagaggcacttccctcctaagtcaaagaccatcctcactgactatgtgccaacgcctcgtttcaggcttgtgactcaacaaagggcttttccattgatagaagcagtttgggatttgtagttgcgacttcttcgatagttacctgcacgtccattgctggcaactgacttgtcattaaaacctggctctttggttaagggagctacgctgtggtttattcttaagttacgtggataaactaacctctaacagaaatatactttggttaattttgaaatgtgtcatttttaaacaatcttaaaagtaatacagaattgtgatttattaattttaaaacattcagaacttgttgaaagaaaaattatatctgaatcaagattcatgttttttatttttattttttttgatacagagtctcactctgtcactcaggctggagtgcagtgacatgatctcagctcactgcaacctccgcttcctgggttcaagcaattctcatgcctcagcctcctgagtagctgagaccacaggcacccgccaccacacccagctatttttttgtatttttagtagagacagagtctcaccacattgcccaggctggtctccaactcctgagctcaggcagtctgcccaccttggcctcccaaagtgctgcagttacaggcgtgagccactgcacctggcctcatgttttttaaataattgccttttatatttaccctttttgtcatcactttagaatgaaaattcccatttaaatctgaaagttaccttaatagtcctcttgtgttattaggacagtattattatagtacttatttattttattttagatttaaagttatcttctctttttcttttttcttctgctgcttttagggacaattaaaactgggaaactatgaaacatggaacattttatcctacctgaaagtaaacgagtaattgtgaagcataagacactgaggctaatacaactctgtcttcatgtgttgactgcctggcacatagtattcattctcttccctttaacatagaagtgtccagctgcgtacagtctagtaaccagcaactgtaaacgaacctgtgcctctaacaagcgattctaaaccacctatgagtatttcttttagggctcacttaaatacatgtttgtatatactgtattctagccagaataattttagatctgatcaggtagtagctaaaattagaaaaaaacaaaatagatgcttaaagaatttgcatccatttttgagtctaaatcttttaaaatatactgagatccacatctagtgaaatgtcagtgtcaaaatattatagattatagctaaaatccagattaatactcatttggggttttttatagtggaacttcatagtaatacaaaaagcagattgtcttcctgtctccgctgctcccacagtaggtattgaaactggtaaaatcagttttttgatagtgtgtgtatataagaaaaaatagatacacacattcttttttctcagtcaacacattgattgaacactctggcaaagatgctgtggtggatgaggttggagttcgaaagaagaagcaagcgctggcctggccttgaaagaaccgaagtctttcccattcacttctctagaaagctgccaagacagaggcagaaagaaatggatgatagttctgtcaagcacacttctgttctcttagaacttagaagtgtttctaagagaacagaagtaataagagaaacagttacgtgtggaattcaacatctttggttggaacgcattggctttttttttcttgttttgatagaaatggaattaagcaaaagtagtttttgtcttttctgttgtcttcaaattttatgccttttatttttaatttaatcccgttcaattatttaattgttatacattgacattaactgctgtattttgactttgttcaataattttgttctttcagggctagaaataaactttttaaaaaaagtgtgcatttttccctttcctaaacttttattctttcttttgatcagcgtaaaagaatattttaatgtcttttgatagcataaaagaatatttaaatgtcttaataggttttcaaagaacatttagtatttttagtgataaatgttttaaaccttttaa

SEQ ID NO: 163242 - DNA, 689 bp, Homo sapiens
  Payload ID: 12166
  Gene Symbol: PAK2
  Gene Name: p21 protein (Cdc42/Rac)-activated kinase 2
  ENST ID: ENST00000426668
  CDS Start-End: 1-665
gggcttctggtacagttttcactgctactgacgttgcactgggacaggaggttgctatcaaacaaattaatttacagaaacagccaaagaaggaactgatcattaacgagattctggtgatgaaagaattgaaaaatcccaacatcgttaactttttggacagttacctggtaggagatgaattgtttgtggtcatggaataccttgctggggggtcactcactgatgtggtaacagaaacgtgcatggatgaagcacagattgctgctgtatgcagagagtgtttacaggcattggagtttttacatgctaatcaagtgatccacagagacatcaaaagtgacaatgtacttttgggaatggaaggatctgttaagctcactgactttggtttctgtgcccagatcacccctgagcagagcaaacgcagtaccatggtcggaacgccatactggatggcaccagaggtggttacacggaaagcttatggccctaaagtcgacatatggtctctgggtatcatggctattgagatggtagaaggagagcctccatacctcaatgaaaatcccttgaggcatcctttcctgaaactggccaaaccgttatctagcttgacaccactgatcatggcagctaaagaagcaatgaagagtaaccgttaacatcactgctgtggcctcatactc

SEQ ID NO: 163243 - DNA, 2178 bp, Homo sapiens
  Payload ID: 12167
  Gene Symbol: PAK3
  Gene Name: p21 protein (Cdc42/Rac)-activated kinase 3
  Uniprot ID: O75914
  ENST ID: ENST00000262836
  CDS Start-End: 28-1707
gagctgtgaaattagttgtaactgaaaatgtctgacggtctggataatgaagagaaacccccggctcctccactgaggatgaatagtaacaaccgggattcttcagcactcaaccacagctccaaaccacttcccatggcccctgaagagaagaataagaaagccaggcttcgctctatcttcccaggaggaggggataaaaccaataagaagaaggagaaagagcgcccagagatctctcttccttcagactttgagcatacgattcatgtggggtttgatgcagtcaccggggaattcactccagatctctatggctcacagatgtgcccagggaagctcccagagggaattccagagcaatgggcacgattactccaaacttccaacataacaaaattggaacagaagaagaacccacaagctgttctagatgttctcaaattctatgattccaaagaaacagtcaacaaccagaaatacatgagctttacatcaggagataaaagtgcacatggatacatagcagcccatccttcgagtacaaaaacagcatctgagcctccattggcccctcctgtgtctgaagaagaagatgaagaggaagaagaagaagaagatgaaaatgagccaccaccagttatcgcaccaagaccagagcatacaaaatcaatctatactcgttctgtggttgaatccattgcttcaccagcagtaccaaataaagaggtcacaccaccctctgctgaaaatgccaattccagtactttgtacaggaacacagatcggcaaagaaaaaaatccaagatgacagatgaggagatcttagagaagctaagaagcattgtgagtgttggggacccaaagaaaaaatacacaagatttgaaaaaattggtcaaggggcatcaggtactgtttatacagcactagacattgcaacaggacaagaggtggccataaagcagatgaaccttcaacagcaacccaagaaggaattaattattaatgaaattctggtcatgagggaaaataagaaccctaatattgttaattatttagatagctacttggtgggtgatgaactatgggtagtcatggaatacttggctggtggctctctgactgatgtggtcacagagacctgtatggatgaaggacagatagcagctgtctgcagagagtgcctgcaagctttggatttcctgcactcaaaccaggtgatccatagagatataaagagtgacaatattcttctcgggatggatggctctgttaaattgactgactttgggttctgtgcccagatcactcctgagcaaagtaaacgaagcactatggtgggaaccccatattggatggcacctgaggtggtgactcgaaaagcttatggtccgaaagttgatatctggtctcttggaattatggcaattgaaatggtggaaggtgaacccccttaccttaatgaaaatccactcagggcattgtatctgatagccactaatggaactccagagctccagaatcctgagagactgtcagctgtattccgtgactttttaaatcgctgtcttgagatggatgtggataggcgaggatctgccaaggagcttttgcagcatccatttttaaaattagccaagcctctctccagcctgactcctctgattatcgctgcaaaggaagcaattaagaacagcagccgctaagactgcaagccttacacctcaccatctccctcatgagtaagactgaaataaaactctgctgcaggaaagatggaagaaaagacagtcaaatggggtgggggttctttacctttcaaatgaatagaaacttcttataagcctttttcctactccctcagattatgtaatttatttgtaagcctgaatcgcagcccaaacagggcagcaatgttgaagtgaccataaagtggtcacttccaccgtgaagcgaaagagccagtagtgaatcccctcattttgtgcattcactttgaagaaaaaggtttctcaaagatgcacactccctcttcatagtgttgtgtttgtttttaagttagagagtagtccctcttgcattcaaacctccttcaaaactccttacccaatgtgatgtttttcacttgcattgtcattagatgtccagaaaaaaaaaagatgtcaaaatgtttttct

SEQ ID NO: 163244 - DNA, 2241 bp, Homo sapiens
  Payload ID: 12167
  Gene Symbol: PAK3
  Gene Name: p21 protein (Cdc42/Rac)-activated kinase 3
  Uniprot ID: O75914
  ENST ID: ENST00000360648
  CDS Start-End: 28-1770
gagctgtgaaattagttgtaactgaaaatgtctgacggtctggataatgaagagaaacccccggctcctccactgaggatgaatagtaacaaccgggattcttcagcactcaaccacagctccaaaccacttcccatggcccctgaagagaagaataagaaagccaggcttcgctctatcttcccaggaggaggggataaaaccaataagaagaaggagaaagagcgcccagagatctctcttccttcagactttgagcatacgattcatgtggggtttgatgcagtcaccggggaattcactaactcccctttccagacctctagacctgtgacggtcgcttcaagtcaatcagagggaaaaatgccagatctctatggctcacagatgtgcccagggaagctcccagagggaattccagagcaatgggcacgattactccaaacttccaacataacaaaattggaacagaagaagaacccacaagctgttctagatgttctcaaattctatgattccaaagaaacagtcaacaaccagaaatacatgagctttacatcaggagataaaagtgcacatggatacatagcagcccatccttcgagtacaaaaacagcatctgagcctccattggcccctcctgtgtctgaagaagaagatgaagaggaagaagaagaagaagatgaaaatgagccaccaccagttatcgcaccaagaccagagcatacaaaatcaatctatactcgttctgtggttgaatccattgcttcaccagcagtaccaaataaagaggtcacaccaccctctgctgaaaatgccaattccagtactttgtacaggaacacagatcggcaaagaaaaaaatccaagatgacagatgaggagatcttagagaagctaagaagcattgtgagtgttggggacccaaagaaaaaatacacaagatttgaaaaaattggtcaaggggcatcaggtactgtttatacagcactagacattgcaacaggacaagaggtggccataaagcagatgaaccttcaacagcaacccaagaaggaattaattattaatgaaattctggtcatgagggaaaataagaaccctaatattgttaattatttagatagctacttggtgggtgatgaactatgggtagtcatggaatacttggctggtggctctctgactgatgtggtcacagagacctgtatggatgaaggacagatagcagctgtctgcagagagtgcctgcaagctttggatttcctgcactcaaaccaggtgatccatagagatataaagagtgacaatattcttctcgggatggatggctctgttaaattgactgactttgggttctgtgcccagatcactcctgagcaaagtaaacgaagcactatggtgggaaccccatattggatggcacctgaggtggtgactcgaaaagcttatggtccgaaagttgatatctggtctcttggaattatggcaattgaaatggtggaaggtgaacccccttaccttaatgaaaatccactcagggcattgtatctgatagccactaatggaactccagagctccagaatcctgagagactgtcagctgtattccgtgactttttaaatcgctgtcttgagatggatgtggataggcgaggatctgccaaggagcttttgcagcatccatttttaaaattagccaagcctctctccagcctgactcctctgattatcgctgcaaaggaagcaattaagaacagcagccgctaagactgcaagccttacacctcaccatctccctcatgagtaagactgaaataaaactctgctgcaggaaagatggaagaaaagacagtcaaatggggtgggggttctttacctttcaaatgaatagaaacttcttataagcctttttcctactccctcagattatgtaatttatttgtaagcctgaatcgcagcccaaacagggcagcaatgttgaagtgaccataaagtggtcacttccaccgtgaagcgaaagagccagtagtgaatcccctcattttgtgcattcactttgaagaaaaaggtttctcaaagatgcacactccctcttcatagtgttgtgtttgtttttaagttagagagtagtccctcttgcattcaaacctccttcaaaactccttacccaatgtgatgtttttcacttgcattgtcattagatgtccagaaaaaaaaaagatgtcaaaatgtttttct

SEQ ID NO: 163245 - DNA, 8940 bp, Homo sapiens
  Payload ID: 12167
  Gene Symbol: PAK3
  Gene Name: p21 protein (Cdc42/Rac)-activated kinase 3
  Uniprot ID: O75914
  ENST ID: ENST00000372007
  CDS Start-End: 392-2026
agaggaaaggtcttgacggggtggctggatccgtggcagaatccagttccagattctagacttgagggttctgggctgttggtctgtagaagcgaaggagagaaggactcaaatccaggccaagtgtatggctgtctgaggtattggaacagaaggaggtccattcctgttggtgacaacaccgtggccctgttctgggatgagcaaggtgtaaaggtttcccccaagaaagagcagctgagtccttgcatcttgtggcagctggtgtgcccagcactgagtctgtaggagctgaagccagcccggacccttctcatgggcagtgcccacctgtgctgaagtcctgcagcggtggcggtgtgaggagctgtgaaattagttgtaactgaaaatgtctgacggtctggataatgaagagaaacccccggctcctccactgaggatgaatagtaacaaccgggattcttcagcactcaaccacagctccaaaccacttcccatggcccctgaagagaagaataagaaagccaggcttcgctctatcttcccaggaggaggggataaaaccaataagaagaaggagaaagagcgcccagagatctctcttccttcagactttgagcatacgattcatgtggggtttgatgcagtcaccggggaattcactggaattccagagcaatgggcacgattactccaaacttccaacataacaaaattggaacagaagaagaacccacaagctgttctagatgttctcaaattctatgattccaaagaaacagtcaacaaccagaaatacatgagctttacatcaggagataaaagtgcacatggatacatagcagcccatccttcgagtacaaaaacagcatctgagcctccattggcccctcctgtgtctgaagaagaagatgaagaggaagaagaagaagaagatgaaaatgagccaccaccagttatcgcaccaagaccagagcatacaaaatcaatctatactcgttctgtggttgaatccattgcttcaccagcagtaccaaataaagaggtcacaccaccctctgctgaaaatgccaattccagtactttgtacaggaacacagatcggcaaagaaaaaaatccaagatgacagatgaggagatcttagagaagctaagaagcattgtgagtgttggggacccaaagaaaaaatacacaagatttgaaaaaattggtcaaggggcatcaggtactgtttatacagcactagacattgcaacaggacaagaggtggccataaagcagatgaaccttcaacagcaacccaagaaggaattaattattaatgaaattctggtcatgagggaaaataagaaccctaatattgttaattatttagatagctacttggtgggtgatgaactatgggtagtcatggaatacttggctggtggctctctgactgatgtggtcacagagacctgtatggatgaaggacagatagcagctgtctgcagagagtgcctgcaagctttggatttcctgcactcaaaccaggtgatccatagagatataaagagtgacaatattcttctcgggatggatggctctgttaaattgactgactttgggttctgtgcccagatcactcctgagcaaagtaaacgaagcactatggtgggaaccccatattggatggcacctgaggtggtgactcgaaaagcttatggtccgaaagttgatatctggtctcttggaattatggcaattgaaatggtggaaggtgaacccccttaccttaatgaaaatccactcagggcattgtatctgatagccactaatggaactccagagctccagaatcctgagagactgtcagctgtattccgtgactttttaaatcgctgtcttgagatggatgtggataggcgaggatctgccaaggagcttttgcagcatccatttttaaaattagccaagcctctctccagcctgactcctctgattatcgctgcaaaggaagcaattaagaacagcagccgctaagactgcaagccttacacctcaccatctccctcatgagtaagactgaaataaaactctgctgcaggaaagatggaagaaaagacagtcaaatggggtgggggttctttacctttcaaatgaatagaaacttcttataagcctttttcctactccctcagattatgtaatttatttgtaagcctgaatcgcagcccaaacagggcagcaatgttgaagtgaccataaagtggtcacttccaccgtgaagcgaaagagccagtagtgaatcccctcattttgtgcattcactttgaagaaaaaggtttctcaaagatgcacactccctcttcatagtgttgtgtttgtttttaagttagagagtagtccctcttgcattcaaacctccttcaaaactccttacccaatgtgatgtttttcacttgcattgtcattagatgtccagaaaaaaaaaagatgtcaaaatgtttttctaaaaaaagaaagcaaaaaaagcaaggcaaaaaaaaaaaaaaaaacaaacaaaaacaaaaacaaaacaaaaacaagcaaacaaaaaataccagagcaagtactgtgtgaacatgtggaagtccatgccctaatagagttgcaattttttattcttcttctatagtggtggcttggtttgtgtacctatttttctgcatttgtattggaaaaggtttcttttaagacattttccaaaagtggagaggaatatgtgtgttcaggaagggctttcaaaaaactgtatatctaaataaagctcaaacggtgaaatcctgtcacattttcacaatgatgcttaaaagataattgagtaaaccaggttgttaatctccttaatacctgaaagaggacacactgaaactgaaactgtgacatcctgctaggtgagttcaggttctgaacctaggaaatcctcataggagaaaccacatttaaacaaagatgggactttctctgagagccaaaaccagataaatgtagaatactgaaatccttgttggacattaagtaaacaaagataatgatacctaaattaatcctctcttgtgcttatgaaacatatgcactgtaaaataggcataccaggaggaaatagatacattaatcatcatttacttatgatacaaattatttattttgacaatttataacgtttaaaaaagttttttaaagatctagagaaaggtgatatagtaaacattcaactctgtaagaaatgggaggtcagtgaaggctacatcccaatcaatatttggctctaagtacctcttcccatttttcctatgtatcacctatttctgtttcggaatatggtgtgttcatgcttagttctttgggcttttgaatatcaaaagcatattcataaatgtcttgaaattctctccagtggaaaataattttaacttacaatcatatcccaagaaatgtcagtccgacagaattccttatatgacttggggaaaataacaaaatttgactactatttcaccatatatctatttattaaaaaattcaacagttggcacttcctgaatcttctgagagtagaaaaatatctgcggagtgtctgtgtagaaaaggatatgcctctcttttgagtgtattgacaattttgtaaattacagaaagttgtttctctaagcctttgaaaaactaacaatttgtgttatagaaggcttcttaatttgcagtataaaagaatctaaacagaacttatgtacattcagccagaaggggaaagagatcagttacataggcctctctccttctttgccaaggtacatccatccatctaaccatccatatatccacatcttaaaatgaaagcactttctttagagtttcagcaaactatatagtgtacgtgtttatgttcaggagatgaccccactggtgtatttcctattttccctattgttttctttgactgtaaaagttgggagaggcttgacctcctccccttgaaaatgtccacagtgggataaaacaacaaatgtgaaaagaaaatgaaacggtaatattaatttgaagcatactatgttatactttgcaaaaacgaatctgggcctgtaatttttaatgccacactgctctaatgagagagagaggccttaattttgatttcatttaaaaataagtactttaaaaaatttttcactcatagtgccgggaaattcaatgaaatcctgggatgcaaataaaaatcagtacattagtgactgtgtcctgccagtggagagagcccaatacctggttaggaagccctattcattagttagcatcccttacatgttgagaaggccttttttttgttgttattttggagaccttggagcagtgacccttcagatcactgtaggcagagaaatggcttctctcttatgctttcagttcagcatattaacaatgaggagccaggtacttctttactaccactttgtaccaagatttgataataatatatcccaggaggcattacttttataaatttgtattcatgtaaattttcaaatgagaacagcttctaaagccccttccctgtattggagagttatgtatatttctaataagtattagaaagaagctgtttctcatgccacagtgatgctgaaggattcacatttggtacaatcgagtaacttgaacgccagattgttaacagtttattctctttccctggatttttaagctcatcttgacacaggtgagtctatccaaatctttgatgttgctagtgtgccctgagataacgagggcacatctttcaatgttgattccaaaatgtcctgagttaggaatagggcagtgggaaagtcagggaagggtgagaagcacagtagagattatttatttaaaaaaggaaagaacgttaatgttgttagcaaggatccagtgcgttgtcataatcccatgaggattttcagatgacacaatcccctcaaatcagtcaccatgttgggtaatgacttcgttcttgctgatctcgtgtgtgtgtcattgtaaatatttgtgtgtccatgttccattttggctactggatggccaagccatgtaagaagatttaactcaagtatttattctttatgttattcagatttctttcaggcttgtgaactgcaccccaatgtttgagtttaaccacctgatccttacatctatccctccccggtgaagcacattccattgctaaaagaaaaagaaacacgaaattgcttcctgttgtctgtataactgttttgatagtttgagatatttgtctataaatgatatttctcagctcaaagatcgtgtaaataattatattcctttgctcaatgggtttatttctaatgaggctgccagttctgagagattctataatatcacttttaaataacataaacagggattacaactatgtaaaaagaaatgcatatggacaaagactgggaacacagataattgaaatcagttgtgttagggtggtggaattatgtgaatttttttttctttttaaaattttatttgatattgttataatattgctttacaataaataaacagcagaaagggaactatagacacatagaaaagatgccagaagcagatgccttctggccagagcgcagagcatgcagggcagagatatttgctagttacaattattccataggctttatgcttgcctgggtgctgaggttggcacacgctcgggtatggcacacgctttcttaggagactattatctataagttaaagctagggagatgtcactattagaactccaaacacactcttctgctttaaaacaggttgtctgccctctgctttggtatggcattcgggtgtctgttttgtggttgctttagattggaggggtgaccattttattagcccccttgataacatctgttgcagatattgcctttctggaacgttttaacagactctcaggttgaattttggaggactagaaggataaaatccccagctcccaccattttcttgtccaacaggatattactgtatatcattcaggtaggattcttcttttaataaccaatagggcaagtcccactaatttcaatagaagttatgacttgcaattaaaagctgactttgaaatcattaaacaaatatgtaggactgtctctgcctgttggcattcagttatagttctgttaattttggcttgggatggtctccatgtgcttttttctgcctatttataggttgtttgcagtagttgtgatttttaaagagcaagggagaccatctaaccaaaggataacttccttctaactcaccaaagaaattttaggtgagaactttaataatgaggtagtcacctcagatatgctgcttagtttcactaaaagcagaccctatacctagagaagtcactggctttttattggtcattctcaatacagaaatacttaggggagtcttaaccctgccatccccggttgaatctcttggtctttatctaagctacttgcagttaatattcagttaagcaaaggtatggccagtagtgcaagtatctcccagtctctgagctctgaacaagaggactgaaattcagcatttgtaaactgacagtttgatgggcctgggatttgaagtgaactcagcacacaattctgaacgtgtatttgcatgtggactgggaaggaaataaatgggaacttggaaataatggaatatttctcctatgaaagaatttttcgtagaagatttgtttttgatataatctttctgttggttagcttttagtgttttcattccttttctgatccacactcctttaagtgaccaaatgaatataacccaacatgcattgggaatgtgtttaatattaaacaatgtctaactgaatctgcaaatgcgggaactgagatatcacctccatgtgcacacctgtgtgtacgagtattctatacaacttgtagcatttactgccacttaattgggttgaacttgcaagataaacttttggaaactgcttagtgccatcggagtctcctttagaagctgccatcaggcaaatgctatcccataataccagcagtaagcctggcaacatgttcaacagatttagtacccaagaggaaatcaacagcgatagtagagaatgagtcagatgtagtgggataaatactagcctaggaagaaggagccccggagtctaatatgagctttattactaaattgctatgtgacgctaggcaagtcacttaacctctccatggctgtttcctcatctgtaaaataagtgtattggactagatgatccttagggtctttccaaaagtctaacattctatggcattataggttgccttgcaaattcagcctgctatagtgatggcaaatatcacgtttaagcctgagtctcttatgttgcagttaaataaaagaactatgtaagatgatttttaaaattcaagcaaatgggccgggtgcggtggctcatacctgtaatcccagcactttgggaggccaaggcaggcggatcacctgaggtcaggagttcgagaccagcctgaccaacatagagaaaccccatctctactaaaaatacaaaattagccgggtgtggtggcgggcgcctgtaatcccagctacttgggaggctgaggtgggagaatcgcttgaacccaggaggcggaggttgtggtgagctgagatcatgccattgcactccagcctcggcaacaagagtgaaacttcgtctccaaaaaaaaaaactcaagcaaatgaagttcataataataggggatgttgataaaacttgtggcagccttccaattcatttacagttgtttcgttttgtttttgttttaatgtccattttctgttgactgttcccagttttcattttccatacagtctgtatgtaaagtctggttttcattaagctgtggccagtatttgccactacaacagaaacacactgtcacacttgctagaatataactgtacttgagcttctcctttcctgtgaagtagtgctgggctttctagagtttaattctcaagtggcacaagatagcagagcccatgcattttaatggctgagactgctaagagtgaacctaaacacttacaagttgcagagagaaatgaaaaagtaattacatgctattagcattgagaaatgttgacaaattaatttgttgggaaccaaagatagcatttctgatgacaactcccacagtgattggccagttgtatgatgagtacactgctggaaagagggtaaactgggagttagtggatggtcccaatgccctgcctacagcagagtgccaaccagccctgagtgcaaaattcaagttcaatgtgtgtgcttgtgtgtggtgtgctttatggacccgcaaataccatattcattattgatgataagatcttcacagaatcctgtagctactaatgcattgagtttttaatctcagtacatcagccaggaggagccagatcacagggtagtgatgtctactgggattatactcataacatctacacaaaacaagttgagaaggatccacgttttcattgtttatcagaattgtatctcatttggctgagcattacttttgtcagaatgtgttatctgtaaaccatgtgtagtgaaattcttctgtaactttggattaaaggtatttatggtctttttgtttgtttgatttttaagtaagttatttcttttgtagacctgctgatggtatggttccatccttctgacctcagcatccaatctttttaaggatttttgttttcaatattgttattttaaattgtggttgaagcaatagaaaattgaaatatggattgtgcatgactgtgtcttgagtgtaaaaatattgcagtttgaaacttggacctaaagtattgcaaataaaaatgacaaacatcaatga

SEQ ID NO: 163246 - DNA, 2606 bp, Homo sapiens
  Payload ID: 12167
  Gene Symbol: PAK3
  Gene Name: p21 protein (Cdc42/Rac)-activated kinase 3
  Uniprot ID: O75914
  ENST ID: ENST00000372010
  CDS Start-End: 443-2122
ctggagcgctcggaggtagaggaaaggtcttgacggggtggctggatccgtggcagaatccagttccagattctagacttgagggttctgggctgttggtctgtagaagcgaaggagagaaggccatgttagtcttgctcccctcatggttttgcagactcaaatccaggccaagtgtatggctgtctgaggtattggaacagaaggaggtccattcctgttggtgacaacaccgtggccctgttctgggatgagcaaggtgtaaaggtttcccccaagaaagagcagctgagtccttgcatcttgtggcagctggtgtgcccagcactgagtctgtaggagctgaagccagcccggacccttctcatgggcagtgcccacctgtgctgaagtcctgcagcggtggcggtgtgaggagctgtgaaattagttgtaactgaaaatgtctgacggtctggataatgaagagaaacccccggctcctccactgaggatgaatagtaacaaccgggattcttcagcactcaaccacagctccaaaccacttcccatggcccctgaagagaagaataagaaagccaggcttcgctctatcttcccaggaggaggggataaaaccaataagaagaaggagaaagagcgcccagagatctctcttccttcagactttgagcatacgattcatgtggggtttgatgcagtcaccggggaattcactccagatctctatggctcacagatgtgcccagggaagctcccagagggaattccagagcaatgggcacgattactccaaacttccaacataacaaaattggaacagaagaagaacccacaagctgttctagatgttctcaaattctatgattccaaagaaacagtcaacaaccagaaatacatgagctttacatcaggagataaaagtgcacatggatacatagcagcccatccttcgagtacaaaaacagcatctgagcctccattggcccctcctgtgtctgaagaagaagatgaagaggaagaagaagaagaagatgaaaatgagccaccaccagttatcgcaccaagaccagagcatacaaaatcaatctatactcgttctgtggttgaatccattgcttcaccagcagtaccaaataaagaggtcacaccaccctctgctgaaaatgccaattccagtactttgtacaggaacacagatcggcaaagaaaaaaatccaagatgacagatgaggagatcttagagaagctaagaagcattgtgagtgttggggacccaaagaaaaaatacacaagatttgaaaaaattggtcaaggggcatcaggtactgtttatacagcactagacattgcaacaggacaagaggtggccataaagcagatgaaccttcaacagcaacccaagaaggaattaattattaatgaaattctggtcatgagggaaaataagaaccctaatattgttaattatttagatagctacttggtgggtgatgaactatgggtagtcatggaatacttggctggtggctctctgactgatgtggtcacagagacctgtatggatgaaggacagatagcagctgtctgcagagagtgcctgcaagctttggatttcctgcactcaaaccaggtgatccatagagatataaagagtgacaatattcttctcgggatggatggctctgttaaattgactgactttgggttctgtgcccagatcactcctgagcaaagtaaacgaagcactatggtgggaaccccatattggatggcacctgaggtggtgactcgaaaagcttatggtccgaaagttgatatctggtctcttggaattatggcaattgaaatggtggaaggtgaacccccttaccttaatgaaaatccactcagggcattgtatctgatagccactaatggaactccagagctccagaatcctgagagactgtcagctgtattccgtgactttttaaatcgctgtcttgagatggatgtggataggcgaggatctgccaaggagcttttgcagcatccatttttaaaattagccaagcctctctccagcctgactcctctgattatcgctgcaaaggaagcaattaagaacagcagccgctaagactgcaagccttacacctcaccatctccctcatgagtaagactgaaataaaactctgctgcaggaaagatggaagaaaagacagtcaaatggggtgggggttctttacctttcaaatgaatagaaacttcttataagcctttttcctactccctcagattatgtaatttatttgtaagcctgaatcgcagcccaaacagggcagcaatgttgaagtgaccataaagtggtcacttccaccgtgaagcgaaagagccagtagtgaatcccctcattttgtgcattcactttgaagaaaaaggtttctcaaagatgcacactccctcttcatagtgttgtgtttgtttttaagttagagagtagtccctcttgcattcaaacctccttcaaaactccttacccaatgtgatgtttttcacttgcattgtcattagatgtccagaaaaaaaaaagatgtcaaaatgtttttctaaaaaaagaaagc

SEQ ID NO: 163247 - DNA, 2196 bp, Homo sapiens
  Payload ID: 12167
  Gene Symbol: PAK3
  Gene Name: p21 protein (Cdc42/Rac)-activated kinase 3
  Uniprot ID: O75914
  ENST ID: ENST00000417227
  CDS Start-End: 28-1725
gagctgtgaaattagttgtaactgaaaatgtctgacggtctggataatgaagagaaacccccggctcctccactgaggatgaatagtaacaaccgggattcttcagcactcaaccacagctccaaaccacttcccatggcccctgaagagaagaataagaaagccaggcttcgctctatcttcccaggaggaggggataaaaccaataagaagaaggagaaagagcgcccagagatctctcttccttcagactttgagcatacgattcatgtggggtttgatgcagtcaccggggaattcactaactcccctttccagacctctagacctgtgacggtcgcttcaagtcaatcagagggaaaaatgggaattccagagcaatgggcacgattactccaaacttccaacataacaaaattggaacagaagaagaacccacaagctgttctagatgttctcaaattctatgattccaaagaaacagtcaacaaccagaaatacatgagctttacatcaggagataaaagtgcacatggatacatagcagcccatccttcgagtacaaaaacagcatctgagcctccattggcccctcctgtgtctgaagaagaagatgaagaggaagaagaagaagaagatgaaaatgagccaccaccagttatcgcaccaagaccagagcatacaaaatcaatctatactcgttctgtggttgaatccattgcttcaccagcagtaccaaataaagaggtcacaccaccctctgctgaaaatgccaattccagtactttgtacaggaacacagatcggcaaagaaaaaaatccaagatgacagatgaggagatcttagagaagctaagaagcattgtgagtgttggggacccaaagaaaaaatacacaagatttgaaaaaattggtcaaggggcatcaggtactgtttatacagcactagacattgcaacaggacaagaggtggccataaagcagatgaaccttcaacagcaacccaagaaggaattaattattaatgaaattctggtcatgagggaaaataagaaccctaatattgttaattatttagatagctacttggtgggtgatgaactatgggtagtcatggaatacttggctggtggctctctgactgatgtggtcacagagacctgtatggatgaaggacagatagcagctgtctgcagagagtgcctgcaagctttggatttcctgcactcaaaccaggtgatccatagagatataaagagtgacaatattcttctcgggatggatggctctgttaaattgactgactttgggttctgtgcccagatcactcctgagcaaagtaaacgaagcactatggtgggaaccccatattggatggcacctgaggtggtgactcgaaaagcttatggtccgaaagttgatatctggtctcttggaattatggcaattgaaatggtggaaggtgaacccccttaccttaatgaaaatccactcagggcattgtatctgatagccactaatggaactccagagctccagaatcctgagagactgtcagctgtattccgtgactttttaaatcgctgtcttgagatggatgtggataggcgaggatctgccaaggagcttttgcagcatccatttttaaaattagccaagcctctctccagcctgactcctctgattatcgctgcaaaggaagcaattaagaacagcagccgctaagactgcaagccttacacctcaccatctccctcatgagtaagactgaaataaaactctgctgcaggaaagatggaagaaaagacagtcaaatggggtgggggttctttacctttcaaatgaatagaaacttcttataagcctttttcctactccctcagattatgtaatttatttgtaagcctgaatcgcagcccaaacagggcagcaatgttgaagtgaccataaagtggtcacttccaccgtgaagcgaaagagccagtagtgaatcccctcattttgtgcattcactttgaagaaaaaggtttctcaaagatgcacactccctcttcatagtgttgtgtttgtttttaagttagagagtagtccctcttgcattcaaacctccttcaaaactccttacccaatgtgatgtttttcacttgcattgtcattagatgtccagaaaaaaaaaagatgtcaaaatgtttttct

SEQ ID NO: 163248 - DNA, 2477 bp, Homo sapiens
  Payload ID: 12167
  Gene Symbol: PAK3
  Gene Name: p21 protein (Cdc42/Rac)-activated kinase 3
  Uniprot ID: O75914
  ENST ID: ENST00000425146
  CDS Start-End: 372-2006
aatcacagtcaaaatacacccagatgctctcacacacccagacgcgcgcgcatccccgggccatggggcgcacgtgagcccgcaccccgcgcacccagccctgcctctcgccagagcatcctcagcagctgccaccgaagcagcctcctccttctctcttcctcctcctcctaccacggccgccgccaccaccgctgcggctgtgatctcctatcccctctggtcctccttcctcccccagttcctgctcctcctcccatcccctgctcctcctgcccagcagcgaagggcagaaccctcggctgccgccctccttcgctctgaccaagaagaggctggaacaggagctgtgaaattagttgtaactgaaaatgtctgacggtctggataatgaagagaaacccccggctcctccactgaggatgaatagtaacaaccgggattcttcagcactcaaccacagctccaaaccacttcccatggcccctgaagagaagaataagaaagccaggcttcgctctatcttcccaggaggaggggataaaaccaataagaagaaggagaaagagcgcccagagatctctcttccttcagactttgagcatacgattcatgtggggtttgatgcagtcaccggggaattcactggaattccagagcaatgggcacgattactccaaacttccaacataacaaaattggaacagaagaagaacccacaagctgttctagatgttctcaaattctatgattccaaagaaacagtcaacaaccagaaatacatgagctttacatcaggagataaaagtgcacatggatacatagcagcccatccttcgagtacaaaaacagcatctgagcctccattggcccctcctgtgtctgaagaagaagatgaagaggaagaagaagaagaagatgaaaatgagccaccaccagttatcgcaccaagaccagagcatacaaaatcaatctatactcgttctgtggttgaatccattgcttcaccagcagtaccaaataaagaggtcacaccaccctctgctgaaaatgccaattccagtactttgtacaggaacacagatcggcaaagaaaaaaatccaagatgacagatgaggagatcttagagaagctaagaagcattgtgagtgttggggacccaaagaaaaaatacacaagatttgaaaaaattggtcaaggggcatcaggtactgtttatacagcactagacattgcaacaggacaagaggtggccataaagcagatgaaccttcaacagcaacccaagaaggaattaattattaatgaaattctggtcatgagggaaaataagaaccctaatattgttaattatttagatagctacttggtgggtgatgaactatgggtagtcatggaatacttggctggtggctctctgactgatgtggtcacagagacctgtatggatgaaggacagatagcagctgtctgcagagagtgcctgcaagctttggatttcctgcactcaaaccaggtgatccatagagatataaagagtgacaatattcttctcgggatggatggctctgttaaattgactgactttgggttctgtgcccagatcactcctgagcaaagtaaacgaagcactatggtgggaaccccatattggatggcacctgaggtggtgactcgaaaagcttatggtccgaaagttgatatctggtctcttggaattatggcaattgaaatggtggaaggtgaacccccttaccttaatgaaaatccactcagggcattgtatctgatagccactaatggaactccagagctccagaatcctgagagactgtcagctgtattccgtgactttttaaatcgctgtcttgagatggatgtggataggcgaggatctgccaaggagcttttgcagcatccatttttaaaattagccaagcctctctccagcctgactcctctgattatcgctgcaaaggaagcaattaagaacagcagccgctaagactgcaagccttacacctcaccatctccctcatgagtaagactgaaataaaactctgctgcaggaaagatggaagaaaagacagtcaaatggggtgggggttctttacctttcaaatgaatagaaacttcttataagcctttttcctactccctcagattatgtaatttatttgtaagcctgaatcgcagcccaaacagggcagcaatgttgaagtgaccataaagtggtcacttccaccgtgaagcgaaagagccagtagtgaatcccctcattttgtgcattcactttgaagaaaaaggtttctcaaagatgcacactccctcttcatagtgttgtgtttgtttttaagttagagagtagtccctcttgcattcaaacctccttcaaaactccttacccaatgtgatgtttttcacttgcattgtcattagatgtccagaaaaaaaaaagatgtcaaaatgtttttct

SEQ ID NO: 163249 - DNA, 573 bp, Homo sapiens
  Payload ID: 12167
  Gene Symbol: PAK3
  Gene Name: p21 protein (Cdc42/Rac)-activated kinase 3
  ENST ID: ENST00000429193
  CDS Start-End: 29-573
ggagctgtgaaattagttgtaactgaaaatgtctgacggtctggataatgaagagaaacccccggctcctccactgaggatgaatagtaacaaccgggattcttcagcactcaaccacagctccaaaccacttcccatggcccctgaagagaagaataagaaagccaggcttcgctctatcttcccaggaggaggggataaaaccaataagaagaaggagaaagagcgcccagagatctctcttccttcagactttgagcatacgattcatgtggggtttgatgcagtcaccggggaattcactaactcccctttccagacctctagacctgtgacggtcgcttcaagtcaatcagagggaaaaatgccagatctctatggctcacagatgtgcccagggaagctcccagagggaattccagagcaatgggcacgattactccaaacttccaacataacaaaattggaacagaagaagaacccacaagctgttctagatgttctcaaattctatgattccaaagaaacagtcaacaaccagaaatacatgagctttacatcaggagataaaag

SEQ ID NO: 163250 - DNA, 2550 bp, Homo sapiens
  Payload ID: 12167
  Gene Symbol: PAK3
  Gene Name: p21 protein (Cdc42/Rac)-activated kinase 3
  Uniprot ID: O75914
  ENST ID: ENST00000446737
  CDS Start-End: 445-2079
aatcacagtcaaaatacacccagatgctctcacacacccagacgcgcgcgcatccccgggccatggggcgcacgtgagcccgcaccccgcgcacccagccctgcctctcgccagagcatcctcagcagctgccaccgaagcagcctcctccttctctcttcctcctcctcctaccacggccgccgccaccaccgctgcggctgtgatctcctatcccctctggtcctccttcctcccccagttcctgctcctcctcccatcccctgctcctcctgcccagcagcgaagggcagaaccctcggctgccgccctccttcgctctgaccaagaagaggctggaacagaataacatacagaggacagctttctcttctgaggagtcagaagttcagttcgcccaacatggaatgacttgaggagctgtgaaattagttgtaactgaaaatgtctgacggtctggataatgaagagaaacccccggctcctccactgaggatgaatagtaacaaccgggattcttcagcactcaaccacagctccaaaccacttcccatggcccctgaagagaagaataagaaagccaggcttcgctctatcttcccaggaggaggggataaaaccaataagaagaaggagaaagagcgcccagagatctctcttccttcagactttgagcatacgattcatgtggggtttgatgcagtcaccggggaattcactggaattccagagcaatgggcacgattactccaaacttccaacataacaaaattggaacagaagaagaacccacaagctgttctagatgttctcaaattctatgattccaaagaaacagtcaacaaccagaaatacatgagctttacatcaggagataaaagtgcacatggatacatagcagcccatccttcgagtacaaaaacagcatctgagcctccattggcccctcctgtgtctgaagaagaagatgaagaggaagaagaagaagaagatgaaaatgagccaccaccagttatcgcaccaagaccagagcatacaaaatcaatctatactcgttctgtggttgaatccattgcttcaccagcagtaccaaataaagaggtcacaccaccctctgctgaaaatgccaattccagtactttgtacaggaacacagatcggcaaagaaaaaaatccaagatgacagatgaggagatcttagagaagctaagaagcattgtgagtgttggggacccaaagaaaaaatacacaagatttgaaaaaattggtcaaggggcatcaggtactgtttatacagcactagacattgcaacaggacaagaggtggccataaagcagatgaaccttcaacagcaacccaagaaggaattaattattaatgaaattctggtcatgagggaaaataagaaccctaatattgttaattatttagatagctacttggtgggtgatgaactatgggtagtcatggaatacttggctggtggctctctgactgatgtggtcacagagacctgtatggatgaaggacagatagcagctgtctgcagagagtgcctgcaagctttggatttcctgcactcaaaccaggtgatccatagagatataaagagtgacaatattcttctcgggatggatggctctgttaaattgactgactttgggttctgtgcccagatcactcctgagcaaagtaaacgaagcactatggtgggaaccccatattggatggcacctgaggtggtgactcgaaaagcttatggtccgaaagttgatatctggtctcttggaattatggcaattgaaatggtggaaggtgaacccccttaccttaatgaaaatccactcagggcattgtatctgatagccactaatggaactccagagctccagaatcctgagagactgtcagctgtattccgtgactttttaaatcgctgtcttgagatggatgtggataggcgaggatctgccaaggagcttttgcagcatccatttttaaaattagccaagcctctctccagcctgactcctctgattatcgctgcaaaggaagcaattaagaacagcagccgctaagactgcaagccttacacctcaccatctccctcatgagtaagactgaaataaaactctgctgcaggaaagatggaagaaaagacagtcaaatggggtgggggttctttacctttcaaatgaatagaaacttcttataagcctttttcctactccctcagattatgtaatttatttgtaagcctgaatcgcagcccaaacagggcagcaatgttgaagtgaccataaagtggtcacttccaccgtgaagcgaaagagccagtagtgaatcccctcattttgtgcattcactttgaagaaaaaggtttctcaaagatgcacactccctcttcatagtgttgtgtttgtttttaagttagagagtagtccctcttgcattcaaacctccttcaaaactccttacccaatgtgatgtttttcacttgcattgtcattagatgtccagaaaaaaaaaagatgtcaaaatgtttttct

SEQ ID NO: 163251 - DNA, 2098 bp, Homo sapiens
  Payload ID: 12167
  Gene Symbol: PAK3
  Gene Name: p21 protein (Cdc42/Rac)-activated kinase 3
  Uniprot ID: O75914
  ENST ID: ENST00000518291
  CDS Start-End: 356-2098
cagaatccagttccagattctagacttgagggttctgggctgttggtctgtagaagcgaaggagagaaggactcaaatccaggccaagtgtatggctgtctgaggtattggaacagaaggaggtccattcctgttggtgacaacaccgtggccctgttctgggatgagcaaggtgtaaaggtttcccccaagaaagagcagctgagtccttgcatcttgtggcagctggtgtgcccagcactgagtctgtaggagctgaagccagcccggacccttctcatgggcagtgcccacctgtgctgaagtcctgcagcggtggcggtgtgaggagctgtgaaattagttgtaactgaaaatgtctgacggtctggataatgaagagaaacccccggctcctccactgaggatgaatagtaacaaccgggattcttcagcactcaaccacagctccaaaccacttcccatggcccctgaagagaagaataagaaagccaggcttcgctctatcttcccaggaggaggggataaaaccaataagaagaaggagaaagagcgcccagagatctctcttccttcagactttgagcatacgattcatgtggggtttgatgcagtcaccggggaattcactaactcccctttccagacctctagacctgtgacggtcgcttcaagtcaatcagagggaaaaatgccagatctctatggctcacagatgtgcccagggaagctcccagagggaattccagagcaatgggcacgattactccaaacttccaacataacaaaattggaacagaagaagaacccacaagctgttctagatgttctcaaattctatgattccaaagaaacagtcaacaaccagaaatacatgagctttacatcaggagataaaagtgcacatggatacatagcagcccatccttcgagtacaaaaacagcatctgagcctccattggcccctcctgtgtctgaagaagaagatgaagaggaagaagaagaagaagatgaaaatgagccaccaccagttatcgcaccaagaccagagcatacaaaatcaatctatactcgttctgtggttgaatccattgcttcaccagcagtaccaaataaagaggtcacaccaccctctgctgaaaatgccaattccagtactttgtacaggaacacagatcggcaaagaaaaaaatccaagatgacagatgaggagatcttagagaagctaagaagcattgtgagtgttggggacccaaagaaaaaatacacaagatttgaaaaaattggtcaaggggcatcaggtactgtttatacagcactagacattgcaacaggacaagaggtggccataaagcagatgaaccttcaacagcaacccaagaaggaattaattattaatgaaattctggtcatgagggaaaataagaaccctaatattgttaattatttagatagctacttggtgggtgatgaactatgggtagtcatggaatacttggctggtggctctctgactgatgtggtcacagagacctgtatggatgaaggacagatagcagctgtctgcagagagtgcctgcaagctttggatttcctgcactcaaaccaggtgatccatagagatataaagagtgacaatattcttctcgggatggatggctctgttaaattgactgactttgggttctgtgcccagatcactcctgagcaaagtaaacgaagcactatggtgggaaccccatattggatggcacctgaggtggtgactcgaaaagcttatggtccgaaagttgatatctggtctcttggaattatggcaattgaaatggtggaaggtgaacccccttaccttaatgaaaatccactcagggcattgtatctgatagccactaatggaactccagagctccagaatcctgagagactgtcagctgtattccgtgactttttaaatcgctgtcttgagatggatgtggataggcgaggatctgccaaggagcttttgcagcatccatttttaaaattagccaagcctctctccagcctgactcctctgattatcgctgcaaaggaagcaattaagaacagcagccgctaa

SEQ ID NO: 163252 - DNA, 2638 bp, Homo sapiens
  Payload ID: 12167
  Gene Symbol: PAK3
  Gene Name: p21 protein (Cdc42/Rac)-activated kinase 3
  Uniprot ID: O75914
  ENST ID: ENST00000519681
  CDS Start-End: 443-2140
ctggagcgctcggaggtagaggaaaggtcttgacggggtggctggatccgtggcagaatccagttccagattctagacttgagggttctgggctgttggtctgtagaagcgaaggagagaaggccatgttagtcttgctcccctcatggttttgcagactcaaatccaggccaagtgtatggctgtctgaggtattggaacagaaggaggtccattcctgttggtgacaacaccgtggccctgttctgggatgagcaaggtgtaaaggtttcccccaagaaagagcagctgagtccttgcatcttgtggcagctggtgtgcccagcactgagtctgtaggagctgaagccagcccggacccttctcatgggcagtgcccacctgtgctgaagtcctgcagcggtggcggtgtgaggagctgtgaaattagttgtaactgaaaatgtctgacggtctggataatgaagagaaacccccggctcctccactgaggatgaatagtaacaaccgggattcttcagcactcaaccacagctccaaaccacttcccatggcccctgaagagaagaataagaaagccaggcttcgctctatcttcccaggaggaggggataaaaccaataagaagaaggagaaagagcgcccagagatctctcttccttcagactttgagcatacgattcatgtggggtttgatgcagtcaccggggaattcactaactcccctttccagacctctagacctgtgacggtcgcttcaagtcaatcagagggaaaaatgggaattccagagcaatgggcacgattactccaaacttccaacataacaaaattggaacagaagaagaacccacaagctgttctagatgttctcaaattctatgattccaaagaaacagtcaacaaccagaaatacatgagctttacatcaggagataaaagtgcacatggatacatagcagcccatccttcgagtacaaaaacagcatctgagcctccattggcccctcctgtgtctgaagaagaagatgaagaggaagaagaagaagaagatgaaaatgagccaccaccagttatcgcaccaagaccagagcatacaaaatcaatctatactcgttctgtggttgaatccattgcttcaccagcagtaccaaataaagaggtcacaccaccctctgctgaaaatgccaattccagtactttgtacaggaacacagatcggcaaagaaaaaaatccaagatgacagatgaggagatcttagagaagctaagaagcattgtgagtgttggggacccaaagaaaaaatacacaagatttgaaaaaattggtcaaggggcatcaggtactgtttatacagcactagacattgcaacaggacaagaggtggccataaagcagatgaaccttcaacagcaacccaagaaggaattaattattaatgaaattctggtcatgagggaaaataagaaccctaatattgttaattatttagatagctacttggtgggtgatgaactatgggtagtcatggaatacttggctggtggctctctgactgatgtggtcacagagacctgtatggatgaaggacagatagcagctgtctgcagagagtgcctgcaagctttggatttcctgcactcaaaccaggtgatccatagagatataaagagtgacaatattcttctcgggatggatggctctgttaaattgactgactttgggttctgtgcccagatcactcctgagcaaagtaaacgaagcactatggtgggaaccccatattggatggcacctgaggtggtgactcgaaaagcttatggtccgaaagttgatatctggtctcttggaattatggcaattgaaatggtggaaggtgaacccccttaccttaatgaaaatccactcagggcattgtatctgatagccactaatggaactccagagctccagaatcctgagagactgtcagctgtattccgtgactttttaaatcgctgtcttgagatggatgtggataggcgaggatctgccaaggagcttttgcagcatccatttttaaaattagccaagcctctctccagcctgactcctctgattatcgctgcaaaggaagcaattaagaacagcagccgctaagactgcaagccttacacctcaccatctccctcatgagtaagactgaaataaaactctgctgcaggaaagatggaagaaaagacagtcaaatggggtgggggttctttacctttcaaatgaatagaaacttcttataagcctttttcctactccctcagattatgtaatttatttgtaagcctgaatcgcagcccaaacagggcagcaatgttgaagtgaccataaagtggtcacttccaccgtgaagcgaaagagccagtagtgaatcccctcattttgtgcattcactttgaagaaaaaggtttctcaaagatgcacactccctcttcatagtgttgtgtttgtttttaagttagagagtagtccctcttgcattcaaacctccttcaaaactccttacccaatgtgatgtttttcacttgcattgtcattagatgtccagaaaaaaaaaagatgtcaaaatgtttttctaaaaaaagaaagcaaaaaaagcaaggc

SEQ ID NO: 163253 - DNA, 2130 bp, Homo sapiens
  Payload ID: 12167
  Gene Symbol: PAK3
  Gene Name: p21 protein (Cdc42/Rac)-activated kinase 3
  ENST ID: ENST00000620137
  CDS Start-End: 1-1632
atgtctgacggtctggataatgaagagaaacccccggctcctccactgaggatgaatagtaacccgggattcttcagcactcaaccacagctcaaaccacttcccatggcccctgaagagaagaataagaaagccaggcttcgctctatcttcccaggaggaggggataaaaccaataagaagaaggagaaagagcgcccagagatctctcttccttcagactttgagcatacgattcatgtggggtttgatgcagtcaccggggaattcactggaattccagagcaatgggcacgattactccaaacttccaacataacaaaattggaacagaagaagaacccacaagctgttctagatgttctcaaattctatgattccaaagaaacagtcaacaaccagaaatacatgagctttacatcaggagataaaagtgcacatggatacatagcagcccatccttcgagtacaaaaacagcatctgagcctccattggcccctcctgtgtctgaagaagaagatgaagaggaagaagaagaagaagatgaaaatgagccaccaccagttatcgcaccaagaccagagcatacaaaatcaatctatactcgttctgtggttgaatccattgcttcaccagcagtaccaaataaagaggtcacaccaccctctgctgaaaatgccaattccagtactttgtacaggaacacagatcggcaaagaaaaaaatccaagatgacagatgaggagatcttagagaagctaagaagcattgtgagtgttggggacccaaagaaaaaatacacaagatttgaaaaaattggtcaaggggcatcaggtactgtttatacagcactagacattgcaacaggacaagaggtggccataaagcagatgaaccttcaacagcaacccaagaaggaattaattattaatgaaattctggtcatgagggaaaataagaaccctaatattgttaattatttagatagctacttggtgggtgatgaactatgggtagtcatggaatacttggctggtggctctctgactgatgtggtcacagagacctgtatggatgaaggacagatagcagctgtctgcagagagtgcctgcaagctttggatttcctgcactcaaaccaggtgatccatagagatataaagagtgacaatattcttctcgggatggatggctctgttaaattgactgactttgggttctgtgcccagatcactcctgagcaaagtaaacgaagcactatggtgggaaccccatattggatggcacctgaggtggtgactcgaaaagcttatggtccgaaagttgatatctggtctcttggaattatggcaattgaaatggtggaaggtgaacccccttaccttaatgaaaatccactcagggcattgtatctgatagccactaatggaactccagagctccagaatcctgagagactgtcagctgtattccgtgactttttaaatcgctgtcttgagatggatgtggataggcgaggatctgccaaggagcttttgcagcatccatttttaaaattagccaagcctctctccagcctgactcctctgattatcgctgcaaaggaagcaattaagaacagcagccgctaagactgcaagccttacacctcaccatctccctcatgagtaagactgaaataaaactctgctgcaggaaagatggaagaaaagacagtcaaatggggtgggggttctttacctttcaaatgaatagaaacttcttataagcctttttcctactccctcagattatgtaatttatttgtaagcctgaatcgcagcccaaacagggcagcaatgttgaagtgaccataaagtggtcacttccaccgtgaagcgaaagagccagtagtgaatcccctcattttgtgcattcactttgaagaaaaaggtttctcaaagatgcacactccctcttcatagtgttgtgtttgtttttaagttagagagtagtccctcttgcattcaaacctccttcaaaactccttacccaatgtgatgtttttcacttgcattgtcattagatgtccagaaaaaaaaaagatgtcaaaatgtttttctaaaaaaagaaagcaaaaaaagcaaggc

SEQ ID NO: 163254 - DNA, 2555 bp, Homo sapiens
  Payload ID: 12168
  Gene Symbol: PAK4
  Gene Name: p21 protein (Cdc42/Rac)-activated kinase 4
  Uniprot ID: O96013
  ENST ID: ENST00000321944
  CDS Start-End: 228-1733
gggattcaacatggcggcgggagtgtccgcggtggtggcggtgcaagagagctgagggaggcgcgagggcgcggagttccaggtcgagcagttaggccgcgagcgactgcggcgccgagccgatgagtaacccgaagcccctagaggagtggtcacctgcctgagggcacttctgtcccaccagcatcagaccaggtgtgtgcaggccgcaccgagtccccggcaccatgtttgggaagaggaagaagcgggtggagatctccgcgccgtccaacttcgagcaccgcgtgcacacgggcttcgaccagcacgagcagaagttcacggggctgccccgccagtggcagagcctgatcgaggagtcggctcgccggcccaagcccctcgtcgaccccgcctgcatcacctccatccagcccggggcccccaagaccatcgtgcggggcagcaaaggtgccaaagatggggccctcacgctgctgctggacgagtttgagaacatgtcggtgacacgctccaactccctgcggagagacagcccgccgccgcccgcccgtgcccgccaggaaaatgggatgccagaggagccggccaccacggccagagggggcccagggaagggggagcctcatgacgtggcccctaacgggccatcagcggggggcctggccatcccccagtcctcctcctcctcctcccggcctcccacccgagcccgaggtgcccccagccctggagtgctgggaccccacgcctcagagccccagctggcccctccagcctgcacccccgccgcccctgctgttcctgggccccctggcccccgctcaccacagcgggagccacagcgagtatcccatgagcagttccgggctgccctgcagctggtggtggacccaggcgacccccgctcctacctggacaacttcatcaagattggcgagggctccacgggcatcgtgtgcatcgccaccgtgcgcagctcgggcaagctggtggccgtcaagaagatggacctgcgcaagcagcagaggcgcgagctgctcttcaacgaggtggtaatcatgagggactaccagcacgagaatgtggtggagatgtacaacagctacctggtgggggacgagctctgggtggtcatggagttcctggaaggaggcgccctcaccgacatcgtcacccacaccaggatgaacgaggagcagatcgcggccgtgtgccttgcagtgctgcaggccctgtcggtgctccacgcccagggcgtcatccaccgggacatcaagagcgactcgatcctgctgacccatgatggcagggtgaagctgtcagactttgggttctgcgcccaggtgagcaaggaagtgccccgaaggaagtcgctggtcggcacgccctactggatggccccagagctcatctcccgccttccctacgggccagaggtagacatctggtcgctggggataatggtgattgagatggtggacggagagcccccctacttcaacgagccacccctcaaagccatgaagatgattcgggacaacctgccaccccgactgaagaacctgcacaaggtgtcgccatccctgaagggcttcctggaccgcctgctggtgcgagaccctgcccagcgggccacggcagccgagctgctgaagcacccattcctggccaaggcagggccgcctgccagcatcgtgcccctcatgcgccagaaccgcaccagatgaggcccagcgcccttcccctcaaccaaagagccccccgggtcacccccgccccactgaggccagtagggggccaggcctcccactcctcccagcccgggagatgctccgcgtggcaccaccctccttgctgggggtagatgagaccctactactgaactccagttttgatctcgtgacttttagaaaaacacagggactcgtgggagcaagcgaggctcccaggacccccaccctctgggacaggccctcccccatgttcttctgtctccaggaagggcagcggccctcccatcactggaagtctgcagtgggggtcgctgggggtggagagaacactaagaggtgaacatgtatgagtgtgtgcacgcgtgtgagtgtgcatgtgtgtgtgtgcaaaggtccagccaccccgtcctccagcctgcaaggggtgtctggcgccttgcctgacacccagccccctctccccctgagccattgtgggggtcgatcatgaatgtccgaagagtggccttttcccgtagccctgcgccccctttctgtggctggatggggagacaggtcagggccccccaccctctccagcccctgcagcaaatgactactgcacctggacagcctcctcttttctagaagtctatttatattgtcattttataacactctagcccctgcccttattgggggacagatggtccctgtcctgcggggtggccctggcagaaccactgcctgaagaaccaggttcctgcccggtcagcgcagccccagcccgcccacccctgcctcgagttagttttacaattaaaacattgtcttgtt

SEQ ID NO: 163255 - DNA, 2739 bp, Homo sapiens
  Payload ID: 12168
  Gene Symbol: PAK4
  Gene Name: p21 protein (Cdc42/Rac)-activated kinase 4
  Uniprot ID: O96013
  ENST ID: ENST00000358301
  CDS Start-End: 141-1916
ttcaacatggcggcgggagtgtccgcggtggtggcggtgcaagagagctgagggaggcgcgagggcgcggagttccaggtcgagcagttaggccgcgagcgactgcggcgccgagccggccgcaccgagtccccggcaccatgtttgggaagaggaagaagcgggtggagatctccgcgccgtccaacttcgagcaccgcgtgcacacgggcttcgaccagcacgagcagaagttcacggggctgccccgccagtggcagagcctgatcgaggagtcggctcgccggcccaagcccctcgtcgaccccgcctgcatcacctccatccagcccggggcccccaagaccatcgtgcggggcagcaaaggtgccaaagatggggccctcacgctgctgctggacgagtttgagaacatgtcggtgacacgctccaactccctgcggagagacagcccgccgccgcccgcccgtgcccgccaggaaaatgggatgccagaggagccggccaccacggccagagggggcccagggaaggcaggcagccgaggccggttcgccggtcacagcgaggcgggtggcggcagtggtgacaggcgacgggcggggccagagaagaggcccaagtcttccagggagggctcagggggtccccaggagtcctcccgggacaaacgccccctctccgggcctgatgtcggcaccccccagcctgctggtctggccagtggggcgaaactggcagctggccggccctttaacacctacccgagggctgacacggaccacccatcccggggtgcccagggggagcctcatgacgtggcccctaacgggccatcagcggggggcctggccatcccccagtcctcctcctcctcctcccggcctcccacccgagcccgaggtgcccccagccctggagtgctgggaccccacgcctcagagccccagctggcccctccagcctgcacccccgccgcccctgctgttcctgggccccctggcccccgctcaccacagcgggagccacagcgagtatcccatgagcagttccgggctgccctgcagctggtggtggacccaggcgacccccgctcctacctggacaacttcatcaagattggcgagggctccacgggcatcgtgtgcatcgccaccgtgcgcagctcgggcaagctggtggccgtcaagaagatggacctgcgcaagcagcagaggcgcgagctgctcttcaacgaggtggtaatcatgagggactaccagcacgagaatgtggtggagatgtacaacagctacctggtgggggacgagctctgggtggtcatggagttcctggaaggaggcgccctcaccgacatcgtcacccacaccaggatgaacgaggagcagatcgcggccgtgtgccttgcagtgctgcaggccctgtcggtgctccacgcccagggcgtcatccaccgggacatcaagagcgactcgatcctgctgacccatgatggcagggtgaagctgtcagactttgggttctgcgcccaggtgagcaaggaagtgccccgaaggaagtcgctggtcggcacgccctactggatggccccagagctcatctcccgccttccctacgggccagaggtagacatctggtcgctggggataatggtgattgagatggtggacggagagcccccctacttcaacgagccacccctcaaagccatgaagatgattcgggacaacctgccaccccgactgaagaacctgcacaaggtgtcgccatccctgaagggcttcctggaccgcctgctggtgcgagaccctgcccagcgggccacggcagccgagctgctgaagcacccattcctggccaaggcagggccgcctgccagcatcgtgcccctcatgcgccagaaccgcaccagatgaggcccagcgcccttcccctcaaccaaagagccccccgggtcacccccgccccactgaggccagtagggggccaggcctcccactcctcccagcccgggagatgctccgcgtggcaccaccctccttgctgggggtagatgagaccctactactgaactccagttttgatctcgtgacttttagaaaaacacagggactcgtgggagcaagcgaggctcccaggacccccaccctctgggacaggccctcccccatgttcttctgtctccaggaagggcagcggccctcccatcactggaagtctgcagtgggggtcgctgggggtggagagaacactaagaggtgaacatgtatgagtgtgtgcacgcgtgtgagtgtgcatgtgtgtgtgtgcaaaggtccagccaccccgtcctccagcctgcaaggggtgtctggcgccttgcctgacacccagccccctctccccctgagccattgtgggggtcgatcatgaatgtccgaagagtggccttttcccgtagccctgcgccccctttctgtggctggatggggagacaggtcagggccccccaccctctccagcccctgcagcaaatgactactgcacctggacagcctcctcttttctagaagtctatttatattgtcattttataacactctagcccctgcccttattgggggacagatggtccctgtcctgcggggtggccctggcagaaccactgcctgaagaaccaggttcctgcccggtcagcgcagccccagcccgcccacccctgcctcgagttagttttacaattaaaacattgtcttgttt

SEQ ID NO: 163256 - DNA, 2855 bp, Homo sapiens
  Payload ID: 12168
  Gene Symbol: PAK4
  Gene Name: p21 protein (Cdc42/Rac)-activated kinase 4
  Uniprot ID: O96013
  ENST ID: ENST00000360442
  CDS Start-End: 253-2028
ccatctttctccaggctctctatgggatgccgccatcagaatgtctcttcctcagcccctttgttttttaaagtggctttggtcgaccatttgctctgtgcttggtactgtgtcaagggcccgattgaagaccacagatcctaaagataggggagtgtcgcgacaaggctgcctggggtgccctcttaacccaggggatcagtaaccctgtgctgagtcaatatccaaaggccgcaccgagtccccggcaccatgtttgggaagaggaagaagcgggtggagatctccgcgccgtccaacttcgagcaccgcgtgcacacgggcttcgaccagcacgagcagaagttcacggggctgccccgccagtggcagagcctgatcgaggagtcggctcgccggcccaagcccctcgtcgaccccgcctgcatcacctccatccagcccggggcccccaagaccatcgtgcggggcagcaaaggtgccaaagatggggccctcacgctgctgctggacgagtttgagaacatgtcggtgacacgctccaactccctgcggagagacagcccgccgccgcccgcccgtgcccgccaggaaaatgggatgccagaggagccggccaccacggccagagggggcccagggaaggcaggcagccgaggccggttcgccggtcacagcgaggcgggtggcggcagtggtgacaggcgacgggcggggccagagaagaggcccaagtcttccagggagggctcagggggtccccaggagtcctcccgggacaaacgccccctctccgggcctgatgtcggcaccccccagcctgctggtctggccagtggggcgaaactggcagctggccggccctttaacacctacccgagggctgacacggaccacccatcccggggtgcccagggggagcctcatgacgtggcccctaacgggccatcagcggggggcctggccatcccccagtcctcctcctcctcctcccggcctcccacccgagcccgaggtgcccccagccctggagtgctgggaccccacgcctcagagccccagctggcccctccagcctgcacccccgccgcccctgctgttcctgggccccctggcccccgctcaccacagcgggagccacagcgagtatcccatgagcagttccgggctgccctgcagctggtggtggacccaggcgacccccgctcctacctggacaacttcatcaagattggcgagggctccacgggcatcgtgtgcatcgccaccgtgcgcagctcgggcaagctggtggccgtcaagaagatggacctgcgcaagcagcagaggcgcgagctgctcttcaacgaggtggtaatcatgagggactaccagcacgagaatgtggtggagatgtacaacagctacctggtgggggacgagctctgggtggtcatggagttcctggaaggaggcgccctcaccgacatcgtcacccacaccaggatgaacgaggagcagatcgcggccgtgtgccttgcagtgctgcaggccctgtcggtgctccacgcccagggcgtcatccaccgggacatcaagagcgactcgatcctgctgacccatgatggcagggtgaagctgtcagactttgggttctgcgcccaggtgagcaaggaagtgccccgaaggaagtcgctggtcggcacgccctactggatggccccagagctcatctcccgccttccctacgggccagaggtagacatctggtcgctggggataatggtgattgagatggtggacggagagcccccctacttcaacgagccacccctcaaagccatgaagatgattcgggacaacctgccaccccgactgaagaacctgcacaaggtgtcgccatccctgaagggcttcctggaccgcctgctggtgcgagaccctgcccagcgggccacggcagccgagctgctgaagcacccattcctggccaaggcagggccgcctgccagcatcgtgcccctcatgcgccagaaccgcaccagatgaggcccagcgcccttcccctcaaccaaagagccccccgggtcacccccgccccactgaggccagtagggggccaggcctcccactcctcccagcccgggagatgctccgcgtggcaccaccctccttgctgggggtagatgagaccctactactgaactccagttttgatctcgtgacttttagaaaaacacagggactcgtgggagcaagcgaggctcccaggacccccaccctctgggacaggccctcccccatgttcttctgtctccaggaagggcagcggccctcccatcactggaagtctgcagtgggggtcgctgggggtggagagaacactaagaggtgaacatgtatgagtgtgtgcacgcgtgtgagtgtgcatgtgtgtgtgtgcaaaggtccagccaccccgtcctccagcctgcaaggggtgtctggcgccttgcctgacacccagccccctctccccctgagccattgtgggggtcgatcatgaatgtccgaagagtggccttttcccgtagccctgcgccccctttctgtggctggatggggagacaggtcagggccccccaccctctccagcccctgcagcaaatgactactgcacctggacagcctcctcttttctagaagtctatttatattgtcattttataacactctagcccctgcccttattgggggacagatggtccctgtcctgcggggtggccctggcagaaccactgcctgaagaaccaggttcctgcccggtcagcgcagccccagcccgcccacccctgcctcgagttagttttacaattaaaacattgtcttgttttgtg

SEQ ID NO: 163257 - DNA, 3025 bp, Homo sapiens
  Payload ID: 12168
  Gene Symbol: PAK4
  Gene Name: p21 protein (Cdc42/Rac)-activated kinase 4
  Uniprot ID: O96013
  ENST ID: ENST00000593690
  CDS Start-End: 428-2203
gcgggagtgtccgcggtggtggcggtgcaagagagctgagggaggcgcgagggcgcggagttccaggtcgagcagttaggccgcgagcgactgcggcgccgagccgatgagtaacccgaagcccctagaggagtggtcacctgcctgagggcacttctgtcccaccagcatcagaccaggtgtgtgcaggctctctatgggatgccgccatcagaatgtctcttcctcagcccctttgttttttaaagtggctttggtcgaccatttgctctgtgcttggtactgtgtcaagggcccgattgaagaccacagatcctaaagataggggagtgtcgcgacaaggctgcctggggtgccctcttaacccaggggatcagtaaccctgtgctgagtcaatatccaaaggccgcaccgagtccccggcaccatgtttgggaagaggaagaagcgggtggagatctccgcgccgtccaacttcgagcaccgcgtgcacacgggcttcgaccagcacgagcagaagttcacggggctgccccgccagtggcagagcctgatcgaggagtcggctcgccggcccaagcccctcgtcgaccccgcctgcatcacctccatccagcccggggcccccaagaccatcgtgcggggcagcaaaggtgccaaagatggggccctcacgctgctgctggacgagtttgagaacatgtcggtgacacgctccaactccctgcggagagacagcccgccgccgcccgcccgtgcccgccaggaaaatgggatgccagaggagccggccaccacggccagagggggcccagggaaggcaggcagccgaggccggttcgccggtcacagcgaggcgggtggcggcagtggtgacaggcgacgggcggggccagagaagaggcccaagtcttccagggagggctcagggggtccccaggagtcctcccgggacaaacgccccctctccgggcctgatgtcggcaccccccagcctgctggtctggccagtggggcgaaactggcagctggccggccctttaacacctacccgagggctgacacggaccacccatcccggggtgcccagggggagcctcatgacgtggcccctaacgggccatcagcggggggcctggccatcccccagtcctcctcctcctcctcccggcctcccacccgagcccgaggtgcccccagccctggagtgctgggaccccacgcctcagagccccagctggcccctccagcctgcacccccgccgcccctgctgttcctgggccccctggcccccgctcaccacagcgggagccacagcgagtatcccatgagcagttccgggctgccctgcagctggtggtggacccaggcgacccccgctcctacctggacaacttcatcaagattggcgagggctccacgggcatcgtgtgcatcgccaccgtgcgcagctcgggcaagctggtggccgtcaagaagatggacctgcgcaagcagcagaggcgcgagctgctcttcaacgaggtggtaatcatgagggactaccagcacgagaatgtggtggagatgtacaacagctacctggtgggggacgagctctgggtggtcatggagttcctggaaggaggcgccctcaccgacatcgtcacccacaccaggatgaacgaggagcagatcgcggccgtgtgccttgcagtgctgcaggccctgtcggtgctccacgcccagggcgtcatccaccgggacatcaagagcgactcgatcctgctgacccatgatggcagggtgaagctgtcagactttgggttctgcgcccaggtgagcaaggaagtgccccgaaggaagtcgctggtcggcacgccctactggatggccccagagctcatctcccgccttccctacgggccagaggtagacatctggtcgctggggataatggtgattgagatggtggacggagagcccccctacttcaacgagccacccctcaaagccatgaagatgattcgggacaacctgccaccccgactgaagaacctgcacaaggtgtcgccatccctgaagggcttcctggaccgcctgctggtgcgagaccctgcccagcgggccacggcagccgagctgctgaagcacccattcctggccaaggcagggccgcctgccagcatcgtgcccctcatgcgccagaaccgcaccagatgaggcccagcgcccttcccctcaaccaaagagccccccgggtcacccccgccccactgaggccagtagggggccaggcctcccactcctcccagcccgggagatgctccgcgtggcaccaccctccttgctgggggtagatgagaccctactactgaactccagttttgatctcgtgacttttagaaaaacacagggactcgtgggagcaagcgaggctcccaggacccccaccctctgggacaggccctcccccatgttcttctgtctccaggaagggcagcggccctcccatcactggaagtctgcagtgggggtcgctgggggtggagagaacactaagaggtgaacatgtatgagtgtgtgcacgcgtgtgagtgtgcatgtgtgtgtgtgcaaaggtccagccaccccgtcctccagcctgcaaggggtgtctggcgccttgcctgacacccagccccctctccccctgagccattgtgggggtcgatcatgaatgtccgaagagtggccttttcccgtagccctgcgccccctttctgtggctggatggggagacaggtcagggccccccaccctctccagcccctgcagcaaatgactactgcacctggacagcctcctcttttctagaagtctatttatattgtcattttataacactctagcccctgcccttattgggggacagatggtccctgtcctgcggggtggccctggcagaaccactgcctgaagaaccaggttcctgcccggtcagcgcagccccagcccgcccacccctgcctcgagttagttttacaattaaaacattgtcttgtt

SEQ ID NO: 163258 - DNA, 1715 bp, Homo sapiens
  Payload ID: 12168
  Gene Symbol: PAK4
  Gene Name: p21 protein (Cdc42/Rac)-activated kinase 4
  Uniprot ID: O96013
  ENST ID: ENST00000599470
  CDS Start-End: 161-1477
ccccggatgttcgttggggattcaacatggcggcgggagtgtccgcggtggtggcggtgcaagagagctgagggaggcgcgagggcgcggagttccaggtcgagcagttaggccgcgagcgactgcggcgccgagccggccgcaccgagtccccggcaccatgtttgggaagaggaagaagcgggtggagatctccgcgccgtccaacttcgagcaccgcgtgcacacgggcttcgaccagcacgagcagaagttcacggggctgccccgccagtggcagagcctgatcgaggagtcggctcgccggcccaagcccctcgtcgaccccgcctgcatcacctccatccagcccggggcccccaagggggagcctcatgacgtggcccctaacgggccatcagcggggggcctggccatcccccagtcctcctcctcctcctcccggcctcccacccgagcccgaggtgcccccagccctggagtgctgggaccccacgcctcagagccccagctggcccctccagcctgcacccccgccgcccctgctgttcctgggccccctggcccccgctcaccacagcgggagccacagcgagtatcccatgagcagttccgggctgccctgcagctggtggtggacccaggcgacccccgctcctacctggacaacttcatcaagattggcgagggctccacgggcatcgtgtgcatcgccaccgtgcgcagctcgggcaagctggtggccgtcaagaagatggacctgcgcaagcagcagaggcgcgagctgctcttcaacgaggtggtaatcatgagggactaccagcacgagaatgtggtggagatgtacaacagctacctggtgggggacgagctctgggtggtcatggagttcctggaaggaggcgccctcaccgacatcgtcacccacaccaggatgaacgaggagcagatcgcggccgtgtgccttgcagtgctgcaggccctgtcggtgctccacgcccagggcgtcatccaccgggacatcaagagcgactcgatcctgctgacccatgatggcagggtgaagctgtcagactttgggttctgcgcccaggtgagcaaggaagtgccccgaaggaagtcgctggtcggcacgccctactggatggccccagagctcatctcccgccttccctacgggccagaggtagacatctggtcgctggggataatggtgattgagatggtggacggagagcccccctacttcaacgagccacccctcaaagccatgaagatgattcgggacaacctgccaccccgactgaagaacctgcacaaggtgtcgccatccctgaagggcttcctggaccgcctgctggtgcgagaccctgcccagcgggccacggcagccgagctgctgaagcacccattcctggccaaggcagggccgcctgccagcatcgtgcccctcatgcgccagaaccgcaccagatgaggcccagcgcccttcccctcaaccaaagagccccccgggtcacccccgccccactgaggccagtagggggccaggcctcccactcctcccagcccgggagatgctccgcgtggcaccaccctccttgctgggggtagatgagaccctactactgaactccagttttgatctcgtgacttttagaaaaacacagggactcgtgggagcaagcgaggctcccaggacccccaccctctgg

SEQ ID NO: 163259 - DNA, 5735 bp, Homo sapiens
  Payload ID: 12168
  Gene Symbol: PAK4
  Gene Name: p21 protein (Cdc42/Rac)-activated kinase 4
  Uniprot ID: O96013
  ENST ID: ENST00000599386
  CDS Start-End: 182-1498
ggcggtgcaagagagctgagggaggcgcgagggcgcggagttccaggtcgagcagttaggccgcgagcgactgcggcgccgagccgatgagtaacccgaagcccctagaggagtggtcacctgcctgagggcacttctgtcccaccagcatcagaccaggccgcaccgagtccccggcaccatgtttgggaagaggaagaagcgggtggagatctccgcgccgtccaacttcgagcaccgcgtgcacacgggcttcgaccagcacgagcagaagttcacggggctgccccgccagtggcagagcctgatcgaggagtcggctcgccggcccaagcccctcgtcgaccccgcctgcatcacctccatccagcccggggcccccaagggggagcctcatgacgtggcccctaacgggccatcagcggggggcctggccatcccccagtcctcctcctcctcctcccggcctcccacccgagcccgaggtgcccccagccctggagtgctgggaccccacgcctcagagccccagctggcccctccagcctgcacccccgccgcccctgctgttcctgggccccctggcccccgctcaccacagcgggagccacagcgagtatcccatgagcagttccgggctgccctgcagctggtggtggacccaggcgacccccgctcctacctggacaacttcatcaagattggcgagggctccacgggcatcgtgtgcatcgccaccgtgcgcagctcgggcaagctggtggccgtcaagaagatggacctgcgcaagcagcagaggcgcgagctgctcttcaacgaggtggtaatcatgagggactaccagcacgagaatgtggtggagatgtacaacagctacctggtgggggacgagctctgggtggtcatggagttcctggaaggaggcgccctcaccgacatcgtcacccacaccaggatgaacgaggagcagatcgcggccgtgtgccttgcagtgctgcaggccctgtcggtgctccacgcccagggcgtcatccaccgggacatcaagagcgactcgatcctgctgacccatgatggcagggtgaagctgtcagactttgggttctgcgcccaggtgagcaaggaagtgccccgaaggaagtcgctggtcggcacgccctactggatggccccagagctcatctcccgccttccctacgggccagaggtagacatctggtcgctggggataatggtgattgagatggtggacggagagcccccctacttcaacgagccacccctcaaagccatgaagatgattcgggacaacctgccaccccgactgaagaacctgcacaaggtgtcgccatccctgaagggcttcctggaccgcctgctggtgcgagaccctgcccagcgggccacggcagccgagctgctgaagcacccattcctggccaaggcagggccgcctgccagcatcgtgcccctcatgcgccagaaccgcaccagatgaggcccagcgcccttcccctcaaccaaagagccccccgggtcacccccgccccactgaggccagtagggggccaggcctcccactcctcccagcccgggagatgctccgcgtggcaccaccctccttgctgggggtagatgagaccctactactgaactccagttttgatctcgtgacttttagaaaaacacagggactcgtgggagcaagcgaggctcccaggacccccaccctctgggacaggccctcccccatgttcttctgtctccaggaagggcagcggccctcccatcactggaagtctgcagtgggggtcgctgggggtggagagaacactaagaggtgaacatgtatgagtgtgtgcacgcgtgtgagtgtgcatgtgtgtgtgtgcaaaggtccagccaccccgtcctccagcctgcaaggggtgtctggcgccttgcctgacacccagccccctctccccctgagccattgtgggggtcgatcatgaatgtccgaagagtggccttttcccgtagccctgcgccccctttctgtggctggatggggagacaggtcagggccccccaccctctccagcccctgcagcaaatgactactgcacctggacagcctcctcttttctagaagtctatttatattgtcattttataacactctagcccctgcccttattgggggacagatggtccctgtcctgcggggtggccctggcagaaccactgcctgaagaaccaggttcctgcccggtcagcgcagccccagcccgcccacccctgcctcgagttagttttacaattaaaacattgtcttgttttgtgtctgtgtgcgatgtgtggggggcagggggccctgcccggctgtcttgggtgggaatttgcagggagagggtctggatctgggagcaaaccacgattccagccaaggcagggcaagggtggggtggggagtggggagttcaggtcatagcagccagtaagctcccccagcctgccactccccagaatggggcaggattgtccccacccctggaagcagccagtttgccacagtccatgtgcagactgatcccagtttgccaaatctgcaatttcctggaaccttttaaaggctgtcttgagcgcgtttggtgagtaggagctaacccaagttagtaaattgaaggccatttggcaaattggtcagtgggcagatgggcttttggggattgactgaggctgactggcctggagctgctggcttcggagagacaccctgtgaagtgtgtccttccacgcaggagcccagagccgagcccacgctggggggaatctgactggcatggaggtggccatgccaccatcgctgctgcagctgcatcctggcactttgcgcctcaggccctgttgggctccactttctgcatcctccccagcccccagggaggcagtggagtggggagagagccaggagtgagcctccgtccccaaagccagccaggcgtcatcagcaccagagacctcagcctggtcctctcgggaagtgagtggccagggcagagattccaggttagtccacgcctcccacccttcacaggtcctgaccccaagaatcagagcactgtgtgtgtggcagggcctatgccaagtgcaaacacagcctagatggatcatcacagagtgaaacccagcggtgcaagcagctgtgctctctgcgatgtattggaggcttaggtgaggtggatgcctttctggaaaaaaaaaaaatgctaacattggcaaaagaagaaatagaaaacaagaccaaaataactgtctcctcactgcacacacactccagaataaataaaaggtttcaggcttgaatgcactttcaaatgagattttttttttttttttgagacggagtatcgctctgtcgcccaggctggagtgcagtggcacgatcttggctcactgcaacttctgcctcctgggttcaagcgattctcctgcctcagcctcccaagtagctgggattacaggcgcttgccaccacgccaggctaattttttgtattttgagtagagactggatttcgccatcttggccagactggtcttgaactcctgacctcgtgatccacccacctcagcctcccaaagtgctgggattacaggcatgagccaccatgcctggcctcaaatgaggtttaccagactttgaaggagcaggtaattccttctaccttgtgaacaagttgttccagaaagatagcagctcaggaggcctctgtgaccatggttccagacccagataaggacggcaaagaacagagcatctcagaaacgcaaggctcacagccagggtgcccggcgaccccacgggcactgagaacagctagctctaggagctccactctcctgctgaagaaaccacgggctcagagacggggagctccctcgcccagccacatctgtgaccccacggtaactctgctggttttggtgccttcagtcactcactgcaggtttgttttgttttgttttgttttgagtttttttgttttttgttttttgtttttagagacaagatgttgctatgttgcctaggctggtttcgaactcctggcctcaagggatcctccctccttggccccgcaaagtgctgggattacaggcgtgagccaccgtgcccagcccgctcactgcagtttgaaggcatggctttgggtggcgtggggtgaaagctgcccgaggccccgttcctccccacgtggctgcctcctgccagagccagtcaggaaaacagaccccaactagagttgtttcaaatggcagggatttggtaccggtggttggatcatgacaaagctctgagaaggctggaggagccacagagtgccaagtgcccagcaatcattagaggaaggaggctgctgccacctgtgtggctagaggaacagaggggccaatggcattccccaaaccccactctcgcctctgtctggccagagcagaatggcttcttccagcttcccaccctggactcccacccaggagcctcctcctggcagacccttcctgaccccaccggcccggggggtctacagatccatgtttcaggcgtccgcctggagcggaacaggggagtgcttaggacaagggtggtgccagaggatccactctgcccacatttagttgaccagctgaggcactccacgggaatgaatgactctcgacaggtgccggaggtgaggaggggcccggaggcccaggaggggcacagggatggattcgtccgcctgggggctggaggtgtgtttacagagccccaaaataaacaatgcaaccaggtcagaccagcggttctcacagtgtggttcccagaccagcagcatcactgggagcttactggacacgcaaataaatccctgtgtgccaccccagctgcatcagatgctggtggggcccagtgatctgtatttaacacaccctccgggggatgccggtgcccactcacgtttgagaacccctgcgatccacgactgccctcccgtgtaaaaggcccacctctgtgggactccaagtcatcagcaccctagggtccttccgtctttttccttcctcctgggacacctgcctctcccatgtcgtattagagaattccttatgctcccaagtgggcacggggagaggaaggcactcctctttaaggaccgacccagaggttttgccattgcttcactggccagagcttagtcacgcagcctcacccagaggcaagggaggttggaaaatgtagtgtttgtgtgtgtctaacacaaattctattaccatgcagtcaggattctccactcttgctctttcattagatttgctgggcttcaccctggactttctgatttagtgacagaacagagaacccagaggcagacccagatgtgtacaagggcttcatatacaatcaggagatttaataatcatgctaggggccgggtgcagtggctcacgcctgtaatcccaagcactttggggagccgaggcaggcagatcacttgaggtcaggagtttgagaccagcctgggcaacaaagtgagaccctgtctctactaaaaataacaaaaattagccgggcgtggtggtgggcgcctgtaatcccagctcctcgggtggctgaggcatgagaatcacttgaacccaggaggcagaggtttcagtgagctgagatcacatcactgcactccagcctgggtgacagagtgagattctgtc

SEQ ID NO: 163260 - DNA, 564 bp, Homo sapiens
  Payload ID: 12168
  Gene Symbol: PAK4
  Gene Name: p21 protein (Cdc42/Rac)-activated kinase 4
  ENST ID: ENST00000602004
  CDS Start-End: 19-564
gaggggggaaagccccggatgttcgttggggattcaacatggcggcgggagtgtccgcggtggtggcggtgcaagagagctgagggaggcgcgagggcgcggagttccaggccgcaccgagtccccggcaccatgtttgggaagaggaagaagcgggtggagatctccgcgccgtccaacttcgagcaccgcgtgcacacgggcttcgaccagcacgagcagaagttcacggggctgccccgccagtggcagagcctgatcgaggagtcggctcgccggcccaagcccctcgtcgaccccgcctgcatcacctccatccagcccggggcccccaagggggagcctcatgacgtggcccctaacgggccatcagcggggggcctggccatcccccagtcctcctcctcctcctcccggcctcccacccgagcccgaggtgcccccagccctggagtgctgggaccccacgcctcagagccccagctggcccctccagcctgcacccccgccgcccctgctgttcctgggccccctggcccccgctcaccacagcgggagccacag

SEQ ID NO: 163261 - DNA, 633 bp, Homo sapiens
  Payload ID: 12168
  Gene Symbol: PAK4
  Gene Name: p21 protein (Cdc42/Rac)-activated kinase 4
  ENST ID: ENST00000597715
  CDS Start-End: 1-448
aatcatgagggactaccagcacgagaatgtggtgaagctgtcagactttgggttctgcgcccaggtgagcaaggaagtgccccgaaggaagtcgctggtcggcacgccctactggatggccccagagctcatctcccgccttccctacgggccagaggtagacatctggtcgctggggataatggtgattgagatggtggacggagagcccccctacttcaacgagccacccctcaaagccatgaagatgattcgggacaacctgccaccccgactgaagaacctgcacaaggtgtcgccatccctgaagggcttcctggaccgcctgctggtgcgagaccctgcccagcgggccacggcagccgagctgctgaagcacccattcctggccaaggcagggccgcctgccagcatcgtgcccctcatgcgccagaaccgcaccagatgaggcccagcgcccttcccctcaaccaaagagccccccgggtcacccccgccccactgaggccagtagggggccaggcctcccactcctcccagcccgggagatgctccgcgtggcaccaccctccttgctgggggtagatgagaccctactactgaactccagttttgatctcgtgacttttagaa

SEQ ID NO: 163262 - DNA, 714 bp, Homo sapiens
  Payload ID: 12168
  Gene Symbol: PAK4
  Gene Name: p21 protein (Cdc42/Rac)-activated kinase 4
  ENST ID: ENST00000593480
  CDS Start-End: 321-714
ggattcaacatggcggcgggagtgtccgcggtggtggcggtgcaagagagctgagggaggcgcgagggcgcggagttccaggtcgagcagttaggccgcgagcgactgcggcgccgagccgccttcctgctgcccaccccgcgtccctccagactgggtcccgtgctcccgtcccccagccctgaccaccctgggcagctgctgcatggggacagatgagtaacccgaagcccctagaggagtggtcacctgcctgagggcacttctgtcccaccagcatcagaccaggtgtgtgcaggccgcaccgagtccccggcaccatgtttgggaagaggaagaagcgggtggagatctccgcgccgtccaacttcgagcaccgcgtgcacacgggcttcgaccagcacgagcagaagttcacggggctgccccgccagtggcagagcctgatcgaggagtcggctcgccggcccaagcccctcgtcgaccccgcctgcatcacctccatccagcccggggcccccaagaccatcgtgcggggcagcaaaggtgccaaagatggggccctcacgctgctgctggacgagtttgagaacatgtcggtgacacgctccaactccctgcggagagacagcccgccgccgcccgcccgtgcccgccaggaaaatgggatgccagaggagccggccaccacggccagagggggcccagggaagg

SEQ ID NO: 163263 - DNA, 534 bp, Homo sapiens
  Payload ID: 12168
  Gene Symbol: PAK4
  Gene Name: p21 protein (Cdc42/Rac)-activated kinase 4
  ENST ID: ENST00000599657
  CDS Start-End: 255-534
atagagcccaggcagccctcctcggtgggtgcccatgttgagggcctggggagccctggatctactctgctttcccagctggaagcctgtctgtccacaggcccgccccattgagggtggcccaggaagtgggaaagagcgtggtggagatgagtaacccgaagcccctagaggagtggtcacctgcctgagggcacttctgtcccaccagcatcagaccaggtgtgtgcaggccgcaccgagtccccggcaccatgtttgggaagaggaagaagcgggtggagatctccgcgccgtccaacttcgagcaccgcgtgcacacgggcttcgaccagcacgagcagaagttcacggggctgccccgccagtggcagagcctgatcgaggagtcggctcgccggcccaagcccctcgtcgaccccgcctgcatcacctccatccagcccggggcccccaagggggagcctcatgacgtggcccctaacgggccatcagcggggggcctggccatcccccagtcctcctcctcctcct

SEQ ID NO: 163264 - DNA, 3865 bp, Homo sapiens
  Payload ID: 12169
  Gene Symbol: PAK6
  Gene Name: p21 protein (Cdc42/Rac)-activated kinase 6
  Uniprot ID: Q9NQU5
  ENST ID: ENST00000260404
  CDS Start-End: 427-2472
gtgccgtccccctgctggggacagcagctgggtccagcagagagctggctgggggcttgacaggagtttatcctaactgatgctgggtgggcgcaggccctgagatgggcgtcagggagaggggacgccagacacacggcctgagcagggtgaggagcagctgccagccccggcaggcccaggccctgtctgggtgcacaggacagagacacagcaagatgcccagggagtgccgcttcctgggctagagacaagcaccagcctgcagtggagaacgcaggaccccgctgcccagaaggagcagccacggcctgcggaggactggcccagcaaggtcccaggtcttccctctcctcagcgcctaagagagaggcccagtgcgggtgaggagtcgcgaggaagaggcggaaggcgccggaaggcaccatgttccgcaagaaaaagaagaaacgccctgagatctcagcgccacagaacttccagcaccgtgtccacacctccttcgaccccaaagaaggcaagtttgtgggcctccccccacaatggcagaacatcctggacacactgcggcgccccaagcccgtggtggacccttcgcgaatcacacgggtgcagctccagcccatgaagacagtggtgcggggcagcgcgatgcctgtggatggctacatctcggggctgctcaacgacatccagaagttgtcagtcatcagctccaacaccctgcgtggccgcagccccaccagccggcggcgggcacagtccctggggctgctgggggatgagcactgggccaccgacccagacatgtacctccagagcccccagtctgagcgcactgacccccacggcctctacctcagctgcaacgggggcacaccagcaggccacaagcagatgccgtggcccgagccacagagcccacgggtcctgcccaatgggctggctgcaaaggcacagtccctgggccccgccgagtttcagggtgcctcgcagcgctgtctgcagctgggtgcctgcctgcagagctccccaccaggagcctcgccccccacgggcaccaataggcatggaatgaaggctgccaagcatggctctgaggaggcccggccacagtcctgcctggtgggctcagccacaggcaggccaggtggggaaggcagccctagccctaagacccgggagagcagcctgaagcgcaggctattccgaagcatgttcctgtccactgctgccacagcccctccaagcagcagcaagccaggccctccaccacagagcaagcccaactcctctttccgaccgccgcagaaagacaaccccccaagcctggtggccaaggcccagtccttgccctcggaccagccggtggggaccttcagccctctgaccacttcggataccagcagcccccagaagtccctccgcacagccccggccacaggccagcttccaggccggtcttccccagcgggatccccccgcacctggcacgcccagatcagcaccagcaacctgtacctgccccaggaccccacggttgccaagggtgccctggctggtgaggacacaggtgttgtgacacatgagcagttcaaggctgcgctcaggatggtggtggaccagggtgacccccggctgctgctggacagctacgtgaagattggcgagggctccaccggcatcgtctgcttggcccgggagaagcactcgggccgccaggtggccgtcaagatgatggacctcaggaagcagcagcgcagggagctgctcttcaacgaggtggtgatcatgcgggactaccagcacttcaacgtggtggagatgtacaagagctacctggtgggcgaggagctgtgggtgctcatggagttcctgcagggaggagccctcacagacatcgtctcccaagtcaggctgaatgaggagcagattgccactgtgtgtgaggctgtgctgcaggccctggcctacctgcatgctcagggtgtcatccaccgggacatcaagagtgactccatcctgctgaccctcgatggcagggtgaagctctcggacttcggattctgtgctcagatcagcaaagacgtccctaagaggaagtccctggtgggaaccccctactggatggctcctgaagtgatctccaggtctttgtatgccactgaggtggatatctggtctctgggcatcatggtgattgagatggtagatggggagccaccgtacttcagtgactccccagtgcaagccatgaagaggctccgggacagccccccacccaagctgaaaaactctcacaaggtctccccagtgctgcgagacttcctggagcggatgctggtgcgggacccccaagagagagccacagcccaggagctcctagaccaccccttcctgctgcagacagggctacctgagtgcctggtgcccctgatccagctctaccgaaagcagacctccacctgctgagcccaccccaagtatgcctgccacctacgcccacaggcagggcacactgggcagccagcctgccggcaggacttgcctgcctcctcctctcagtattctctccaaagattgaaatgtgaagccccagccccaccctctgcccttcagcctactgggccaggccggacctgccccctcagtgtctctccctcccgagtccccagatggagacccctttctacaggatgaccccttgatatttgcacagggatatttctaagaaacgcagaggccagcgttcctggcctctgcagccaacacagtagaaaaggctgctgtggttttttaaaggcagttgtccactagtgtcctaggccactgcagagggcagactgctggtctccacagatacctgctgttctcagctccagcttcaaacctcgagtctcgagagggccacggggtggtttttatgaccggaatcccgcttcctccctcacgtctgatgtcctgaaggtgcagtcccacctgtacagcccctccccgcccagaactgtgaatggcctgctccaggccatggctgggggcagggagtgaggggacaatttctgagtgaaagagaaagaatggggtcggtggtgaaggtgctctcactttacagaatggagagaacatcgtgtgtgtgtgtgtgtgtgtgtgtgtgtgtgtgtgtgtgtaaggggaggaaagccaccttgacagcccaggtccctccaggtcacccacagccagtttcaggaaggctgcccctctctcccactaagttctggcctgaagggacctgctttcttggcctggcttccacctctccactcctgtgtctacctggccagtggagtggtccatgctaagtctaacactcctgggagctcaggaggcttctgagcttctcctgtactgtgcatcgtgagggccagagacaggaatgtaaggattggcaactgtgttacctttcaagtttatctcaataaccaggtcatcagggacccattgttctcttcagaaccctatctgggagagaaggcgaaccacctccgggtttccatcatgtcaaggtcacaggcatccatgtgtgcaaaccatctgccccagctgcctccacagactgctgtctccttgtcctcctcggccctgccccacttcagggctgctgtgagatggaattccaggaaagaacttcaggtgtctggaccctttctatctagataatatttttagattcttctgctccctagtgacctacctgggggcaaagaaattgcaaggacttttttttaagggtcagagttttcaaaacaaaagcatcttccctagaaatttttgtgaattgtttgcacttgtgcctgttttaaattaaattgagtgttcaaagcca

SEQ ID NO: 163265 - DNA, 4215 bp, Homo sapiens
  Payload ID: 12169
  Gene Symbol: PAK6
  Gene Name: p21 protein (Cdc42/Rac)-activated kinase 6
  Uniprot ID: Q9NQU5
  ENST ID: ENST00000455577
  CDS Start-End: 913-2823
aaacgagcaggtcgatgcctgaggatttaatggagaaatcccaaagtgagccggggcgcgcggtggaggaggggcgcgccgcagccggggccgctgggccctgatgggcgggagcggggtggagcggcctcgcctgccaggcagccctgggcgcggggctcggcggccacactctggagacagccacggtccaggcaggtgggggagggcgctgctcccgtcctgatgtgccaggagccgccagcagccatccaggtgactaagccggcccactagcactgagtcaccgcccgcctcgagctgttcttgcttctcctttgcatctgattattttgggagctggaaacttggagctgcacctgagtcccgccccttctagctctcccctccctaccttgggctccaggaagatgggacttgctgtgagtctgctgccaccccctaaagatatggaagacgctgtgggggccagaagtgcccggggggctgtggcagcaggcagagtgcaatagcagatatggtggtcaggctgcctgtgtgtgtcctctggaggtgttgggacagaagggcagtcttgtccgagctgactggagtcctcccgggctggctctgaactcatctcccacggggatgtttcggtaaaggagtggcttctggggtcggagtggcatttggagagcgaggctggattggcttaggctggcctgggcagggagtgccgcttcctgggctagagacaagcaccagcctgcagtggagaacgcaggaccccgctgcccagaaggagcagccacggcctgcggaggactggcccagcaaggtcccaggtcttccctctcctcagcgcctaagagagaggcccagtgcgggtgaggagtcgcgaggaagaggcggaaggcgccggaaggcaccatgttccgcaagaaaaagaagaaacgccctgagatctcagcgccacagaacttccagcaccgtgtccacacctccttcgaccccaaagaaggcaagtttgtgggcctccccccacaatggcagaacatcctggacacactgcggcgccccaagcccgtggtggacccttcgcgaatcacacgggtgcagctccagcccatgaagacagtggtgcggggcagcgcgatgcctgtggatggctacatctcggggctgctcaacgacatccagaagttgtcagtcatcagctccaacaccctgcgtggccgcagccccaccagccggcggcgggcacagtccctggggctgctgggggatgagcactgggccaccgacccagacatgtacctccagagcccccagtctgagcgcactgacccccacggcctctacctcagctgcaacgggggcacaccagcaggccacaagcagatgccgtggcccgagccacagagcccacgggtcctgcccaatgggctggctgcaaaggcacagtccctgggccccgccgagtttcagggtgcctcgcagcgctgtctgcagctgggtgcctgcctgcagagctccccaccaggagcctcgccccccacgggcaccaataggcatggaatgaaggctgccaagcatggctctgaggaggcccggccacagtcctgcctggtgggctcagccacaggcaggccaggtggggaaggcagccctagccctaagacccgggagagcagcctgaagcgcaggctattccgaagcatgttcctgtccactgctgccacagcccctccaagcagcagcaagccaggccctccaccacagagcaagcccaactcctctttccgaccgccgcagaaagacaaccccccaagcctggtggccaaggcccagtccttgccctcggaccagccggtggggaccttcagccctctgaccacttcggataccagcagcccccagaagtccctccgcacagccccggccacaggccagcttccaggccggtcttccccagcgggatccccccgcacctggcacgcccagatcagcaccagcaacctgtacctgccccaggaccccacggttgccaagggtgccctggctggtgaggacacaggtgttgtgacacatgagcagttcaaggctgcgctcaggatggtggtggaccagggtgacccccggctgctgctggacagctacgtgaagattggcgagggctccaccggcatcgtctgcttggcccgggagaagcactcgggccgccaggtggccgtcaagatgatggacctcaggaagcagcagcgcagggagctgctcttcaacgaggtggtgatcatgcgggactaccagcacttcaacgtggtggagatgtacaagagctacctggtgggcgaggagctgtgggtgctcatggagttcctgcagggaggagccctcacagacatcgtctcccaagtcaggctgaatgaggagcagattgccactgtgtgtgaggctgtgctgcaggccctggcctacctgcatgctcagggtgtcatccaccgggacatcaagagtgactccatcctgctgaccctcgatggcagggtgaagctctcggacttcggattctgtgctcagatcagcaaagacgtccctaagaggaagtccctggtgggaaccccctactggatggctcctgaagtgatctccaggtctttgtatgccactgaggtctccccagtgctgcgagacttcctggagcggatgctggtgcgggacccccaagagagagccacagcccaggagctcctagaccaccccttcctgctgcagacagggctacctgagtgcctggtgcccctgatccagctctaccgaaagcagacctccacctgctgagcccaccccaagtatgcctgccacctacgcccacaggcagggcacactgggcagccagcctgccggcaggacttgcctgcctcctcctctcagtattctctccaaagattgaaatgtgaagccccagccccaccctctgcccttcagcctactgggccaggccggacctgccccctcagtgtctctccctcccgagtccccagatggagacccctttctacaggatgaccccttgatatttgcacagggatatttctaagaaacgcagaggccagcgttcctggcctctgcagccaacacagtagaaaaggctgctgtggttttttaaaggcagttgtccactagtgtcctaggccactgcagagggcagactgctggtctccacagatacctgctgttctcagctccagcttcaaacctcgagtctcgagagggccacggggtggtttttatgaccggaatcccgcttcctccctcacgtctgatgtcctgaaggtgcagtcccacctgtacagcccctccccgcccagaactgtgaatggcctgctccaggccatggctgggggcagggagtgaggggacaatttctgagtgaaagagaaagaatggggtcggtggtgaaggtgctctcactttacagaatggagagaacatcgtgtgtgtgtgtgtgtgtgtgtgtgtgtgtgtgtgtgtgtaaggggaggaaagccaccttgacagcccaggtccctccaggtcacccacagccagtttcaggaaggctgcccctctctcccactaagttctggcctgaagggacctgctttcttggcctggcttccacctctccactcctgtgtctacctggccagtggagtggtccatgctaagtctaacactcctgggagctcaggaggcttctgagcttctcctgtactgtgcatcgtgagggccagagacaggaatgtaaggattggcaactgtgttacctttcaagtttatctcaataaccaggtcatcagggacccattgttctcttcagaaccctatctgggagagaaggcgaaccacctccgggtttccatcatgtcaaggtcacaggcatccatgtgtgcaaaccatctgccccagctgcctccacagactgctgtctccttgtcctcctcggccctgccccacttcagggctgctgtgagatggaattccaggaaagaacttcaggtgtctggaccctttctatctagataatatttttagattcttctgctccctagtgacctacctgggggcaaagaaattgcaaggacttttttttaagggtcagagttttcaaaacaaaagcatcttccctagaaatttttgtgaattgtttgcacttgtgcctgttttaaattaaattgagtgttcaaagcc

SEQ ID NO: 163266 - DNA, 2540 bp, Homo sapiens
  Payload ID: 12169
  Gene Symbol: PAK6
  Gene Name: p21 protein (Cdc42/Rac)-activated kinase 6
  Uniprot ID: Q9NQU5
  ENST ID: ENST00000542403
  CDS Start-End: 112-2157
ggaggactggcccagcaaggtcccaggtcttccctctcctcagcgcctaagagagaggcccagtgcgggtgaggagtcgcgaggaagaggcggaaggcgccggaaggcaccatgttccgcaagaaaaagaagaaacgccctgagatctcagcgccacagaacttccagcaccgtgtccacacctccttcgaccccaaagaaggcaagtttgtgggcctccccccacaatggcagaacatcctggacacactgcggcgccccaagcccgtggtggacccttcgcgaatcacacgggtgcagctccagcccatgaagacagtggtgcggggcagcgcgatgcctgtggatggctacatctcggggctgctcaacgacatccagaagttgtcagtcatcagctccaacaccctgcgtggccgcagccccaccagccggcggcgggcacagtccctggggctgctgggggatgagcactgggccaccgacccagacatgtacctccagagcccccagtctgagcgcactgacccccacggcctctacctcagctgcaacgggggcacaccagcaggccacaagcagatgccgtggcccgagccacagagcccacgggtcctgcccaatgggctggctgcaaaggcacagtccctgggccccgccgagtttcagggtgcctcgcagcgctgtctgcagctgggtgcctgcctgcagagctccccaccaggagcctcgccccccacgggcaccaataggcatggaatgaaggctgccaagcatggctctgaggaggcccggccacagtcctgcctggtgggctcagccacaggcaggccaggtggggaaggcagccctagccctaagacccgggagagcagcctgaagcgcaggctattccgaagcatgttcctgtccactgctgccacagcccctccaagcagcagcaagccaggccctccaccacagagcaagcccaactcctctttccgaccgccgcagaaagacaaccccccaagcctggtggccaaggcccagtccttgccctcggaccagccggtggggaccttcagccctctgaccacttcggataccagcagcccccagaagtccctccgcacagccccggccacaggccagcttccaggccggtcttccccagcgggatccccccgcacctggcacgcccagatcagcaccagcaacctgtacctgccccaggaccccacggttgccaagggtgccctggctggtgaggacacaggtgttgtgacacatgagcagttcaaggctgcgctcaggatggtggtggaccagggtgacccccggctgctgctggacagctacgtgaagattggcgagggctccaccggcatcgtctgcttggcccgggagaagcactcgggccgccaggtggccgtcaagatgatggacctcaggaagcagcagcgcagggagctgctcttcaacgaggtggtgatcatgcgggactaccagcacttcaacgtggtggagatgtacaagagctacctggtgggcgaggagctgtgggtgctcatggagttcctgcagggaggagccctcacagacatcgtctcccaagtcaggctgaatgaggagcagattgccactgtgtgtgaggctgtgctgcaggccctggcctacctgcatgctcagggtgtcatccaccgggacatcaagagtgactccatcctgctgaccctcgatggcagggtgaagctctcggacttcggattctgtgctcagatcagcaaagacgtccctaagaggaagtccctggtgggaaccccctactggatggctcctgaagtgatctccaggtctttgtatgccactgaggtggatatctggtctctgggcatcatggtgattgagatggtagatggggagccaccgtacttcagtgactccccagtgcaagccatgaagaggctccgggacagccccccacccaagctgaaaaactctcacaaggtctccccagtgctgcgagacttcctggagcggatgctggtgcgggacccccaagagagagccacagcccaggagctcctagaccaccccttcctgctgcagacagggctacctgagtgcctggtgcccctgatccagctctaccgaaagcagacctccacctgctgagcccaccccaaaaccctatctgggagagaaggcgaaccacctccgggtttccatcatgtcaaggtcacaggcatccatgtgtgcaaaccatctgccccagctgcctccacagactgctgtctccttgtcctcctcggccctgccccacttcagggctgctgtgagatggaattccaggaaagaacttcaggtgtctggaccctttctatctagataatatttttagattcttctgctccctagtgacctacctgggggcaaagaaattgcaaggacttttttttaagggtcagagttttcaaaacaaaagcatcttccctagaaatttttgtgaattgtttgcacttgtgcctgttttaaattaaattgagtgttcaaagcca

SEQ ID NO: 163267 - DNA, 552 bp, Homo sapiens
  Payload ID: 12169
  Gene Symbol: PAK6
  Gene Name: p21 protein (Cdc42/Rac)-activated kinase 6
  ENST ID: ENST00000558183
  CDS Start-End: 331-552
tttttttttttttttttctattttgcctgaagggagtgccgcttcctgggctagagacaagcaccagcctgcagtggagaacgcaggaccccgctgcccagaaggagcagccacggcctgcggaggactggcccagcaaggtcccaggtcttccctctcctcagcgcctaagagagaggcccagtgcgggtgaggagtcgcgaggaagaggcggaaggcgccggaagacaggttttcaccatgttggccaagctggtctcaaactcctgacctcaggtgatccacccgcctcggcctcccagagtactaggattacaggcatgaaccaccatgcccggcccaggcaccatgttccgcaagaaaaagaagaaacgccctgagatctcagcgccacagaacttccagcaccgtgtccacacctccttcgaccccaaagaaggcaagtttgtgggcctccccccacaatggcagaacatcctggacacactgcggcgccccaagcccgtggtggacccttcgcgaatcacacgggtgcagctccagcccatgaag

SEQ ID NO: 163268 - DNA, 571 bp, Homo sapiens
  Payload ID: 12169
  Gene Symbol: PAK6
  Gene Name: p21 protein (Cdc42/Rac)-activated kinase 6
  ENST ID: ENST00000559139
  CDS Start-End: 245-571
ttcgcgtccccgagagggcgcagcagtggggcctgcgagctggggccgggtggccgcgccgggtcggagtgtggctggagaggggccgccccggaagcggtgctgcgcccaacgtccccttctccccgcctgcggaggactggcccagcaaggtcccaggtcttccctctcctcagcgcctaagagagaggcccagtgcgggtgaggagtcgcgaggaagaggcggaaggcgccggaaggcaccatgttccgcaagaaaaagaagaaacgccctgagatctcagcgccacagaacttccagcaccgtgtccacacctccttcgaccccaaagaaggcaagtttgtgggcctccccccacaatggcagaacatcctggacacactgcggcgccccaagcccgtggtggacccttcgcgaatcacacgggtgcagctccagcccatgaagacagtggtgcggggcagcgcgatgcctgtggatggctacatctcggggctgctcaacgacatccagaagttgtcagtcatcagctccaacaccctgcgtggccgcagccccaccagccggcgg

SEQ ID NO: 163269 - DNA, 598 bp, Homo sapiens
  Payload ID: 12169
  Gene Symbol: PAK6
  Gene Name: p21 protein (Cdc42/Rac)-activated kinase 6
  ENST ID: ENST00000559617
  CDS Start-End: 262-598
aaaatcgcggtcaggtgaagccggcgctgcaccaacgtgtaagcgcggcccctcctcggcgttcccgcgccgaggtccctcccgcggagggcgggcccggctcccacgacctcttcgagcgttcctgggcttcccgctccgcaggcctgcggaggactggcccagcaaggtcccaggtcttccctctcctcagcgcctaagagagaggcccagtgcgggtgaggagtcgcgaggaagaggcggaaggcgccggaaggcaccatgttccgcaagaaaaagaagaaacgccctgagatctcagcgccacagaacttccagcaccgtgtccacacctccttcgaccccaaagaaggcaagtttgtgggcctccccccacaatggcagaacatcctggacacactgcggcgccccaagcccgtggtggacccttcgcgaatcacacgggtgcagctccagcccatgaagacagtggtgcggggcagcgcgatgcctgtggatggctacatctcggggctgctcaacgacatccagaagttgtcagtcatcagctccaacaccctgcgtggccgcagccccaccagccggcggcgggcacagt

SEQ ID NO: 163270 - DNA, 553 bp, Homo sapiens
  Payload ID: 12169
  Gene Symbol: PAK6
  Gene Name: p21 protein (Cdc42/Rac)-activated kinase 6
  ENST ID: ENST00000558878
  CDS Start-End: 381-553
agaagaggctgggtgagaaaagcactgaggttttcttttcctttttttttttttttttttttctattttgcctgaagggagtgccgcttcctgggctagagacaagcaccagcctgcagtggagaacgcaggaccccgctgcccagaaggagcagccacggcctgcggaggactggcccagcaaggtcccaggtcttccctctcctcagcgcctaagagagaggcccagtgcgggtgaggagtcgcgaggaagaggcggaaggcgccggaagtcaagacaggttttcaccatgttggccaagctggtctcaaactcctgacctcaggtgatccacccgcctcggcctcccagagtactaggattacaggcatgaaccaccatgcccggcccaggcaccatgttccgcaagaaaaagaagaaacgccctgagatctcagcgccacagaacttccagcaccgtgtccacacctccttcgaccccaaagaaggcaagtttgtgggcctccccccacaatggcagaacatcctggacacactgcggcgccccaagcc

SEQ ID NO: 163271 - DNA, 561 bp, Homo sapiens
  Payload ID: 12169
  Gene Symbol: PAK6
  Gene Name: p21 protein (Cdc42/Rac)-activated kinase 6
  ENST ID: ENST00000560806
  CDS Start-End: 502-561
gaacgcaggaccccgctgcccagaaggagcagccacggcctgcggaggactggcccagcaaggtcccaggtcttccctctcctcagcgcctaagagagaggcccagtgcgggtgaggagtcgcgaggaagaggcggaaggcgccggaaggctcttcctgagtgacgaccgtgagaaatatccaaagctcctccgtgagcaggaacagatgctccccctcactgtgcctggagaagctggcagaggtgaattaatccatcccttgtcatctacaaaaatgtcgaggcctacgtaaggcgagtaggccaaggtcacaagccgggacttaggaacaccaagcccaaggtccacgctgagccagcactcgggcttgtggcccaggacttgagccctgtcaagacaggttttcaccatgttggccaagctggtctcaaactcctgacctcaggtgatccacccgcctcggcctcccagagtactaggattacaggcatgaaccaccatgcccggcccaggcaccatgttccgcaagaaaaagaagaaacgccctgagatctcagcg

SEQ ID NO: 163272 - DNA, 1146 bp, Homo sapiens
  Payload ID: 12169
  Gene Symbol: PAK6
  Gene Name: p21 protein (Cdc42/Rac)-activated kinase 6
  ENST ID: ENST00000560669
  CDS Start-End: 293-1146
ccccttctccccgtaagccccgcaaggagcctgccgcctcttgcacctgagccaggagttcagtcgggaggcgggcgcggagcggttcccagcgcctggacgtcagccagtcgcaacacccgcgggaacacttgctacatttgccataatgcatttctgatctgtttccgcgcaggcctgcggaggactggcccagcaaggtcccaggtcttccctctcctcagcgcctaagagagaggcccagtgcgggtgaggagtcgcgaggaagaggcggaaggcgccggaaggcaccatgttccgcaagaaaaagaagaaacgccctgagatctcagcgccacagaacttccagcaccgtgtccacacctccttcgaccccaaagaaggcaagtttgtgggcctccccccacaatggcagaacatcctggacacactgcggcgccccaagcccgtggtggacccttcgcgaatcacacgggtgcagctccagcccatgaagacagtggtgcggggcagcgcgatgcctgtggatggctacatctcggggctgctcaacgacatccagaagttgtcagtcatcagctccaacaccctgcgtggccgcagccccaccagccggcggcgggcacagtccctggggctgctgggggatgagcactgggccaccgacccagacatgtacctccagagcccccagtctgagcgcactgacccccacggcctctacctcagctgcaacgggggcacaccagcaggccacaagcagatgccgtggcccgagccacagagcccacgggtcctgcccaatgggctggctgcaaaggcacagtccctgggccccgccgagtttcagggtgcctcgcagcgctgtctgcagctgggtgcctgcctgcagagctccccaccaggagcctcgccccccacgggcaccaataggcatggaatgaaggctgccaagcatggctctgaggaggcccggccacagtcctgcctggtgggctcagccacaggcaggccaggtggggaaggcagccctagccctaagacccgggagagcagcctgaagcgcaggctattccgaagcatgttcctgtccactgctgccacagcccctccaagcagcagcaagccaggccctccaccacagag

SEQ ID NO: 163273 - DNA, 569 bp, Homo sapiens
  Payload ID: 12169
  Gene Symbol: PAK6
  Gene Name: p21 protein (Cdc42/Rac)-activated kinase 6
  ENST ID: ENST00000560684
  CDS Start-End: 357-569
atcgcggtcaggtgaagccggcgctgcaccaacgtgtaagcgcggcccctcctcggcgttcccgcgccgaggtccctcccgcggagggcgggcccggctcccacgacctcttcgagcgttcctgggcttcccgctccgcaggcctgcggaggactggcccagcaaggtcccaggtcttccctctcctcagcgcctaagagagaggcccagtgcgggtgaggagtcgcgaggaagaggcggaaggcgccggaagacaggttttcaccatgttggccaagctggtctcaaactcctgacctcaggtgatccacccgcctcggcctcccagagtactaggattacaggcatgaaccaccatgcccggcccaggcaccatgttccgcaagaaaaagaagaaacgccctgagatctcagcgccacagaacttccagcaccgtgtccacacctccttcgaccccaaagaaggcaagtttgtgggcctccccccacaatggcagaacatcctggacacactgcggcgccccaagcccgtggtggacccttcgcgaatcacacgggtgcagctccag

SEQ ID NO: 163274 - DNA, 565 bp, Homo sapiens
  Payload ID: 12169
  Gene Symbol: PAK6
  Gene Name: p21 protein (Cdc42/Rac)-activated kinase 6
  ENST ID: ENST00000558055
  CDS Start-End: 200-565
aaaattgccaagcaacgttggagcagctcggcgccccaaacgagcaggtcgatgcctgaggatttaatggagaaatcccaaagcctgcggaggactggcccagcaaggtcccaggtcttccctctcctcagcgcctaagagagaggcccagtgcgggtgaggagtcgcgaggaagaggcggaaggcgccggaaggcaccatgttccgcaagaaaaagaagaaacgccctgagatctcagcgccacagaacttccagcaccgtgtccacacctccttcgaccccaaagaaggcaagtttgtgggcctccccccacaatggcagaacatcctggacacactgcggcgccccaagcccgtggtggacccttcgcgaatcacacgggtgcagctccagcccatgaagacagtggtgcggggcagcgcgatgcctgtggatggctacatctcggggctgctcaacgacatccagaagttgtcagtcatcagctccaacaccctgcgtggccgcagccccaccagccggcggcgggcacagtccctggggctgctgggggatgagcactgg

SEQ ID NO: 163275 - DNA, 891 bp, Homo sapiens
  Payload ID: 12169
  Gene Symbol: PAK6
  Gene Name: p21 protein (Cdc42/Rac)-activated kinase 6
  ENST ID: ENST00000561230
  CDS Start-End: 578-891
aaaaccagctgagaccagcacctgccagatctgaatgcgcagctccaagttctggggggtgggggtgggggtgagccaaggaggtctggcttctctagggcaagggtaggaaggacagcagggaggctcaccctgagcccggcaggcagcccttcctcctcctccccttcagcaaagaaaggcagataaaaacgtgtttttataaatagctccagccccagctgatttgtaaattcagtgggttttttgtgtcaatgacatcaccttcctccccatggcaacccccgacgatatcaaaattgccaagcaacgttggagcagctcggcgccccaaacgagcaggtcgatgcctgaggatttaatggagaaatcccaaaggagtgccgcttcctgggctagagacaagcaccagcctgcagtggagaacgcaggaccccgctgcccagaaggagcagccacggcctgcggaggactggcccagcaaggtcccaggtcttccctctcctcagcgcctaagagagaggcccagtgcgggtgaggagtcgcgaggaagaggcggaaggcgccggaaggcaccatgttccgcaagaaaaagaagaaacgccctgagatctcagcgccacagaacttccagcaccgtgtccacacctccttcgaccccaaagaaggcaagtttgtgggcctccccccacaatggcagaacatcctggacacactgcggcgccccaagcccgtggtggacccttcgcgaatcacacgggtgcagctccagcccatgaagacagtggtgcggggcagcgcgatgcctgtggatggctacatctcggggctgctcaacgacatccagaagttgtcagtcatcagctccaacaccctgcgtggccgcagccc

SEQ ID NO: 163276 - DNA, 560 bp, Homo sapiens
  Payload ID: 12169
  Gene Symbol: PAK6
  Gene Name: p21 protein (Cdc42/Rac)-activated kinase 6
  ENST ID: ENST00000558106
  CDS Start-End: 192-560
acacgcggcccgctcaggtccgggagagtcggcccgcggctctggagcgtgcatctgcgatgccagtgaacgaggcctgcggaggactggcccagcaaggtcccaggtcttccctctcctcagcgcctaagagagaggcccagtgcgggtgaggagtcgcgaggaagaggcggaaggcgccggaaggcaccatgttccgcaagaaaaagaagaaacgccctgagatctcagcgccacagaacttccagcaccgtgtccacacctccttcgaccccaaagaaggcaagtttgtgggcctccccccacaatggcagaacatcctggacacactgcggcgccccaagcccgtggtggacccttcgcgaatcacacgggtgcagctccagcccatgaagacagtggtgcggggcagcgcgatgcctgtggatggctacatctcggggctgctcaacgacatccagaagttgtcagtcatcagctccaacaccctgcgtggccgcagccccaccagccggcggcgggcacagtccctggggctgctgggggatgagcactgggcc

SEQ ID NO: 163277 - DNA, 4020 bp, Homo sapiens
  Payload ID: 12169
  Gene Symbol: PAK6
  Gene Name: p21 protein (Cdc42/Rac)-activated kinase 6
  Uniprot ID: Q9NQU5
  ENST ID: ENST00000560346
  CDS Start-End: 584-2629
attttgggagctggaaacttggagctgcacctgagtcccgccccttctagctctcccctccctaccttgggctccaggaagatgggacttgctgtgagtctgctgccaccccctaaagatatggaagacgctgtgggggccagaagtgcccggggggctgtggcagcaggcagagtgcaatagcagatatggtggtcaggctgcctgtgtgtgtcctctggaggtgttgggacagaagggcagtcttgtccgagctgactggagtcctcccgggctggctctgaactcatctcccacggggatgtttcggtaaaggagtggcttctggggtcggagtggcatttggagagcgaggctggattggcttaggctggcctgggcagggagtgccgcttcctgggctagagacaagcaccagcctgcagtggagaacgcaggaccccgctgcccagaaggagcagccacggcctgcggaggactggcccagcaaggtcccaggtcttccctctcctcagcgcctaagagagaggcccagtgcgggtgaggagtcgcgaggaagaggcggaaggcgccggaaggcaccatgttccgcaagaaaaagaagaaacgccctgagatctcagcgccacagaacttccagcaccgtgtccacacctccttcgaccccaaagaaggcaagtttgtgggcctccccccacaatggcagaacatcctggacacactgcggcgccccaagcccgtggtggacccttcgcgaatcacacgggtgcagctccagcccatgaagacagtggtgcggggcagcgcgatgcctgtggatggctacatctcggggctgctcaacgacatccagaagttgtcagtcatcagctccaacaccctgcgtggccgcagccccaccagccggcggcgggcacagtccctggggctgctgggggatgagcactgggccaccgacccagacatgtacctccagagcccccagtctgagcgcactgacccccacggcctctacctcagctgcaacgggggcacaccagcaggccacaagcagatgccgtggcccgagccacagagcccacgggtcctgcccaatgggctggctgcaaaggcacagtccctgggccccgccgagtttcagggtgcctcgcagcgctgtctgcagctgggtgcctgcctgcagagctccccaccaggagcctcgccccccacgggcaccaataggcatggaatgaaggctgccaagcatggctctgaggaggcccggccacagtcctgcctggtgggctcagccacaggcaggccaggtggggaaggcagccctagccctaagacccgggagagcagcctgaagcgcaggctattccgaagcatgttcctgtccactgctgccacagcccctccaagcagcagcaagccaggccctccaccacagagcaagcccaactcctctttccgaccgccgcagaaagacaaccccccaagcctggtggccaaggcccagtccttgccctcggaccagccggtggggaccttcagccctctgaccacttcggataccagcagcccccagaagtccctccgcacagccccggccacaggccagcttccaggccggtcttccccagcgggatccccccgcacctggcacgcccagatcagcaccagcaacctgtacctgccccaggaccccacggttgccaagggtgccctggctggtgaggacacaggtgttgtgacacatgagcagttcaaggctgcgctcaggatggtggtggaccagggtgacccccggctgctgctggacagctacgtgaagattggcgagggctccaccggcatcgtctgcttggcccgggagaagcactcgggccgccaggtggccgtcaagatgatggacctcaggaagcagcagcgcagggagctgctcttcaacgaggtggtgatcatgcgggactaccagcacttcaacgtggtggagatgtacaagagctacctggtgggcgaggagctgtgggtgctcatggagttcctgcagggaggagccctcacagacatcgtctcccaagtcaggctgaatgaggagcagattgccactgtgtgtgaggctgtgctgcaggccctggcctacctgcatgctcagggtgtcatccaccgggacatcaagagtgactccatcctgctgaccctcgatggcagggtgaagctctcggacttcggattctgtgctcagatcagcaaagacgtccctaagaggaagtccctggtgggaaccccctactggatggctcctgaagtgatctccaggtctttgtatgccactgaggtggatatctggtctctgggcatcatggtgattgagatggtagatggggagccaccgtacttcagtgactccccagtgcaagccatgaagaggctccgggacagccccccacccaagctgaaaaactctcacaaggtctccccagtgctgcgagacttcctggagcggatgctggtgcgggacccccaagagagagccacagcccaggagctcctagaccaccccttcctgctgcagacagggctacctgagtgcctggtgcccctgatccagctctaccgaaagcagacctccacctgctgagcccaccccaagtatgcctgccacctacgcccacaggcagggcacactgggcagccagcctgccggcaggacttgcctgcctcctcctctcagtattctctccaaagattgaaatgtgaagccccagccccaccctctgcccttcagcctactgggccaggccggacctgccccctcagtgtctctccctcccgagtccccagatggagacccctttctacaggatgaccccttgatatttgcacagggatatttctaagaaacgcagaggccagcgttcctggcctctgcagccaacacagtagaaaaggctgctgtggttttttaaaggcagttgtccactagtgtcctaggccactgcagagggcagactgctggtctccacagatacctgctgttctcagctccagcttcaaacctcgagtctcgagagggccacggggtggtttttatgaccggaatcccgcttcctccctcacgtctgatgtcctgaaggtgcagtcccacctgtacagcccctccccgcccagaactgtgaatggcctgctccaggccatggctgggggcagggagtgaggggacaatttctgagtgaaagagaaagaatggggtcggtggtgaaggtgctctcactttacagaatggagagaacatcgtgtgtgtgtgtgtgtgtgtgtgtgtgtgtgtgtgtgtgtaaggggaggaaagccaccttgacagcccaggtccctccaggtcacccacagccagtttcaggaaggctgcccctctctcccactaagttctggcctgaagggacctgctttcttggcctggcttccacctctccactcctgtgtctacctggccagtggagtggtccatgctaagtctaacactcctgggagctcaggaggcttctgagcttctcctgtactgtgcatcgtgagggccagagacaggaatgtaaggattggcaactgtgttacctttcaagtttatctcaataaccaggtcatcagggacccattgttctcttcagaaccctatctgggagagaaggcgaaccacctccgggtttccatcatgtcaaggtcacaggcatccatgtgtgcaaaccatctgccccagctgcctccacagactgctgtctccttgtcctcctcggccctgccccacttcagggctgctgtgagatggaattccaggaaagaacttcaggtgtctggaccctttctatctagataatatttttagattcttctgctccctagtgacctacctgggggcaaagaaattgcaaggacttttttttaagggtcagagttttcaaaacaaaagcatcttccctagaaatttttgtgaattgtttgcacttgtgcctgttttaaattaaattgagtgttcaaagc

SEQ ID NO: 163278 - DNA, 2490 bp, Homo sapiens
  Payload ID: 12170
  Gene Symbol:
  Gene Name: p21 protein (Cdc42/Rac)-activated kinase 6 [Source:EntrezGene
  Acc:56924]
  ENST ID: ENST00000453867
  CDS Start-End: 158-559
aaagaccagctatgcagcttctttcatggcctatttttattatctccttctcttaaatctgggctcagaatccacgatccctatgattgtaacaagaacaatcaagctttgaagatagtggacttttcctacagtgttgaccttagggtgcagctggatgtttttaccctcagcggctttcggactgtacagatcctggaaggacaaaagatcctggctaactgttcttctccctaccaggcctgcggaggactggcccagcaaggtcccaggtcttccctctcctcagcgcctaagagagaggcccagtgcgggtgaggagtcgcgaggaagaggcggaaggcgccggaaggcaccatgttccgcaagaaaaagaagaaacgccctgagatctcagcgccacagaacttccagcaccgtgtccacacctccttcgaccccaaagaaggcaagtttgtgggcctccccccacaatggcagaacatcctggacacactgcggcgccccaagcccgtggtggacccttcgcgaatcacacgggtgcagctccagcccatgaagacagtggtgcggggcagcgcgatgcctgtggatggctacatctcggggctgctcaacgacatccagaagttgtcagtcatcagctccaacaccctgcgtggccgcagccccaccagccggcggcgggcacagtccctggggctgctgggggatgagcactgggccaccgacccagacatgtacctccagagcccccagtctgagcgcactgacccccacggcctctacctcagctgcaacgggggcacaccagcaggccacaagcagatgccgtggcccgagccacagagcccacgggtcctgcccaatgggctggctgcaaaggcacagtccctgggccccgccgagtttcagggtgcctcgcagcgctgtctgcagctgggtgcctgcctgcagagctccccaccaggagcctcgccccccacgggcaccaataggcatggaatgaaggctgccaagcatggctctgaggaggcccggccacagtcctgcctggtgggctcagccacaggcaggccaggtggggaaggcagccctagccctaagacccgggagagcagcctgaagcgcaggctattccgaagcatgttcctgtccactgctgccacagcccctccaagcagcagcaagccaggccctccaccacagagcaagcccaactcctctttccgaccgccgcagaaagacaaccccccaagcctggtggccaaggcccagtccttgccctcggaccagccggtggggaccttcagccctctgaccacttcggataccagcagcccccagaagtccctccgcacagccccggccacaggccagcttccaggccggtcttccccagcgggatccccccgcacctggcacgcccagatcagcaccagcaacctgtacctgccccaggaccccacggttgccaagggtgccctggctggtgaggacacaggtgttgtgacacatgagcagttcaaggctgcgctcaggatggtggtggaccagggtgacccccggctgctgctggacagctacgtgaagattggcgagggctccaccggcatcgtctgcttggcccgggagaagcactcgggccgccaggtggccgtcaagatgatggacctcaggaagcagcagcgcagggagctgctcttcaacgaggtggtgatcatgcgggactaccagcacttcaacgtggtggagatgtacaagagctacctggtgggcgaggagctgtgggtgctcatggagttcctgcagggaggagccctcacagacatcgtctcccaagtcaggctgaatgaggagcagattgccactgtgtgtgaggctgtgctgcaggccctggcctacctgcatgctcagggtgtcatccaccgggacatcaagagtgactccatcctgctgaccctcgatggcagggtgaagctctcggacttcggattctgtgctcagatcagcaaagacgtccctaagaggaagtccctggtgggaaccccctactggatggctcctgaagtgatctccaggtctttgtatgccactgaggtggatatctggtctctgggcatcatggtgattgagatggtagatggggagccaccgtacttcagtgactccccagtgcaagccatgaagaggctccgggacagccccccacccaagctgaaaaactctcacaaggtctccccagtgctgcgagacttcctggagcggatgctggtgcgggacccccaagagagagccacagcccaggagctcctagaccaccccttcctgctgcagacagggctacctgagtgcctggtgcccctgatccagctctaccgaaagcagacctccacctgctgagcccaccccaagtatgcctgccacctacgcccacaggcagggcacactgggcagccagcctgccggcaggacttgcctgcctcctcc

SEQ ID NO: 163279 - DNA, 2767 bp, Homo sapiens
  Payload ID: 12170
  Gene Symbol:
  Gene Name: p21 protein (Cdc42/Rac)-activated kinase 6 [Source:EntrezGene
  Acc:56924]
  ENST ID: ENST00000441369
  CDS Start-End: 420-2465
tttcatggcctatttttattatctccttctcttaaatctgggctcagaatccacgatccctatgattgtaacaagaacaatcaagctttgaagatagtggacttttcctacagtgttgaccttagggtgcagctggatgtttttaccctcagcggctttcggactgtacagatcctggaaggacaaaagatcctggctaactgttcttctccctaccagggagtgccgcttcctgggctagagacaagcaccagcctgcagtggagaacgcaggaccccgctgcccagaaggagcagccacggcctgcggaggactggcccagcaaggtcccaggtcttccctctcctcagcgcctaagagagaggcccagtgcgggtgaggagtcgcgaggaagaggcggaaggcgccggaaggcaccatgttccgcaagaaaaagaagaaacgccctgagatctcagcgccacagaacttccagcaccgtgtccacacctccttcgaccccaaagaaggcaagtttgtgggcctccccccacaatggcagaacatcctggacacactgcggcgccccaagcccgtggtggacccttcgcgaatcacacgggtgcagctccagcccatgaagacagtggtgcggggcagcgcgatgcctgtggatggctacatctcggggctgctcaacgacatccagaagttgtcagtcatcagctccaacaccctgcgtggccgcagccccaccagccggcggcgggcacagtccctggggctgctgggggatgagcactgggccaccgacccagacatgtacctccagagcccccagtctgagcgcactgacccccacggcctctacctcagctgcaacgggggcacaccagcaggccacaagcagatgccgtggcccgagccacagagcccacgggtcctgcccaatgggctggctgcaaaggcacagtccctgggccccgccgagtttcagggtgcctcgcagcgctgtctgcagctgggtgcctgcctgcagagctccccaccaggagcctcgccccccacgggcaccaataggcatggaatgaaggctgccaagcatggctctgaggaggcccggccacagtcctgcctggtgggctcagccacaggcaggccaggtggggaaggcagccctagccctaagacccgggagagcagcctgaagcgcaggctattccgaagcatgttcctgtccactgctgccacagcccctccaagcagcagcaagccaggccctccaccacagagcaagcccaactcctctttccgaccgccgcagaaagacaaccccccaagcctggtggccaaggcccagtccttgccctcggaccagccggtggggaccttcagccctctgaccacttcggataccagcagcccccagaagtccctccgcacagccccggccacaggccagcttccaggccggtcttccccagcgggatccccccgcacctggcacgcccagatcagcaccagcaacctgtacctgccccaggaccccacggttgccaagggtgccctggctggtgaggacacaggtgttgtgacacatgagcagttcaaggctgcgctcaggatggtggtggaccagggtgacccccggctgctgctggacagctacgtgaagattggcgagggctccaccggcatcgtctgcttggcccgggagaagcactcgggccgccaggtggccgtcaagatgatggacctcaggaagcagcagcgcagggagctgctcttcaacgaggtggtgatcatgcgggactaccagcacttcaacgtggtggagatgtacaagagctacctggtgggcgaggagctgtgggtgctcatggagttcctgcagggaggagccctcacagacatcgtctcccaagtcaggctgaatgaggagcagattgccactgtgtgtgaggctgtgctgcaggccctggcctacctgcatgctcagggtgtcatccaccgggacatcaagagtgactccatcctgctgaccctcgatggcagggtgaagctctcggacttcggattctgtgctcagatcagcaaagacgtccctaagaggaagtccctggtgggaaccccctactggatggctcctgaagtgatctccaggtctttgtatgccactgaggtggatatctggtctctgggcatcatggtgattgagatggtagatggggagccaccgtacttcagtgactccccagtgcaagccatgaagaggctccgggacagccccccacccaagctgaaaaactctcacaaggtctccccagtgctgcgagacttcctggagcggatgctggtgcgggacccccaagagagagccacagcccaggagctcctagaccaccccttcctgctgcagacagggctacctgagtgcctggtgcccctgatccagctctaccgaaagcagacctccacctgctgagcccaccccaagtatgcctgccacctacgcccacaggcagggcacactgggcagccagcctgccggcaggacttgcctgcctcctcctctcagtattctctccaaagattgaaatgtgaagccccagccccaccctctgcccttcagcctactgggccaggccggacctgccccctcagtgtctctccctcccgagtccccagatggagacccctttctacaggatgaccccttgatatttgcacagggatatttctaagaaacgcagaggccagcgttcctggcctctgcagccaacacag

SEQ ID NO: 163280 - DNA, 2620 bp, Homo sapiens
  Payload ID: 12170
  Gene Symbol:
  Gene Name: p21 protein (Cdc42/Rac)-activated kinase 6 [Source:EntrezGene
  Acc:56924]
  ENST ID: ENST00000558658
  CDS Start-End: 1-483
gtttttaccctcagcggctttcggactgtacagatcctggaaggacaaaagatcctggctaactgttcttctccctaccagggagtgccgcttcctgggctagagacaagcaccagcctgcagtggagaacgcaggaccccgctgcccagaaggagcagccacggcctgcggaggactggcccagcaaggtcccaggtcttccctctcctcagcgcctaagagagaggcccagtgcgggtgaggagtcgcgaggaagaggcggaaggcgccggaaggcaccatgttccgcaagaaaaagaagaaacgccctgagatctcagcgccacagaacttccagcaccgtgtccacacctccttcgaccccaaagaaggcaagtttgtgggcctccccccacaatggcagaacatcctggacacactgcggcgccccaagcccgtggtggacccttcgcgaatcacacgggtgcagctccagcccatgaagacagtggtgcggggcagcgcgatgcctgtggatggctacatctcggggctgctcaacgacatccagaagttgtcagtcatcagctccaacaccctgcgtggccgcagccccaccagccggcggcgggcacagtccctggggctgctgggggatgagcactgggccaccgacccagacatgtacctccagagcccccagtctgagcgcactgacccccacggcctctacctcagctgcaacgggggcacaccagcaggccacaagcagatgccgtggcccgagccacagagcccacgggtcctgcccaatgggctggctgcaaaggcacagtccctgggccccgccgagtttcagggtgcctcgcagcgctgtctgcagctgggtgcctgcctgcagagctccccaccaggagcctcgccccccacgggcaccaataggcatggaatgaaggctgccaagcatggctctgaggaggcccggccacagtcctgcctggtgggctcagccacaggcaggccaggtggggaaggcagccctagccctaagacccgggagagcagcctgaagcgcaggctattccgaagcatgttcctgtccactgctgccacagcccctccaagcagcagcaagccaggccctccaccacagagcaagcccaactcctctttccgaccgccgcagaaagacaaccccccaagcctggtggccaaggcccagtccttgccctcggaccagccggtggggaccttcagccctctgaccacttcggataccagcagcccccagaagtccctccgcacagccccggccacaggccagcttccaggccggtcttccccagcgggatccccccgcacctggcacgcccagatcagcaccagcaacctgtacctgccccaggaccccacggttgccaagggtgccctggctggtgaggacacaggtgttgtgacacatgagcagttcaaggctgcgctcaggatggtggtggaccagggtgacccccggctgctgctggacagctacgtgaagattggcgagggctccaccggcatcgtctgcttggcccgggagaagcactcgggccgccaggtggccgtcaagatgatggacctcaggaagcagcagcgcagggagctgctcttcaacgaggtggtgatcatgcgggactaccagcacttcaacgtggtggagatgtacaagagctacctggtgggcgaggagctgtgggtgctcatggagttcctgcagggaggagccctcacagacatcgtctcccaagtcaggctgaatgaggagcagattgccactgtgtgtgaggctgtgctgcaggccctggcctacctgcatgctcagggtgtcatccaccgggacatcaagagtgactccatcctgctgaccctcgatggcagggtgaagctctcggacttcggattctgtgctcagatcagcaaagacgtccctaagaggaagtccctggtgggaaccccctactggatggctcctgaagtgatctccaggtctttgtatgccactgaggtggatatctggtctctgggcatcatggtgattgagatggtagatggggagccaccgtacttcagtgactccccagtgcaagccatgaagaggctccgggacagccccccacccaagctgaaaaactctcacaaggtctccccagtgctgcgagacttcctggagcggatgctggtgcgggacccccaagagagagccacagcccaggagctcctagaccaccccttcctgctgcagacagggctacctgagtgcctggtgcccctgatccagctctaccgaaagcagacctccacctgctgagcccaccccaagtatgcctgccacctacgcccacaggcagggcacactgggcagccagcctgccggcaggacttgcctgcctcctcctctcagtattctctccaaagattgaaatgtgaagccccagccccaccctctgcccttcagcctactgggccaggccggacctgccccctcagtgtctctccctcccgagtccccagatggagacccctttctacaggatgaccccttgatatttgcacagggatatttctaagaaacgcagaggccagcgttcctggcctctgcag

SEQ ID NO: 163281 - DNA, 608 bp, Homo sapiens
  Payload ID: 12170
  Gene Symbol:
  Gene Name: p21 protein (Cdc42/Rac)-activated kinase 6 [Source:EntrezGene
  Acc:56924]
  ENST ID: ENST00000559435
  CDS Start-End: 1-424
caaggaacacctacaggtcttctgggatgggtccttctggaaacttagccaaaatatttctgagctaaaagatggtgaattgtggaataaattctttgtgcggattctgaatgccaatgatgaggccacagtgtctgttcttggggagcttgcagcagaaatgaatggggtttttgacactacattccaaagtcacctgaacaaagccttatggaagggagtgccgcttcctgggctagagacaagcaccagcctgcagtggagaacgcaggaccccgctgcccagaaggagcagccacggcctgcggaggactggcccagcaaggtcccaggtcttccctctcctcagcgcctaagagagaggcccagtgcgggtgaggagtcgcgaggaagaggcggaaggcgccggaagacagtggaatgatacttgtaatgggctttggattttataaaaacacacccccagagtctgcctgctccataggggacttggcacaggcaccatgttccgcaagaaaaagaagaaacgccctgagatctcagcgccacagaacttccagcaccgtgtccacacctccttcgaccccaaagaaggcaagtttgtgggc

SEQ ID NO: 163282 - DNA, 4500 bp, Homo sapiens
  Payload ID: 12171
  Gene Symbol: PAK7
  Gene Name: p21 protein (Cdc42/Rac)-activated kinase 7
  Uniprot ID: Q9P286
  ENST ID: ENST00000353224
  CDS Start-End: 268-2427
agttccccagcgtgcgcccggggagaccgggaacatggcgctgggagcgctgtagcagctgagaaggggctgaggcaccgccgcttcgctgacagccggccaccagaaatacactgtggtgaaatgcttccacctcttgctaaaatgaacactgaggaaaaatgaagaagactgacaagcaccagcgaaaagttgcagaatagaaatagccacactcctctggagtctttaattcatccacagccatcatataaaggttttggcatcatgtttgggaagaaaaagaaaaagattgaaatatctggcccgtccaactttgaacacagggttcatactgggtttgatccacaagagcagaagtttaccggccttccccagcagtggcacagcctgttagcagatacggccaacaggccaaagcctatggtggacccttcatgcatcacacccatccagctggctcctatgaagacaatcgttagaggaaacaaaccctgcaaggaaacctccatcaacggcctgctagaggattttgacaacatctcggtgactcgctccaactccctaaggaaagaaagcccacccaccccagatcagggagcctccagccacggtccaggccacgcggaagaaaatggcttcatcaccttctcccagtattccagcgaatccgatactactgctgactacacgaccgaaaagtacagggagaagagtctctatggagatgatctggatccgtattatagaggcagccacgcagccaagcaaaatgggcacgtaatgaaaatgaagcacggggaggcctactattctgaggtgaagcctttgaaatccgattttgccagattttctgccgattatcactcacatttggactcactgagcaaaccaagtgaatacagtgacctcaagtgggagtatcagagagcctcgagtagctcccctctggattattcattccaattcacaccttctagaactgcagggaccagcgggtgctccaaggagagcctggcgtacagtgaaagtgaatggggacccagcctggatgactatgacaggaggccaaagtcttcgtacctgaatcagacaagccctcagcccaccatgcggcagaggtccaggtcaggctcgggactccaggaaccgatgatgccatttggagcaagtgcatttaaaacccatccccaaggacactcctacaactcctacacctaccctcgcttgtccgagcccacaatgtgcattccaaaggtggattacgatcgagcacagatggtcctcagccctccactgtcagggtctgacacctaccccaggggccctgccaaactacctcaaagtcaaagcaaatcgggctattcctcaagcagtcaccagtacccgtctgggtaccacaaagccaccttgtaccatcacccctccctgcagagcagttcgcagtacatctccacggcttcctacctgagctccctcagcctctcatccagcacctacccgccgcccagctggggctcctcctccgaccagcagccctccagggtgtcccatgaacagtttcgggcggccctgcagctggtggtcagcccaggagaccccagggaatacttggccaactttatcaaaatcggggaaggctcaaccggcatcgtatgcatcgccaccgagaaacacacagggaaacaagttgcagtgaagaaaatggacctccggaagcaacagagacgagaactgcttttcaatgaggtcgtgatcatgcgggattaccaccatgacaatgtggttgacatgtacagcagctaccttgtcggcgatgagctctgggtggtcatggagtttctagaaggtggtgccttgacagacattgtgactcacaccagaatgaatgaagaacagatagctactgtctgcctgtcagttctgagagctctctcctaccttcataaccaaggagtgattcacagggacataaaaagtgactccatcctcctgacaagcgatggccggataaagttgtctgattttggtttctgtgctcaagtttccaaagaggtgccgaagaggaaatcattggttggcactccctactggatggcccctgaggtgatttctaggctaccttatgggacagaggtggacatctggtccctcgggatcatggtgatagaaatgattgatggcgagcccccctacttcaatgagcctcccctccaggcgatgcggaggatccgggacagtttacctccaagagtgaaggacctacacaaggtttcttcagtgctccggggattcctagacttgatgttggtgagggagccctctcagagagcaacagcccaggaactcctcggacatccattcttaaaactagcaggtccaccgtcttgcatcgtccccctcatgagacaatacaggcatcactgagcagaggattcgtgtaggtggcaaagctagatgaggacatgagaataattcaggagaacaaaaggaaacacagaacatgcaaaaggcctgtgcattctagaccagccaattggtgggacagcgtgatgaccggcagggttcaacagaccagggcatcttcttgtgtcttaaacaggcatctctccactgacagccggtgtggtcacttggagcacggctttaataagtcattattatatttttcagcccttcatccagcaaatcagaaggactcagtacaaactccgttatgatatatcctagccacatgcagggtaacatgtaggattttctatattgaaagaatacttttctggcaaaaaaaaaaaaaaaagaaagaaaggaaaacaaaaagcacttttttcttaatggtagcagtataatgtattttgcaacgaatttgtaatttttctgtacgatagttttgataatttatagtactttgatgtcatgtagccattgtatcagttgaagtaatacttgtttactagaggagtttgaacaaagcctttcctacttttttatccctttaagagaaccaatgattctttaggaactttgaatactgaatgactctcaatcaccgtcagctttagtaaaatctctttcttatcctaacaagtgtcttatttggtggaagaagaattaagagtgatggtgatggtgtgcacgtttcattaatccaaccaaaaataatgaaataaaatttgagccacagtataccactccttgggataaagttaaatatttttaaagatcacattttccatgaacgcctctagtagcaaaccattcttttgcacaccacaatgtttccctcagtgccctttctcaaatgggtacaatgttcccttgtggccaaatttccctcccagggagcaatttcagtgctaggatcattggattcagttcccaaaatagaatgtttcagtgagaccatgagaattccaggctcacaaagggagaggagagaacagggcaagacgtttggtttcatttgtcaccatttttaaaactctgtatgctagcacaccaaactcttgtctatatttacctttgtaccacagtattaatcgctattgttcatgtatcgtgctggaagtctgaactgactctagaggatgaattagcaagagggtattttaccaggtatgatctgacttcagttgtgcccatgttataatgtgtttccgacataggagagtcgtgctgctgtctagatcttcttgaatgttgataaaaatgaatgactactacaatacattttgtgttgcttgttggatgaatttgcatgttaactgtaggccaatatagatttgcctttaaaactctggaagagctacatagtcatcattagtttctattaattatgcatcagacaaaagccatttgttaccaaactgggaaaacagaggcttttcttaactatttcacatactgtaacaaatatgaatttaaatttgtgatagcgctctggttgctctaagcataattaagaatttttgtaattaataggttgctaattatttatcactgctaaaaaggaaaaaaggcataaaatgaccttctactgattagattttcagttttctttcaaactggaaatgcctccataaatatgatctatgattttgcttcataaaacagcaaatcaatgttttatgtaaaatattaaagcattaatataaatatgtgagaataaaaacaatctaaatccagaaaatggcagtcctaaatgttcatgagacagattgtattaatttaaccaggactatgtagaagtagaaagaaaagaaaaagaaaatcttttttaaaccagaataaacattaaaaactattgcagaaaatagtggattttggattccaaacattttcgacagtgtaatggaaatttttctgtaattttcttaccatcgggtattttttaaagtattcattgagtttaccaaaagttactgtagcttaaaaggttttgtgagcactaactattggcagaaactgcatttgcaaataaaaataaatgtttgccttttc

SEQ ID NO: 163283 - DNA, 4613 bp, Homo sapiens
  Payload ID: 12171
  Gene Symbol: PAK7
  Gene Name: p21 protein (Cdc42/Rac)-activated kinase 7
  Uniprot ID: Q9P286
  ENST ID: ENST00000378423
  CDS Start-End: 381-2540
ggcgctgggagcgctgtagcagctgagaaggggctgaggcaccgccgcttcgctgacagccggccaccaggtttctgtctcccagtataatcatatccagccccatggctcttactggggcctctgaaatgtttatcaccaaatctgtgtctgcagttccaacctcttccctgagcatcaaagctgtatttccaactttcgctggatgcttctatctggaaatacactgtggtgaaatgcttccacctcttgctaaaatgaacactgaggaaaaatgaagaagactgacaagcaccagcgaaaagttgcagaatagaaatagccacactcctctggagtctttaattcatccacagccatcatataaaggttttggcatcatgtttgggaagaaaaagaaaaagattgaaatatctggcccgtccaactttgaacacagggttcatactgggtttgatccacaagagcagaagtttaccggccttccccagcagtggcacagcctgttagcagatacggccaacaggccaaagcctatggtggacccttcatgcatcacacccatccagctggctcctatgaagacaatcgttagaggaaacaaaccctgcaaggaaacctccatcaacggcctgctagaggattttgacaacatctcggtgactcgctccaactccctaaggaaagaaagcccacccaccccagatcagggagcctccagccacggtccaggccacgcggaagaaaatggcttcatcaccttctcccagtattccagcgaatccgatactactgctgactacacgaccgaaaagtacagggagaagagtctctatggagatgatctggatccgtattatagaggcagccacgcagccaagcaaaatgggcacgtaatgaaaatgaagcacggggaggcctactattctgaggtgaagcctttgaaatccgattttgccagattttctgccgattatcactcacatttggactcactgagcaaaccaagtgaatacagtgacctcaagtgggagtatcagagagcctcgagtagctcccctctggattattcattccaattcacaccttctagaactgcagggaccagcgggtgctccaaggagagcctggcgtacagtgaaagtgaatggggacccagcctggatgactatgacaggaggccaaagtcttcgtacctgaatcagacaagccctcagcccaccatgcggcagaggtccaggtcaggctcgggactccaggaaccgatgatgccatttggagcaagtgcatttaaaacccatccccaaggacactcctacaactcctacacctaccctcgcttgtccgagcccacaatgtgcattccaaaggtggattacgatcgagcacagatggtcctcagccctccactgtcagggtctgacacctaccccaggggccctgccaaactacctcaaagtcaaagcaaatcgggctattcctcaagcagtcaccagtacccgtctgggtaccacaaagccaccttgtaccatcacccctccctgcagagcagttcgcagtacatctccacggcttcctacctgagctccctcagcctctcatccagcacctacccgccgcccagctggggctcctcctccgaccagcagccctccagggtgtcccatgaacagtttcgggcggccctgcagctggtggtcagcccaggagaccccagggaatacttggccaactttatcaaaatcggggaaggctcaaccggcatcgtatgcatcgccaccgagaaacacacagggaaacaagttgcagtgaagaaaatggacctccggaagcaacagagacgagaactgcttttcaatgaggtcgtgatcatgcgggattaccaccatgacaatgtggttgacatgtacagcagctaccttgtcggcgatgagctctgggtggtcatggagtttctagaaggtggtgccttgacagacattgtgactcacaccagaatgaatgaagaacagatagctactgtctgcctgtcagttctgagagctctctcctaccttcataaccaaggagtgattcacagggacataaaaagtgactccatcctcctgacaagcgatggccggataaagttgtctgattttggtttctgtgctcaagtttccaaagaggtgccgaagaggaaatcattggttggcactccctactggatggcccctgaggtgatttctaggctaccttatgggacagaggtggacatctggtccctcgggatcatggtgatagaaatgattgatggcgagcccccctacttcaatgagcctcccctccaggcgatgcggaggatccgggacagtttacctccaagagtgaaggacctacacaaggtttcttcagtgctccggggattcctagacttgatgttggtgagggagccctctcagagagcaacagcccaggaactcctcggacatccattcttaaaactagcaggtccaccgtcttgcatcgtccccctcatgagacaatacaggcatcactgagcagaggattcgtgtaggtggcaaagctagatgaggacatgagaataattcaggagaacaaaaggaaacacagaacatgcaaaaggcctgtgcattctagaccagccaattggtgggacagcgtgatgaccggcagggttcaacagaccagggcatcttcttgtgtcttaaacaggcatctctccactgacagccggtgtggtcacttggagcacggctttaataagtcattattatatttttcagcccttcatccagcaaatcagaaggactcagtacaaactccgttatgatatatcctagccacatgcagggtaacatgtaggattttctatattgaaagaatacttttctggcaaaaaaaaaaaaaaaagaaagaaaggaaaacaaaaagcacttttttcttaatggtagcagtataatgtattttgcaacgaatttgtaatttttctgtacgatagttttgataatttatagtactttgatgtcatgtagccattgtatcagttgaagtaatacttgtttactagaggagtttgaacaaagcctttcctacttttttatccctttaagagaaccaatgattctttaggaactttgaatactgaatgactctcaatcaccgtcagctttagtaaaatctctttcttatcctaacaagtgtcttatttggtggaagaagaattaagagtgatggtgatggtgtgcacgtttcattaatccaaccaaaaataatgaaataaaatttgagccacagtataccactccttgggataaagttaaatatttttaaagatcacattttccatgaacgcctctagtagcaaaccattcttttgcacaccacaatgtttccctcagtgccctttctcaaatgggtacaatgttcccttgtggccaaatttccctcccagggagcaatttcagtgctaggatcattggattcagttcccaaaatagaatgtttcagtgagaccatgagaattccaggctcacaaagggagaggagagaacagggcaagacgtttggtttcatttgtcaccatttttaaaactctgtatgctagcacaccaaactcttgtctatatttacctttgtaccacagtattaatcgctattgttcatgtatcgtgctggaagtctgaactgactctagaggatgaattagcaagagggtattttaccaggtatgatctgacttcagttgtgcccatgttataatgtgtttccgacataggagagtcgtgctgctgtctagatcttcttgaatgttgataaaaatgaatgactactacaatacattttgtgttgcttgttggatgaatttgcatgttaactgtaggccaatatagatttgcctttaaaactctggaagagctacatagtcatcattagtttctattaattatgcatcagacaaaagccatttgttaccaaactgggaaaacagaggcttttcttaactatttcacatactgtaacaaatatgaatttaaatttgtgatagcgctctggttgctctaagcataattaagaatttttgtaattaataggttgctaattatttatcactgctaaaaaggaaaaaaggcataaaatgaccttctactgattagattttcagttttctttcaaactggaaatgcctccataaatatgatctatgattttgcttcataaaacagcaaatcaatgttttatgtaaaatattaaagcattaatataaatatgtgagaataaaaacaatctaaatccagaaaatggcagtcctaaatgttcatgagacagattgtattaatttaaccaggactatgtagaagtagaaagaaaagaaaaagaaaatcttttttaaaccagaataaacattaaaaactattgcagaaaatagtggattttggattccaaacattttcgacagtgtaatggaaatttttctgtaattttcttaccatcgggtattttttaaagtattcattgagtttaccaaaagttactgtagcttaaaaggttttgtgagcactaactattggcagaaactgcatttgcaaataaaaataaatgtttgccttttc

SEQ ID NO: 163284 - DNA, 4780 bp, Homo sapiens
  Payload ID: 12171
  Gene Symbol: PAK7
  Gene Name: p21 protein (Cdc42/Rac)-activated kinase 7
  Uniprot ID: Q9P286
  ENST ID: ENST00000378429
  CDS Start-End: 548-2707
cgaaaacccggagcagctgcgtacgctcatggacagtcctccgaggggcgaagccgggcagctgggcatgctcagtagctgggggaggtttgggtggagagtagaaagctgtggctctgcctctcaccccctcccgctggcccccgccccccttgcccctacccagccagtagtagttccccagcgtgcgcccggggagaccgggaacatggcgctgggagcgctgtagcagctgagaaggggctgaggcaccgccgcttcgctgacagccggccaccagatgttcatgcattctagagaaagtggaaaacttagaagcctaattaatgactgtcttctggacctctgagaccatgtttctagtgttttccgtggaatattatcagaaatacactgtggtgaaatgcttccacctcttgctaaaatgaacactgaggaaaaatgaagaagactgacaagcaccagcgaaaagttgcagaatagaaatagccacactcctctggagtctttaattcatccacagccatcatataaaggttttggcatcatgtttgggaagaaaaagaaaaagattgaaatatctggcccgtccaactttgaacacagggttcatactgggtttgatccacaagagcagaagtttaccggccttccccagcagtggcacagcctgttagcagatacggccaacaggccaaagcctatggtggacccttcatgcatcacacccatccagctggctcctatgaagacaatcgttagaggaaacaaaccctgcaaggaaacctccatcaacggcctgctagaggattttgacaacatctcggtgactcgctccaactccctaaggaaagaaagcccacccaccccagatcagggagcctccagccacggtccaggccacgcggaagaaaatggcttcatcaccttctcccagtattccagcgaatccgatactactgctgactacacgaccgaaaagtacagggagaagagtctctatggagatgatctggatccgtattatagaggcagccacgcagccaagcaaaatgggcacgtaatgaaaatgaagcacggggaggcctactattctgaggtgaagcctttgaaatccgattttgccagattttctgccgattatcactcacatttggactcactgagcaaaccaagtgaatacagtgacctcaagtgggagtatcagagagcctcgagtagctcccctctggattattcattccaattcacaccttctagaactgcagggaccagcgggtgctccaaggagagcctggcgtacagtgaaagtgaatggggacccagcctggatgactatgacaggaggccaaagtcttcgtacctgaatcagacaagccctcagcccaccatgcggcagaggtccaggtcaggctcgggactccaggaaccgatgatgccatttggagcaagtgcatttaaaacccatccccaaggacactcctacaactcctacacctaccctcgcttgtccgagcccacaatgtgcattccaaaggtggattacgatcgagcacagatggtcctcagccctccactgtcagggtctgacacctaccccaggggccctgccaaactacctcaaagtcaaagcaaatcgggctattcctcaagcagtcaccagtacccgtctgggtaccacaaagccaccttgtaccatcacccctccctgcagagcagttcgcagtacatctccacggcttcctacctgagctccctcagcctctcatccagcacctacccgccgcccagctggggctcctcctccgaccagcagccctccagggtgtcccatgaacagtttcgggcggccctgcagctggtggtcagcccaggagaccccagggaatacttggccaactttatcaaaatcggggaaggctcaaccggcatcgtatgcatcgccaccgagaaacacacagggaaacaagttgcagtgaagaaaatggacctccggaagcaacagagacgagaactgcttttcaatgaggtcgtgatcatgcgggattaccaccatgacaatgtggttgacatgtacagcagctaccttgtcggcgatgagctctgggtggtcatggagtttctagaaggtggtgccttgacagacattgtgactcacaccagaatgaatgaagaacagatagctactgtctgcctgtcagttctgagagctctctcctaccttcataaccaaggagtgattcacagggacataaaaagtgactccatcctcctgacaagcgatggccggataaagttgtctgattttggtttctgtgctcaagtttccaaagaggtgccgaagaggaaatcattggttggcactccctactggatggcccctgaggtgatttctaggctaccttatgggacagaggtggacatctggtccctcgggatcatggtgatagaaatgattgatggcgagcccccctacttcaatgagcctcccctccaggcgatgcggaggatccgggacagtttacctccaagagtgaaggacctacacaaggtttcttcagtgctccggggattcctagacttgatgttggtgagggagccctctcagagagcaacagcccaggaactcctcggacatccattcttaaaactagcaggtccaccgtcttgcatcgtccccctcatgagacaatacaggcatcactgagcagaggattcgtgtaggtggcaaagctagatgaggacatgagaataattcaggagaacaaaaggaaacacagaacatgcaaaaggcctgtgcattctagaccagccaattggtgggacagcgtgatgaccggcagggttcaacagaccagggcatcttcttgtgtcttaaacaggcatctctccactgacagccggtgtggtcacttggagcacggctttaataagtcattattatatttttcagcccttcatccagcaaatcagaaggactcagtacaaactccgttatgatatatcctagccacatgcagggtaacatgtaggattttctatattgaaagaatacttttctggcaaaaaaaaaaaaaaaagaaagaaaggaaaacaaaaagcacttttttcttaatggtagcagtataatgtattttgcaacgaatttgtaatttttctgtacgatagttttgataatttatagtactttgatgtcatgtagccattgtatcagttgaagtaatacttgtttactagaggagtttgaacaaagcctttcctacttttttatccctttaagagaaccaatgattctttaggaactttgaatactgaatgactctcaatcaccgtcagctttagtaaaatctctttcttatcctaacaagtgtcttatttggtggaagaagaattaagagtgatggtgatggtgtgcacgtttcattaatccaaccaaaaataatgaaataaaatttgagccacagtataccactccttgggataaagttaaatatttttaaagatcacattttccatgaacgcctctagtagcaaaccattcttttgcacaccacaatgtttccctcagtgccctttctcaaatgggtacaatgttcccttgtggccaaatttccctcccagggagcaatttcagtgctaggatcattggattcagttcccaaaatagaatgtttcagtgagaccatgagaattccaggctcacaaagggagaggagagaacagggcaagacgtttggtttcatttgtcaccatttttaaaactctgtatgctagcacaccaaactcttgtctatatttacctttgtaccacagtattaatcgctattgttcatgtatcgtgctggaagtctgaactgactctagaggatgaattagcaagagggtattttaccaggtatgatctgacttcagttgtgcccatgttataatgtgtttccgacataggagagtcgtgctgctgtctagatcttcttgaatgttgataaaaatgaatgactactacaatacattttgtgttgcttgttggatgaatttgcatgttaactgtaggccaatatagatttgcctttaaaactctggaagagctacatagtcatcattagtttctattaattatgcatcagacaaaagccatttgttaccaaactgggaaaacagaggcttttcttaactatttcacatactgtaacaaatatgaatttaaatttgtgatagcgctctggttgctctaagcataattaagaatttttgtaattaataggttgctaattatttatcactgctaaaaaggaaaaaaggcataaaatgaccttctactgattagattttcagttttctttcaaactggaaatgcctccataaatatgatctatgattttgcttcataaaacagcaaatcaatgttttatgtaaaatattaaagcattaatataaatatgtgagaataaaaacaatctaaatccagaaaatggcagtcctaaatgttcatgagacagattgtattaatttaaccaggactatgtagaagtagaaagaaaagaaaaagaaaatcttttttaaaccagaataaacattaaaaactattgcagaaaatagtggattttggattccaaacattttcgacagtgtaatggaaatttttctgtaattttcttaccatcgggtattttttaaagtattcattgagtttaccaaaagttactgtagcttaaaaggttttgtgagcactaactattggcagaaactgcatttgcaaataaaaataaatgtttgccttttc

SEQ ID NO: 163285 - DNA, 5905 bp, Homo sapiens
  Payload ID: 12172
  Gene Symbol: P2RX5-TAX1BP3
  Gene Name: P2RX5-TAX1BP3 readthrough (NMD candidate)
  ENST ID: ENST00000550383
  CDS Start-End: 190-1488
caaccgcgtcaataaaaggccgccccgacccgcccccgcgccccgcagccctgccggacaccccgggctgcagctgagcgggcgcagacgggccgaggcgggcgccgggcgcgcagggaccgagggaccgagtgctccccatgagcgcacgtgggccgggcggtccgcaagcccggctgagagcgcgccatggggcaggcgggctgcaaggggctctgcctgtcgctgttcgactacaagaccgagaagtatgtcatcgccaagaacaagaaggtgggcctgctgtaccggctgctgcaggcctccatcctggcgtacctggtcgtatgggtgttcctgataaagaagggttaccaagacgtcgacacctccctgcagagtgctgtcatcaccaaagtcaagggcgtggccttcaccaacacctcggatcttgggcagcggatctgggatgtcgccgactacgtcattccagcccagggagagaacgtcttttttgtggtcaccaacctgattgtgacccccaaccagcggcagaacgtctgtgctgagaatgaaggcattcctgatggcgcgtgctccaaggacagcgactgccacgctggggaagcggttacagctggaaacggagtgaagaccggccgctgcctgcggagagagaacttggccaggggcacctgtgagatctttgcctggtgcccgttggagacaagctccaggccggaggagccattcctgaaggaggccgaagacttcaccattttcataaagaaccacatccgtttccccaaattcaacttctccaaaagcaatgtgatggacgtcaaggacagatctttcctgaaatcatgccactttggccccaagaaccactactgccccatcttccgactgggctccgtgatccgctgggccgggagcgacttccaggatatagccctggagggtggcgtgataggaattaatattgaatggaactgtgatcttgataaagctgcctctgagtgccaccctcactattcttttagccgtctggacaataaactttcaaagtctgtctcctccgggtacaacttcagatttgccagatattaccgagacgcagccggggtggagttccgcaccctgatgaaagcctacgggatccgctttgacgtgatggtgaacggcaagggtgctttcttctgcgacctggtactcatctacctcatcaaaaagagagagttttaccgtgacaagaagtacgaggaagtgaggggcctagaagacagttcccaggaggccgaggacgaggcatcggggctggggctatctgagcagctcacatctgggccagggctgctggggatgccggagcagcaggagctgcaggagccacccgaggcgaagcgtggaagcagcagtcagaaggggaacggatctgtgtgcccacagctcctggagccccacaggctgaggactccctctgcttctcccttacaccaggaatgaacctttccttcccactcagaggaggttctgagaggactgaggtgggcaaaccactgaggatcttcagtgggggcagagaaagggctcactgagatggggggcaacgctatggcctcagcttctccttggcgtcgtgtgcatgtgttcctgaagccgaaacggaatttaacaggtctgggtcccagatccatttccatgactggccatgggctatctatgatctgtcaaaaggggacttggattcaagctctcagatccccttccaatctaaaacagattctttttttaaaaaaaatccaaatgtgattacgtcacttcagactaaaaacttccaaaggcttcccccatttgctctgaggatcaaggccagggcaaatgggagctcactgcagcctcaacctcctgggctcaagtgatcttgatcttcccattccagcctcctgagtagctggactacaggcgcatgtccccacacccattactgccctccatgatctggtctgggtctaccctgtggcctcttctctcactctctaaatacagtcacattccttcctgcccaatggcctggaaacatgcgctttcctgaaggtaactccttccccacacttgcctatgttattcaacttttgggtttcagatgtaatgttatttcctcagagaagacttccttgacctccatataccccaacttgggctaggtctgctatgtcctcttcatagtactcaccatgatttaagtatttctgaagttaggtgatgctggtttccccagttaaccataaatccaatgagcaccatcattttcattactgtaatttcttttttttttagacagggtctcgctgttgcctaggttggagtgtagtggcaaaatcgtggcttactgtggcctcaacctcccgggcccaggtgatcctgatcctcccacctcagcctcctgagtagctgggactacaggcacatgccaccacatctggctaattaaatgtttttttgtagagatgggcatctcactatgttgcccaggctggtcttgatctcctgggctcaagccttggcctcccaaagtgctgagatcacagcaggagccactacactcaggcaattaccgtcattctaatgcaatatttattcctcaattaaacaaatgcattttattcttttttttttgagagggagtttcgctcttgttgcccaggccggagtgcaatggcatgatctcggctcaccgcaacctctgcctcccaggttcaagagattctcctgcctcagccttcctagtagctgggattacaggcctgtgccaccacacccggctaattttgtatttttagtagagatggggtttctccatgttggtcaggctggtctcgaactcctgacctcaggtgatctgcccacctcggcctcccaaagtgctgggattacaggcatgagccaccgtgctcggccacaaatgcgttttattctaaaataaccctcctgacaagaaaggatcatggattaacacatggaggtgtttacaccctaaacctgcccaaagttcaacttcaatgtccaaacaatttttgtgttttttttgagatggaatcttgctgtcacccaggctggagtgcagtggtatgatcttggctcactgcaacctccacctccagggttcaagcgattctcctacctcagccacccaagtagctgggattacaggtgcccaccaccacgcctggctaatttttgcatcttatttttagtagagatggggtttcgccatgttggccaggcttgtctcaaactcctgacctcaggtgatctgcctgccgtcggactcccaaagtgctaggattacaggcgtgagccactgtgcccagcctaaatgtccaaacaatgtttaatcttccctagacatattctaaaaaatacagcttgactttattttttcttatggaaaggactgtcactaaatgaaatggaactaaaatgacaccatatatacctgaaagtagtggttagtgggagggaacgctggcctgtgaaaggtacacccagcaaacatatcaagagcaaattaagagacctgcatttgaatcctggctctgtctcttcctagctgtatctcctctgggagaagtatttaacctctctgagcctcaggttccttacgagggagctaacaataacatctaccctgtaaggttattgctaaaattaaatgagaggatcggtgtagagtagaagtcacaatgccagcatatagggaactcttttttttttttttttccctgagagacagacggagtcttgctccatcacccaggctggaatgcagtggcacgatctcggctcgctgcaacctctgcctccagggttcaagcgattctctttcctcagcctcccgagtacctggcattgcaggcgcgcgccaccacacccggctaatatttatatttttagtagagacggagttttgccatgttggccaggttggtcttgaactcctgacctcaggtgatccgcccacctcggcctcccaaagtgctgggattacagacatgagccaccgtgcccggcccagggagctcttaatacatattaactgttactgcttcttaggatgttaataagttctttccttatgtaggcccttagggcccgtttctgaatggcctatgtgtaaatacaaggacttaacacaaggctatggcccattccttgctctccaggagtcaaatctcggcgattttgcatcagtggcagcctaagcgttacagcaggaaagaactccacaaagtgtctcacgcttcatttaatctgaagaatattacaggctctccgtcttcagatataaattatttataacgttacagaacaagcagcgaattcaaccacttaagaactaaggaagtctacatggtgttaattgctggccacagtcctcccgatctggttttttaaaaaagtcccccgggcccccatttcagtagacgtgcaccatgccgtagaggaacgtccagaacaggacgtaggtgaagaggcccccgatgaggcctcctgtaaagagaggtctccgtgatttgaaatatttgttccacctccttcccgccttgagaatgaggagcagggagagcaggacggaggcgagcaggtagaagatgaagccgtagaggccggtgaggccgaggatgccggccgtggcccccgacagcgctgacaccgaggtccggcaataatccaggacggcggcgttgccccgcacggccgcctcgctgatgaacggcggcccttcccgcttggccaccaccgcggccatcgcaccagcccgggctcggcctctcgctttctcgcggaacaacgcggagctgcggagaaaaccaagttacaagtggcgcccggagctcgcaaagagttgaaattcacaagctgcgtcaaggtgagaacttaatcctgggtttcagcattggaggtggaatcgaccaggatccttcccagaatcccttctctgaagacaagacggacaagggtatttatgtcacacgggtgtctgaaggaggccctgctgaaatcgctgggctgcagattggagacaagatcatgcaggtgaacggctgggacatgaccatggtcacacacgaccaggcccgcaagcggctcaccaagcgctcggaggaggtggtgcgtctgctggtgacgcggcagtcgctgcagaaggccgtgcagcagtccatgctgtcctagcagccaccaccatctgcgactcctgcctgccgcctctctgtacagtaacgccacttccacactctgtccccatctggcttctgctgaccgctgggccccagctcagaagggctatagctggtcccagaggcctggcctggccttccttcccttctcccatccctggcctggggcctctgggaccggctttctctcctggacaccgaggattggaaataagggcctggagctgagtagtagccagtctgctgtgaccacaggctcaggtccgaccctgctgcttggccacagcagtggctgggcaagtgggaaccactatctcttgggagcccccaaaagctgggaaatgctggaggaaccaggcctttcccgcttttgcctggctgcagggttcggctccgcccctgccccccagccctcgtgtgtccacaccgcagtgcctctgcccctcgggggactggacacacatcctgccagaggcgctacgaagctttgcccagatgaagccaggtgggctccgcgttcactcccactctcccgaggggtgctggcctccccagggtttgccttcttacggatttagacgaggttcgaggctcacctatcagggcagctctcaggattgtcattttcctctttgcctgtgggtttaacttttgtatttttttaatcacaagtttgatac

SEQ ID NO: 163286 - DNA, 2532 bp, Homo sapiens
  Payload ID: 12173
  Gene Symbol: POR
  Gene Name: P450 (cytochrome) oxidoreductase
  Uniprot ID: P16435
  ENST ID: ENST00000394893
  CDS Start-End: 21-1922
agccgggctgccagcgtttcatgatcaacatgggagactcccacgtggacaccagctccaccgtgtccgaggcggtggccgaagaagtatctcttttcagcatgacggacatgattctgttttcgctcatcgtgggtctcctaacctactggttcctcttcagaaagaaaaaagaagaagtccccgagttcaccaaaattcagacattgacctcctctgtcagagagagcagctttgtggaaaagatgaagaaaacggggaggaacatcatcgtgttctacggctcccagacggggactgcagaggagtttgccaaccgcctgtccaaggacgcccaccgctacgggatgcgaggcatgtcagcggaccctgaggagtatgacctggccgacctgagcagcctgccagagatcgacaacgccctggtggttttctgcatggccacctacggtgagggagaccccaccgacaatgcccaggacttctacgactggctgcaggagacagacgtggatctctctggggtcaagttcgcggtgtttggtcttgggaacaagacctacgagcacttcaatgccatgggcaagtacgtggacaagcggctggagcagctcggcgcccagcgcatctttgagctggggttgggcgacgacgatgggaacttggaggaggacttcatcacctggcgagagcagttctggccggccgtgtgtgaacactttggggtggaagccactggcgaggagtccagcattcgccagtacgagcttgtggtccacaccgacatagatgcggccaaggtgtacatgggggagatgggccggctgaagagctacgagaaccagaagcccccctttgatgccaagaatccgttcctggctgcagtcaccaccaaccggaagctgaaccagggaaccgagcgccacctcatgcacctggaattggacatctcggactccaaaatcaggtatgaatctggggaccacgtggctgtgtacccagccaacgactctgctctcgtcaaccagctgggcaaaatcctgggtgccgacctggacgtcgtcatgtccctgaacaacctggatgaggagtccaacaagaagcacccattcccgtgccctacgtcctaccgcacggccctcacctactacctggacatcaccaacccgccgcgtaccaacgtgctgtacgagctggcgcagtacgcctcggagccctcggagcaggagctgctgcgcaagatggcctcctcctccggcgagggcaaggagctgtacctgagctgggtggtggaggcccggaggcacatcctggccatcctgcaggactgcccgtccctgcggccccccatcgaccacctgtgtgagctgctgccgcgcctgcaggcccgctactactccatcgcctcatcctccaaggtccaccccaactctgtgcacatctgtgcggtggttgtggagtacgagaccaaggctggccgcatcaacaagggcgtggccaccaactggctgcgggccaaggagcctgccggggagaacggcggccgtgcgctggtgcccatgttcgtgcgcaagtcccagttccgcctgcccttcaaggccaccacgcctgtcatcatggtgggccccggcaccggggtggcacccttcataggcttcatccaggagcgggcctggctgcgacagcagggcaaggaggtgggggagacgctgctgtactacggctgccgccgctcggatgaggactacctgtaccgggaggagctggcgcagttccacagggacggtgcgctcacccagctcaacgtggccttctcccgggagcagtcccacaaggtctacgtccagcacctgctaaagcaagaccgagagcacctgtggaagttgatcgaaggcggtgcccacatctacgtctgtgggtgagtgagtggggtcactggaatagggggcagggaggacaaggccctgcctgccacagttggcccagcccccagcaccccctcttcctgcccagggatgcacggaacatggccagggatgtgcagaacaccttctacgacatcgtggctgagctcggggccatggagcacgcgcaggcggtggactacatcaagaaactgatgaccaagggccgctactccctggacgtgtggagctaggggcctgcctgccccacccaccccacagactccggcctgtaatcagctctcctggctccctcccgtagtctcctgggtgtgtttggcttggccttggcatgggcgcaggcccagtgacaaagactcctctgggcctggggtgcatcctcctcagcccccaggccaggtgaggtccaccggcccctggcagcacagcccagggcctgcatgggggcaccgggctccatgcctctggaggcctctggccctcggtggctgcacagaagggctctttctctctgctgagctgggcccagcccctccacgtgatttccagtgagtgtaaataattttaaataacctctggcccttggaataaagttctgttttctgta

SEQ ID NO: 163287 - DNA, 561 bp, Homo sapiens
  Payload ID: 12173
  Gene Symbol: POR
  Gene Name: P450 (cytochrome) oxidoreductase
  Uniprot ID: P16435
  ENST ID: ENST00000432753
  CDS Start-End: 63-561
gcacttgagaactctcacagggagggaagcaagcatacaattcaacaagaatggcacgtttcatgatcaacatgggagactcccacgtggacaccagctccaccgtgtccgaggcggtggccgaagaagtatctcttttcagcatgacggacatgattctgttttcgctcatcgtgggtctcctaacctactggttcctcttcagaaagaaaaaagaagaagtccccgagttcaccaaaattcagacattgacctcctctgtcagagagagcagctttgtggaaaagatgaagaaaacggggaggaacatcatcgtgttctacggctcccagacggggactgcagaggagtttgccaaccgcctgtccaaggacgcccaccgctacgggatgcgaggcatgtcagcggaccctgaggagtatgacctggccgacctgagcagcctgccagagatcgacaacgccctggtggttttctgcatggccacctacggtgagggagaccccaccgacaatgcccaggacttctacgactggctgcaggagacagacgtggatctct

SEQ ID NO: 163288 - DNA, 736 bp, Homo sapiens
  Payload ID: 12173
  Gene Symbol: POR
  Gene Name: P450 (cytochrome) oxidoreductase
  Uniprot ID: P16435
  ENST ID: ENST00000418341
  CDS Start-End: 549-736
aagaaaagttgctatattttgcaaaagacataaatctacagattcaagaaactgagtgaaccccacagaaggtataaagaagaaactcagagattaaagactctttcagggcagaaggctcacacaggcttccagaacctcctcggagcgattgtagggactgcctgacccggaagagagttgtcagtcaagaccgccagagttttcccatcagagtatttggcatagcagaggtggctcccaaactgtgccagggcactgcagcaaactcacaagtgatcattctcaatgcggcggacgctcaagtctgttgaactccatgcgaagtgctagcttgggacagttcacggttccaacgtgagatccttgctgcattccttcttaggattttacatctttgcgaagctgggtttgcagtggttgttcagacctaactatacgtggaactgttaggcatttttttttggcctacggataccattaaaaatttgctgagataccagggactccacaaacgaaggacatttgggatctgtccagacagtttcatgatcaacatgggagactcccacgtggacaccagctccaccgtgtccgaggcggtggccgaagaagtatctcttttcagcatgacggacatgattctgttttcgctcatcgtgggtctcctaacctactggttcctcttcagaaagaaaaaagaagaagtccccgagttcaccaaaattcagacatt

SEQ ID NO: 163289 - DNA, 625 bp, Homo sapiens
  Payload ID: 12173
  Gene Symbol: POR
  Gene Name: P450 (cytochrome) oxidoreductase
  Uniprot ID: P16435
  ENST ID: ENST00000439963
  CDS Start-End: 61-625
agcaaggagaccggaagaaggtctggggaagttatttggacaatgaagagagccagtttcatgatcaacatgggagactcccacgtggacaccagctccaccgtgtccgaggcggtggccgaagaagtatctcttttcagcatgacggacatgattctgttttcgctcatcgtgggtctcctaacctactggttcctcttcagaaagaaaaaagaagaagtccccgagttcaccaaaattcagacattgacctcctctgtcagagagagcagctttgtggaaaagatgaagaaaacggggaggaacatcatcgtgttctacggctcccagacggggactgcagaggagtttgccaaccgcctgtccaaggacgcccaccgctacgggatgcgaggcatgtcagcggaccctgaggagtatgacctggccgacctgagcagcctgccagagatcgacaacgccctggtggttttctgcatggccacctacggtgagggagaccccaccgacaatgcccaggacttctacgactggctgcaggagacagacgtggatctctctggggtcaagttcgcggtgtttggtcttgggaacaagacctacgagcacttcaatgccatgggca

SEQ ID NO: 163290 - DNA, 2332 bp, Homo sapiens
  Payload ID: 12173
  Gene Symbol: POR
  Gene Name: P450 (cytochrome) oxidoreductase
  ENST ID: ENST00000447222
  CDS Start-End: 1-2176
gacggacatgattctgttttcgctcatcgtgggtctcctaacctactggttcctcttcagaaagaaaaaagaagaagtccccgagttcaccaaaattcagacattgacctcctctgtcagagagagcagctttgtggaaaagatgaagaaaacggggaggaacatcatcgtgttctacggctcccagacggggactgcagaggagtttgccaaccgcctgtccaaggacgcccaccgctacgggatgcgaggcatgtcagcggaccctgaggagtatgacctggccgacctgagcagcctgccagagatcgacaacgccctggtggttttctgcatggccacctacggtgagggagaccccaccgacaatgcccaggacttctacgactggctgcaggagacagacgtggatctctctggggtcaagttcgcggtgagtcacccagagactgctatgggctcccggtggcctgcggtgcctccctggggactccagatccatgtatctgaaaggcagccctccagacccccaccctgtcctcagcagccagggcaggccacttgtgagaccctctcctctgccccagaccccagcactacgagaatgtcccctccctgtccccagccccagtcggctccagggggcattgggtgctggagactaaaggtgtttggtcttgggaacaagacctacgagcacttcaatgccatgggcaagtacgtggacaagcggctggagcagctcggcgcccagcgcatctttgagctggggttgggcgacgacgatgggaacttggaggaggacttcatcacctggcgagagcagttctggccggccgtgtgtgaacactttggggtggaagccactggcgaggagtccagcattcgccagtacgagcttgtggtccacaccgacatagatgcggccaaggtgtacatgggggagatgggccggctgaagagctacgagaaccagaagcccccctttgatgccaagaatccgttcctggctgcagtcaccaccaaccggaagctgaaccagggaaccgagcgccacctcatgcacctggaattggacatctcggactccaaaatcaggtatgaatctggggaccacgtggctgtgtacccagccaacgactctgctctcgtcaaccagctgggcaaaatcctgggtgccgacctggacgtcgtcatgtccctgaacaacctggatgaggagtccaacaagaagcacccattcccgtgccctacgtcctaccgcacggccctcacctactacctggacatcaccaacccgccgcgtaccaacgtgctgtacgagctggcgcagtacgcctcggagccctcggagcaggagctgctgcgcaagatggcctcctcctccggcgagggcaaggagctgtacctgagctgggtggtggaggcccggaggcacatcctggccatcctgcaggactgcccgtccctgcggccccccatcgaccacctgtgtgagctgctgccgcgcctgcaggcccgctactactccatcgcctcatcctccaaggtccaccccaactctgtgcacatctgtgcggtggttgtggagtacgagaccaaggctggccgcatcaacaagggcgtggccaccaactggctgcgggccaaggagcctgccggggagaacggcggccgtgcgctggtgcccatgttcgtgcgcaagtcccagttccgcctgcccttcaaggccaccacgcctgtcatcatggtgggccccggcaccggggtggcacccttcataggcttcatccaggagcgggcctggctgcgacagcagggcaaggaggtgggggagacgctgctgtactacggctgccgccgctcggatgaggactacctgtaccgggaggagctggcgcagttccacagggacggtgcgctcacccagctcaacgtggccttctcccgggagcagtcccacaaggtctacgtccagcacctgctaaagcaagaccgagagcacctgtggaagttgatcgaaggcggtgcccacatctacgtctgtggcaccccctcttcctgcccagggatgcacggaacatggccagggatgtgcagaacaccttctacgacatcgtggctgagctcggggccatggagcacgcgcaggcggtggactacatcaagaaactgatgaccaagggccgctactccctggacgtgtggagctaggggcctgcctgccccacccaccccacagactccggcctgtaatcagctctcctggctccctcccgtagtctcctgggtgtgtttggcttggccttggcatgggcgcaggcccagtgac

SEQ ID NO: 163291 - DNA, 498 bp, Homo sapiens
  Payload ID: 12173
  Gene Symbol: POR
  Gene Name: P450 (cytochrome) oxidoreductase
  Uniprot ID: P16435
  ENST ID: ENST00000453773
  CDS Start-End: 78-498
agaccgccctcagcacaggacctgccctggctggtcagccctgcctggggcacccacagccccagctgtccagtttcatgatcaacatgggagactcccacgtggacaccagctccaccgtgtccgaggcggtggccgaagaagtatctcttttcagcatgacggacatgattctgttttcgctcatcgtgggtctcctaacctactggttcctcttcagaaagaaaaaagaagaagtccccgagttcaccaaaattcagacattgacctcctctgtcagagagagcagctttgtggaaaagatgaagaaaacggggaggaacatcatcgtgttctacggctcccagacggggactgcagaggagtttgccaaccgcctgtccaaggacgcccaccgctacgggatgcgaggcatgtcagcggaccctgaggagtatgacctggccgacctgagcagcctgccagagatcgacaacgccctggtggttttctgcatgg

SEQ ID NO: 163292 - DNA, 548 bp, Homo sapiens
  Payload ID: 12173
  Gene Symbol: POR
  Gene Name: P450 (cytochrome) oxidoreductase
  Uniprot ID: P16435
  ENST ID: ENST00000414186
  CDS Start-End: 33-548
gagtgctatctttcgcggcgacggcgggtttcatgatcaacatgggagactcccacgtggacaccagctccaccgtgtccgaggcggtggccgaagaagtatctcttttcagcatgacggacatgattctgttttcgctcatcgtgggtctcctaacctactggttcctcttcagaaagaaaaaagaagaagtccccgagttcaccaaaattcagacattgacctcctctgtcagagagagcagctttgtggaaaagatgaagaaaacggggaggaacatcatcgtgttctacggctcccagacggggactgcagaggagtttgccaaccgcctgtccaaggacgcccaccgctacgggatgcgaggcatgtcagcggaccctgaggagtatgacctggccgacctgagcagcctgccagagatcgacaacgccctggtggttttctgcatggccacctacggtgagggagaccccaccgacaatgcccaggacttctacgactggctgcaggagacagacgtggatctctctggggtcaagttcgcg

SEQ ID NO: 163293 - DNA, 1104 bp, Homo sapiens
  Payload ID: 12173
  Gene Symbol: POR
  Gene Name: P450 (cytochrome) oxidoreductase
  ENST ID: ENST00000448410
  CDS Start-End: 36-341
gtgcccgcagagagcagccgggctgccagcgtttcatgatcaacatgggagactcccacgtggacaccagctccaccgtgtccgaggcggtggccgaagaagtatctcttttcagcatgacggacatgattctgttttcgctcatcgtgggtctcctaacctactggttcctcttcagaaagaaaaaagaagaagtccccgagttcaccaaaattcagacattgacctcctctgtcagagagagcagctttgtggaaaagatgaagaaaacggtgagtttcctgcatgtctttactcttctcaggaagcctcggccccgatgggcatgtaatcaagtctagcagacggctggcgtcaccgcatagaggatgtcccggtggccaggagagggaacgcagcccggctcgcttgggagtcattcttgcctaaccaaagccctgaagcagctctgctgttgctgggacagtttgtttccttgaatctttactttttgaacaaaccaaagtctaagaacagaccctccctctaactcacgaagcttctcccgtctggccctggcctgtccaggagcagaggggaggaacatcatcgtgttctacggctcccagacggggactgcagaggagtttgccaaccgcctgtccaaggacgcccaccgctacgggatgcgaggcatgtcagcggaccctgaggagtatgacctggccgacctgagcagcctgccagagatcgacaacgccctggtggttttctgcatggccacctacggtgagggagaccccaccgacaatgcccaggacttctacgactggctgcaggagacagacgtggatctctctggggtcaagttcgcggtgagtcacccagagactgctatgggctcccggtggcctgcggtgcctccctggggactccagatccatgtatctgaaaggcagccctccagacccccaccctgtcctcagcagccagggcaggccacttgtgagaccctctcctctgccccagaccccagcactacgagaatgtcccctccctgtccccagccccagtcggctccagggggcattgggtgctggagactaaaggcaagaaaggtctggc

SEQ ID NO: 163294 - DNA, 283 bp, Homo sapiens
  Payload ID: 12173
  Gene Symbol: POR
  Gene Name: P450 (cytochrome) oxidoreductase
  Uniprot ID: P16435
  ENST ID: ENST00000449920
  CDS Start-End: 96-283
gacttcctgggccctgaagctccaaggacaaaagactcctgtcccttttcccttcctctccattctgggtctcccaccaccaccaagtccttttcatgatcaacatgggagactcccacgtggacaccagctccaccgtgtccgaggcggtggccgaagaagtatctcttttcagcatgacggacatgattctgttttcgctcatcgtgggtctcctaacctactggttcctcttcagaaagaaaaaagaagaagtccccgagttcaccaaaattcagacatt

SEQ ID NO: 163295 - DNA, 565 bp, Homo sapiens
  Payload ID: 12173
  Gene Symbol: POR
  Gene Name: P450 (cytochrome) oxidoreductase
  ENST ID: ENST00000426184
  CDS Start-End: 240-565
agatgttgcagagttcttgggctcatgggggcagacgcaggcaggagctcagggaaattccgagaggactttggggtgtccaggagcactttgaggccacgggcccaggcaacttcctcaccagtacggaacaggggatgcacagggccgaactttccatctgctggcccctgctggtgtccaggagagagctgtgaccctcctttttccttaagtcctggagctgagagtgagaagccatggggtgcacgtactcgtctccacctgaggagcccgctctgagaaggacctcctctgtcagagagagcagctttgtggaaaagatgaagaaaacggggaggaacatcatcgtgttctacggctcccagacggggactgcagaggagtttgccaaccgcctgtccaaggacgcccaccgctacgggatgcgaggcatgtcagcggaccctgaggagtatgacctggccgacctgagcagcctgccagagatcgacaacgccctggtggttttctgcatggccacctacggtgagggagaccccaccgacaatgcccaggacttcta

SEQ ID NO: 163296 - DNA, 569 bp, Homo sapiens
  Payload ID: 12173
  Gene Symbol: POR
  Gene Name: P450 (cytochrome) oxidoreductase
  ENST ID: ENST00000439297
  CDS Start-End: 407-569
atgttgcagagttcttgggctcatgggggcagacgcaggcaggagctcagggaaattccgagaggactttggggtgtccaggagcactttgaggccacgggcccaggcaacttcctcaccagtacggaacaggggatgcacagggccgaactttccatctgctggcccctgctggtgtccaggagagagctgtgaccctcctttttccttaagtcctggagctgagagtgagaagccatggggtgcacgtactcgtctccacctgaggagcccgctctgagaaggtcagttcctgacactgtccctggcggcagactgccctcatgccccttggccaggggacgcctgcaccctcactcgagtgtgggagacttcctcctggcggggacctgctggaggcctgaagatgcggctgcctggagttaacagcaaggacctcctctgtcagagagagcagctttgtggaaaagatgaagaaaacggggaggaacatcatcgtgttctacggctcccagacggggactgcagaggagtttgccaaccgcctgtccaaggacgcccaccgctac

SEQ ID NO: 163297 - DNA, 1044 bp, Homo sapiens
  Payload ID: 12173
  Gene Symbol: POR
  Gene Name: P450 (cytochrome) oxidoreductase
  Uniprot ID: P16435
  ENST ID: ENST00000412064
  CDS Start-End: 5-640
tttcatgatcaacatgggagactcccacgtggacaccagctccaccgtgtccgaggcggtggccgaagaagtatctcttttcagcatgacggacatgattctgttttcgctcatcgtgggtctcctaacctactggttcctcttcagaaagaaaaaagaagaagtccccgagttcaccaaaattcagacattgacctcctctgtcagagagagcagctttgtggaaaagatgaagaaaacggggaggaacatcatcgtgttctacggctcccagacggggactgcagaggagtttgccaaccgcctgtccaaggacgcccaccgctacgggatgcgaggcatgtcagcggaccctgaggagtatgacctggccgacctgagcagcctgccagagatcgacaacgccctggtggttttctgcatggccacctacggtgagggagaccccaccgacaatgcccaggacttctacgactggctgcaggagacagacgtggatctctctggggtcaagttcgcggtgtttggtcttgggaacaagacctacgagcacttcaatgccatgggcaaatgcggccaaggtgtacatgggggagatgggccggctgaagagctacgagaaccagaagcccccctttgatgccaagaatccgttcctggctgcagtcaccaccaaccggaagctgaaccagggaaccgagcgccacctcatgcacctggaattggacatctcggactccaaaatcagtcccacaaggtctacgtccagcacctgctaaagcaagaccgagagcacctgtggaagttgatcgaaggcggtgcccacatctacgtctgtggggatgcacggaacatggccagggatgtgcagaacaccttctacgacatcgtggctgagctcggggccatggagcacgcgcaggcggtggactacatcaagaaactgatgaccaagggccgctactccctggacgtgtggagctaggggcctgcctgccccacccaccccacagactccggcctgtaatcagctctcctggctcc

SEQ ID NO: 163298 - DNA, 586 bp, Homo sapiens
  Payload ID: 12173
  Gene Symbol: POR
  Gene Name: P450 (cytochrome) oxidoreductase
  Uniprot ID: P16435
  ENST ID: ENST00000412521
  CDS Start-End: 148-586
ccagcggtgagtgctatctttcgcggcgacggcgggcatcaggtgggctgagtcgatggatcacgggagccccccagcccggcctgcatccctgagggcagtgcccctcgcagtcaggtgtctcggcggcccccacaacacagtttcatgatcaacatgggagactcccacgtggacaccagctccaccgtgtccgaggcggtggccgaagaagtatctcttttcagcatgacggacatgattctgttttcgctcatcgtgggtctcctaacctactggttcctcttcagaaagaaaaaagaagaagtccccgagttcaccaaaattcagacattgacctcctctgtcagagagagcagctttgtggaaaagatgaagaaaacggggaggaacatcatcgtgttctacggctcccagacggggactgcagaggagtttgccaaccgcctgtccaaggacgcccaccgctacgggatgcgaggcatgtcagcggaccctgaggagtatgacctggccgacctgagcagcctgccagagatcgacaacgccctggtggttttctgcatggccacctacggtgagggag

SEQ ID NO: 163299 - DNA, 631 bp, Homo sapiens
  Payload ID: 12173
  Gene Symbol: POR
  Gene Name: P450 (cytochrome) oxidoreductase
  ENST ID: ENST00000421059
  CDS Start-End: 515-631
agagagcagccgggctgccagcggtgagtgctatctttcgcggcgacggcggggtgggtgaggtcgggccccaagactcggggtttgccgggcgcctcagttcaccgcggccgcctggctctctgcgtcggggtgggccctcgggcctgggcactgcgcgtctggcccgacgctcgggcggaaggcatggctcccaccccggccctcctccgcgtcgcccttcccctagagctgatctcccgcggcggcctgagggtcgacttttccacagcttgggccgagagagcccggcaggccctcggctgagggttagggctcggtatctcagggctcggggtccagtccccgcgccgccgccccccacgggctaagccactttaactctccgagcctcagtttccccatctgtacgatgaatgggcctcgggaggcagcgaattctgggggtacctaacgtgagaggcgctcgatgcatgctcatgggacccgaatctaaccctgcagcatcagtttcatgatcaacatgggagactcccacgtggacaccagctccaccgtgtccgaggcggtggccgaagaagtatctcttttcagcatgacggacatgattctgttttcgctcatcgtgggt

SEQ ID NO: 163300 - DNA, 1858 bp, Homo sapiens
  Payload ID: 12173
  Gene Symbol: POR
  Gene Name: P450 (cytochrome) oxidoreductase
  ENST ID: ENST00000439269
  CDS Start-End: 251-1507
ataacgttcctctctgtgcccttgatggcccctgggtgctgcccgggcttccttaccttctcccagatggaagcctgcccagccctgccccggcttctgggcgtctggcccccggcagctccacgccgcctccctccttgctccctcgcctgccctccttgtgcatctgcagcaggggctcccctgcttcttgtccattcgccagtacgagcttgtggtccacaccgacatagatgcggccaaggtgtacatgggggagatgggccggctgaagagctacgagaaccagaagcccccctttgatgccaagaatccgttcctggctgcagtcaccaccaaccggaagctgaaccagggaaccgagcgccacctcatgcacctggaattggacatctcggactccaaaatcaggtatgaatctggggaccacgtggctgtgtacccagccaacgactctgctctcgtcaaccagctgggcaaaatcctgggtgccgacctggacgtcgtcatgtccctgaacaacctggatgaggagtccaacaagaagcacccattcccgtgccctacgtcctaccgcacggccctcacctactacctggacatcaccaacccgccgcgtaccaacgtgctgtacgagctggcgcagtacgcctcggagccctcggagcaggagctgctgcgcaagatggcctcctcctccggcgagggcaaggagctgtacctgagctgggtggtggaggcccggaggcacatcctggccatcctgcaggactgcccgtccctgcggccccccatcgaccacctgtgtgagctgctgccgcgcctgcaggcccgctactactccatcgcctcatcctccaaggtccaccccaactctgtgcacatctgtgcggtggttgtggagtacgagaccaaggctggccgcatcaacaagggcgtggccaccaactggctgcgggccaaggagcctgccggggagaacggcggccgtgcgctggtgcccatgttcgtgcgcaagtcccagttccgcctgcccttcaaggccaccacgcctgtcatcatggtgggccccggcaccggggtggcacccttcataggcttcatccaggagcgggcctggctgcgacagcagggcaaggaggtgggggagacgctgctgtactacggctgccgccgctcggatgaggactacctgtaccgggaggagctggcgcagttccacagggacggtgcgctcacccagctcaacgtggccttctcccgggagcagtcccacaaggtctacgtccagcacctgctaaagcaagaccgagagcacctgtggaagttgatcgaaggcggtgcccacatctacgtctgtggggatgcacggaacatggccagggatgtgcagaacaccttctacgacatcgtggctgagctcggggccatggagcacgcgcaggcggtggactacatcaagaaactgatgaccaagggccgctactccctggacgtgtggagctaggggcctgcctgccccacccaccccacagactccggcctgtaatcagctctcctggctccctcccgtagtctcctgggtgtgtttggcttggccttggcatgggcgcaggcccagtgacaaagactcctctgggcctggggtgcatcctcctcagcccccaggccaggtgaggtccaccggcccctggcagcacagcccagggcctgcatgggggcaccgggctccatgcctctggaggcctctggccctcggtggctgcacagaagggctctttctctctgctgagctgggcccagcccctccacgtgatttccagtgagtgtaaataattttaaataacctctggccctt

SEQ ID NO: 163301 - DNA, 2295 bp, Homo sapiens
  Payload ID: 12173
  Gene Symbol: POR
  Gene Name: P450 (cytochrome) oxidoreductase
  Uniprot ID: P16435
  ENST ID: ENST00000454934
  CDS Start-End: 5-574
tttcatgatcaacatgggagactcccacgtggacaccagctccaccgtgtccgaggcggtggccgaagaagtatctcttttcagcatgacggacatgattctgttttcgctcatcgtgggtctcctaacctactggttcctcttcagaaagaaaaaagaagaagtccccgagttcaccaaaattcagacattgacctcctctgtcagagagagcagctttgtggaaaagatgaagaaaacggggaggaacatcatcgtgttctacggctcccagacggggactgcagaggagtttgccaaccgcctgtccaaggacgcccaccgctacgggatgcgaggcatgtcagcggaccctgaggagtatgacctggccgacctgagcagcctgccagagatcgacaacgccctggtggttttctgcatggccacctacggtgagggagaccccaccgacaatgcccaggacttctacgactggctgcaggagacagacgtggatctctctggggtcaagttcgcgcttggaggaggacttcatcacctggcgagagcagttctggccggccgtgtgtgaacactttggggtggaagccactggcgaggagtccagcattcgccagtacgagcttgtggtccacaccgacatagatgcggccaaggtgtacatgggggagatgggccggctgaagagctacgagaaccagaagcccccctttgatgccaagaatccgttcctggctgcagtcaccaccaaccggaagctgaaccagggaaccgagcgccacctcatgcacctggaattggacatctcggactccaaaatcaggtatgaatctggggaccacgtggctgtgtacccagccaacgactctgctctcgtcaaccagctgggcaaaatcctgggtgccgacctggacgtcgtcatgtccctgaacaacctggatgaggagtccaacaagaagcacccattcccgtgccctacgtcctaccgcacggccctcacctactacctggacatcaccaacccgccgcgtaccaacgtgctgtacgagctggcgcagtacgcctcggagccctcggagcaggagctgctgcgcaagatggcctcctcctccggcgagggcaaggagctgtacctgagctgggtggtggaggcccggaggcacatcctggccatcctgcaggactgcccgtccctgcggccccccatcgaccacctgtgtgagctgctgccgcgcctgcaggcccgctactactccatcgcctcatcctccaaggtccaccccaactctgtgcacatctgtgcggtggttgtggagtacgagaccaaggctggccgcatcaacaagggcgtggccaccaactggctgcgggccaaggagcctgccggggagaacggcggccgtgcgctggtgcccatgttcgtgcgcaagtcccagttccgcctgcccttcaaggccaccacgcctgtcatcatggtgggccccggcaccggggtggcacccttcataggcttcatccaggagcgggcctggctgcgacagcagggcaaggaggtgggggagacgctgctgtactacggctgccgccgctcggatgaggactacctgtaccgggaggagctggcgcagttccacagggacggtgcgctcacccagctcaacgtggccttctcccgggagcagtcccacaaggtctacgtccagcacctgctaaagcaagaccgagagcacctgtggaagttgatcgaaggcggtgcccacatctacgtctgtggggatgcacggaacatggccagggatgtgcagaacaccttctacgacatcgtggctgagctcggggccatggagcacgcgcaggcggtggactacatcaagaaactgatgaccaagggccgctactccctggacgtgtggagctaggggcctgcctgccccacccaccccacagactccggcctgtaatcagctctcctggctccctcccgtagtctcctgggtgtgtttggcttggccttggcatgggcgcaggcccagtgacaaagactcctctgggcctggggtgcatcctcctcagcccccaggccaggtgaggtccaccggcccctggcagcacagcccagggcctgcatgggggcaccgggctccatgcctctggaggcctctggccctcggtggctgcacagaagggctctttctctctgctgagctgggcccagcccctccacgtgatttccagtgagtgtaaataattttaaataacctctggcccttggaataaagttctgttttctgt

SEQ ID NO: 163302 - DNA, 2522 bp, Homo sapiens
  Payload ID: 12173
  Gene Symbol: POR
  Gene Name: P450 (cytochrome) oxidoreductase
  Uniprot ID: P16435
  ENST ID: ENST00000461988
  CDS Start-End: 106-2148
acgcccccacccccgcggccggcgaaggcggtggtagcgcctcagtggtgtgggcctgagccctgcccaggtgcccgcagagagcagccgggctgccagcgtttcatgatcaacatgggagactcccacgtggacaccagctccaccgtgtccgaggcggtggccgaagaagtatctcttttcagcatgacggacatgattctgttttcgctcatcgtgggtctcctaacctactggttcctcttcagaaagaaaaaagaagaagtccccgagttcaccaaaattcagacattgacctcctctgtcagagagagcagctttgtggaaaagatgaagaaaacggggaggaacatcatcgtgttctacggctcccagacggggactgcagaggagtttgccaaccgcctgtccaaggacgcccaccgctacgggatgcgaggcatgtcagcggaccctgaggagtatgacctggccgacctgagcagcctgccagagatcgacaacgccctggtggttttctgcatggccacctacggtgagggagaccccaccgacaatgcccaggacttctacgactggctgcaggagacagacgtggatctctctggggtcaagttcgcggtgtttggtcttgggaacaagacctacgagcacttcaatgccatgggcaagtacgtggacaagcggctggagcagctcggcgcccagcgcatctttgagctggggttgggcgacgacgatgggaacttggaggaggacttcatcacctggcgagagcagttctggccggccgtgtgtgaacactttggggtggaagccactggcgaggagtccagcattcgccagtacgagcttgtggtccacaccgacatagatgcggccaaggtgtacatgggggagatgggccggctgaagagctacgagaaccagaagcccccctttgatgccaagaatccgttcctggctgcagtcaccaccaaccggaagctgaaccagggaaccgagcgccacctcatgcacctggaattggacatctcggactccaaaatcaggtatgaatctggggaccacgtggctgtgtacccagccaacgactctgctctcgtcaaccagctgggcaaaatcctgggtgccgacctggacgtcgtcatgtccctgaacaacctggatgaggagtccaacaagaagcacccattcccgtgccctacgtcctaccgcacggccctcacctactacctggacatcaccaacccgccgcgtaccaacgtgctgtacgagctggcgcagtacgcctcggagccctcggagcaggagctgctgcgcaagatggcctcctcctccggcgagggcaaggagctgtacctgagctgggtggtggaggcccggaggcacatcctggccatcctgcaggactgcccgtccctgcggccccccatcgaccacctgtgtgagctgctgccgcgcctgcaggcccgctactactccatcgcctcatcctccaaggtccaccccaactctgtgcacatctgtgcggtggttgtggagtacgagaccaaggctggccgcatcaacaagggcgtggccaccaactggctgcgggccaaggagcctgccggggagaacggcggccgtgcgctggtgcccatgttcgtgcgcaagtcccagttccgcctgcccttcaaggccaccacgcctgtcatcatggtgggccccggcaccggggtggcacccttcataggcttcatccaggagcgggcctggctgcgacagcagggcaaggaggtgggggagacgctgctgtactacggctgccgccgctcggatgaggactacctgtaccgggaggagctggcgcagttccacagggacggtgcgctcacccagctcaacgtggccttctcccgggagcagtcccacaaggtctacgtccagcacctgctaaagcaagaccgagagcacctgtggaagttgatcgaaggcggtgcccacatctacgtctgtggggatgcacggaacatggccagggatgtgcagaacaccttctacgacatcgtggctgagctcggggccatggagcacgcgcaggcggtggactacatcaagaaactgatgaccaagggccgctactccctggacgtgtggagctaggggcctgcctgccccacccaccccacagactccggcctgtaatcagctctcctggctccctcccgtagtctcctgggtgtgtttggcttggccttggcatgggcgcaggcccagtgacaaagactcctctgggcctggggtgcatcctcctcagcccccaggccaggtgaggtccaccggcccctggcagcacagcccagggcctgcatgggggcaccgggctccatgcctctggaggcctctggccctcggtggctgcacagaagggctctttctctctgctgagctgggcccagcccctccacgtgatttccagtgagtgtaaataattttaaataacctctggcccttggaataaagttctgttttctgta

SEQ ID NO: 163303 - DNA, 1998 bp, Homo sapiens
  Payload ID: 12174
  Gene Symbol: PDRG1
  Gene Name: p53 and DNA-damage regulated 1
  Uniprot ID: Q9NUG6
  ENST ID: ENST00000202017
  CDS Start-End: 132-533
agcctgcgcaccaccgttcttttaactgcgcaggcgcgccggaagcacctagagagcggcgcgtgcgcagcgggagtcgaagcggagatcccggggtcgcgcgagagccgcaagcggagttggtgggcgctatgctatcacccgaggcagagcgagtgctgcggtaccttgtagaagtggaggagctcgccgaggaggtgctggcggacaagcggcagattgtggacctggacactaaaaggaatcagaatcgagagggcctgagggccctgcagaaggatctcagcctctctgaagatgtgatggtttgcttcgggaacatgtttatcaagatgcctcaccctgagacaaaggaaatgattgaaaaagatcaagatcatctggataaagaaatagaaaaactgcggaagcaacttaaagtgaaggtcaaccgcctttttgaggcccaaggcaaaccggagctgaagggttttaacttgaaccccctcaaccaggatgagcttaaagctctcaaggtcatcttgaaaggatgagactcaagaaccaagatgggggaccagcaaccccccagggtcatggaggacccaggaccctccaaccttgacacctgtaaggacaggatctgccctgtaaggggccagccgtcaggaatctggccatgaaaacctctttgtagtgcttggctactctgtgatggcaggagggaaccttcagcctgtctggctgctggacctggacaccagggctcggtggacacaagatctattgacgggccttggtagccaccagtgggtgtgtggggcagtggctgtgggggtgtaagaatgactgcaacaggcacttcccaacaatggcctgctgttcacatggaccctgagcaaggaaggagggagggaggggcagagtggagtgtcattccagcattcctctcagaagggagagaggttttcaggctggtgccatgcgattggaataaagcaggaggctcatgggtggttgctgaatgaagaacagaatcttggtgctttgtggctcaccacagccatctgtggggcaggcacacacacctcccgccagctccaattttgcactttttccctgcttgattccaagagtaggtgctgcctagcagcccttcgtggccactctttactcaggagggccttgcagagtcctgcaccaggcctgggtgagtggatgcgcctcttaccatatgacacgtgtcaagatgcccttccgccccctctgaaagtggggcccggccagcactgctcgttactgtctgccttcagtggtctgaggtcccagtatgaactgccgtgaagtcaaaactcttatgtgttcattaagggctcaataaatgttagctgaatgaatgaatagcagcaactagtctttatttgcctcatctagtccttcagtaagggcacgccactccatttagaatacaacctatgaacatggttcttgccttgaaataaacctgtgatttgacaggcgggtgataacaaatggcagcatggcaggggcacacctctcctggtccccccgctccttggctctggctcatagttacatagaaacacaggctgtcatggccagttcttacgtgttttcaagagaagctagacatatgggttgtgaagttgaatctccttttaaatatttttgactaatgcagaaacttttaaaacatgagtgtgggtcacaggtgttagctccagatagtgcaataccatacaactataatcaagaataaggaacaagctccaagatacatcaagtgaggaaagcaaggggaaggctggtgtcttataagctaataatttttgtgcaagcacagtgtgattccctcagaacagcacctgcagggttggggcgcacaggtgggagggaaggagatgtcaccctatacccttttgtaaactttggattttaaaccgtatgaatatattgcttattttaaaatgtaaataaagtagggagttgcagaattca

SEQ ID NO: 163304 - DNA, 2998 bp, Homo sapiens
  Payload ID: 12175
  Gene Symbol: PIDD1
  Gene Name: p53-induced death domain protein 1
  Uniprot ID: Q9HB75
  ENST ID: ENST00000347755
  CDS Start-End: 143-2875
gccggcgggatcccaggcgccgagcgcccgctgagcagccaccctttgcgcgccgcctgcagcgcagcttccccgggcgctgcctggacaggcctgcctgcgtgctgggacatgtctggcctccaaggaccgtcggtgggcgatggctgcaacggtggaggggccagagctggaggcagctgctgccgcaggagatgcttcagaggattcggacgcagggtccagggcgctgcctttcctgggcggcaaccggctgagcttggacctgtaccccgggggctgccagcagctgctgcacctgtgtgtccagcagcctctgcagctgctgcaggtggaattcttgcgtctgagcactcacgaggaccctcagctgctggaggccaccctggcccagctgcctcagagcctgtcctgcctccgctccctggtcctcaaaggagggcaacgccgggacacactgggtgcctgtctccggggtgccctgaccaacctgcccgctggtctgagtggcctggcccatctggcccacctggacctgagcttcaacagcctggagacactgccggcctgtgtcctgcagatgcgaggtctgggtgcgctcttgctgtctcacaactgcctctctgagctgcctgaggctctgggggccctccccgccctcaccttcctcacagtgacacacaaccgcctgcagacgctgcccccagcactgggggccctatccaccctgcagcgcctcgatctctctcagaatctgctggacacgctacctcctgagattggaggcctgggcagcctcctggagctcaacctggcctccaaccggctgcagagcctcccagcctctctggcgggacttcggtccttgcggctccttgtcctgcacagcaacctcctggcctctgtgccagctgacttggcccgccttccactcctcacccggctcgacctgagggacaaccagctccgggacctgccccctgagctgctagacgccccctttgtgcgcctgcaggggaaccccctgggtgaggcctcgccagacgccccgagttcaccagtggcagccctcattccagaaatgcccagactgttcctgacctcagatttggacagctttcctgtgacccctcaaggctgctcagtgaccctggcctgtggcgtccgcctgcagttcccagcgggagccaccgccacccccatcaccatccgctatcggctgctgctgccggagccaggcctcgtccccctgggtcctcatgacgccctgctcagccatgtgctggagctgcagccccatggggtggccttccagcaggatgtggggctgtggctgctcttcaccccaccgcaggcccggcgctgccgtgaagtggtggtcaggacccggaatgacaacagctggggtgacctggagacctacctggaggaagaggcaccccagcggctctgggctcactgccaggtgccccacttctcctggttccttgtggtttcccgccctgtgtccaatgcctgcctggtgccaccggaggggacactgctgtgctcctcgggtcatcctggggtcaaagtcatcttcccccctggggccactgaggagcctcgtcgagtctccatgcaggtggtgcgcatggctggccgagagctgcaggccctcctgggagaaccagaggctgcagtgagccccctgctgtgcctgtcacagagcggtccccccagcttcctccaaccggtcaccgtgcagctgcctctgccctctggcatcacaggcctcagtctggaccgctcccgcctgcacctgttgtactgggcccctcctgcagccacctgggatgacatcacagctcaggtggtcctggagctcacccacctgtacgcacgcttccaggtcacacacttctcctggtactggctctggtacaccaccaagaactgtgtgggaggcctggctcggaaggcctgggagcggctgcggctgcaccgtgtgaacctcatcgctctgcagcggcgccgggaccctgagcaggtcctgctgcagtgcctgccccgaaacaaggtggacgccacccttcggcggctgctggagcggtaccggggccccgagccctctgacacggtggagatgttcgagggcgaagagttctttgcggccttcgagcgcggcatcgacgtggatgctgaccgccctgactgtgtggagggcagaatctgctttgtcttctactcgcacctgaagaatgtgaaggaggtatacgtgaccaccactctggaccgggaggctcaggctgtgcggggccaggtgtccttctaccgtggcgcggtgcctgtgcgggtgcccgaggaggctgaggctgcccggcagaggaagggcgcagacgccctgtggatggccactctgcccatcaagctgccgagacttcgagggtccgaggggccacggcggggggctggcctctccttggcacccttgaatctgggagatgccgagaccggctttctgacgcagagcaacctgctgagtgtggctgggcgtctgggtctggactggccagccgtggccctgcacctgggggtgtcctaccgggaggtgcagcgcatccggcacgagttccgggatgatctggatgagcagatccgtcacatgctcttctcctgggctgagcgccaggctgggcagccaggggctgtggggctcctggtgcaggccctggagcagagtgaccggcaggacgtggctgaagaggtgcgcgcagtcttggagctcggccgccgcaagtaccaggacagcatccgacgcatgggcttggcccccaaggaccccgctctgcctggctcctcggctccacagcccccagagcctgcccaggcctaggccccacagacttttaggctggcccagatattccccagtggatgggcagagcccccaccttcaagtctctccagtgtgtggggacgggtccctgtgagcaacaaaactgcactgtttctttca

SEQ ID NO: 163305 - DNA, 2886 bp, Homo sapiens
  Payload ID: 12175
  Gene Symbol: PIDD1
  Gene Name: p53-induced death domain protein 1
  Uniprot ID: Q9HB75
  ENST ID: ENST00000411829
  CDS Start-End: 82-2763
ctgcagcttccccgggcgctgcctggacaggcctgcctgcgtgctgggacatgtctggcctccaaggaccgtcggtgggcgatggctgcaacggtggaggggccagagctggaggcagctgctgccgcaggagatgcttcagaggattcggacgcagggtccagggcgctgcctttcctgggcggcaaccggctgagcttggacctgtaccccgggggctgccagcagctgctgcacctgtgtgtccagcagcctctgcagctgctgcaggtggaattcttgcgtctgagcactcacgaggaccctcagctgctggaggccaccctggcccagctgcctcagagcctgtcctgcctccgctccctggtcctcaaaggagggcaacgccgggacacactgggtgcctgtctccggggtgccctgaccaacctgcccgctggtctgagtggcctggcccatctggcccacctggacctgagcttcaacagcctggagacactgccggcctgtgtcctgcagatgcgaggtctgggtgcgctcttgctgtctcacaactgcctctctgagctgcctgaggctctgggggccctccccgccctcaccttcctcacagtgacacacaaccgcctgcagacgctgcccccagcactgggggccctatccaccctgcagcgcctcgatctctctcagaatctgctggacacgctacctcctgagattggaggcctgggcagcctcctggagctcaacctggcctccaaccggctgcagagcctcccagcctctctggcgggacttcggtccttgcggctccttgtcctgcacagcaacctcctggcctctgtgccagctgacttggcccgccttccactcctcacccggctcgacctgagggacaaccagctccgggacctgccccctgagctgctagacgccccctttgtgcgcctgcaggggaaccccctgggtgaggcctcgccagacgccccgagttcaccagtggcagccctcattccagaaatgcccagactgttcctgacctcagatttggacagctttcctgtgacccctcaaggctgctcagtgaccctggcctgtggcgtccgcctgcagttcccagcgggagccaccgccacccccatcaccatccgctatcggctgctgctgccggagccaggcctcgtccccctgggtcctcatgacgccctgctcagccatgtgctggagctgcagccccatggggtggccttccagcaggatgtggggctgtggctgctcttcaccccaccgcaggcccggcgctgccgtgaagtggtggtcaggacccggaatgacaacagctggggtgacctggagacctacctggaggaagaggcaccccagcggctctgggctcactgccaggtgccccacttctcctggttccttgtggtttcccgccctgtgtccaatgcctgcctggtgccaccggaggggacactgctgtgctcctcgggtcatcctggggtcaaagtcatcttcccccctggggccactgaggagcctcgtcgagtctccatgcaggtggtgcgcatggctggccgagagctgcaggccctcctgggagaaccagaggctgcagtgagccccctgctgtgcctgtcacagagcggtccccccagcttcctccaaccggtcaccgtgcagctgcctctgccctctggcatcacaggcctcagtctggaccgctcccgcctgcacctgttgtactgggcccctcctgcagccacctgggatgacatcacagctcaggtggtcctggagctcacccacctgtacgcacgcttccaggtcacacacttctcctggtactggctctggtacaccaccaagaactgtgtgggaggcctggctcggaaggcctgggagcggctgcggctgcaccgtgtgaacctcatcgctctgcagcggcgccgggaccctgagcaggtcctgctgcagtgcctgccccgaaacaaggtggacgccacccttcggcggctgctggagcggtaccggggccccgagccctctgacacggtggagatgttcgagggcgaagagttctttgcggccttcgagcgcggcatcgacgtggatgctgaccgccctgactgtgtggagggcagaatctgctttgtcttctactcgcacctgaagaatgtgaaggaggtgtccttctaccgtggcgcggtgcctgtgcgggtgcccgaggaggctgaggctgcccggcagaggaagggcgcagacgccctgtggatggccactctgcccatcaagctgccgagacttcgagggtccgaggggccacggcggggggctggcctctccttggcacccttgaatctgggagatgccgagaccggctttctgacgcagagcaacctgctgagtgtggctgggcgtctgggtctggactggccagccgtggccctgcacctgggggtgtcctaccgggaggtgcagcgcatccggcacgagttccgggatgatctggatgagcagatccgtcacatgctcttctcctgggctgagcgccaggctgggcagccaggggctgtggggctcctggtgcaggccctggagcagagtgaccggcaggacgtggctgaagaggtgcgcgcagtcttggagctcggccgccgcaagtaccaggacagcatccgacgcatgggcttggcccccaaggaccccgctctgcctggctcctcggctccacagcccccagagcctgcccaggcctaggccccacagacttttaggctggcccagatattccccagtggatgggcagagcccccaccttcaagtctctccagtgtgtggggacgggtccctgtgagcaacaaaactgcactgtttctttca

SEQ ID NO: 163306 - DNA, 1937 bp, Homo sapiens
  Payload ID: 12175
  Gene Symbol: PIDD1
  Gene Name: p53-induced death domain protein 1
  ENST ID: ENST00000531286
  CDS Start-End: 1-1016
acgccccctttgtgcgcctgcaggggaaccccctgggtgaggcctcgccagacgccccgagttcaccagtggcagccctcattccagaaatgcccagactgttcctgacctcagatttggacagctttcctgtgacccctcaaggctgctcagtgaccctggcctgtggcgtccgcctgcagttcccagcgggagccaccgccacccccatcaccatccgctatcggctgctgctgccggagccaggcctcgtccccctgggtcctcatgacgccctgctcagccatgtgctggagctgcagccccatggggtggccttccagcaggatgtggggctgtggctgctcttcaccccaccgcaggcccggcgctgccgtgaagtggtggtcaggacccggaatgacaacagctggggtgacctggagacctacctggaggaagaggcaccccagcggctctgggctcactgccaggtgccccacttctcctggttccttgtggtttcccgccctgtgtccaatgcctgcctggtgccaccggaggggacactgctgtgctcctcgggtcatcctggggtcaaagtcatcttcccccctggggccactgaggagcctcgtcgagtctccatgcaggtggtgcgcatggctggccgagagctgcaggccctcctgggagaaccagaggctgcagtgagccccctgctgtgcctgtcacagagcggtccccccagcttcctccaaccggtcaccgtgcagctgcctctgccctctggcatcacaggcctcagtctggaccgctcccgcctgcacctgttgtactgggcccctcctgcagccacctgggatgacatcacagctcaggtggtcctggagctcacccacctgtacgcacgcttccaggtactggctctggtacaccaccaagaactgtgtgggaggcctggctcggaaggcctgggagcggctgcggctgcaccgtgtgaacctcatcgctctgcagcggcgccgggaccctgagcaggtcctgctgcagtgcctgccccgaaacaaggtggacgccacccttcggcggctgctggagcggtaccggggccccgagccctctgacacggtggagatgttcgagggcgaagagttctttgcggccttcgagcgcggcatcgacgtggatgctgaccgccctgactgtgtggagggcagaatctgctttgtcttctactcgcacctgaagaatgtgaaggaggtgtccttctaccgtggcgcggtgcctgtgcgggtgcccgaggaggctgaggctgcccggcagaggaagggcgcagacgccctgtggatggccactctgcccatcaagctgccgagacttcgagggtccgaggggccacggcggggggctggcctctccttggcacccttgaatctgggagatgccgagaccggctttctgacgcagagcaacctgctgagtgtggctgggcgtctgggtctggactggccagccgtggccctgcacctgggggtgtcctaccgggaggtgcagcgcatccggcacgagttccgggatgatctggatgagcagatccgtcacatgctcttctcctgggctgagcgccaggctgggcagccaggggctgtggggctcctggtgcaggccctggagcagagtgaccggcaggacgtggctgaagaggtgcgcgcagtcttggagctcggccgccgcaagtaccaggacagcatccgacgcatgggcttggcccccaaggaccccgctctgcctggctcctcggctccacagcccccagagcctgcccaggcctaggccccacagacttttaggctggcccagatattccccagtggatgggcagagcccccaccttcaagtctctccagtgtgtggggacgggtccctgtgagcaacaaaactgcactgtttctttc

SEQ ID NO: 163307 - DNA, 3917 bp, Homo sapiens
  Payload ID: 12175
  Gene Symbol: PIDD1
  Gene Name: p53-induced death domain protein 1
  ENST ID: ENST00000524486
  CDS Start-End: 716-1042
ccccgacgcccgggggatcccgagcctgcctcggggctggggcccgccccccacgccgtctgagcggtgcgcggtgcaccaccctccccagtggaccgaactggaaaggccgggagaggtttcctccggggctcacgaattggggtcccggccccaggaccccgaagctgcccaatggctcacgccccaggccctcacccttacacggccttccctgactttcggggcgcagtcacccccgcggtaggggagggtcacggccttcctggtaaaacggatgtaaatagaagggggactcatctccaggactggggaacagcccctatgacctcgcagctccacggctccattggccagatttccaggaccaggactgaagcctcactaccccggctttgctgctcatagcgaggtctccctgcccggtgctcctgcgagccatggcggtcccattccccaaccctctttccagtggtgacccaggcctccggggttcagggtgaccacaaggtctcccccactctgcagcccaggcccagatggcctggctctagagctccccactccatccagagtccctgtttccccaaagagaagggcccaccccggctcccgctcactcctcctcctgcctctgcagcttccccgggcgctgcctggacaggcctgcctgcgtgctgggacatgtctggcctccaaggaccgtcggtgggcgatggctgcaacggtggaggggccagagctggaggcagctgctgccgcaggagatgcttcagaggattcggacgcagggtccagggcgctgcctttcctgggcggcaaccggctgagcttggacctgtaccccgggggctgccagcagctgctgcacctgtgtgtccagcagcctctgcagctgctgcaggtggaattcttgcgtctgagcactcacgaggaccctcagctgctggaggccaccctggcccagctgcctcagagcctgtcctgcctccgctccctggtcctcaaagggtcgatctgggacctcggaccctggctctgagggccacatccgcctccccccttcccaggagggcaacgccgggacacactgggtgcctgtctccggggtgccctgaccaacctgcccgctggtctgagtggcctggcccatctggcccacctggacctgagcttcaacagcctggagacactgccggcctgtgtcctgcagatgcgaggtctgggtgcgctcttgctgtctcacaactgcctctctgagctgcctgaggctctgggggccctccccgccctcaccttcctcacagtgacacacaaccgcctgcagacgctgcccccagcactgggggccctatccaccctgcagcgcctcgatctctctcagaatctgctggacacgctacctcctgagattggaggcctgggcagcctcctggagctcaacctggcctccaaccggctgcagagcctcccagcctctctgggtgagtagcccctgcgccccgacacactggccccacgggagggtccctgaagcctgcctgtcttctgcaggggcctctgcacccacaggcttggtccacagctgcctcttggttgtccctccacctccctggcctttgagactccctcagtggctttgtcagagttctctgagcccagctgtggaggagagtctgaaacagctgctctgggaggcggcagcaggagtgtcccagcgccgtgggctgggctggtgccaagcctaagccagcaactgcccgcagcgggacttcggtccttgcggctccttgtcctgcacagcaacctcctggcctctgtgccagctgacttggcccgccttccactcctcacccggctcgacctgagggacaaccagctccgggacctgccccctgagctgctagacgccccctttgtgcgcctgcaggggaaccccctgggtgaggcctcgccagacgccccgagttcaccagtggcagccctcattccagaaatgcccagactgttcctgacctcagatttggacagctttcctgtgacccctcaaggctgctcagtgaccctggcctgtggcgtccgcctgcagttcccagcgggagccaccgccacccccatcaccatccgctatcggctgctgctgccggagccaggcctcgtccccctgggtcctcatgacgccctgctcagccatgtgctggagctgcagccccatggggtggccttccagcaggatgtggggctgtggctgctcttcaccccaccgcaggcccggcgctgccgtgaagtggtggtcaggacccggaatgacaacagctggggtgacctggagacctacctggaggaagaggcaccccagcggctctgggctcactgccaggtgccccacttctcctggttccttgtggtttcccgccctgtgtccaatgcctgcctggtgccaccggaggggacactgctgtgctcctcgggtcatcctggggtcaaagtcatcttcccccctggggccactgaggagcctcgtcgagtctccatgcaggtggtgcgcatggctggccgagagctgcaggccctcctgggagaaccagaggctgcagtgagccccctgctgtgcctgtcacagagcggtccccccagcttcctccaaccggtcaccgtgcagctgcctctgccctctggcatcacaggcctcagtctggaccgctcccgcctgcacctgttgtactgggcccctcctgcagccacctgggatgacatcacagctcaggtggtcctggagctcacccacctgtacgcacgcttccaggtcacacacttctcctggtactggctctggtacaccaccaagaactgtgtgggaggcctggctcggaaggcctgggagcggctgcggctgcaccgtgtgaacctcatcgctctgcagcggcgccgggaccctgagcaggtcctgctgcagtgcctgccccgaaacaaggtggacgccacccttcggcggctgctggagcggtaccggggccccgagccctctgacacggtggagatgttcgagggcgaagagttctttgcggccttcgagcgcggcatcgacgtggatgctgaccgccctgactgtgtggagggcagaatctgctttgtcttctactcgcacctgaagaatgtgaaggaggtatacgtgaccaccactctggaccgggaggctcaggctgtgcggggccaggtgtccttctaccgtggcgcggtgcctgtgcgggtgcccgaggaggctgaggctgcccggcagaggaagggcgcagacgccctgtggatggccactctgcccatcaagctgccgagacttcgagggtccgaggggccacggcggggggctggcctctccttggcacccttgaatctgggagatgccgagaccggctttctgacgcagagcaacctgctgagtgtggctgggcgtctgggtctggactggccagccgtggccctgcacctgggggtgtcctaccgggaggtgcagcgcatccggcacgagttccgggatgatctggatgagcagatccgtcacatgctcttctcctgggctgagcgccaggctgggcagccaggggctgtggggctcctggtgcaggccctggagcagagtgaccggcaggacgtggctgaagaggtgcgcgcagtcttggagctcggccgccgcaagtaccaggacagcatccgacgcatgggcttggcccccaaggaccccgctctgcctggctcctcggctccacagcccccagagcctgcccaggcctaggccccacagacttttaggctggcccagatattccccagtggatgggcagagcccccaccttcaagtctctccagtgtgtggggacgggtccctgtgagcaacaaaactgcactgtttctttcacctc

SEQ ID NO: 163308 - DNA, 3175 bp, Homo sapiens
  Payload ID: 12175
  Gene Symbol: PIDD1
  Gene Name: p53-induced death domain protein 1
  ENST ID: ENST00000525028
  CDS Start-End: 288-614
ctcctgcgagccatggcggtcccattccccaaccctctttccagtggtgacccaggcctccggggttcagggtgaccacaaggtctcccccactctgcagcccaggcccagatggcctggctctagagctccccactccatccagagtccctgtttccccaaagagaagggcccaccccggctcccgctcactcctcctcctgcctctgcagcttccccgggcgctgcctggacaggcctgcctgcgtgctgggacatgtctggcctccaaggaccgtcggtgggcgatggctgcaacggtggaggggccagagctggaggcagctgctgccgcaggagatgcttcagaggattcggacgcagggtccagggcgctgcctttcctgggcggcaaccggctgagcttggacctgtaccccgggggctgccagcagctgctgcacctgtgtgtccagcagcctctgcagctgctgcaggtggaattcttgcgtctgagcactcacgaggaccctcagctgctggaggccaccctggcccagctgcctcagagcctgtcctgcctccgctccctggtcctcaaagggtcgatctgggacctcggaccctggctctgagggccacatccgcctccccccttcccaggagggcaacgccgggacacactgggtgcctgtctccggggtgccctgaccaacctgcccgctggtctgagtggcctggcccatctggcccacctggacctgagcttcaacagcctggagacactgccggcctgtgtcctgcagatgcgaggtctgggtgcgctcttgctgtctcacaactgcctctctgagctgcctgaggctctgggggccctccccgccctcaccttcctcacagtgacacacaaccgcctgcagacgctgcccccagcactgggggccctatccaccctgcagcgcctcgatctctctcagaatctgctggacacgctacctcctgagattggaggcctgggcagcctcctggagctcaacctggcctccaaccggctgcagagcctcccagcctctctggcgggacttcggtccttgcggctccttgtcctgcacagcaacctcctggcctctgtgccagctgacttggcccgccttccactcctcacccggctcgacctgagggacaaccagctccgggacctgccccctgagctgctagacgccccctttgtgcgcctgcaggggaaccccctgggtgaggcctcgccagacgccccgagttcaccagtggcagccctcattccagaaatgcccagactgttcctgacctcagatttggacagctttcctgtgacccctcaaggctgctcagtgaccctggcctgtggcgtccgcctgcagttcccagcgggagccaccgccacccccatcaccatccgctatcggctgctgctgccggagccaggcctcgtccccctgggtcctcatgacgccctgctcagccatgtgctggagctgcagccccatggggtggccttccagcaggatgtggggctgtggctgctcttcaccccaccgcaggcccggcgctgccgtgaagtggtggtcaggacccggaatgacaacagctggggtgacctggagacctacctggaggaagaggcaccccagcggctctgggctcactgccaggtgccccacttctcctggttccttgtggtttcccgccctgtgtccaatgcctgcctggtgccaccggaggggacactgctgtgctcctcgggtcatcctggggtcaaagtcatcttcccccctggggccactgaggagcctcgtcgagtctccatgcaggtggtgcgcatggctggccgagagctgcaggccctcctgggagaaccagaggctgcagtgagccccctgctgtgcctgtcacagagcggtccccccagcttcctccaaccggtcaccgtgcagctgcctctgccctctggcatcacaggcctcagtctggaccgctcccgcctgcacctgttgtactgggcccctcctgcagccacctgggatgacatcacagctcaggtggtcctggagctcacccacctgtactggctctggtacaccaccaagaactgtgtgggaggcctggctcggaaggcctgggagcggctgcggctgcaccgtgtgaacctcatcgctctgcagcggcgccgggaccctgagcaggtcctgctgcagtgcctgccccgaaacaaggtggacgccacccttcggcggctgctggagcggtaccggggccccgagccctctgacacggtggagatgttcgagggcgaagagttctttgcggccttcgagcgcggcatcgacgtggatgctgaccgccctgactgtgtggagggcagaatctgctttgtcttctactcgcacctgaagaatgtgaaggaggtatacgtgaccaccactctggaccgggaggctcaggctgtgcggggccaggtgtccttctaccgtggcgcggtgcctgtgcgggtgcccgaggaggctgaggctgcccggcagaggaagggcgcagacgccctgtggatggccactctgcccatcaagctgccgagacttcgagggtccgaggggccacggcggggggctggcctctccttggcacccttgaatctgggagatgccgagaccggctttctgacgcagagcaacctgctgagtgtggctgggcgtctgggtctggactggccagccgtggccctgcacctgggggtgtcctaccgggaggtgcagcgcatccggcacgagttccgggatgatctggatgagcagatccgtcacatgctcttctcctgggctgagcgccaggctgggcagccaggggctgtggggctcctggtgcaggccctggagcagagtgaccggcaggacgtggctgaagaggtgcgcgcagtcttggagctcggccgccgcaagtaccaggacagcatccgacgcatgggcttggcccccaaggaccccgctctgcctggctcctcggctccacagcccccagagcctgcccaggcctaggccccacagacttttaggctggcccagatattccccagtggatgggcagagcccccaccttcaagtctctccagtgtgtggggacgggtccctgtgagcaacaaaactgcactgtttctttcacctca

SEQ ID NO: 163309 - DNA, 2066 bp, Homo sapiens
  Payload ID: 12176
  Gene Symbol: PAF1
  Gene Name: PAF1 homolog, Paf1/RNA polymerase II complex component
  Uniprot ID: Q8N7H5
  ENST ID: ENST00000221265
  CDS Start-End: 332-1927
acccagacgctcgccaatccgtgtgtggttccgagccggacttcatttccccgaaggcgtcgcggcctgaggagacccgttgggtcctcagcgtcttggcggcagttggtggaaccggagcttcgagtccgtccccggtgctgcctgcgcgttcacctgagtctcgctggagctcttctcgcccgcccacctcatctcaacccactttccgcggggagcggcgccaagctgggccttcctcggatcaggcgtcccctgaagtcggcacgcccctctgcgtcccccttcggtcccgctaggaccccgtccgggctgccgtcgcctcgtcgctatggcgcccaccatccagacccaggcccagcgggaggatggccacaggcccaattcccaccggactctgcctgagaggtctggagtggtctgccgagtcaagtactgcaatagcctccctgatatccccttcgaccccaagttcatcacctaccccttcgaccagaacaggttcgtccagtacaaagccacttccttggagaaacagcacaaacatgacctcctgactgagccagacctgggggtcaccatcgatctcatcaatcctgacacctaccgcatcgaccccaatgttcttctagatccagctgatgagaaacttttggaagaggagattcaggcccccaccagctccaagagatcccagcagcacgcgaaggtggtgccatggatgcgaaagacagagtacatctccactgagttcaaccgttatggcatctccaatgagaagcctgaggtcaagattggggtttctgtgaagcagcagtttaccgaggaagaaatatacaaagacagggatagccagatcacagccattgagaagacttttgaggatgcccagaaatcaatctcacagcattacagcaaaccccgagtcacaccggtggaggtcatgcctgtcttcccagactttaagatgtggatcaatccatgtgctcaggtgatctttgactcagacccagcccccaaggacacgagtggtgcagctgcgttggagatgatgtctcaggccatgattaggggcatgatggatgaggaagggaaccagtttgtggcctatttcctgcctgtagaagagacgttgaagaaacgaaagcgggaccaggaggaggagatggactatgcaccagatgatgtgtatgactacaaaattgctcgggagtacaactggaacgtgaagaacaaagctagcaagggctatgaggaaaactacttcttcatcttccgagagggtgacggggtttactacaatgagttggaaaccagggtccgccttagtaagcgccgggccaaggctggggttcagtcaggcaccaacgccctgcttgtggtcaaacatcgggacatgaatgagaaggaactggaagctcaggaggcacggaaggcccagctagaaaaccacgaaccggaggaggaagaggaagaggagatggagacagaagagaaagaagctgggggctcagatgaggagcaggagaagggcagcagcagtgagaaggagggcagtgaagatgagcactcgggcagcgagagtgaacgggaggaaggtgacagggacgaggccagtgacaagagtggcagtggtgaggacgagagcagcgaggatgaggcccgggctgcccgtgacaaagaggagatctttggcagtgatgctgattctgaggacgatgccgactctgatgatgaggacagaggacaggcccaaggtggcagtgacaatgattcagacagcggcagcaatgggggtggccagcggagccggagccacagccgcagcgccagtcccttccccagtggcagcgagcactcggcccaggaggatggcagtgaagctgcagcttctgattccagtgaagctgatagtgacagtgactgagtcccagggcattcagggctggttcagacaccattattgtgagcagcaaagcacttttctagtggtctgtttgtgagcctttcacttgtttgttccccacccccaaacctttgctgttaataaagtcaacttctcttta

SEQ ID NO: 163310 - DNA, 1383 bp, Homo sapiens
  Payload ID: 12176
  Gene Symbol: PAF1
  Gene Name: PAF1 homolog, Paf1/RNA polymerase II complex component
  ENST ID: ENST00000416728
  CDS Start-End: 291-1157
gttgggtcctcagcgtcttggcggcagttggtggaaccggagcttcgagtccgtccccggtgctgcctgcgcgttcacctgagtctcgctggagctcttctcgcccgcccacctcatctcaacccactttccgcggggagcggcgccaagctgggccttcctcggatcaggcgtcccctgaagtcggcacgcccctctgcgtcccccttcggtcccgctaggaccccgtccgggctgccgtcgcctcgtcgctatggcgcccaccatccagacccaggcccagcgggaggatggccacaggcccaattcccaccggactctgcctgagaggtctggagtggtctgccgagtcaagtactgcaatagcctccctgatatccccttcgaccccaagttcatcacctaccccttcgaccagaacagttcttctagatccagctgatgagaaacttttggaagaggagattcaggcccccaccagctccaagagatcccagcagcacgcgaaggtggtgccatggatgcgaaagacagagtacatctccactgagttcaaccgttatggcatctccaatgagaagcctgaggtcaagattggggtttctgtgaagcagcagtttaccgaggaagaaatatacaaagacagggatagccagatcacagccattgagaagacttttgaggatgcccagaaatcaatctcacagcattacagcaaaccccgagtcacaccggtggaggtcatgcctgtcttcccagactttaagatgtggatcaatccatgtgctcaggtgatctttgactcagacccagcccccaaggacacgagtggtgcagctgcgttggagatgatgtctcaggccatgattaggggcatgatggatgaggaagggaaccagtttgtggcctatttcctgcctgtagaagagacgttgaagaaacgaaagcgggaccaggaggaggagatggactatgcaccagatgatgtgtatgactacaaaattgctcgggagtacaactggaacgtgaagaacaaagctagcaagggctatgaggaaaactacttcttcatcttccgagagggtgacggggtttactacaatgagttggaaaccagtattcagtacagtcacatgctgtacaaccttgtagcctaggagcaataggctacaccattacagcctagggtccgccttagtaagcgccgggccaaggctggggttcagtcaggcaccaacgccctgcttgtggtcaaacatcgggacatgaatgagaaggaactggaagctcaggaggcacggaaggcccagctagaaaaccacgaaccggaggaggaagaggaagaggagatggagacagaagagaaagaagctgggggctcag

SEQ ID NO: 163311 - DNA, 1810 bp, Homo sapiens
  Payload ID: 12176
  Gene Symbol: PAF1
  Gene Name: PAF1 homolog, Paf1/RNA polymerase II complex component
  Uniprot ID: Q8N7H5
  ENST ID: ENST00000595564
  CDS Start-End: 291-1748
ttcatttccccgaaggcgtcgcggcctgaggagacccgttgggtcctcagcgtcttggcggcagttggtggaaccggagcttcgagtccgtccccggtgctgcctgcgcgttcacctgagtctcgctggagctcttctcgcccgcccacctcatctcaacccactttccgcggggagcggcgccaagctgggccttcctcggatcaggcgtcccctgaagtcggcacgcccctctgcgtcccccttcggtcccgctaggaccccgtccgggctgccgtcgcctcgtcgctatggcgcccaccatccagacccaggcccagcgggaggatggccacaggtctggagtggtctgccgagtcaagtactgcaatagcctccctgatatccccttcgaccccaagttcatcacctaccccttcgaccagaacaggttcgtccagtacaaagccacttccttggagaaacagcacaaacatgacctcctgactgagccagacctgggggtcaccatcgatctcatcaatcctgacacctaccgcatcgaccccaatgttcttctagatccagctgatgagaaacttttggaagaggagattcaggcccccaccagctccaagagatcccagcagcacgcgaaggtggtgccatggatgcgaaagacagagtacatctccactgagttcaaccgttatggcatctccaatgagaagcctgaggtcaagattggggtttctgtgaagcagcagtttaccgaggaagaaatatacaaagacagggatagccagatcacagccattgagaagacttttgaggatgcccagaaatcaatctcacagcattacagcaaaccccgagtcacaccggtggaggtcatgcctgtcttcccagactttaagatgtggatcaatccatgtgctcaggtgatctttgactcagacccagcccccaaggacacgagtggtgcagctgcgttggagatgatgtctcaggccatgattaggggcatgatggatgaggaagggaaccagtttgtggcctatttcctgcctgtagaagagacgttgaagaaacgaaagcgggaccaggaggaggagatggactatgcaccagatgatgtgtatgactacaaaattgctcgggagtacaactggaacgtgaagaacaaagctagcaagggctatgaggaaaactacttcttcatcttccgagagggtgacggggtttactacaatgagttggaaaccagggtccgccttagtaagcgccgggccaaggctggggttcagtcaggcaccaacgccctgcttgtggtcaaacatcgggacatgaatgagaaggaactggaagctcaggaggcacggaaggcccagctagaaaaccacgaaccggaggaggaagaggaagaggagatggagacagaagagaaagaagctgggggctcagtgatgctgattctgaggacgatgccgactctgatgatgaggacagaggacaggcccaaggtggcagtgacaatgattcagacagcggcagcaatgggggtggccagcggagccggagccacagccgcagcgccagtcccttccccagtggcagcgagcactcggcccaggaggatggcagtgaagctgcagcttctgattccagtgaagctgatagtgacagtgactgagtcccagggcattcagggctggttcagacaccattattgtgagcagcaaagcacttttctagtggtctgtttgtgagcctttcacttgtttgttccccacccccaaacctttgctgttaataaagtcaacttctcttt

SEQ ID NO: 163312 - DNA, 281 bp, Homo sapiens
  Payload ID: 12176
  Gene Symbol: PAF1
  Gene Name: PAF1 homolog, Paf1/RNA polymerase II complex component
  ENST ID: ENST00000595379
  CDS Start-End: 1-281
ggttcagtcaggcaccaacgccctgcttgtggtcaaacatcgggacatgaatgagaaggaactggaagctcaggaggcacggaaggcccagctagaaaaccacgaaccggaggaggaagaggaagaggagatggagacagaagagaaagaagctgggggctcaggtaaatctggacaggccagactctgggagccctgggagggtggaaaagtgggtttcatctctctccactcccttccagatgaggagcaggagaagggcagcagcagtgagaaggagg

SEQ ID NO: 163313 - DNA, 2838 bp, Homo sapiens
  Payload ID: 12177
  Gene Symbol: PAX1
  Gene Name: paired box 1
  Uniprot ID: P15863
  ENST ID: ENST00000398485
  CDS Start-End: 55-1659
aaattgattcccgcacgctgcagcctcccggtcagacgaatttctcccaatcggatgaagttcaccctgggcctggggtcgcgggcgtggagagtgtcctgggagggggcagcagcggcggcggcaggccctggagcgggcggcagcgcgctccgctgccgcgcacagcgcgtctccagcccgcggctgggccgccgcggctctcggctctcgggcgccctccctctatgcctctcacgcggcggcggcggcgcccaagctctcccggactgcgccgggcccagccccggccaccccggccaccccggcgccaggcagctggccggcccgctcgctatggagcagacgtatggcgaggtgaaccagctgggcggtgtgttcgtcaacggccgccccctgcccaacgccatccgcttgcgcattgtggagctggcgcagctgggcatccgaccctgtgacatcagtcggcagctccgcgtatcccacggctgcgtgagcaagatcctggcgcgctacaacgagaccggctccattctgcccggggccatcggggggagcaagccccgcgtcaccactcccaacgtggtcaagcacatccgggactacaagcaaggagaccctggcatctttgcctgggagatccgcgaccggctgctggccgacggcgtctgtgacaagtacaatgtgccttcggtgagctccatcagccgcatcctgcgcaacaagatcggcagcctggcgcagcccggaccgtacgaggcaagtaagcagccgccgtcgcagcctacgctgccctacaaccacatctaccagtacccctaccccagtcccgtgtcgcccacgggcgccaagatgggcagccaccccggggtcccgggcacggcgggccacgtcagcatcccgcgctcatggccctcggcacactcggtcagcaacatcctgggcatccggacgtttatggagcaaacaggggccctggctgggagcgaaggcaccgcttactctcccaagatggaagactgggccggcgtgaaccgcacggccttccccgccacccccgcagtgaatgggctagagaaacctgccttagaggcagacattaaatacactcagtcggcctccaccctctctgccgtgggcggctttctccccgcctgcgcctacccggcctccaaccagcacggcgtgtacagcgccccgggcggcggctacctcgccccgggcccgccgtggccgcctgcgcaaggtcctcctctggcgccccccggggccggcgtagctgtgcatggcggggaactcgcggcagcaatgaccttcaagcatcccagccgagaaggaagcctcccagctccggcagcaaggccccggacgccctcagtagcttacacggactgcccatcccggcctcgacctcctaggggcagctctccccggacccgagcccggagggaacggcaggcggacccgggcgcacaggtctgcgcggcggccccggcaatcggcacgggcaggatcggaggactcgcggaggaggaagccagtgccggcccgcggggtgcacgcccagccagcccccaggcccagccctgcctctggccggacccaccacacttcctttattggtctgggtttttaggcttctctgaacttgggttttagactgccgtaccctcctcacaatccttgctctgacgtggcctccttcgctctgccagcttcaaatttcttttttgtcactcccttgtccgtctccgtctcgcctctctccctgtttccttcccccctctttctttctcactctccctcccttccctttctctttcccttcctccctaccttccaccccggctttccccgaccttccagggctccctctgcccttccactctcttttccttgctccgacctctgctccagtcccgcttcttcccccgtctcctctttctagtcctctatatgctatcagccctttttcctggtccatccctgtcgttccttctctctctgtctctggttctactgtcaagggccctagttccctttgttttactgcttccccaaccctccctcagtccctgagagccctagagccatctcggtgacagtcccttctctggcacctgggactttgtagccttcactcctctgagcccaccagccctaatggaggggggctcaaacctaggaagtggacagaaaagccacagcctttattttgtattttttttgtaataacaaaccctaaaaaaccctccatgaactgtcctctcccgtcgatccccgcagcatattgtctggaaatctgttttctttctcagagcccagtggccgccgggcttctcttcccttctgagatgatgtcaccccaaagaagactggggtaggagtagggagcacaggggttgttggtgttttcagtgcttagaaaactgggttgtcctgcaggtgtctcctcccacccctccactcgcaacacttgctagggaatccgaccagtggtaaacacatcagcactttttggtgttcaggggtcagcacatttgttaatttaaaccacagactgcttccaggtacaaaggttcatttggacttctggtttgcaagggatgagggttaaaaaaaacaaaacaaaacaaacaacaacaacaacaaaaacaacccagaaagtatcttctagagccagccgcaagagctgtgagctgcttccaagttaggcgagctggtggtggtaccctggacataatgcaattctgtagtcagagcaatatccctggcgagagcctgacatcgcctgttaaaggtggctgcctctgaataaaggaaagcgtctgaaaggtg

SEQ ID NO: 163314 - DNA, 1850 bp, Homo sapiens
  Payload ID: 12177
  Gene Symbol: PAX1
  Gene Name: paired box 1
  Uniprot ID: P15863
  ENST ID: ENST00000444366
  CDS Start-End: 2-1303
aatgcgccgcgctccactccgcggctcctctgcgcccttgcccactccaagccagacccaggcggtttgcccttggactccgagctgtctggggacccacaggtcacctttggaagtgcgcctgggtgcagtccctcgctccgcgtggggacccttggctaacccgccgggtgttttctccccctccggctcactcttgtctggcgcatccgcagagcagacgtatggcgaggtgaaccagctgggcggtgtgttcgtcaacggccgccccctgcccaacgccatccgcttgcgcattgtggagctggcgcagctgggcatccgaccctgtgacatcagtcggcagctccgcgtatcccacggctgcgtgagcaagatcctggcgcgctacaacgagaccggctccattctgcccggggccatcggggggagcaagccccgcgtcaccactcccaacgtggtcaagcacatccgggactacaagcaaggagaccctggcatctttgcctgggagatccgcgaccggctgctggccgacggcgtctgtgacaagtacaatgtgccttcggtgagctccatcagccgcatcctgcgcaacaagatcggcagcctggcgcagcccggaccgtacgaggcaagtaagcagccgccgtcgcagcctacgctgccctacaaccacatctaccagtacccctaccccagtcccgtgtcgcccacgggcgccaagatgggcagccaccccggggtcccgggcacggcgggccacgtcagcatcccgcgctcatggccctcggcacactcggtcagcaacatcctgggcatccggacgtttatggagcaaacaggggccctggctgggagcgaaggcaccgcttactctcccaagatggaagactgggccggcgtgaaccgcacggccttccccgccacccccgcagtgaatgggctagagaaacctgccttagaggcagacattaaatacactcagtcggcctccaccctctctgccgtgggcggctttctccccgcctgcgcctacccggcctccaaccagcacggcgtgtacagcgccccgggcggcggctacctcgccccgggcccgccgtggccgcctgcgcaaggtcctcctctggcgccccccggggccggcgtagctgtgcatggcggggaactcgcggcagcaatgaccttcaagcatcccagccgagaagtggctgacaggaagcctcccagctccggcagcaaggccccggacgccctcagtagcttacacggactgcccatcccggcctcgacctcctaggggcagctctccccggacccgagcccggagggaacggcaggcggacccgggcgcacaggtctgcgcggcggccccggcaatcggcacgggcaggatcggaggactcgcggaggaggaagccagtgccggcccgcggggtgcacgcccagccagcccccaggcccagccctgcctctggccggacccaccacacttcctttattggtctgggtttttaggcttctctgaacttgggttttagactgccgtaccctcctcacaatccttgctctgacgtggcctccttcgctctgccagcttcaaatttcttttttgtcactcccttgtccgtctccgtctcgcctctctccctgtttccttcccccctctttctttctcactctccctcccttccctttctctttcccttcctccctaccttccaccccggctttccccgaccttccagggctccctctgcccttccactctcttttccttgctccgacctctgctccagtcccgcttcttcccccgtctcctctttctagtcctctatatgctatca

SEQ ID NO: 163315 - DNA, 5352 bp, Homo sapiens
  Payload ID: 12177
  Gene Symbol: PAX1
  Gene Name: paired box 1
  ENST ID: ENST00000613128
  CDS Start-End: 55-1428
aaattgattcccgcacgctgcagcctcccggtcagacgaatttctcccaatcggatgaagttcaccctgggcctggggtcgcgggcgtggagagtgtcctgggagggggcagcagcggcggcggcaggccctggagcgggcggcagcgcgctccgctgccgcgcacagcgcgtctccagcccgcggctgggccgccgcggctctcggctctcgggcgccctccctctatgcctctcacgcggcggcggcggcgcccaagctctcccggactgcgccgggcccagccccggccaccccggccaccccggcgccaggcagctggccggcccgctcgctatggagcagacgtatggcgaggtgaaccagctgggcggtgtgttcgtcaacggccgccccctgcccaacgccatccgcttgcgcattgtggagctggcgcagctgggcatccgaccctgtgacatcagtcggcagctccgcgtatcccacggctgcgtgagcaagatcctggcgcgctacaacgagaccggctccattctgcccggggccatcggggggagcaagccccgcgtcaccactcccaacgtggtcaagcacatccgggactacaagcaaggagaccctggcatctttgcctgggagatccgcgaccggctgctggccgacggcgtctgtgacaagtacaatgtgccttcggtgagctccatcagccgcatcctgcgcaacaagatcggcagcctggcgcagcccggaccgtacgaggcaagtaagcagccgccgtcgcagcctacgctgccctacaaccacatctaccagtacccctaccccagtcccgtgtcgcccacgggcgccaagatgggcagccaccccggggtcccgggcacggcgggccacgtcagcatcccgcgctcatggccctcggcacactcggtcagcaacatcctgggcatccggacgtttatggagcaaacaggggccctggctgggagcgaaggcaccgcttactctcccaagatggaagactgggccggcgtgaaccgcacggccttccccgccacccccgcagtgaatgggctagagaaacctgccttagaggcagacattaaatacactcagtcggcctccaccctctctgccgtgggcggctttctccccgcctgcgcctacccggcctccaaccagcacggcgtgtacagcgccccgggcggcggctacctcgccccgggcccgccgtggccgcctgcgcaaggtcctcctctggcgccccccggggccggcgtagctgtgcatggcggggaactcgcggcagcaatgaccttcaagcatcccagccgagaagtggctgacaggaagcctcccagctccggcagcaaggccccggacgccctcagtagcttacacggactgcccatcccggcctcgacctcctaggggcagctctccccggacccgagcccggagggaacggcaggcggacccgggcgcacaggtctgcgcggcggccccggcaatcggcacgggcaggatcggaggactcgcggaggaggaagccagtgccggcccgcggggtgcacgcccagccagcccccaggcccagccctgcctctggccggacccaccacacttcctttattggtctgggtttttaggcttctctgaacttgggttttagactgccgtaccctcctcacaatccttgctctgacgtggcctccttcgctctgccagcttcaaatttcttttttgtcactcccttgtccgtctccgtctcgcctctctccctgtttccttcccccctctttctttctcactctccctcccttccctttctctttcccttcctccctaccttccaccccggctttccccgaccttccagggctccctctgcccttccactctcttttccttgctccgacctctgctccagtcccgcttcttcccccgtctcctctttctagtcctctatatgctatcagccctttttcctggtccatccctgtcgttccttctctctctgtctctggttctactgtcaagggccctagttccctttgttttactgcttccccaaccctccctcagtccctgagagccctagagccatctcggtgacagtcccttctctggcacctgggactttgtagccttcactcctctgagcccaccagccctaatggaggggggctcaaacctaggaagtggacagaaaagccacagcctttattttgtattttttttgtaataacaaaccctaaaaaaccctccatgaactgtcctctcccgtcgatccccgcagcatattgtctggaaatctgttttctttctcagagcccagtggccgccgggcttctcttcccttctgagatgatgtcaccccaaagaagactggggtaggagtagggagcacaggggttgttggtgttttcagtgcttagaaaactgggttgtcctgcaggtgtctcctcccacccctccactcgcaacacttgctagggaatccgaccagtggtaaacacatcagcactttttggtgttcaggggtcagcacatttgttaatttaaaccacagactgcttccaggtacaaaggttcatttggacttctggtttgcaagggatgagggttaaaaaaaacaaaacaaaacaaacaacaacaacaacaaaaacaacccagaaagtatcttctagagccagccgcaagagctgtgagctgcttccaagttaggcgagctggtggtggtaccctggacataatgcaattctgtagtcagagcaatatccctggcgagagcctgacatcgcctgttaaaggtggctgcctctgaataaaggaaagcgtctgaaaggtgtgtggtgaggtgagcaagtctgtttctgagcgcagagtgttgagttcttactccgtagctaccctctcccctgagttcctaggatgaacactatcaagggaaattatgcagaaaccaccttgaaatgcagttaattctgaaaagagtaaaatgggcaaaaggcaatgagccagaatggaggatttcttcagaacatttctagtattctaaaagctaaagaagacaatcccaggctaccaagtaatctagggggtttgcactacaaaggggcttccggctaattgtttttttttcctgcctctgtttgaccttctaaaactgatggaagagatttttgaattgaagttgctgtttgtgagtggagctgcctgcttggtgtgtgcactggtcccacctaggggactagtggtaaacagtttttgtttcaactctttttgatagtatctgttgaaggtatcaattataaaaaagtacttacttttttcctagagagactcttcttctcagattcaaagtctcttgtctttttttttttttttttttaaagtttcactttgtagacagtgttagtgatggctagggatttgatttattttctttagaccacatagcaaggtatgaattagagggcttgtgcttggaaactgggtgacactatctcatcagagaggcaggattgagacttggactttgagactgaagtcctcagccttccatggcagcatatcctgtagaagagcttgtcatactgataataggaaaaaagtatgacagagaagcatgttcccaagtcccccatcctctcagcctgtctccttgtgcttagatgagcattgcatgctcagtggtgacatcctggacagaattttcatgcacccatttgtgctgcctggagaaggactggcttgctcaggccaggaggaagacatcacatccctttctgaaggaatgagaagaatctatatgacaacttctacctttgagttgtcaccatccccatttccctgctatggcccacttctgtgtttgagctgatcagggttatgggggagaagagctgggaaatgcgccccagggtggatgcaaagcacctgtgttttaagtgccacctgcaaagggaggcatttttcaaatctgcctcttgttccctgtatcctgtggctggaggcgggtctttgagttccctggctctggggcgagcattcactgaggataggcagccttcgtcccagagccagcaggctctgacatttcatgtggggtgtggagggacataccccctctctcgcggctgggggtcacggaacatcttagtgaacttggcttaaatctctgctccactgtatgtgtcaggggactgggacctcttggaacctgtctgtgaaatgtagccttcaatgcagtaacgcgcacggtgacctggcctgtaggaagactgccactggtgtggcctcacctctctggagacaattttgcttatctgttaacaaaagttagaggaatcacttgtaaggttggtgggagacccagaatttaaatattttccaaaagatcccattggaatattgcacttttgctctttgttcgtatggatctgtggaggaactgagagctcataataaaattatgcagcaccacgtcaggtagaataatttgagaaacaatcactccctaaacgcagtttgtctttgcctttcatttttttaatttaagaataagttttttttagaaaaatatagagatgtaacccaaagaaaataaagacataatcagatagccctctgattttttgaaagaatagaaataatatatgcgtatcactaaaaaactcaagcagtacagaaacattaaaatgaaaagtggaagttcttcctgctctcatttttgttcttaaaggtgaatgctgttatagtcttttgtgaatctttccaggaaaaacatgcatgcgggaaaatatgtttctgtctatgtgttatttgaaagtgcacactaatgagttgtgctgtgcacacacagacatgagctgaagatctgctctttgcgtaccaccagcttcagctccaatgtacccactttattctcgtgaatggatgtctattaccgaggatttattaaaaacagggtatttgtaaagagggccagcttcgtgctttaaatgaataaagacaggattttgttgtgttcattattggaggaagtacttgcaatggattgtaataacttccctgccaaaggtagctgttttttggcaagaagtaaggaaaacaaaccaaaggaaaggaggattgaggggcaagaggcatgaagttttgcccttcttgaatatgccccgagttgttctacagatcactgaagggcatttgaaggtgtgaggggaaggcttcctctcctttggagggagtcagtctctctgggccaggaaagagacatggaggcagaggggtgcgggaaaaccttgtgtgaagaaatactggctacaaataaagtttagattttcaatactg

SEQ ID NO: 163316 - DNA, 4057 bp, Homo sapiens
  Payload ID: 12178
  Gene Symbol: PAX2
  Gene Name: paired box 2
  Uniprot ID: Q02962
  ENST ID: ENST00000355243
  CDS Start-End: 551-1735
cgggggcctggcccgcgcgctcccctcccgcaggcgccacctcggacatccccgggattgctacttctctgccaacttcgccaactcgccagcacttggagaggcccggctcccctcccggcgccctctgaccgcccccgccccgcgcgctctccgaccaccgcctctcggatgaccaggttccaggggagctgagcgagtcgcctcccccgcccagcttcagccctggctgcagctgcagcgcgagccatgcgcccccagtgcaccccggcccggcccaccgccccggggccattctgctgaccgcccagccccgagccccgacagtggcaagttgcggctactgcagttgcaagctccggccaacccggaggagccccagcggggagcgcagtgctgcgccccccgcccccgcgcgccccgcagcagccgggcgttcactcatcctccctcccccaccgtccctcccttttctcctcaagtcctgaagttgagtttgagaggcgacacggcggcggcggccgcgctgctcccgctcctctgcctccccatggatatgcactgcaaagcagaccccttctccgcgatgcacccagggcacgggggtgtgaaccagctcgggggggtgtttgtgaacggccggcccctacccgacgtggtgaggcagcgcatcgtggagctggcccaccagggtgtgcggccctgtgacatctcccggcagctgcgggtcagccacggctgtgtcagcaaaatcctgggcaggtactacgagaccggcagcatcaagccgggtgtgatcggtggctccaagcccaaagtggcgacgcccaaagtggtggacaagattgctgaatacaaacgacagaacccgactatgttcgcctgggagattcgagaccggctcctggccgagggcatctgtgacaatgacacagtgcccagcgtctcttccatcaacagaatcatccggaccaaagttcagcagcctttccacccaacgccggatggggctgggacaggagtgaccgcccctggccacaccattgttcccagcacggcctcccctcctgtttccagcgcctccaatgacccagtgggatcctactccatcaatgggatcctggggattcctcgctccaatggtgagaagaggaaacgtgatgaagatgtgtctgagggctcagtccccaatggagattcccagagtggtgtggacagtttgcggaagcacttgcgagctgacaccttcacccagcagcagctggaagctttggatcgggtctttgagcgtccttcctaccctgacgtcttccaggcatcagagcacatcaaatcagaacaggggaacgagtactccctcccagccctgacccctgggcttgatgaagtcaagtcgagtctatctgcatccaccaaccctgagctgggcagcaacgtgtcaggcacacagacatacccagttgtgactggtcgtgacatggcgagcaccactctgcctggttacccccctcacgtgccccccactggccagggaagctaccccacctccaccctggcaggaatggtgcctgggagcgagttctccggcaacccgtacagccacccccagtacacggcctacaacgaggcttggagattcagcaaccccgccttactaagttccccttattattatagtgccgccccccggggctccgcccctgccgctgctgccgctgcctatgaccgccactagttaccgcggggaccacatcaagcttcaggccgacagcttcggcctccacatcgtccccgtctgaccccaccccggagggagggaggaccgacgcgacgcgatgcctcccggccaccgccccagcctcaccccatcccacgacccccgcaacccttcacatcacccccctcgaaggtcggacaggacgggtggagccgtgggcgggaccctcaggcccgggcccgccgcccccagccccgcctgccgcccctccccgcctgcctggactgcgcggcgccgtgagggggattcggcccagctcgtcccggcctccaccaagccagccccgaagcccgccagccaccctgccggactcgggcgcgacctgctggcgcgcgccggatgtttctgtgacacacaatcagcgcggaccgcagcgcggcccagccccgggcacccgcctcggacgctcgggcgccaggaggcttcgctggaggggctgggccaaggagattaagaagaaaacgactttctgcaggaggaagagcccgctgccgaatccctgggaaaaattcttttcccccagtgccagccggactgccctcgccttccgggtgtgccctgtcccagaagatggaatgggggtgtgggggtccggctctaggaacgggctttgggggcgtcaggtctttccaaggttgggacccaaggatcggggggcccagcagcccgcaccgatcgagccggactctcggctcttcactgctcctcctggcctgcctagttccccagggcccggcacctcctgctgcgagacccggctctcagccctgccttgcccctacctcagcgtctcttccacctgctggcctcccagtttcccctcctgccagtccttcgcctgtcccttgacgccctgcatcctcctccctgactcgcagccccatcggacgctctcccgggaccgccgcaggaccagtttccatagactgcggactggggtcttcctccagcagttacttgatgccccctcccccgacacagactctcaatctgccggtggtaagaaccggttctgagctggcgtctgagctgctgcggggtggaagtggggggctgcccactccactcctcccatcccctcccagcctcctcctccggcaggaactgaacagaaccacaaaaagtctacatttatttaatatgatggtctttgcaaaaaggaacaaaacaacacaaaagcccaccaggctgctgctttgtggaaagacggtgtgtgtcgtgtgaaggcgaaacccggtgtacataacccctccccctccgccccgccccgcccggccccgtagagtccctgtcgcccgccggccctgcctgtagatacgccccgctgtctgtgctgtgagagtcgccgctcgctgggggggaagggggggacacagctacacgcccattaaagcacagcacgtcctgggggaggggggcattttttatgttacaaaaaaaaattacgaaagaaaagaaatctctatgcaaaatgacgaacatggtcctgtggactcctctggcctgttttgttggctctttctctgtaattccgtgttttcgctttttcctccctgcccctctctccctctgcccctctctcctctccgcttctctccccctctgtctctgtctctctccgtctctgtcgctcttgtctgtctgtctctgctctttcctcggcctctctccccagacctggcccggccgccctgtctccgcaggctagatccgaggtggcagctccagcccccgggctcgccccctcgcgggcgtgccccgcgcgccccgggcggccgaaggccgggccgccccgtcccgccccgtagttgctctttcggtagtggcgatgcgccctgcatgtctcctcacccgtggatcgtgacgactcgaaataacagaaacaaagtcaataaagtgaaaataaataaaaatccttgaacaaatccgaaaaggcttggagtcctcgcccagatctctctcccctgcgagccctttttatttgagaaggaaaaagagaaaagagaatcgtttaagggaacccggcgcccagccaggctccagtggcccgaacggggcggcgagggcggcgagggcgccgaggtccggcccatcccagtcctgtggggctggccgggcagagaccccggacccaggcccaggcctaacctgctaaatgtccccggacggttctggtctcctcggccactttcagtgcgtcggttcgttttgattctttttcttttgtgcacataagaaataaataataataataaataaagaataaaattttgtatgtca

SEQ ID NO: 163317 - DNA, 3193 bp, Homo sapiens
  Payload ID: 12178
  Gene Symbol: PAX2
  Gene Name: paired box 2
  ENST ID: ENST00000361791
  CDS Start-End: 42-1223
cggcggcggcggccgcgctgctcccgctcctctgcctccccatggatatgcactgcaaagcagaccccttctccgcgatgcaccggcacgggggtgtgaaccagctcgggggggtgtttgtgaacggccggcccctacccgacgtggtgaggcagcgcatcgtggagctggcccaccagggtgtgcggccctgtgacatctcccggcagctgcgggtcagccacggctgtgtcagcaaaatcctgggcaggtactacgagaccggcagcatcaagccgggtgtgatcggtggctccaagcccaaagtggcgacgcccaaagtggtggacaagattgctgaatacaaacgacagaacccgactatgttcgcctgggagattcgagaccggctcctggccgagggcatctgtgacaatgacacagtgcccagcgtctcttccatcaacagaatcatccggaccaaagttcagcagcctttccacccaacgccggatggggctgggacaggagtgaccgcccctggccacaccattgttcccagcacggcctcccctcctgtttccagcgcctccaatgacccagtgggatcctactccatcaatgggatcctggggattcctcgctccaatggtgagaagaggaaacgtgatgaagatgtgtctgagggctcagtccccaatggagattcccagagtggtgtggacagtttgcggaagcacttgcgagctgacaccttcacccagcagcagctggaagctttggatcgggtctttgagcgtccttcctaccctgacgtcttccaggcatcagagcacatcaaatcagaacaggggaacgagtactccctcccagccctgacccctgggcttgatgaagtcaagtcgagtctatctgcatccaccaaccctgagctgggcagcaacgtgtcaggcacacagacatacccagttgtgactggtcgtgacatggcgagcaccactctgcctggttacccccctcacgtgccccccactggccagggaagctaccccacctccaccctggcaggaatggtgcctgggagcgagttctccggcaacccgtacagccacccccagtacacggcctacaacgaggcttggagattcagcaaccccgccttactaagttccccttattattatagtgccgccccccggggctccgcccctgccgctgctgccgctgcctatgaccgccactagttaccgcggggaccacatcaagcttcaggccgacagcttcggcctccacatcgtccccgtctgaccccaccccggagggagggaggaccgacgcgacgcgatgcctcccggccaccgccccagcctcaccccatcccacgacccccgcaacccttcacatcacccccctcgaaggtcggacaggacgggtggagccgtgggcgggaccctcaggcccgggcccgccgcccccagccccgcctgccgcccctccccgcctgcctggactgcgcggcgccgtgagggggattcggcccagctcgtcccggcctccaccaagccagccccgaagcccgccagccaccctgccggactcgggcgcgacctgctggcgcgcgccggatgtttctgtgacacacaatcagcgcggaccgcagcgcggcccagccccgggcacccgcctcggacgctcgggcgccaggaggcttcgctggaggggctgggccaaggagattaagaagaaaacgactttctgcaggaggaagagcccgctgccgaatccctgggaaaaattcttttcccccagtgccagccggactgccctcgccttccgggtgtgccctgtcccagaagatggaatgggggtgtgggggtccggctctaggaacgggctttgggggcgtcaggtctttccaaggttgggacccaaggatcggggggcccagcagcccgcaccgatcgagccggactctcggctcttcactgctcctcctggcctgcctagttccccagggcccggcacctcctgctgcgagacccggctctcagccctgccttgcccctacctcagcgtctcttccacctgctggcctcccagtttcccctcctgccagtccttcgcctgtcccttgacgccctgcatcctcctccctgactcgcagccccatcggacgctctcccgggaccgccgcaggaccagtttccatagactgcggactggggtcttcctccagcagttacttgatgccccctcccccgacacagactctcaatctgccggtggtaagaaccggttctgagctggcgtctgagctgctgcggggtggaagtggggggctgcccactccactcctcccatcccctcccagcctcctcctccggcaggaactgaacagaaccacaaaaagtctacatttatttaatatgatggtctttgcaaaaaggaacaaaacaacacaaaagcccaccaggctgctgctttgtggaaagacggtgtgtgtcgtgtgaaggcgaaacccggtgtacataacccctccccctccgccccgccccgcccggccccgtagagtccctgtcgcccgccggccctgcctgtagatacgccccgctgtctgtgctgtgagagtcgccgctcgctgggggggaagggggggacacagctacacgcccattaaagcacagcacgtcctgggggaggggggcattttttatgttacaaaaaaaaattacgaaagaaaagaaatctctatgcaaaatgacgaacatggtcctgtggactcctctggcctgttttgttggctctttctctgtaattccgtgttttcgctttttcctccctgcccctctctccctctgcccctctctcctctccgcttctctccccctctgtctctgtctctctccgtctctgtcgctcttgtctgtctgtctctgctctttcctcggcctctctccccagacctggcccggccgccctgtctccgcaggctagatccgaggtggcagctccagcccccgggctcgccccctcgcgggcgtgccccgcgcgccccgggcggccgaaggccgggccgccccgtcccgccccgtagttgctctttcggtagtggcgatgcgccctgcatgtctcctcacccgtggatcgtgacgactcgaaataacagaaacaaagtcaataaagtgaaaataaataaaaatccttgaacaaatcc

SEQ ID NO: 163318 - DNA, 4140 bp, Homo sapiens
  Payload ID: 12178
  Gene Symbol: PAX2
  Gene Name: paired box 2
  Uniprot ID: Q02962
  ENST ID: ENST00000370296
  CDS Start-End: 551-1741
cgggggcctggcccgcgcgctcccctcccgcaggcgccacctcggacatccccgggattgctacttctctgccaacttcgccaactcgccagcacttggagaggcccggctcccctcccggcgccctctgaccgcccccgccccgcgcgctctccgaccaccgcctctcggatgaccaggttccaggggagctgagcgagtcgcctcccccgcccagcttcagccctggctgcagctgcagcgcgagccatgcgcccccagtgcaccccggcccggcccaccgccccggggccattctgctgaccgcccagccccgagccccgacagtggcaagttgcggctactgcagttgcaagctccggccaacccggaggagccccagcggggagcgcagtgctgcgccccccgcccccgcgcgccccgcagcagccgggcgttcactcatcctccctcccccaccgtccctcccttttctcctcaagtcctgaagttgagtttgagaggcgacacggcggcggcggccgcgctgctcccgctcctctgcctccccatggatatgcactgcaaagcagaccccttctccgcgatgcacccagggcacgggggtgtgaaccagctcgggggggtgtttgtgaacggccggcccctacccgacgtggtgaggcagcgcatcgtggagctggcccaccagggtgtgcggccctgtgacatctcccggcagctgcgggtcagccacggctgtgtcagcaaaatcctgggcaggtactacgagaccggcagcatcaagccgggtgtgatcggtggctccaagcccaaagtggcgacgcccaaagtggtggacaagattgctgaatacaaacgacagaacccgactatgttcgcctgggagattcgagaccggctcctggccgagggcatctgtgacaatgacacagtgcccagcgtctcttccatcaacagaatcatccggaccaaagttcagcagcctttccacccaacgccggatggggctgggacaggagtgaccgcccctggccacaccattgttcccagcacggcctcccctcctgtttccagcgcctccaatgacccagtgggatcctactccatcaatgggatcctggggattcctcgctccaatggtgagaagaggaaacgtgatgaagatgtgtctgagggctcagtccccaatggagattcccagagtggtgtggacagtttgcggaagcacttgcgagctgacaccttcacccagcagcagctggaagctttggatcgggtctttgagcgtccttcctaccctgacgtcttccaggcatcagagcacatcaaatcagaacaggggaacgagtactccctcccagccctgacccctgggcttgatgaagtcaagtcgagtctatctgcatccaccaaccctgagctgggcagcaacgtgtcaggcacacagacatacccagttgtgactggtcgtgacatggcgagcaccactctgcctggttacccccctcacgtgccccccactggccagggaagctaccccacctccaccctggcaggaatggtgcctgaggctgcagttggtccctcatcctccctcatgagcaagccggggaggaagcttgcagaagtgcccccttgtgtgcaacccactggagcgagttctccggcaacccgtacagccacccccagtacacggcctacaacgaggcttggagattcagcaaccccgccttactaagttccccttattattatagtgccgccccccggggctccgcccctgccgctgctgccgctgcctatgaccgccactagttaccgcggggaccacatcaagcttcaggccgacagcttcggcctccacatcgtccccgtctgaccccaccccggagggagggaggaccgacgcgacgcgatgcctcccggccaccgccccagcctcaccccatcccacgacccccgcaacccttcacatcacccccctcgaaggtcggacaggacgggtggagccgtgggcgggaccctcaggcccgggcccgccgcccccagccccgcctgccgcccctccccgcctgcctggactgcgcggcgccgtgagggggattcggcccagctcgtcccggcctccaccaagccagccccgaagcccgccagccaccctgccggactcgggcgcgacctgctggcgcgcgccggatgtttctgtgacacacaatcagcgcggaccgcagcgcggcccagccccgggcacccgcctcggacgctcgggcgccaggaggcttcgctggaggggctgggccaaggagattaagaagaaaacgactttctgcaggaggaagagcccgctgccgaatccctgggaaaaattcttttcccccagtgccagccggactgccctcgccttccgggtgtgccctgtcccagaagatggaatgggggtgtgggggtccggctctaggaacgggctttgggggcgtcaggtctttccaaggttgggacccaaggatcggggggcccagcagcccgcaccgatcgagccggactctcggctcttcactgctcctcctggcctgcctagttccccagggcccggcacctcctgctgcgagacccggctctcagccctgccttgcccctacctcagcgtctcttccacctgctggcctcccagtttcccctcctgccagtccttcgcctgtcccttgacgccctgcatcctcctccctgactcgcagccccatcggacgctctcccgggaccgccgcaggaccagtttccatagactgcggactggggtcttcctccagcagttacttgatgccccctcccccgacacagactctcaatctgccggtggtaagaaccggttctgagctggcgtctgagctgctgcggggtggaagtggggggctgcccactccactcctcccatcccctcccagcctcctcctccggcaggaactgaacagaaccacaaaaagtctacatttatttaatatgatggtctttgcaaaaaggaacaaaacaacacaaaagcccaccaggctgctgctttgtggaaagacggtgtgtgtcgtgtgaaggcgaaacccggtgtacataacccctccccctccgccccgccccgcccggccccgtagagtccctgtcgcccgccggccctgcctgtagatacgccccgctgtctgtgctgtgagagtcgccgctcgctgggggggaagggggggacacagctacacgcccattaaagcacagcacgtcctgggggaggggggcattttttatgttacaaaaaaaaattacgaaagaaaagaaatctctatgcaaaatgacgaacatggtcctgtggactcctctggcctgttttgttggctctttctctgtaattccgtgttttcgctttttcctccctgcccctctctccctctgcccctctctcctctccgcttctctccccctctgtctctgtctctctccgtctctgtcgctcttgtctgtctgtctctgctctttcctcggcctctctccccagacctggcccggccgccctgtctccgcaggctagatccgaggtggcagctccagcccccgggctcgccccctcgcgggcgtgccccgcgcgccccgggcggccgaaggccgggccgccccgtcccgccccgtagttgctctttcggtagtggcgatgcgccctgcatgtctcctcacccgtggatcgtgacgactcgaaataacagaaacaaagtcaataaagtgaaaataaataaaaatccttgaacaaatccgaaaaggcttggagtcctcgcccagatctctctcccctgcgagccctttttatttgagaaggaaaaagagaaaagagaatcgtttaagggaacccggcgcccagccaggctccagtggcccgaacggggcggcgagggcggcgagggcgccgaggtccggcccatcccagtcctgtggggctggccgggcagagaccccggacccaggcccaggcctaacctgctaaatgtccccggacggttctggtctcctcggccactttcagtgcgtcggttcgttttgattctttttcttttgtgcacataagaaataaataataataataaataaagaataaaattttgtatgtca

SEQ ID NO: 163319 - DNA, 4126 bp, Homo sapiens
  Payload ID: 12178
  Gene Symbol: PAX2
  Gene Name: paired box 2
  Uniprot ID: Q02962
  ENST ID: ENST00000428433
  CDS Start-End: 551-1804
cgggggcctggcccgcgcgctcccctcccgcaggcgccacctcggacatccccgggattgctacttctctgccaacttcgccaactcgccagcacttggagaggcccggctcccctcccggcgccctctgaccgcccccgccccgcgcgctctccgaccaccgcctctcggatgaccaggttccaggggagctgagcgagtcgcctcccccgcccagcttcagccctggctgcagctgcagcgcgagccatgcgcccccagtgcaccccggcccggcccaccgccccggggccattctgctgaccgcccagccccgagccccgacagtggcaagttgcggctactgcagttgcaagctccggccaacccggaggagccccagcggggagcgcagtgctgcgccccccgcccccgcgcgccccgcagcagccgggcgttcactcatcctccctcccccaccgtccctcccttttctcctcaagtcctgaagttgagtttgagaggcgacacggcggcggcggccgcgctgctcccgctcctctgcctccccatggatatgcactgcaaagcagaccccttctccgcgatgcacccagggcacgggggtgtgaaccagctcgggggggtgtttgtgaacggccggcccctacccgacgtggtgaggcagcgcatcgtggagctggcccaccagggtgtgcggccctgtgacatctcccggcagctgcgggtcagccacggctgtgtcagcaaaatcctgggcaggtactacgagaccggcagcatcaagccgggtgtgatcggtggctccaagcccaaagtggcgacgcccaaagtggtggacaagattgctgaatacaaacgacagaacccgactatgttcgcctgggagattcgagaccggctcctggccgagggcatctgtgacaatgacacagtgcccagcgtctcttccatcaacagaatcatccggaccaaagttcagcagcctttccacccaacgccggatggggctgggacaggagtgaccgcccctggccacaccattgttcccagcacggcctcccctcctgtttccagcgcctccaatgacccagtgggatcctactccatcaatgggatcctggggattcctcgctccaatggtgagaagaggaaacgtgatgaagttgaggtatacactgatcctgcccacattagaggaggtggaggtttgcatctggtctggactttaagagatgtgtctgagggctcagtccccaatggagattcccagagtggtgtggacagtttgcggaagcacttgcgagctgacaccttcacccagcagcagctggaagctttggatcgggtctttgagcgtccttcctaccctgacgtcttccaggcatcagagcacatcaaatcagaacaggggaacgagtactccctcccagccctgacccctgggcttgatgaagtcaagtcgagtctatctgcatccaccaaccctgagctgggcagcaacgtgtcaggcacacagacatacccagttgtgactggtcgtgacatggcgagcaccactctgcctggttacccccctcacgtgccccccactggccagggaagctaccccacctccaccctggcaggaatggtgcctgggagcgagttctccggcaacccgtacagccacccccagtacacggcctacaacgaggcttggagattcagcaaccccgccttactaagttccccttattattatagtgccgccccccggggctccgcccctgccgctgctgccgctgcctatgaccgccactagttaccgcggggaccacatcaagcttcaggccgacagcttcggcctccacatcgtccccgtctgaccccaccccggagggagggaggaccgacgcgacgcgatgcctcccggccaccgccccagcctcaccccatcccacgacccccgcaacccttcacatcacccccctcgaaggtcggacaggacgggtggagccgtgggcgggaccctcaggcccgggcccgccgcccccagccccgcctgccgcccctccccgcctgcctggactgcgcggcgccgtgagggggattcggcccagctcgtcccggcctccaccaagccagccccgaagcccgccagccaccctgccggactcgggcgcgacctgctggcgcgcgccggatgtttctgtgacacacaatcagcgcggaccgcagcgcggcccagccccgggcacccgcctcggacgctcgggcgccaggaggcttcgctggaggggctgggccaaggagattaagaagaaaacgactttctgcaggaggaagagcccgctgccgaatccctgggaaaaattcttttcccccagtgccagccggactgccctcgccttccgggtgtgccctgtcccagaagatggaatgggggtgtgggggtccggctctaggaacgggctttgggggcgtcaggtctttccaaggttgggacccaaggatcggggggcccagcagcccgcaccgatcgagccggactctcggctcttcactgctcctcctggcctgcctagttccccagggcccggcacctcctgctgcgagacccggctctcagccctgccttgcccctacctcagcgtctcttccacctgctggcctcccagtttcccctcctgccagtccttcgcctgtcccttgacgccctgcatcctcctccctgactcgcagccccatcggacgctctcccgggaccgccgcaggaccagtttccatagactgcggactggggtcttcctccagcagttacttgatgccccctcccccgacacagactctcaatctgccggtggtaagaaccggttctgagctggcgtctgagctgctgcggggtggaagtggggggctgcccactccactcctcccatcccctcccagcctcctcctccggcaggaactgaacagaaccacaaaaagtctacatttatttaatatgatggtctttgcaaaaaggaacaaaacaacacaaaagcccaccaggctgctgctttgtggaaagacggtgtgtgtcgtgtgaaggcgaaacccggtgtacataacccctccccctccgccccgccccgcccggccccgtagagtccctgtcgcccgccggccctgcctgtagatacgccccgctgtctgtgctgtgagagtcgccgctcgctgggggggaagggggggacacagctacacgcccattaaagcacagcacgtcctgggggaggggggcattttttatgttacaaaaaaaaattacgaaagaaaagaaatctctatgcaaaatgacgaacatggtcctgtggactcctctggcctgttttgttggctctttctctgtaattccgtgttttcgctttttcctccctgcccctctctccctctgcccctctctcctctccgcttctctccccctctgtctctgtctctctccgtctctgtcgctcttgtctgtctgtctctgctctttcctcggcctctctccccagacctggcccggccgccctgtctccgcaggctagatccgaggtggcagctccagcccccgggctcgccccctcgcgggcgtgccccgcgcgccccgggcggccgaaggccgggccgccccgtcccgccccgtagttgctctttcggtagtggcgatgcgccctgcatgtctcctcacccgtggatcgtgacgactcgaaataacagaaacaaagtcaataaagtgaaaataaataaaaatccttgaacaaatccgaaaaggcttggagtcctcgcccagatctctctcccctgcgagccctttttatttgagaaggaaaaagagaaaagagaatcgtttaagggaacccggcgcccagccaggctccagtggcccgaacggggcggcgagggcggcgagggcgccgaggtccggcccatcccagtcctgtggggctggccgggcagagaccccggacccaggcccaggcctaacctgctaaatgtccccggacggttctggtctcctcggccactttcagtgcgtcggttcgttttgattctttttcttttgtgcacataagaaataaataataataataaataaagaataaaattttgtatgtca

SEQ ID NO: 163320 - DNA, 677 bp, Homo sapiens
  Payload ID: 12178
  Gene Symbol: PAX2
  Gene Name: paired box 2
  ENST ID: ENST00000427256
  CDS Start-End: 34-677
gcggccgcgctgctcccgctcctctgcctccccatggatatgcactgcaaagcagaccccttctccgcgatgcacccagggcacgggggtgtgaaccagctcgggggggtgtttgtgaacggccggcccctacccgacgtggtgaggcagcgcatcgtggagctggcccaccagggtgtgcggccctgtgacatctcccggcagctgcgggtcagccacggctgtgtcagcaaaatcctgggcaggtactacgagaccggcagcatcaagccgggtgtgatcggtggctccaagcccaaagtggcgacgcccaaagtggtggacaagattgctgaatacaaacgacagaacccgactatgttcgcctgggagattcgagaccggctcctggccgagggcatctgtgacaatgacacagtgcccagcgtctcttccatcaacagaatcatccggaccaaagttcagcagcctttccacccaacgccggatggggctgggacaggagtgaccgcccctggccacaccattgttcccagcacggcctcccctcctgtttccagcgcctccaatgacccagtgggatcctactccatcaatgggatcctggggattcctcgctccaatggtgagaagaggaaacgtgatgaagttgaggtatacactgatcctgcccacat

SEQ ID NO: 163321 - DNA, 1755 bp, Homo sapiens
  Payload ID: 12178
  Gene Symbol: PAX2
  Gene Name: paired box 2
  ENST ID: ENST00000554172
  CDS Start-End: 842-1755
cgccccgagagttattaactcgccagcgaggcctatgccgtgccacctgggcgagacggtgggccccaaccaggctctgcgaggcgcggcaggcaggcgagcccaagcagccggcattctctgcctgctgcctggagccgctctgcctccctgtctctgagcgcagcagaccccgggcccctgcctcatccgccttccttgctctacttcagatactaaggaggtgaaagagagatacggtccccctacagataaataacattagaaaaacttcccatcaaaaacaaacaacacaggaaagaggtagaaaaattccgattacaatttaatactttttaaagaagaggcagagagcaaaggggggtgtgtgtgtcaggcacttatcccctgtctgtgctaggagctcggataaacagtcagccgagcctcgacgcccccaaatcgtccgcctccaagccccgcacgcgcggacagctcccgggttgcctgcggcgcaggcgggatgctgcttcgcactagtccagtcctctgccaggcccttcctctcctcgctttcttacgccctttccgctggcatgaattcccctttggcattttctcccctctcccctcttttctgtcatctggtttctctccagtcccccctttgctttctaccttgcgtcgcaaggcctgagtcgccctctcgcccagcccccagtcttcagcccagcgtctgtgcttccagtccccactcctccgcgtggtcgtggaggtccaccacctttcttctcaagctcgggaacatgcccttccgccctgcctgcttccttcgcccgtcccgggccgcggaccctgactaatggccggtccctgctgtgtgtggggtgttgtgtttttttcttgtctctccccagcagggcacgggggtgtgaaccagctcgggggggtgtttgtgaacggccggcccctacccgacgtggtgaggcagcgcatcgtggagctggcccaccagggtgtgcggccctgtgacatctcccggcagctgcgggtcagccacggctgtgtcagcaaaatcctgggcaggtactacgagaccggcagcatcaagccgggtgtgatcggtggctccaagcccaaagtggcgacgcccaaagtggtggacaagattgctgaatacaaacgacagaacccgactatgttcgcctgggagattcgagaccggctcctggccgagggcatctgtgacaatgacacagtgcccagcgtctcttccatcaacagaatcatccggaccaaagttcagcagcctttccacccaacgccggatggggctgggacaggagtgaccgcccctggccacaccattgttcccagcacggcctcccctcctgtttccagcgcctccaatgacccagtgggatcctactccatcaatgggatcctggggattcctcgctccaatgatgtgtctgagggctcagtccccaatggagattcccagagtggtgtggacagtttgcggaagcacttgcgagctgacaccttcacccagcagcagctggaagctttggatcgggtctttgagcgtccttcctaccctgacgtcttccaggcatcagagcacatcaaatcagaacaggggaacgagtactccctcccagccctgacccctgggcttgatgaagtcaagtcgagtctatctgcatccaccaaccctgagctgggcagcaacgtgtcaggcacacagacatacccagttgtgactggtcgtga

SEQ ID NO: 163322 - DNA, 958 bp, Homo sapiens
  Payload ID: 12179
  Gene Symbol: PAX3
  Gene Name: paired box 3
  Uniprot ID: P23760
  ENST ID: ENST00000258387
  CDS Start-End: 251-871
caaacttttccgccctgggctcgggatcctggactccggggcctccccgtcctcccctttcccgggttccagctccggcctctggactaggaaccgacagcccccctccccgcgtccctccctctctctccagccgttttggggaggggctctccacgctccggatagttcccgagggtcatccgcgccgcactcgcctttccgtttcgccttcacctggatataatttccgagcgaagctgcccccaggatgaccacgctggccggcgctgtgcccaggatgatgcggccgggcccggggcagaactacccgcgtagcgggttcccgctggaagtgtccactcccctcggccagggccgcgtcaaccagctcggcggtgtttttatcaacggcaggccgctgcccaaccacatccgccacaagatcgtggagatggcccaccacggcatccggccctgcgtcatctcgcgccagctgcgcgtgtcccacggctgcgtctccaagatcctgtgcaggtaccaggagactggctccatacgtcctggtgccatcggcggcagcaagcccaagcaggtgacaacgcctgacgtggagaagaaaattgaggaatacaaaagagagaacccgggcatgttcagctgggaaatccgagacaaattactcaaggacgcggtctgtgatcgaaacaccgtgccgtcagtgagttccatcagccgcatcctgagaagtaaattcgggaaaggtgaagaggaggaggccgacttggagaggaaggaggcagaggaaagcgagaagaaggccaaacacagcatcgacggcatcctgagcgagcgaggaaaggccctggtctccggagtttcctcgcattaaaggagagagagagagagtactcttttgggcaacggccctccaaaattgcccccacattggctgccttataaatatgtctgtgtgttg

SEQ ID NO: 163323 - DNA, 2038 bp, Homo sapiens
  Payload ID: 12179
  Gene Symbol: PAX3
  Gene Name: paired box 3
  Uniprot ID: P23760
  ENST ID: ENST00000336840
  CDS Start-End: 382-1605
actcggtgtcaccacaggaggagactcaggcaggccgcgctccagcctcaccaggctccccggctcgccgtggctctctgagcccccttttcagggaccccagtcgctggaacatttgcccagactcgtaccaaacttttccgccctgggctcgggatcctggactccggggcctccccgtcctcccctttcccgggttccagctccggcctctggactaggaaccgacagcccccctccccgcgtccctccctctctctccagccgttttggggaggggctctccacgctccggatagttcccgagggtcatccgcgccgcactcgcctttccgtttcgccttcacctggatataatttccgagcgaagctgcccccaggatgaccacgctggccggcgctgtgcccaggatgatgcggccgggcccggggcagaactacccgcgtagcgggttcccgctggaagtgtccactcccctcggccagggccgcgtcaaccagctcggcggtgtttttatcaacggcaggccgctgcccaaccacatccgccacaagatcgtggagatggcccaccacggcatccggccctgcgtcatctcgcgccagctgcgcgtgtcccacggctgcgtctccaagatcctgtgcaggtaccaggagactggctccatacgtcctggtgccatcggcggcagcaagcccaagcaggtgacaacgcctgacgtggagaagaaaattgaggaatacaaaagagagaacccgggcatgttcagctgggaaatccgagacaaattactcaaggacgcggtctgtgatcgaaacaccgtgccgtcagtgagttccatcagccgcatcctgagaagtaaattcgggaaaggtgaagaggaggaggccgacttggagaggaaggaggcagaggaaagcgagaagaaggccaaacacagcatcgacggcatcctgagcgagcgagcctcagcaccccaatcagatgaaggctctgatattgactctgaaccagatttaccactaaagaggaaacagcgcagaagccgaaccaccttcacagcagaacagctggaggaactggagcgtgcttttgagagaactcattaccctgacatttatactagggaggaactggcccagagggcgaagctcaccgaggcccgagtacaggtctggtttagcaaccgccgtgcaagatggaggaagcaagctggggccaatcaactgatggctttcaaccatctcattcccggggggttccctcccactgccatgccgaccttgccaacgtaccagctgtcggagacctcttaccagcccacatctattccacaagctgtgtcagatcccagcagcaccgttcacagacctcaaccgcttcctccaagcactgtacaccaaagcacgattccttccaacccagacagcagctctgcctactgcctccccagcaccaggcatggattttccagctatacagacagctttgtgcctccgtcggggccctccaaccccatgaaccccaccattggcaatggcctctcacctcaggtgcctttcattatctcaagccagatatcgcttggtttcaaatccttttgaacacgttcgacaaaagcagtggagaagaggaagacctggagcaataaaagacaaatgcaacattttaaggcaatggtttcacatggttacatatcaaaacatcccaattctttagtgctgatcatcgaggagctagaacattccatttgcttgtgtgcgtgcgtgcgtgtgtgtgtgtgtgtgtgtattgagatttacccagactggtttgggcaagcagactgttctaaaatataatagaataccctaaagtataacatgtcgatgttcgatgctgatacttctacaactttaaaactgctcatttcatgaagcaagaatggaggaatccttgactcttacacactggaaattgaaataaagataaatgcaaccatttttaggaagctagactagctgtaaaggacctcctaaataaattatttgttactgt

SEQ ID NO: 163324 - DNA, 3109 bp, Homo sapiens
  Payload ID: 12179
  Gene Symbol: PAX3
  Gene Name: paired box 3
  Uniprot ID: P23760
  ENST ID: ENST00000344493
  CDS Start-End: 382-1593
actcggtgtcaccacaggaggagactcaggcaggccgcgctccagcctcaccaggctccccggctcgccgtggctctctgagcccccttttcagggaccccagtcgctggaacatttgcccagactcgtaccaaacttttccgccctgggctcgggatcctggactccggggcctccccgtcctcccctttcccgggttccagctccggcctctggactaggaaccgacagcccccctccccgcgtccctccctctctctccagccgttttggggaggggctctccacgctccggatagttcccgagggtcatccgcgccgcactcgcctttccgtttcgccttcacctggatataatttccgagcgaagctgcccccaggatgaccacgctggccggcgctgtgcccaggatgatgcggccgggcccggggcagaactacccgcgtagcgggttcccgctggaagtgtccactcccctcggccagggccgcgtcaaccagctcggcggtgtttttatcaacggcaggccgctgcccaaccacatccgccacaagatcgtggagatggcccaccacggcatccggccctgcgtcatctcgcgccagctgcgcgtgtcccacggctgcgtctccaagatcctgtgcaggtaccaggagactggctccatacgtcctggtgccatcggcggcagcaagcccaagcaggtgacaacgcctgacgtggagaagaaaattgaggaatacaaaagagagaacccgggcatgttcagctgggaaatccgagacaaattactcaaggacgcggtctgtgatcgaaacaccgtgccgtcagtgagttccatcagccgcatcctgagaagtaaattcgggaaaggtgaagaggaggaggccgacttggagaggaaggaggcagaggaaagcgagaagaaggccaaacacagcatcgacggcatcctgagcgagcgagcctcagcaccccaatcagatgaaggctctgatattgactctgaaccagatttaccactaaagaggaaacagcgcagaagccgaaccaccttcacagcagaacagctggaggaactggagcgtgcttttgagagaactcattaccctgacatttatactagggaggaactggcccagagggcgaagctcaccgaggcccgagtacaggtctggtttagcaaccgccgtgcaagatggaggaagcaagctggggccaatcaactgatggctttcaaccatctcattcccggggggttccctcccactgccatgccgaccttgccaacgtaccagctgtcggagacctcttaccagcccacatctattccacaagctgtgtcagatcccagcagcaccgttcacagacctcaaccgcttcctccaagcactgtacaccaaagcacgattccttccaacccagacagcagctctgcctactgcctccccagcaccaggcatggattttccagctatacagacagctttgtgcctccgtcggggccctccaaccccatgaaccccaccattggcaatggcctctcacctcaggtgcctttcattatctcaagccagatatcgcgtaagtgaactgtccacttggagctaaaactggccctgtttctggtcttcgcagcctagatatgaagaatctgctctgaaaacaaaaaaaaattacccttttgttggggggggtggggcagtggtcccaataggagacaaaggagagtgattgattttcttcctccaatagttggtttcaaatccttttgaacacgttcgacaaaagcagtggagaagaggaagacctggagcaataaaagacaaatgcaacattttaaggcaatggtttcacatggttacatatcaaaacatcccaattctttagtgctgatcatcgaggagctagaacattccatttgcttgtgtgcgtgcgtgcgtgtgtgtgtgtgtgtgtgtattgagatttacccagactggtttgggcaagcagactgttctaaaatataatagaataccctaaagtataacatgtcgatgttcgatgctgatacttctacaactttaaaactgctcatttcatgaagcaagaatggaggaatccttgactcttacacactggaaattgaaataaagataaatgcaaccatttttaggaagctagactagctgtaaaggacctcctaaataaattatttgttactgtatcctcatttgtaatctagttgtcaataaatggcccggacatgtcttgctaacaggatatgggctaccaggaagaaggacttgtttccctttcctgtgtggggagaggtgtgtgacgtttttccagttcacatttatttggtagcccacctgggttggaggaagggcacggtggagagaaagtgacatgcattcacatatctgcttatcagtgtgcaatactgtgtacctcatggatgctttggcaatgcccaaggcgatataagcaaaatcagaagtatatttttgcaggtgcttttattttcacagcccataattcatagtgatagagtgcagtgatgtttgccatttgctggacaaccaacacccgggttgctcctttgattagagaccagatcagataattatgcttttaaactgattacgtttacattcttctcttttctatgaaaggcagggcaagaacagaagtgttcacatggctctcatgtacttttaaattatacaatgatatccaatattaaaagattataggaactgaggtttacatacgtttgtgtggtgacattttagaatgtcaataaatttgctttttgagatgttgagaggaacaagaaggtggaaggcagtgttatttatttctttctattcttggaaccacgaatgaggtaggcacaaatacattccttttagagttaagaactatgacgtagcgagttagtgagactagacatagtaccgaatttagttcatgcattggtcttagagggtgatggaacaagagaagtactatctttgtgttgcagcctcaaccaacaacaatgtgttgtaaaaatgtctttcatgtaaaaagtgcagtaaatatttactatttataatgaataaacagttatgaaaactt

SEQ ID NO: 163325 - DNA, 3610 bp, Homo sapiens
  Payload ID: 12179
  Gene Symbol: PAX3
  Gene Name: paired box 3
  Uniprot ID: P23760
  ENST ID: ENST00000350526
  CDS Start-End: 138-1577
gtccctccctctctctccagccgttttggggaggggctctccacgctccggatagttcccgagggtcatccgcgccgcactcgcctttccgtttcgccttcacctggatataatttccgagcgaagctgcccccaggatgaccacgctggccggcgctgtgcccaggatgatgcggccgggcccggggcagaactacccgcgtagcgggttcccgctggaagtgtccactcccctcggccagggccgcgtcaaccagctcggcggtgtttttatcaacggcaggccgctgcccaaccacatccgccacaagatcgtggagatggcccaccacggcatccggccctgcgtcatctcgcgccagctgcgcgtgtcccacggctgcgtctccaagatcctgtgcaggtaccaggagactggctccatacgtcctggtgccatcggcggcagcaagcccaagcaggtgacaacgcctgacgtggagaagaaaattgaggaatacaaaagagagaacccgggcatgttcagctgggaaatccgagacaaattactcaaggacgcggtctgtgatcgaaacaccgtgccgtcagtgagttccatcagccgcatcctgagaagtaaattcgggaaaggtgaagaggaggaggccgacttggagaggaaggaggcagaggaaagcgagaagaaggccaaacacagcatcgacggcatcctgagcgagcgagcctcagcaccccaatcagatgaaggctctgatattgactctgaaccagatttaccactaaagaggaaacagcgcagaagccgaaccaccttcacagcagaacagctggaggaactggagcgtgcttttgagagaactcattaccctgacatttatactagggaggaactggcccagagggcgaagctcaccgaggcccgagtacaggtctggtttagcaaccgccgtgcaagatggaggaagcaagctggggccaatcaactgatggctttcaaccatctcattcccggggggttccctcccactgccatgccgaccttgccaacgtaccagctgtcggagacctcttaccagcccacatctattccacaagctgtgtcagatcccagcagcaccgttcacagacctcaaccgcttcctccaagcactgtacaccaaagcacgattccttccaacccagacagcagctctgcctactgcctccccagcaccaggcatggattttccagctatacagacagctttgtgcctccgtcggggccctccaaccccatgaaccccaccattggcaatggcctctcacctcaggtaatgggactcctgaccaaccacggtggggtacctcatcagccccagactgattacgcgctctcccctctcaccgggggtctggaacctaccaccacggtgtcggccagctgcagtcagagactagaccatatgaagagcttggacagtctgccaacatctcagtcctactgtccacccacctatagcaccacaggctacagtatggaccctgtcacaggctaccaatatgggcagtatggacaaagtaagccttggactttttagggggcaatttctcctggaagggagataaactcaactcttccttaagaaaggtgaattagaggcaagattaagccacacatgccggtatcaatttttttttttttttgcaaagccagctgactgttccagcaggggcttccttgtgtaattattttcttaactgatgtcaacaacatcttgcggttattaattgttgagacgtgaaacctgattgccactaggtaaaacacaagggttggccaaaatgaaataatccctgacattagaaacacatgttcttaatgaggtcagctccaggatcatatgggggataatcccagggacacaaagttgtgtcaaacttgtctcaggaataaaaatattagtctcaagcctttgatagcacggtattaaatatgacattgtcagcctgtagctgatcttgcccctgactgtgaattgtcccagcatgacctaaaaagctgcgtgtgtttccttacaggtgcctttcattatctcaagccagatatcgcgtaagtgaactgtccacttggagctaaaactggccctgtttctggtcttcgcagcctagatatgaagaatctgctctgaaaacaaaaaaaaattacccttttgttggggggggtggggcagtggtcccaataggagacaaaggagagtgattgattttcttcctccaatagttggtttcaaatccttttgaacacgttcgacaaaagcagtggagaagaggaagacctggagcaataaaagacaaatgcaacattttaaggcaatggtttcacatggttacatatcaaaacatcccaattctttagtgctgatcatcgaggagctagaacattccatttgcttgtgtgcgtgcgtgcgtgtgtgtgtgtgtgtgtgtattgagatttacccagactggtttgggcaagcagactgttctaaaatataatagaataccctaaagtataacatgtcgatgttcgatgctgatacttctacaactttaaaactgctcatttcatgaagcaagaatggaggaatccttgactcttacacactggaaattgaaataaagataaatgcaaccatttttaggaagctagactagctgtaaaggacctcctaaataaattatttgttactgtatcctcatttgtaatctagttgtcaataaatggcccggacatgtcttgctaacaggatatgggctaccaggaagaaggacttgtttccctttcctgtgtggggagaggtgtgtgacgtttttccagttcacatttatttggtagcccacctgggttggaggaagggcacggtggagagaaagtgacatgcattcacatatctgcttatcagtgtgcaatactgtgtacctcatggatgctttggcaatgcccaaggcgatataagcaaaatcagaagtatatttttgcaggtgcttttattttcacagcccataattcatagtgatagagtgcagtgatgtttgccatttgctggacaaccaacacccgggttgctcctttgattagagaccagatcagataattatgcttttaaactgattacgtttacattcttctcttttctatgaaaggcagggcaagaacagaagtgttcacatggctctcatgtacttttaaattatacaatgatatccaatattaaaagattataggaactgaggtttacatacgtttgtgtggtgacattttagaatgtcaataaatttgctttttgagatgttgagaggaacaagaaggtggaaggcagtgttatttatttctttctattcttggaaccacgaatgaggtaggcacaaatacattccttttagagttaagaactatgacgtagcgagttagtgagactagacatagtaccgaatttagttcatgcattggtcttagagggtgatggaacaagagaagtactatctttgtgttgcagcctcaaccaacaacaatgtgttgtaaaaatgtctttcatgtaaaaagtgcagtaaatatttactatttataatgaataaacagttatgaaaa

SEQ ID NO: 163326 - DNA, 3170 bp, Homo sapiens
  Payload ID: 12179
  Gene Symbol: PAX3
  Gene Name: paired box 3
  Uniprot ID: P23760
  ENST ID: ENST00000392069
  CDS Start-End: 367-1884
aggaggagactcaggcaggccgcgctccagcctcaccaggctccccggctcgccgtggctctctgagcccccttttcagggaccccagtcgctggaacatttgcccagactcgtaccaaacttttccgccctgggctcgggatcctggactccggggcctccccgtcctcccctttcccgggttccagctccggcctctggactaggaaccgacagcccccctccccgcgtccctccctctctctccagccgttttggggaggggctctccacgctccggatagttcccgagggtcatccgcgccgcactcgcctttccgtttcgccttcacctggatataatttccgagcgaagctgcccccaggatgaccacgctggccggcgctgtgcccaggatgatgcggccgggcccggggcagaactacccgcgtagcgggttcccgctggaagtgtccactcccctcggccagggccgcgtcaaccagctcggcggtgtttttatcaacggcaggccgctgcccaaccacatccgccacaagatcgtggagatggcccaccacggcatccggccctgcgtcatctcgcgccagctgcgcgtgtcccacggctgcgtctccaagatcctgtgcaggtaccaggagactggctccatacgtcctggtgccatcggcggcagcaagcccaagcaggtgacaacgcctgacgtggagaagaaaattgaggaatacaaaagagagaacccgggcatgttcagctgggaaatccgagacaaattactcaaggacgcggtctgtgatcgaaacaccgtgccgtcagtgagttccatcagccgcatcctgagaagtaaattcgggaaaggtgaagaggaggaggccgacttggagaggaaggaggcagaggaaagcgagaagaaggccaaacacagcatcgacggcatcctgagcgagcgagcctcagcaccccaatcagatgaaggctctgatattgactctgaaccagatttaccactaaagaggaaacagcgcagaagccgaaccaccttcacagcagaacagctggaggaactggagcgtgcttttgagagaactcattaccctgacatttatactagggaggaactggcccagagggcgaagctcaccgaggcccgagtacaggtctggtttagcaaccgccgtgcaagatggaggaagcaagctggggccaatcaactgatggctttcaaccatctcattcccggggggttccctcccactgccatgccgaccttgccaacgtaccagctgtcggagacctcttaccagcccacatctattccacaagctgtgtcagatcccagcagcaccgttcacagacctcaaccgcttcctccaagcactgtacaccaaagcacgattccttccaacccagacagcagctctgcctactgcctccccagcaccaggcatggattttccagctatacagacagctttgtgcctccgtcggggccctccaaccccatgaaccccaccattggcaatggcctctcacctcaggtaatgggactcctgaccaaccacggtggggtacctcatcagccccagactgattacgcgctctcccctctcaccgggggtctggaacctaccaccacggtgtcggccagctgcagtcagagactagaccatatgaagagcttggacagtctgccaacatctcagtcctactgtccacccacctatagcaccacaggctacagtatggaccctgtcacaggctaccaatatgggcagtatggacaaagtgcctttcattatctcaagccagatatcgcttggtttcaaatccttttgaacacgttcgacaaaagcagtggagaagaggaagacctggagcaataaaagacaaatgcaacattttaaggcaatggtttcacatggttacatatcaaaacatcccaattctttagtgctgatcatcgaggagctagaacattccatttgcttgtgtgcgtgcgtgcgtgtgtgtgtgtgtgtgtgtattgagatttacccagactggtttgggcaagcagactgttctaaaatataatagaataccctaaagtataacatgtcgatgttcgatgctgatacttctacaactttaaaactgctcatttcatgaagcaagaatggaggaatccttgactcttacacactggaaattgaaataaagataaatgcaaccatttttaggaagctagactagctgtaaaggacctcctaaataaattatttgttactgtatcctcatttgtaatctagttgtcaataaatggcccggacatgtcttgctaacaggatatgggctaccaggaagaaggacttgtttccctttcctgtgtggggagaggtgtgtgacgtttttccagttcacatttatttggtagcccacctgggttggaggaagggcacggtggagagaaagtgacatgcattcacatatctgcttatcagtgtgcaatactgtgtacctcatggatgctttggcaatgcccaaggcgatataagcaaaatcagaagtatatttttgcaggtgcttttattttcacagcccataattcatagtgatagagtgcagtgatgtttgccatttgctggacaaccaacacccgggttgctcctttgattagagaccagatcagataattatgcttttaaactgattacgtttacattcttctcttttctatgaaaggcagggcaagaacagaagtgttcacatggctctcatgtacttttaaattatacaatgatatccaatattaaaagattataggaactgaggtttacatacgtttgtgtggtgacattttagaatgtcaataaatttgctttttgagatgttgagaggaacaagaaggtggaaggcagtgttatttatttctttctattcttggaaccacgaatgaggtaggcacaaatacattccttttagagttaagaactatgacgtagcgagttagtgagactagacatagtaccgaatttagttcatgcattggtcttagagggtgatggaacaagagaagtactatctttgtgttgcagcctcaaccaacaacaatgtgttgtaaaaatgtctttcatgtaaaaagtgcagtaaatatttactatttataatgaataaacagttatgaaaactt

SEQ ID NO: 163327 - DNA, 2258 bp, Homo sapiens
  Payload ID: 12179
  Gene Symbol: PAX3
  Gene Name: paired box 3
  Uniprot ID: P23760
  ENST ID: ENST00000392070
  CDS Start-End: 382-1836
actcggtgtcaccacaggaggagactcaggcaggccgcgctccagcctcaccaggctccccggctcgccgtggctctctgagcccccttttcagggaccccagtcgctggaacatttgcccagactcgtaccaaacttttccgccctgggctcgggatcctggactccggggcctccccgtcctcccctttcccgggttccagctccggcctctggactaggaaccgacagcccccctccccgcgtccctccctctctctccagccgttttggggaggggctctccacgctccggatagttcccgagggtcatccgcgccgcactcgcctttccgtttcgccttcacctggatataatttccgagcgaagctgcccccaggatgaccacgctggccggcgctgtgcccaggatgatgcggccgggcccggggcagaactacccgcgtagcgggttcccgctggaagtgtccactcccctcggccagggccgcgtcaaccagctcggcggtgtttttatcaacggcaggccgctgcccaaccacatccgccacaagatcgtggagatggcccaccacggcatccggccctgcgtcatctcgcgccagctgcgcgtgtcccacggctgcgtctccaagatcctgtgcaggtaccaggagactggctccatacgtcctggtgccatcggcggcagcaagcccaagcaggtgacaacgcctgacgtggagaagaaaattgaggaatacaaaagagagaacccgggcatgttcagctgggaaatccgagacaaattactcaaggacgcggtctgtgatcgaaacaccgtgccgtcagtgagttccatcagccgcatcctgagaagtaaattcgggaaaggtgaagaggaggaggccgacttggagaggaaggaggcagaggaaagcgagaagaaggccaaacacagcatcgacggcatcctgagcgagcgagcctcagcaccccaatcagatgaaggctctgatattgactctgaaccagatttaccactaaagaggaaacagcgcagaagccgaaccaccttcacagcagaacagctggaggaactggagcgtgcttttgagagaactcattaccctgacatttatactagggaggaactggcccagagggcgaagctcaccgaggcccgagtacaggtctggtttagcaaccgccgtgcaagatggaggaagcaagctggggccaatcaactgatggctttcaaccatctcattcccggggggttccctcccactgccatgccgaccttgccaacgtaccagctgtcggagacctcttaccagcccacatctattccacaagctgtgtcagatcccagcagcaccgttcacagacctcaaccgcttcctccaagcactgtacaccaaagcacgattccttccaacccagacagcagctctgcctactgcctccccagcaccaggcatggattttccagctatacagacagctttgtgcctccgtcggggccctccaaccccatgaaccccaccattggcaatggcctctcacctcaggtaatgggactcctgaccaaccacggtggggtacctcatcagccccagactgattacgcgctctcccctctcaccgggggtctggaacctaccaccacggtgtcggccagctgcagtcagagactagaccatatgaagagcttggacagtctgccaacatctcagtcctactgtccacccacctatagcaccacaggctacagtatggaccctgtcacaggctaccaatatgggcagtatggacaaagtgcctttcattatctcaagccagatatcgcgtaagtgaactgtccacttggagctaaaactggccctgtttctggtcttcgcagcctagatatgaagaatctgctctgaaaacaaaaaaaaattacccttttgttggggggggtggggcagtggtcccaataggagacaaaggagagtgattgattttcttcctccaatagttggtttcaaatccttttgaacacgttcgacaaaagcagtggagaagaggaagacctggagcaataaaagacaaatgcaacattttaaggcaatggtttcacatggttacatatcaaaacatcccaattctttagtgctgatcatcgaggagctagaacattccatttgcttgtgtgcgtgcgtgcgtgtgtgtgtgtgtgtgtgtattgagatttacccagactggtttgggcaagcagactgttctaaaatat

SEQ ID NO: 163328 - DNA, 1782 bp, Homo sapiens
  Payload ID: 12179
  Gene Symbol: PAX3
  Gene Name: paired box 3
  Uniprot ID: P23760
  ENST ID: ENST00000409551
  CDS Start-End: 281-1732
agtcgctggaacatttgcccagactcgtaccaaacttttccgccctgggctcgggatcctggactccggggcctccccgtcctcccctttcccgggttccagctccggcctctggactaggaaccgacagcccccctccccgcgtccctccctctctctccagccgttttggggaggggctctccacgctccggatagttcccgagggtcatccgcgccgcactcgcctttccgtttcgccttcacctggatataatttccgagcgaagctgcccccaggatgaccacgctggccggcgctgtgcccaggatgatgcggccgggcccggggcagaactacccgcgtagcgggttcccgctggaagtgtccactcccctcggccagggccgcgtcaaccagctcggcggtgtttttatcaacggcaggccgctgcccaaccacatccgccacaagatcgtggagatggcccaccacggcatccggccctgcgtcatctcgcgccagctgcgcgtgtcccacggctgcgtctccaagatcctgtgcaggtaccaggagactggctccatacgtcctggtgccatcggcggcagcaagcccaaggtgacaacgcctgacgtggagaagaaaattgaggaatacaaaagagagaacccgggcatgttcagctgggaaatccgagacaaattactcaaggacgcggtctgtgatcgaaacaccgtgccgtcagtgagttccatcagccgcatcctgagaagtaaattcgggaaaggtgaagaggaggaggccgacttggagaggaaggaggcagaggaaagcgagaagaaggccaaacacagcatcgacggcatcctgagcgagcgagcctcagcaccccaatcagatgaaggctctgatattgactctgaaccagatttaccactaaagaggaaacagcgcagaagccgaaccaccttcacagcagaacagctggaggaactggagcgtgcttttgagagaactcattaccctgacatttatactagggaggaactggcccagagggcgaagctcaccgaggcccgagtacaggtctggtttagcaaccgccgtgcaagatggaggaagcaagctggggccaatcaactgatggctttcaaccatctcattcccggggggttccctcccactgccatgccgaccttgccaacgtaccagctgtcggagacctcttaccagcccacatctattccacaagctgtgtcagatcccagcagcaccgttcacagacctcaaccgcttcctccaagcactgtacaccaaagcacgattccttccaacccagacagcagctctgcctactgcctccccagcaccaggcatggattttccagctatacagacagctttgtgcctccgtcggggccctccaaccccatgaaccccaccattggcaatggcctctcacctcaggtaatgggactcctgaccaaccacggtggggtacctcatcagccccagactgattacgcgctctcccctctcaccgggggtctggaacctaccaccacggtgtcggccagctgcagtcagagactagaccatatgaagagcttggacagtctgccaacatctcagtcctactgtccacccacctatagcaccacaggctacagtatggaccctgtcacaggctaccaatatgggcagtatggacaaagtgcctttcattatctcaagccagatatcgcgtaagtgaactgtccacttggagctaaaactggccctgtttctggtcttcgcag

SEQ ID NO: 163329 - DNA, 1254 bp, Homo sapiens
  Payload ID: 12179
  Gene Symbol: PAX3
  Gene Name: paired box 3
  Uniprot ID: P23760
  ENST ID: ENST00000409828
  CDS Start-End: 132-779
ccctctctctccagccgttttggggaggggctctccacgctccggatagttcccgagggtcatccgcgccgcactcgcctttccgtttcgccttcacctggatataatttccgagcgaagctgcccccaggatgaccacgctggccggcgctgtgcccaggatgatgcggccgggcccggggcagaactacccgcgtagcgggttcccgctggaagtgtccactcccctcggccagggccgcgtcaaccagctcggcggtgtttttatcaacggcaggccgctgcccaaccacatccgccacaagatcgtggagatggcccaccacggcatccggccctgcgtcatctcgcgccagctgcgcgtgtcccacggctgcgtctccaagatcctgtgcaggtaccaggagactggctccatacgtcctggtgccatcggcggcagcaagcccaagcaggtgacaacgcctgacgtggagaagaaaattgaggaatacaaaagagagaacccgggcatgttcagctgggaaatccgagacaaattactcaaggacgcggtctgtgatcgaaacaccgtgccgtcagtgagttccatcagccgcatcctgagaagtaaattcgggaaaggtgaagaggaggaggccgacttggagaggaaggaggcagaggaaagcgagaagaaggccaaacacagcatcgacggcatcctgagcgagcgaggtaagcggtggcgccttgggcggcgcacttgctgggtgacttggagggcatcggctagctgacattggtgatctgacggcagccaagcccagctcggatcaaggtcccttcatgcgcggtgtctctgcgcctgagtaacgacatggaactgaaagaccagagggacactaggaatcaaaacaaacatttctattctgcttagtttttctgttttgtaaatctttctttcttaaccactttcagcccctgggattctagaactgtgaattgtgctctgttgtagggggcaggggaagctctcactctgttgccattaaatgtatgagactgggcatctctgagcaattgtagggccggggatagagggtacttgaatcttcagaagttgaagtagcttttatgccctcaggaaaggccctggtctccggagtttcctcgcattaaaggagagagagagagagtactcttttgggcaacggccctccaaaattgcccccacattggctgccttataaatatgtctgtgtgttgactggt

SEQ ID NO: 163330 - DNA, 2010 bp, Homo sapiens
  Payload ID: 12180
  Gene Symbol: PAX4
  Gene Name: paired box 4
  Uniprot ID: O43316
  ENST ID: ENST00000341640
  CDS Start-End: 207-1238
caaagactcacccgtgagccagctctcaaagaaagcagcttgcgttgacagcctgggggcagcaaggatgcagtctcccaggagaggatgcactcggtggtgggaagccaggctggaggggcctgagtgaccctctccacaggcgggcagggcagtgggagaggtggtgtgtggatacctctgtctcacgcccagggatcagcagcatgaaccagcttggggggctctttgtgaatggccggcccctgcctctggatacccggcagcagattgtgcggctagcagtcagtggaatgcggccctgtgacatctcacggatccttaaggtatctaatggctgtgtgagcaagatcctagggcgttactaccgcacaggtgtcttggagccaaagggcattgggggaagcaagccacggctggctacaccccctgtggtggctcgaattgcccagctgaagggtgagtgtccagccctctttgcctgggaaatccaacgccagctttgtgctgaagggctttgcacccaggacaagactcccagtgtctcctccatcaaccgagtcctgcgggcattacaggaggaccagggactaccgtgcacacggctcaggtcaccagctgttttggctccagctgtcctcactccccatagtggctctgagactccccggggtacccacccagggaccggccaccggaatcggactatcttctccccaagccaagcagaggcactggagaaagagttccagcgtgggcagtatcctgattcagtggcccgtggaaagctggctactgccacctctctgcctgaggacacggtgagggtctggttttccaacagaagagccaaatggcgtcggcaagagaagctcaagtgggaaatgcagctgccaggtgcttcccaggggctgactgtaccaagggttgccccaggaatcatctctgcacagcagtcccctggcagtgtgcccacagcagccctgcctgccctggaaccactgggtccctcctgctatcagctgtgctgggcaacagcaccagaaaggtgtctgagtgacaccccacctaaagcctgtctcaagccctgctggggccacttgcccccacagccgaattccctggactcaggactgctttgccttccttgcccttcctcccactgtcacctggccagtcttagtggctctcaggccctgctctggcctggctgcccactactgtatggcttggaatgaggcaggagtgggaaggagatggcatagagaagatctaataccatcctgcccattgtccttaccgtcctgcccatacagactgtggctccttcctccttcctgtgattgctccctcctgtgtggacgttgcctggccctgcctcgatgcctctctggcgcatcacctgattggaggggctggtaaagcaacacccacccacttctcacactagccttaagaggcctccactcagcagtaataaaagctgtttttattagcagtagttctgttgtccatcatgttttccctatgagcacccctatgcccactctaatattcaacaattatagacaatttgccctatcatttatttacatctatgtatctaccatctaatctatgcatgtatgtaggcaatacatgtatctaaacaatgtatttgtcaatgcatcaatttacctactctatgtatgcatctatatgtgtattatgtatgcgtgcatgcgtgcgcgcacacacacacacacacacacacactgacattatatcatggcattttattcctaaatcttccagcatgcatccccaaaaaacaagaaacttgtcttacataatcacaataatatatccacatctaagaaaatttactgtaacttcttaatctaagaaaattatgtatttttgtcatatgtattttgtcatatgtattttgtatttgcatatgtattttgtatttgcatatgtatttttgtcatagcagcaaacagagtgaaatgccatttttcatattct

SEQ ID NO: 163331 - DNA, 1085 bp, Homo sapiens
  Payload ID: 12180
  Gene Symbol: PAX4
  Gene Name: paired box 4
  ENST ID: ENST00000338516
  CDS Start-End: 1-1050
atgcatcaggacgggatcagcagcatgaaccagcttggggggctctttgtgaatggccggcccctgcctctggatacccggcagcagattgtgcggctagcagtcagtggaatgcggccctgtgacatctcacggatccttaaggtatctaatggctgtgtgagcaagatcctagggcgttactaccgcacaggtgtcttggagccaaagggcattgggggaagcaagccacggctggctacaccccctgtggtggctcgaattgcccagctgaagggtgagtgtccagccctctttgcctgggaaatccaacgccagctttgtgctgaagggctttgcacccaggacaagactcccagtgtctcctccatcaaccgagtcctgcgggcattacaggaggaccagggactaccgtgcacacggctcaggtcaccagctgttttggctccagctgtcctcactccccatagtggctctgagactccccggggtacccacccagggaccggccaccggaatcggactatcttctccccaagccaagcagaggcactggagaaagagttccagcgtgggcagtatcctgattcagtggcccgtggaaagctggctactgccacctctctgcctgaggacacggtgagggtctggttttccaacagaagagccaaatggcgtcggcaagagaagctcaagtgggaaatgcagctgccaggtgcttcccaggggctgactgtaccaagggttgccccaggaatcatctctgcacagcagtcccctggcagtgtgcccacagcagccctgcctgccctggaaccactgggtccctcctgctatcagctgtgctgggcaacagcaccagaaaggtgtctgagtgacaccccacctaaagcctgtctcaagccctgctgggactgtggctccttcctccttcctgtgattgctccctcctgtgtggacgttgcctggccctgcctcgatgcctctctggcgcatcacctgattggaggggctggtaaagcaacacccacccacttctcacacccttaagaggcctccactcagcagtaataaaagctgttttt

SEQ ID NO: 163332 - DNA, 1088 bp, Homo sapiens
  Payload ID: 12180
  Gene Symbol: PAX4
  Gene Name: paired box 4
  ENST ID: ENST00000378740
  CDS Start-End: 25-1047
atgcatcaggacgggatcagcagcatgaaccagcttggggggctctttgtgaatggccggcccctgcctctggatacccggcagcagattgtgcggctagcagtcagtggaatgcggccctgtgacatctcacggatccttaaggtatctaatggctgtgtgagcaagatcctagggcgttactaccgcacaggtgtcttggagccaaagggcattgggggaagcaagccacggctggctacaccccctgtggtggctcgaattgcccagctgaagggtgagtgtccagccctctttgcctgggaaatccaacgccagctttgtgctgaagggctttgcacccaggacaagactcccagtgtctcctccatcaaccgagtcctgcgggcattacaggaggaccagggactaccgtgcacacggctcaggtcaccagctgttttggctccagctgtcctcactccccatagtggctctgagactccccggggtacccacccagggaccggccaccggaatcggactatcttctccccaagccaagcagaggcactggagaaagagttccagcgtgggcagtatcctgattcagtggcccgtggaaagctggctactgccacctctctgcctgaggacacggtgagggtctggttttccaacagaagagccaaatggcgtcggcaagagaagctcaagtgggaaatgcagctgccaggtgcttcccaggggctgactgtaccaagggttgccccaggaatcatctctgcacagcagtcccctggcagtgtgcccacagcagccctgcctgccctggaaccactgggtccctcctgctatcagctgtgctgggcaacagcaccagaaaggtgtctgagtgacaccccacctaaagcctgtctcaagccctgctgggactgtggctccttcctccttcctgtgattgctccctcctgtgtggacgttgcctggccctgcctcgatgcctctctggcgcatcacctgattggaggggctggtaaagcaacacccacccacttctcacactagccttaagaggcctccactcagcagtaataaaagctgttttt

SEQ ID NO: 163333 - DNA, 1613 bp, Homo sapiens
  Payload ID: 12180
  Gene Symbol: PAX4
  Gene Name: paired box 4
  ENST ID: ENST00000463946
  CDS Start-End: 462-1487
gggcagcaaggatgcagtctcccaggagaggatgcactcggtggtgggaagccaggctggaggggcctgagtgaccctctccacaggcgggcagggcagtgggagaggtggtgtgtggatacctctgtctcacgcccagggatcagcagcatgaaccagcttggggggctctttgtgaatggccggcccctgcctctggatacccggcagcagattgtgcggctagcagtcagtggaatgcggccctgtgacatctcacggatccttaaggtaatgggccagcacctttacccagtgatggggacaggaagcagggagaaagggctcctctgaaggcaagagcctggggctgttgcaggctctgagggcttctgggacttgggtcacttcctgggagatcctctcggaggttgaaaaggggagcctcaggccctcaaaggtgaggctggactcccgacttcatggcctggtccagtaagtcttggctttgtcttatagcctcctcctgtcccagggacactctccttccttctgcccatcatgcctcacctgtccctgcttctcacctgactcaggtatctaatggctgtgtgagcaagatcctagggcgttactaccgcacaggtgtcttggagccaaagggcattgggggaagcaagccacggctggctacaccccctgtggtggctcgaattgcccagctgaagggtgagtgtccagccctctttgcctgggaaatccaacgccagctttgtgctgaagggctttgcacccaggacaagactcccagtgtctcctccatcaaccgagtcctgcgggcattacaggaggaccagggactaccgtgcacacggctcaggtcaccagctgttttggctccagctgtcctcactccccatagtggctctgagactccccggggtacccacccagggaccggccaccggaatcggactatcttctccccaagccaagcagaggcactggagaaagagttccagcgtgggcagtatcctgattcagtggcccgtggaaagctggctactgccacctctctgcctgaggacacggtgagggtctggttttccaacagaagagccaaatggcgtcggcaagagaagctcaagtgggaaatgcagctgccaggtgcttcccaggggctgactgtaccaagggttgccccaggaatcatctctgcacagcagtcccctggcagtgtgcccacagcagccctgcctgccctggaaccactgggtccctcctgctatcagctgtgctgggcaacagcaccagaaaggtgtctgagtgacaccccacctaaagcctgtctcaagccctgctggggccacttgcccccacagccgaattccctggactcaggactgctttgccttccttgcccttcctcccactgtcacctggccagtcttagtggctctcaggccctgctctggcctggctgcccactactgtatggcttggaatgaggcaggagtgggaaggagatggcatagagaagatctaataccatcctgcccattgtccttaccgtcctgcccatacagactgtggctccttcctccttcctgtgattgctccctcctgtgtggacg

SEQ ID NO: 163334 - DNA, 1565 bp, Homo sapiens
  Payload ID: 12180
  Gene Symbol: PAX4
  Gene Name: paired box 4
  ENST ID: ENST00000483494
  CDS Start-End: 462-1235
gggcagcaaggatgcagtctcccaggagaggatgcactcggtggtgggaagccaggctggaggggcctgagtgaccctctccacaggcgggcagggcagtgggagaggtggtgtgtggatacctctgtctcacgcccagggatcagcagcatgaaccagcttggggggctctttgtgaatggccggcccctgcctctggatacccggcagcagattgtgcggctagcagtcagtggaatgcggccctgtgacatctcacggatccttaaggtaatgggccagcacctttacccagtgatggggacaggaagcagggagaaagggctcctctgaaggcaagagcctggggctgttgcaggctctgagggcttctgggacttgggtcacttcctgggagatcctctcggaggttgaaaaggggagcctcaggccctcaaaggtgaggctggactcccgacttcatggcctggtccagtaagtcttggctttgtcttatagcctcctcctgtcccagggacactctccttccttctgcccatcatgcctcacctgtccctgcttctcacctgactcaggtatctaatggctgtgtgagcaagatcctagggcgttactaccgcacaggtgtcttggagccaaagggcattgggggaagcaagccacggctggctacaccccctgtggtggctcgaattgcccagctgaagggtgagtgtccagccctctttgcctgggaaatccaacgccagctttgtgctgaagggctttgcacccaggacaagactcccagtgtctcctccatcaaccgagtcctgcgggcattacaggaggaccagggactaccgtgcacacggctcaggtcaccagctgttttggctccagctgtcctcactccccatagtggctctgagactccccggggtacccacccagggaccggccaccggaatcggactatcttctccccaagccaagcagaggcactggagaaagagttccagcgtgggcagtatcctgattcagtggcccgtggaaagctggctactgccacctctctgcctgaggacacggtgagggtctggttttccaacagaagagccaaatggcgtcggcaagagaagctcaagtgggaaatgcagctgccaggtgcttcccaggggctgactgtaccaagggttgccccaggaatcatctctgcacagggccccacagtgttcatgtcaagaaagtactaacccaaagtctactatgtgaatggtgccctctggagttgtgcaggatactacttgggtggcaggcagctctggggtcccggcgttctctacaggaggcatcactggaagctaaggttcttctcttgctttttttttttagcagtcccctggcagtgtgcccacagcagccctgcctgccctggaaccactgggtccctcctgctatcagctgtgctgggcaacagcaccagaaaggtgtctgagtgacaccccacctaaagcctgtctcaagccctgctgggactgtggctccttcctccttcctgtgattgctccctcctgtgtggacgt

SEQ ID NO: 163335 - DNA, 1235 bp, Homo sapiens
  Payload ID: 12180
  Gene Symbol: PAX4
  Gene Name: paired box 4
  ENST ID: ENST00000611453
  CDS Start-End: 462-1235
gggcagcaaggatgcagtctcccaggagaggatgcactcggtggtgggaagccaggctggaggggcctgagtgaccctctccacaggcgggcagggcagtgggagaggtggtgtgtggatacctctgtctcacgcccagggatcagcagcatgaaccagcttggggggctctttgtgaatggccggcccctgcctctggatacccggcagcagattgtgcggctagcagtcagtggaatgcggccctgtgacatctcacggatccttaaggtaatgggccagcacctttacccagtgatggggacaggaagcagggagaaagggctcctctgaaggcaagagcctggggctgttgcaggctctgagggcttctgggacttgggtcacttcctgggagatcctctcggaggttgaaaaggggagcctcaggccctcaaaggtgaggctggactcccgacttcatggcctggtccagtaagtcttggctttgtcttatagcctcctcctgtcccagggacactctccttccttctgcccatcatgcctcacctgtccctgcttctcacctgactcaggtatctaatggctgtgtgagcaagatcctagggcgttactaccgcacaggtgtcttggagccaaagggcattgggggaagcaagccacggctggctacaccccctgtggtggctcgaattgcccagctgaagggtgagtgtccagccctctttgcctgggaaatccaacgccagctttgtgctgaagggctttgcacccaggacaagactcccagtgtctcctccatcaaccgagtcctgcgggcattacaggaggaccagggactaccgtgcacacggctcaggtcaccagctgttttggctccagctgtcctcactccccatagtggctctgagactccccggggtacccacccagggaccggccaccggaatcggactatcttctccccaagccaagcagaggcactggagaaagagttccagcgtgggcagtatcctgattcagtggcccgtggaaagctggctactgccacctctctgcctgaggacacggtgagggtctggttttccaacagaagagccaaatggcgtcggcaagagaagctcaagtgggaaatgcagctgccaggtgcttcccaggggctgactgtaccaagggttgccccaggaatcatctctgcacagggccccacagtgttcatgtcaagaaagtactaa

SEQ ID NO: 163336 - DNA, 8615 bp, Homo sapiens
  Payload ID: 12181
  Gene Symbol: PAX5
  Gene Name: paired box 5
  Uniprot ID: Q02548
  ENST ID: ENST00000358127
  CDS Start-End: 155-1330
agctcggcgggggagcggaaggcttgaattattccgacctgtgagcggcccctggcaccaaaaaaaaaaaaaaaaaaaaaaaaaaaagaaaaaaaaaggcacaaaaaagtggaaacttttccctgtccattccatcaagtcctgaaaaatcaaaatggatttagagaaaaattatccgactcctcggaccagcaggacaggacatggaggagtgaatcagcttgggggggtttttgtgaatggacggccactcccggatgtagtccgccagaggatagtggaacttgctcatcaaggtgtcaggccctgcgacatctccaggcagcttcgggtcagccatggttgtgtcagcaaaattcttggcaggtattatgagacaggaagcatcaagcctggggtaattggaggatccaaaccaaaggtcgccacacccaaagtggtggaaaaaatcgctgaatataaacgccaaaatcccaccatgtttgcctgggagatcagggaccggctgctggcagagcgggtgtgtgacaatgacaccgtgcctagcgtcagttccatcaacaggatcatccggacaaaagtacagcagccacccaaccaaccagtcccagcttccagtcacagcatagtgtccactggctccgtgacgcaggtgtcctcggtgagcacggattcggccggctcgtcgtactccatcagcggcatcctgggcatcacgtcccccagcgccgacaccaacaagcgcaagagagacgaaggtattcaggagtctccggtgccgaacggccactcgcttccgggcagagacttcctccggaagcagatgcggggagacttgttcacacagcagcagctggaggtgctggaccgcgtgtttgagaggcagcactactcagacatcttcaccaccacagagcccatcaagcccgagcagaccacagagtattcagccatggcctcgctggctggtgggctggacgacatgaaggccaatctggccagccccacccctgctgacatcgggagcagtgtgccaggcccgcagtcctaccccattgtgacaggccgtgacttggcgagcacgaccctccccgggtaccctccacacgtcccccccgctggacagggcagctactcagcaccgacgctgacagggatggtgcctgggagtgagttttccgggagtccctacagccaccctcagtattcctcgtacaacgactcctggaggttccccaacccggggctgcttggctccccctactattatagcgctgccgcccgaggagccgccccacctgcagccgccactgcctatgaccgtcactgacccttggagccaggcgggcaccaaacactgatggcacctattgagggtgacagccacccagccctcctgaagatagccagagagcccatgagaccgtcccccagcatcccccacttgcctgaagctcccctcttcctctcttcctccagggactctggggccctttggtggggccgttggacttctggatgcttgtctatttctaaaagccaatctatgagcttctcccgatggccactgggtctctgcaaaccaatagactgtcctgcaaataaccgcagccccagcccagcctgcctgtcctccagctgtctgactatccatccatcataaccaccccagcctgggaaggagagcttgcttttgttgcttcagcagcacccatgtaaataccttcttgcttttctgtgggcctgaaggtccgactgagaagactgctccacccatgatgcatctcgcactcttggtgcatcaccggacatcttagacctatggcagagcatcctctctgccctgggtgaccctggcaggtgcgctcagagctgtcctcaagatggaggatgctgcccttgggccccagcctcctgctcatccctccttctttagtatctttacgaggagtctcactgggctggttgtgctgcaggctccccctgaggcccctctccaagaggagcacactttggggagatgtcctggtttcctgcctccatttctctgggaccgatgcagtatcagcagctcttttccagatcaaagaactcaaagaaaactgtctgggagattcctcagctacttttccgaagcagaatgtcatccgaggtattgattacattgtggactttgaatgtgagggctggatgggacgcaggagatcatctgatcccagccaaggaggggcctgaggctctccctactccctcagcccctggaacggtgttttctgaggcatgcccaggttcaggtcacttcggacacctgccatggacacttcacccaccctccaggaccccagcaagtggattctgggcaagcctgttccggtgatgtagacaataattaacacagaggactttcccccacacccagatcacaaacagcctacagccagaacttctgagcatcctctcggggcagaccctccccgtcctcgtggagcttagcaggcagctgggcatggaggtgctggggctggggcagatgcctaatttcgcacaatgcatgcccacctgttgatctaaggggccgcgatggtcagggccacggccaagggccacgggaacttggagagggagcttggagaactcactgtgggctagggtggtcagaggaagccagcagggaagatctgggggacagaggaaggcctcctgagggaggggcaggagagcagtgaggagctgctgtgtgacctgggagtgattttgacatgggggtgccaggtgccatcatctctttacctggggccttaattccttgcatagtctctcttgtcaagtcagaacagccaggtagagcccttgtccaaacctgggctgaatgacagtgatgagagggggcttggccttcttaggtgacaatgtcccccatatctgtatgtcaccaggatggcagagagccagggcagagagagactggacttgggatcagcaggccaggcaggtcttgtcctggtcctggccacatgtctttgctgtgggacctcagacaaaaccctgcacctctttgagccttggctgccttggtgcagcagggtcatctgtagggccaccccacagctctttccttcccctcctctctccagggagccggggctgtgagaggatcatctggggcaggccctccacttccaagcaagcagatgggggtgggcacctgaggcccaataatatttggaccaagtgggaaacaagaacactcggaggggcgggaatcagaagagcctggaaaaagacctagcccaacttcccttgtgggaaactgaggcccagcttggggaaggccaggaccatgcagggagaaaaagcagacttcctctggccaccgctaagtattttgttccctaagtcccccacagggtggtggaacagaagagaaaactaaggctcagcaaggtggagtcctcaagcagtgactggtgggggtggggctgggactcgggctcctgacccccaacccatggtgttccctgtcaccctggtctatccacatctcctattcctgaggagagttgacagtaagagcagtgagagatggttctgggccccatgccctagacaatcagtctgtaagaactgccaaggaagcctggtcacccaggccagggatggagcccagcgagctcacagcaggcacatgcacccccgcccccacccagaacctgcggggcaaagaagggaggtagttggggccagagtccacctccaggagccagggtgagctggctgcagcttccacctgtcaggtaaggtaggagaaggtatgttacctggcatctctctccctgcctccctccatttagcaggaagtggtggggtcaggggtcttcagcacagacttcttgagcctctgccccctgtcacccttcttttggaatgatgtgtacccacatctttggatcctgccctccttgtggttccaggctgttgggaggaggtcagcctcccctgaaccagctgcctgaggcatgcagcatccttcctcggcaaagcccacctggctcacagcggccccctctccccatcctgttcctcttcttgccctgtaatgagctccccccatacctttcctccctcacctgaggctttgctggtcctcagattggttttgtatttgtgagacaaccacttgactcctgggctgccaggcggaagcacaagcgcacatggatgcacacggatgttctcacacacacacgcccgctctcaccaattcacagcacctcgtggtccagcggagctgcctgggagcttggtgaggatggctccaaaggacacaagccgttgagtagatgccagagaattctgaatggaaaacacaagtccggggcctcaccagcatcgtggcagaaggcctggggcatttctccatgggccttcttccctgtgttcgagctctgacttttggaaaaggacattgtggattttatgaaaatttctcataccatcagtctagctccaacctagaaaaattggatgatatatcaaacccaacatccctttcccaaggcaccttagttaaggctagcccttccataactgacattgtacggtgctttgcaatcctcaaccactctgtggagcaaagagcatgatgcctactttatagacggggaaattgacatttggggctctcacggcaacatagaggcgaagtgaattctcagatctccaggccccattctctctccaccgagttgtgctcctgtcatgggagtgtatggcttaaagacactcccccacccccattccctagaaatcccccagacccacaatcaggcaagaaagaacagggacccagaggctggcctgacctaggggcctgcaggttggcggctttgtttcctaagaacattgaaacctgcggagtctttgaccaaatccacaacagtgcttctgaggtttcatccagactctttcccagctgtccctgaggttcagagggtatcagagtcaattcaaggccatgccataatccctgaccaggcctggacatgggtccagccctgactccaggggtccaggtgccaaggtcatgtgctgtcccccacttccctttctttgccttcgcactttggaacaggctccaggcctggctgtgacagtatgcaggagtgcccaagccagggccaccagggtgtccacagcccctggaaacacagatcacaatctcaagtcccctgaatgaactgcttcctgggtgaacggggtggtgtagccttgccactcgggcagcgcaccagacagtacggtgcagcagtgcccgagatgcccagaagtgtgcctgcccccctgagtggcattcaagtatgaaaacttgtaaaattttctgtcggcctaaagaaaaatgtccatgggccaaacttgacccactgggcaccagcctgtgagccccaatgcctgtcaattgccccctttctcattcacctcctgtcctttgttgcagatttggaggagatgggagcccagagaggtgagagatgtgcttcagggtgtccagcaaggcaggggtagaaacgggcacgcccagagcctgccactctcccaggcctcatcttgggctcttgcaagtcttgcgctttgaagatggagttgggtggaaggtcagaggcgctggggacgggattggggagctgctgggttttcaggggaggtcagtgctgcttgggcacctttcacatgtgcagggaagagactcagatgtggccacagggcactgaggggtgaaatccatttaccagaagtcacgctccagaacgactgcccagccttggcagccagtggctccagccaccccctcctcatgacattcagccagaattgagctccaagccagggaagcaaatcttaaaaaccaaccaagcaccctgacacagccctagaaacacgatgagtctgaaatacagcttcccaggaggggagtctaagatacagcttcccgggagggtggaaaccaactcctgccccacggccaggccaggcccaggcaggcatgggtggatcccacagggctctgagctagaccggctccacggtggccccactacgaggccagttctgcagtcttggccttgtcacccatcgagaggctgctctgatggttcccagccacacaccagctctcctggggaaactatttctttcgttcttttggcctcggagaggtccgaggcaagtacatttcttaaaaggtaataaaatgcattattggaaagttggacagtcaggccacgactcctagcccacggcgtgccccacctcccagcagccccttcagccccttgcccctgttgccccaaacctcagggttccctcttgcatattcatgggggaaccacagtgctgatgtgtacttccccactgtcagctcggctgcacctcgtgtggcgccaggtcccaagggcctctgcagaggccaggctgtgagccccttgcctgcctgctcccctgatgaggcaacagcttctctgaaatgagctgccggccaggagcaggcaggcaccagcctgtctttccttttctggtaattcctcagcactgaggctccgttcctgggcaccccaggattgaagggaacctcagaatcatgtcactgccattctagagtttcaatccaaggggtcccctttagctcatctccaagatgggtaaacgtagccaccattcagaaagcccagaaattcttgttcccacatcttagacccctgagcaacacaaggagaaaatgcagctgcttacctattaatatctactgagggacaatcagcaaagcctcaaaggagtcgtctcaggtagggtacttggcctgtggcaggagagacagaggcacaaacccacccacccatcagcttccggtggctgatcggggcccagggagggaagcaggtgaaacagcagggtgggggtgacttggcagtcgtgcatctcctccccgactctgaggcctggcaggaggaggccacaccagcctcacctgccctgacccccgccccccaccctgtgaccctgtggctatggccgctggtcgcccttgtccccaaaatcaccatgcctgtggccacgtccctcatcttctccaaaagcatcattaagaacaagtgattttggatgatggatttttgatttacaaacggcgcatttcccttggagtggaacagaaaggaaaccatttaatggcgcccttcttttcaagcatgaatacattttaatgaaactattttattgtatttgaggaaatggagagttgaacattccaaccaatcaatagccaattaattgctataaagctaaaaagaaaataaataaatcctgagtctattttaaacactgcaaaaagttcagagcctcagaatctggccttcccctccataaggtgcacgagcatgtaaacacacacacacacacacacacacacacacacacactcactcactcccctacacctcagacatacttgaaactcagaaacagcactgagtctccccatgccaattcttgcctgctgtcttcgacttgggtcagagaaggtgagcagacccggcagcagcctgtcccggggctcaggaagaggcaggcccatcccctggccccaagcacccagcacaacagagggtggcgggcagtgagggcctggcgttgcctgggccccacttctcagccccagctgctgggcctccaaggttgggctgaggatggagttttggctctgggtttgccctgactcctgctggaagacgctgccctggtttttcaccctctagtggccttggacattgagtatttgtagaaatgcagattacattgcaaatggaaacctttgccaggaagacacatgcattttgcttttaattctttgagacatttgattttgtcttagggactgacctttcagcatcaaagaaatacatatctactgtatccgccaaagtttgtgatgcctgcatagacgcttacttgtaaaaaaaaaaaaatacaaaaaaatacaaaaaaaccaacaacaaaaaccacaattgaattgcctttgaaagtgggagatgatctgtctccaacggattgaaaaaaaaaaatgcttcttaaaaaatgtgtatgttttgtattctttttttctagtagaaaataactgacttgaaatattggtggtttttttcttagtgacgtgtgttgcttttgtgtgtaataatatttgaatgtaattacagcagtgccaatttgccaaagatgttggacatatttttcttttttggggaggagggcagggctaggggtgggacttgggagaaaacaggggtggggttttggtttaattttttttttacttttttttccttgtcaaacctgaaatttgtggcttccttttaagttaaatggttgactgcaacacctttattttagattagttggagaaacatgcaataagattggcgtagtttcaatatctgtgtgtcttttcatgagtggctgttacttgtgaagaattgattttatgtaacctttatgtgagataattatttgtaaatatttgccataattttattggttcctaaaataaaagtaattttttaagttca

SEQ ID NO: 163337 - DNA, 1444 bp, Homo sapiens
  Payload ID: 12181
  Gene Symbol: PAX5
  Gene Name: paired box 5
  Uniprot ID: Q02548
  ENST ID: ENST00000377840
  CDS Start-End: 11-877
aaaaatcaaaatggatttagagaaaaattatccgactcctcggaccagcaggacaggacatggaggagtgaatcagcttgggggggtttttgtgaatggacggccactcccggatgtagtccgccagaggatagtggaacttgctcatcaaggtgtcaggccctgcgacatctccaggcagcttcgggtcagccatggttgtgtcagcaaaattcttggcaggtattatgagacaggaagcatcaagcctggggtaattggaggatccaaaccaaaggtcgccacacccaaagtggtggaaaaaatcgctgaatataaacgccaaaatcccaccatgtttgcctgggagatcagggaccggctgctggcagagcgggtgtgtgacaatgacaccgtgcctagcgtcagttccatcaacaggatcatccggacaaaagtacagcagccacccaaccaaccagtcccagcttccagtcacagcatagtgtccactggctccgtgacgcaggtgtcctcggtgagcacggattcggccggctcgtcgtactccatcagcggcatcctgggcatcacgtcccccagcgccgacaccaacaagcgcaagagagacgaaggtattcaggagtctccggtgccgaacggccactcgcttccgggcagagacttcctccggaagcagatgcggggagacttgttcacacagcagcagctggaggtgctggaccgcgtgtttgagaggcagcactactcagacatcttcaccaccacagagcccatcaagcccgagcaggccgtgacttggcgagcacgaccctccccgggtaccctccacacgtcccccccgctggacagggcagctactcagcaccgacgctgacagggatggtgcctgggagtgagttttccgggagtccctacagccaccctcagtattcctcgtacaacgactcctggaggttccccaacccggggctgcttggctccccctactattatagcgctgccgcccgaggagccgccccacctgcagccgccactgcctatgaccgtcactgacccttggagccaggcgggcaccaaacactgatggcacctattgagggtgacagccacccagccctcctgaagatagccagagagcccatgagaccgtcccccagcatcccccacttgcctgaagctcccctcttcctctcttcctccagggactctggggccctttggtggggccgttggacttctggatgcttgtctatttctaaaagccaatctatgagcttctcccgatggccactgggtctctgcaaaccaatagactgtcctgcaaataaccgcagccccagcccagcctgcctgtcctccagctgtctgactatccatccatcataaccaccccagcctgggaaggagagcttgcttttgttgcttcagcagcacccatgta

SEQ ID NO: 163338 - DNA, 996 bp, Homo sapiens
  Payload ID: 12181
  Gene Symbol: PAX5
  Gene Name: paired box 5
  Uniprot ID: Q02548
  ENST ID: ENST00000377847
  CDS Start-End: 1-987
atggatttagagaaaaattatccgactcctcggaccagcaggacaggacatggaggagtgaatcagcttgggggggtttttgtgaatggacggccactcccggatgtagtccgccagaggatagtggaacttgctcatcaaggtgtcaggccctgcgacatctccaggcagcttcgggtcagccatggttgtgtcagcaaaattcttggcaggtattatgagacaggaagcatcaagcctggggtaattggaggatccaaaccaaaggtcgccacacccaaagtggtggaaaaaatcgctgaatataaacgccaaaatcccaccatgtttgcctgggagatcagggaccggctgctggcagagcgggtgtgtgacaatgacaccgtgcctagcgtcagttccatcaacaggatcatccggacaaaagtacagcagccacccaaccaaccagtcccagcttccagtcacagcatagtgtccactggctccgtgacgcaggtgtcctcggtgagcacggattcggccggctcgtcgtactccatcagcggcatcctgggcatcacgtcccccagcgccgacaccaacaagcgcaagagagacgaaggtattcaggagtctccggtgccgaacggccactcgcttccgggcagagacttcctccggaagcagatgcggggagacttgttcacacagcagcagctggaggtgctggaccgcgtgtttgagaggcagcactactcagacatcttcaccaccacagagcccatcaagcccgagcagaccacagagtattcagccatggcctcgctggctggtgggctggacgacatgaaggccaatctggccagccccacccctgctgacatcgggagcagtgtgccaggcccgcagtcctaccccattgtgacaggctccccctactattatagcgctgccgcccgaggagccgccccacctgcagccgccactgcctatgaccgtcactgacccttggag

SEQ ID NO: 163339 - DNA, 1472 bp, Homo sapiens
  Payload ID: 12181
  Gene Symbol: PAX5
  Gene Name: paired box 5
  Uniprot ID: Q02548
  ENST ID: ENST00000377852
  CDS Start-End: 11-1084
aaaaatcaaaatggatttagagaaaaattatccgactcctcggaccagcaggacaggacatggaggagtgaatcagcttgggggggtttttgtgaatggacggccactcccggatgtagtccgccagaggatagtggaacttgctcatcaaggtgtcaggccctgcgacatctccaggcagcttcgggtcagccatggttgtgtcagcaaaattcttggcaggtattatgagacaggaagcatcaagcctggggtaattggaggatccaaaccaaaggtcgccacacccaaagtggtggaaaaaatcgctgaatataaacgccaaaatcccaccatgtttgcctgggagatcagggaccggctgctggcagagcgggtgtgtgacaatgacaccgtgcctagcgtcagttccatcaacaggatcatccggacaaaagtacagcagccacccaaccaaccagtcccagcttccagtcacagcatagtgtccactggctccgtgacgcaggtgtcctcggtgagcacggattcggccggctcgtcgtactccatcagcggcatcctgggcatcacgtcccccagcgccgacaccaacaagcgcaagagagacgaaggtattcaggagtctccggtgccgaacggccactcgcttccgggcagagacttcctccggaagcagatgcggggagacttgttcacacagcagcagctggaggtgctggaccgcgtgtttgagaggcagcactactcagacatcttcaccaccacagagcccatcaagcccgagcagaccacagagtattcagccatggcctcgctggctggtgggctggacgacatgaaggccaatctggccagccccacccctgctgacatcgggagcagtgtgccaggcccgcagtcctaccccattgtgacagggagtgagttttccgggagtccctacagccaccctcagtattcctcgtacaacgactcctggaggttccccaacccggggctgcttggctccccctactattatagcgctgccgcccgaggagccgccccacctgcagccgccactgcctatgaccgtcactgacccttggagccaggcgggcaccaaacactgatggcacctattgagggtgacagccacccagccctcctgaagatagccagagagcccatgagaccgtcccccagcatcccccacttgcctgaagctcccctcttcctctcttcctccagggactctggggccctttggtggggccgttggacttctggatgcttgtctatttctaaaagccaatctatgagcttctcccgatggccactgggtctctgcaaaccaatagactgtcctgcaaataaccgcagccccagcccagcctgcctgtcctccagctgtctgactatccatccatcataaccaccccagcctgggaaggagagcttgcttttgttgcttcagcagcacccatgta

SEQ ID NO: 163340 - DNA, 1487 bp, Homo sapiens
  Payload ID: 12181
  Gene Symbol: PAX5
  Gene Name: paired box 5
  Uniprot ID: Q02548
  ENST ID: ENST00000377853
  CDS Start-End: 11-1099
aaaaatcaaaatggatttagagaaaaattatccgactcctcggaccagcaggacaggacatggaggagtgaatcagcttgggggggtttttgtgaatggacggccactcccggatgtagtccgccagaggatagtggaacttgctcatcaaggtgtcaggccctgcgacatctccaggcagcttcgggtcagccatggttgtgtcagcaaaattcttggcaggtattatgagacaggaagcatcaagcctggggtaattggaggatccaaaccaaaggtcgccacacccaaagtggtggaaaaaatcgctgaatataaacgccaaaatcccaccatgtttgcctgggagatcagggaccggctgctggcagagcgggtgtgtgacaatgacaccgtgcctagcgtcagttccatcaacaggatcatccggacaaaagtacagcagccacccaaccaaccagtcccagcttccagtcacagcatagtgtccactggctccgtgacgcaggtgtcctcggtgagcacggattcggccggctcgtcgtactccatcagcggcatcctgggcatcacgtcccccagcgccgacaccaacaagcgcaagagagacgaaggtattcaggagtctccggtgccgaacggccactcgcttccgggcagagacttcctccggaagcagatgcggggagacttgttcacacagcagcagctggaggtgctggaccgcgtgtttgagaggcagcactactcagacatcttcaccaccacagagcccatcaagcccgagcagaccacagagtattcagccatggcctcgctggctggtgggctggacgacatgaaggccaatctggccagccccacccctgctgacatcgggagcagtgtgccaggcccgcagtcctaccccattgtgacaggccgtgacttggcgagcacgaccctccccgggtaccctccacacgtcccccccgctggacagggcagctactcagcaccgacgctgacagggatggtgcctggctccccctactattatagcgctgccgcccgaggagccgccccacctgcagccgccactgcctatgaccgtcactgacccttggagccaggcgggcaccaaacactgatggcacctattgagggtgacagccacccagccctcctgaagatagccagagagcccatgagaccgtcccccagcatcccccacttgcctgaagctcccctcttcctctcttcctccagggactctggggccctttggtggggccgttggacttctggatgcttgtctatttctaaaagccaatctatgagcttctcccgatggccactgggtctctgcaaaccaatagactgtcctgcaaataaccgcagccccagcccagcctgcctgtcctccagctgtctgactatccatccatcataaccaccccagcctgggaaggagagcttgcttttgttgcttcagcagcacccatgta

SEQ ID NO: 163341 - DNA, 885 bp, Homo sapiens
  Payload ID: 12181
  Gene Symbol: PAX5
  Gene Name: paired box 5
  Uniprot ID: Q02548
  ENST ID: ENST00000446742
  CDS Start-End: 1-876
atggatttagagaaaaattatccgactcctcggaccagcaggacaggacatggaggagtgaatcagcttgggggggtttttgtgaatggacggccactcccggatgtagtccgccagaggatagtggaacttgctcatcaaggtgtcaggccctgcgacatctccaggcagcttcgggtcagccatggttgtgtcagcaaaattcttggcaggatcatccggacaaaagtacagcagccacccaaccaaccagtcccagcttccagtcacagcatagtgtccactggctccgtgacgcaggtgtcctcggtgagcacggattcggccggctcgtcgtactccatcagcggcatcctgggcatcacgtcccccagcgccgacaccaacaagcgcaagagagacgaaggtattcaggagtctccggtgccgaacggccactcgcttccgggcagagacttcctccggaagcagatgcggggagacttgttcacacagcagcagctggaggtgctggaccgcgtgtttgagaggcagcactactcagacatcttcaccaccacagagcccatcaagcccgagcagaccacagagtattcagccatggcctcgctggctggtgggctggacgacatgaaggccaatctggccagccccacccctgctgacatcgggagcagtgtgccaggcccgcagtcctaccccattgtgacagggagtgagttttccgggagtccctacagccaccctcagtattcctcgtacaacgactcctggaggttccccaacccggggctgcttggctccccctactattatagcgctgccgcccgaggagccgccccacctgcagccgccactgcctatgaccgtcactgacccttggag

SEQ ID NO: 163342 - DNA, 1056 bp, Homo sapiens
  Payload ID: 12181
  Gene Symbol: PAX5
  Gene Name: paired box 5
  Uniprot ID: Q02548
  ENST ID: ENST00000414447
  CDS Start-End: 1-1047
atggatttagagaaaaattatccgactcctcggaccagcaggacaggacatggaggagtgaatcagcttgggggggtttttgtgaatggacggccactcccggatgtagtccgccagaggatagtggaacttgctcatcaaggtgtcaggccctgcgacatctccaggcagcttcgggtcagccatggttgtgtcagcaaaattcttggcaggtattatgagacaggaagcatcaagcctggggtaattggaggatccaaaccaaaggtcgccacacccaaagtggtggaaaaaatcgctgaatataaacgccaaaatcccaccatgtttgcctgggagatcagggaccggctgctggcagagcgggtgtgtgacaatgacaccgtgcctagcgtcagttccatcaacaggatcatccggacaaaagtacagcagccacccaaccaaccagtcccagcttccagtcacagcataggtattcaggagtctccggtgccgaacggccactcgcttccgggcagagacttcctccggaagcagatgcggggagacttgttcacacagcagcagctggaggtgctggaccgcgtgtttgagaggcagcactactcagacatcttcaccaccacagagcccatcaagcccgagcagaccacagagtattcagccatggcctcgctggctggtgggctggacgacatgaaggccaatctggccagccccacccctgctgacatcgggagcagtgtgccaggcccgcagtcctaccccattgtgacaggccgtgacttggcgagcacgaccctccccgggtaccctccacacgtcccccccgctggacagggcagctactcagcaccgacgctgacagggatggtgcctgggagtgagttttccgggagtccctacagccaccctcagtattcctcgtacaacgactcctggaggttccccaacccggggctgcttggctccccctactattatagcgctgccgcccgaggagccgccccacctgcagccgccactgcctatgaccgtcactgacccttggag

SEQ ID NO: 163343 - DNA, 184 bp, Homo sapiens
  Payload ID: 12181
  Gene Symbol: PAX5
  Gene Name: paired box 5
  ENST ID: ENST00000522932
  CDS Start-End: 1-182
tgtcctcggtgagcacggattcggccggctcgtcgtactccatcagcggcatcctgggcatcacgtcccccagcgccgacaccaacaagcgcaagagagacgaaggctccccctactattatagcgctgccgcccgaggagccgccccacctgcagccgccactgcctatgaccgtcactgacc

SEQ ID NO: 163344 - DNA, 830 bp, Homo sapiens
  Payload ID: 12181
  Gene Symbol: PAX5
  Gene Name: paired box 5
  ENST ID: ENST00000523145
  CDS Start-End: 159-821
atggatttagagaaaaattatccgactcctcggaccagcaggacaggtattatgagacaggaagcatcaagcctggggtaattggaggatccaaaccaaaggtcgccacacccaaagtggtggaaaaaatcgctgaatataaacgccaaaatcccaccatgtttgcctgggagatcagggaccggctgctggcagagcgggtgtgtgacaatgacaccgtgcctagcgtcagttccatcaacaggatcatccggacaaaagtacagcagccacccaaccaaccagtcccagcttccagtcacagcatagtgtccactggctccgtgacgcaggtgtcctcggtgagcacggattcggccggctcgtcgtactccatcagcggcatcctgggcatcacgtcccccagcgccgacaccaacaagcgcaagagagacgaaggtattcaggagtctccggtgccgaacggccactcgcttccgggcagagacttcctccggaagcagatgcggggagacttgttcacacagcagcagctggaggtgctggaccgcgtgtttgagaggcagcactactcagacatcttcaccaccacagagcccatcaagcccgagcagaccacagagtattcagccatggcctcgctggctggtgggctggacgacatgaaggccaatctggccagccccacccctgctgacatcgggagcagtgtgccaggcccgcagtcctaccccattgtgacaggctccccctactattatagcgctgccgcccgaggagccgccccacctgcagccgccactgcctatgaccgtcactgacccttggag

SEQ ID NO: 163345 - DNA, 1255 bp, Homo sapiens
  Payload ID: 12181
  Gene Symbol: PAX5
  Gene Name: paired box 5
  ENST ID: ENST00000520154
  CDS Start-End: 11-898
aaaaatcaaaatggatttagagaaaaattatccgactcctcggaccagcaggacaggacatggaggagtgaatcagcttgggggggtttttgtgaatggacggccactcccggatgtagtccgccagaggatagtggaacttgctcatcaaggtgtcaggccctgcgacatctccaggcagcttcgggtcagccatggttgtgtcagcaaaattcttggcaggtattatgagacaggaagcatcaagcctggggtaattggaggatccaaaccaaaggtcgccacacccaaagtggtggaaaaaatcgctgaatataaacgccaaaatcccaccatgtttgcctgggagatcagggaccggctgctggcagagcgggtgtgtgacaatgacaccgtgcctagcgtcagttccatcaacaggatcatccggacaaaagtacagcagccacccaaccaaccagtcccagcttccagtcacagcatagtgtccactggctccgtgacgcaggtgtcctcggtgagcacggattcggccggctcgtcgtactccatcagcggcatcctgggcatcacgtcccccagcgccgacaccaacaagcgcaagagagacgaaggtattcaggagtctccggtgccgaacggccactcgcttccgggcagagacttcctccggaagcagatgcggggagacttgttcacacagcagcagctggaggtgctggaccgcgtgtttgagaggcagcactactcagacatcttcaccaccacagagcccatcaagcccgagcaggctccccctactattatagcgctgccgcccgaggagccgccccacctgcagccgccactgcctatgaccgtcactgacccttggagccaggcgggcaccaaacactgatggcacctattgagggtgacagccacccagccctcctgaagatagccagagagcccatgagaccgtcccccagcatcccccacttgcctgaagctcccctcttcctctcttcctccagggactctggggccctttggtggggccgttggacttctggatgcttgtctatttctaaaagccaatctatgagcttctcccgatggccactgggtctctgcaaaccaatagactgtcctgcaaataaccgcagccccagcccagcctgcctgtcctccagctgtctgactatccatccatcataaccaccccagcctgggaaggagagcttgcttttgttgcttcagcagcacccatgta

SEQ ID NO: 163346 - DNA, 1019 bp, Homo sapiens
  Payload ID: 12181
  Gene Symbol: PAX5
  Gene Name: paired box 5
  ENST ID: ENST00000522003
  CDS Start-End: 159-1010
atggatttagagaaaaattatccgactcctcggaccagcaggacaggtattatgagacaggaagcatcaagcctggggtaattggaggatccaaaccaaaggtcgccacacccaaagtggtggaaaaaatcgctgaatataaacgccaaaatcccaccatgtttgcctgggagatcagggaccggctgctggcagagcgggtgtgtgacaatgacaccgtgcctagcgtcagttccatcaacaggatcatccggacaaaagtacagcagccacccaaccaaccagtcccagcttccagtcacagcatagtgtccactggctccgtgacgcaggtgtcctcggtgagcacggattcggccggctcgtcgtactccatcagcggcatcctgggcatcacgtcccccagcgccgacaccaacaagcgcaagagagacgaaggtattcaggagtctccggtgccgaacggccactcgcttccgggcagagacttcctccggaagcagatgcggggagacttgttcacacagcagcagctggaggtgctggaccgcgtgtttgagaggcagcactactcagacatcttcaccaccacagagcccatcaagcccgagcagaccacagagtattcagccatggcctcgctggctggtgggctggacgacatgaaggccaatctggccagccccacccctgctgacatcgggagcagtgtgccaggcccgcagtcctaccccattgtgacaggccgtgacttggcgagcacgaccctccccgggtaccctccacacgtcccccccgctggacagggcagctactcagcaccgacgctgacagggatggtgcctgggagtgagttttccgggagtccctacagccaccctcagtattcctcgtacaacgactcctggaggttccccaacccggggctgcttggctccccctactattatagcgctgccgcccgaggagccgccccacctgcagccgccactgcctatgaccgtcactgacccttggag

SEQ ID NO: 163347 - DNA, 659 bp, Homo sapiens
  Payload ID: 12181
  Gene Symbol: PAX5
  Gene Name: paired box 5
  ENST ID: ENST00000524340
  CDS Start-End: 1-657
gacaccaacaagcgcaagagagacgaaggtattcaggagtctccggtgccgaacggccactcgcttccgggcagagacttcctccggaagcagatgcggggagacttgttcacacagcagcagctggaggtgctggaccgcgtgtttgagaggcagcactactcagacatcttcaccaccacagagcccatcaagcccgagcagtggtgccccgtgctgatgagacaatacttggtgcagccccaggcagtccttttccagaccacagagtattcagccatggcctcgctggctggtgggctggacgacatgaaggccaatctggccagccccacccctgctgacatcgggagcagtgtgccaggcccgcagtcctaccccattgtgacaggccgtgacttggcgagcacgaccctccccgggtaccctccacacgtcccccccgctggacagggcagctactcagcaccgacgctgacagggatggtgcctgggagtgagttttccgggagtccctacagccaccctcagtattcctcgtacaacgactcctggaggttccccaacccggggctgcttggctccccctactattatagcgctgccgcccgaggagccgccccacctgcagccgccactgcctatgaccgtcactgacc

SEQ ID NO: 163348 - DNA, 1342 bp, Homo sapiens
  Payload ID: 12181
  Gene Symbol: PAX5
  Gene Name: paired box 5
  ENST ID: ENST00000523241
  CDS Start-End: 11-985
aaaaatcaaaatggatttagagaaaaattatccgactcctcggaccagcaggacaggacatggaggagtgaatcagcttgggggggtttttgtgaatggacggccactcccggatgtagtccgccagaggatagtggaacttgctcatcaaggtgtcaggccctgcgacatctccaggcagcttcgggtcagccatggttgtgtcagcaaaattcttggcaggtattatgagacaggaagcatcaagcctggggtaattggaggatccaaaccaaaggtcgccacacccaaagtggtggaaaaaatcgctgaatataaacgccaaaatcccaccatgtttgcctgggagatcagggaccggctgctggcagagcgggtgtgtgacaatgacaccgtgcctagcgtcagttccatcaacaggatcatccggacaaaagtacagcagccacccaaccaaccagtcccagcttccagtcacagcatagtgtccactggctccgtgacgcaggtgtcctcggtgagcacggattcggccggctcgtcgtactccatcagcggcatcctgggcatcacgtcccccagcgccgacaccaacaagcgcaagagagacgaaggtattcaggagtctccggtgccgaacggccactcgcttccgggcagagacttcctccggaagcagatgcggggagacttgttcacacagcagcagctggaggtgctggaccgcgtgtttgagaggcagcactactcagacatcttcaccaccacagagcccatcaagcccgagcagggagtgagttttccgggagtccctacagccaccctcagtattcctcgtacaacgactcctggaggttccccaacccggggctgcttggctccccctactattatagcgctgccgcccgaggagccgccccacctgcagccgccactgcctatgaccgtcactgacccttggagccaggcgggcaccaaacactgatggcacctattgagggtgacagccacccagccctcctgaagatagccagagagcccatgagaccgtcccccagcatcccccacttgcctgaagctcccctcttcctctcttcctccagggactctggggccctttggtggggccgttggacttctggatgcttgtctatttctaaaagccaatctatgagcttctcccgatggccactgggtctctgcaaaccaatagactgtcctgcaaataaccgcagccccagcccagcctgcctgtcctccagctgtctgactatccatccatcataaccaccccagcctgggaaggagagcttgcttttgttgcttcagcagcacccatgta

SEQ ID NO: 163349 - DNA, 969 bp, Homo sapiens
  Payload ID: 12181
  Gene Symbol: PAX5
  Gene Name: paired box 5
  Uniprot ID: Q02548
  ENST ID: ENST00000520281
  CDS Start-End: 1-960
atggatttagagaaaaattatccgactcctcggaccagcaggacaggacatggaggagtgaatcagcttgggggggtttttgtgaatggacggccactcccggatgtagtccgccagaggatagtggaacttgctcatcaaggtgtcaggccctgcgacatctccaggcagcttcgggtcagccatggttgtgtcagcaaaattcttggcaggtattatgagacaggaagcatcaagcctggggtaattggaggatccaaaccaaaggtcgccacacccaaagtggtggaaaaaatcgctgaatataaacgccaaaatcccaccatgtttgcctgggagatcagggaccggctgctggcagagcgggtgtgtgacaatgacaccgtgcctagcgtcagttccatcaacaggatcatccggacaaaagtacagcagccacccaaccaaccagtcccagcttccagtcacagcataggtattcaggagtctccggtgccgaacggccactcgcttccgggcagagacttcctccggaagcagatgcggggagacttgttcacacagcagcagctggaggtgctggaccgcgtgtttgagaggcagcactactcagacatcttcaccaccacagagcccatcaagcccgagcagaccacagagtattcagccatggcctcgctggctggtgggctggacgacatgaaggccaatctggccagccccacccctgctgacatcgggagcagtgtgccaggcccgcagtcctaccccattgtgacaggccgtgacttggcgagcacgaccctccccgggtaccctccacacgtcccccccgctggacagggcagctactcagcaccgacgctgacagggatggtgcctggctccccctactattatagcgctgccgcccgaggagccgccccacctgcagccgccactgcctatgaccgtcactgacccttggag

SEQ ID NO: 163350 - DNA, 1112 bp, Homo sapiens
  Payload ID: 12181
  Gene Symbol: PAX5
  Gene Name: paired box 5
  Uniprot ID: Q02548
  ENST ID: ENST00000523493
  CDS Start-End: 1-924
atggatttagagaaaaattatccgactcctcggaccagcaggacaggacatggaggagtgaatcagcttgggggggtttttgtgaatggacggccactcccggatgtagtccgccagaggatagtggaacttgctcatcaaggtgtcaggccctgcgacatctccaggcagcttcgggtcagccatggttgtgtcagcaaaattcttggcaggtattatgagacaggaagcatcaagcctggggtaattggaggatccaaaccaaaggtcgccacacccaaagtggtggaaaaaatcgctgaatataaacgccaaaatcccaccatgtttgcctgggagatcagggaccggctgctggcagagcgggtgtgtgacaatgacaccgtgcctagcgtcagttccatcaacaggatcatccggacaaaagtacagcagccacccaaccaaccagtcccagcttccagtcacagcatagtgtccactggctccgtgacgcaggtgtcctcggtgagcacggattcggccggctcgtcgtactccatcagcggcatcctgggcatcacgtcccccagcgccgacaccaacaagcgcaagagagacgaaggtattcaggagtctccggtgccgaacggccactcgcttccgggcagagacttcctccggaagcagatgcggggagacttgttcacacagcagcagctggaggtgctggaccgcgtgtttgagaggcagcactactcagacatcttcaccaccacagagcccatcaagcccgagcagtggtgccccgtgctgatgagacaatacttggtgcagccccaggcagtccttttccaggccgtgacttggcgagcacgaccctccccgggtaccctccacacgtcccccccgctggacagggcagctactcagcaccgacgctgacagggatggtgcctgggagtgagttttccgggagtccctacagccaccctcagtattcctcgtacaacgactcctggaggttccccaacccggggctgcttggctccccctactattatagcgctgccgcccgaggagccgccccacctgcagccgccactgcctatgaccgtcactgacccttggag

SEQ ID NO: 163351 - DNA, 1631 bp, Homo sapiens
  Payload ID: 12182
  Gene Symbol: PAX6
  Gene Name: paired box 6
  Uniprot ID: P26367
  ENST ID: ENST00000241001
  CDS Start-End: 342-1610
gttttgctggaggatgatgacagaggaatctgagaattgctctcacacaccaacccagcaacatccgtggagaaaactctcaccagcaactcctttaaaacaccgtcatttcaaaccattgtggtcttcaagcaacaacagcagcacaaaaaaccccaaccaaacaaaactcttgacagaagctgtgacaaccagaaaggatgcctcataaagggggaagactttaactaggggcgcgcagatgtgtgaggccttttattgtgagagtggacagacatccgagatttcagagccccatattcgagccccgtggaatcccgcggcccccagccagagccagcatgcagaacagtcacagcggagtgaatcagctcggtggtgtctttgtcaacgggcggccactgccggactccacccggcagaagattgtagagctagctcacagcggggcccggccgtgcgacatttcccgaattctgcaggtgtccaacggatgtgtgagtaaaattctgggcaggtattacgagactggctccatcagacccagggcaatcggtggtagtaaaccgagagtagcgactccagaagttgtaagcaaaatagcccagtataagcgggagtgcccgtccatctttgcttgggaaatccgagacagattactgtccgagggggtctgtaccaacgataacataccaagcgtgtcatcaataaacagagttcttcgcaacctggctagcgaaaagcaacagatgggcgcagacggcatgtatgataaactaaggatgttgaacgggcagaccggaagctggggcacccgccctggttggtatccggggacttcggtgccagggcaacctacgcaagatggctgccagcaacaggaaggagggggagagaataccaactccatcagttccaacggagaagattcagatgaggctcaaatgcgacttcagctgaagcggaagctgcaaagaaatagaacatcctttacccaagagcaaattgaggccctggagaaagagtttgagagaacccattatccagatgtgtttgcccgagaaagactagcagccaaaatagatctacctgaagcaagaatacaggtatggttttctaatcgaagggccaaatggagaagagaagaaaaactgaggaatcagagaagacaggccagcaacacacctagtcatattcctatcagcagtagtttcagcaccagtgtctaccaaccaattccacaacccaccacaccggtttcctccttcacatctggctccatgttgggccgaacagacacagccctcacaaacacctacagcgctctgccgcctatgcccagcttcaccatggcaaataacctgcctatgcaacccccagtccccagccagacctcctcatactcctgcatgctgcccaccagcccttcggtgaatgggcggagttatgatacctacacccccccacatatgcagacacacatgaacagtcagccaatgggcacctcgggcaccacttcaacaggactcatttcccctggtgtgtcagttccagttcaagttcccggaagtgaacctgatatgtctcaatactggccaagattacagtaaaaaaaaaaaaaaaaaaaaaaa

SEQ ID NO: 163352 - DNA, 2591 bp, Homo sapiens
  Payload ID: 12182
  Gene Symbol: PAX6
  Gene Name: paired box 6
  Uniprot ID: P26367
  ENST ID: ENST00000379107
  CDS Start-End: 529-1839
cgcccgcccgccggccctcgggctttgtgccgcactgggctccggcgcagaagagtcagccggcactcgagcgccgaggggggcaccgcgcccgccaccagcccgagtggagtcagtcggcaaggcagccgcacgctggaggtagagggaagagcgagctagcgcgagccgggaaggaagccaccaggccaaggcggtggaacgcgcgctccgagggagctcagagccgagcgggaggactgtcagcttccacccagcccccgggctcttgcccccaactccactggagcgctgagctcggaacttgaaaactctctgctccccaggcttcccccgactctcatctcccttgccttgcggaggctggggctcttccctgttctccggccccctgcgcttgggggaagactttaactaggggcgcgcagatgtgtgaggccttttattgtgagagtggacagacatccgagatttcagagccccatattcgagccccgtggaatcccgcggcccccagccagagccagcatgcagaacagtcacagcggagtgaatcagctcggtggtgtctttgtcaacgggcggccactgccggactccacccggcagaagattgtagagctagctcacagcggggcccggccgtgcgacatttcccgaattctgcagacccatgcagatgcaaaagtccaagtgctggacaatcaaaacgtgtccaacggatgtgtgagtaaaattctgggcaggtattacgagactggctccatcagacccagggcaatcggtggtagtaaaccgagagtagcgactccagaagttgtaagcaaaatagcccagtataagcgggagtgcccgtccatctttgcttgggaaatccgagacagattactgtccgagggggtctgtaccaacgataacataccaagcgtgtcatcaataaacagagttcttcgcaacctggctagcgaaaagcaacagatgggcgcagacggcatgtatgataaactaaggatgttgaacgggcagaccggaagctggggcacccgccctggttggtatccggggacttcggtgccagggcaacctacgcaagatggctgccagcaacaggaaggagggggagagaataccaactccatcagttccaacggagaagattcagatgaggctcaaatgcgacttcagctgaagcggaagctgcaaagaaatagaacatcctttacccaagagcaaattgaggccctggagaaagagtttgagagaacccattatccagatgtgtttgcccgagaaagactagcagccaaaatagatctacctgaagcaagaatacaggtatggttttctaatcgaagggccaaatggagaagagaagaaaaactgaggaatcagagaagacaggccagcaacacacctagtcatattcctatcagcagtagtttcagcaccagtgtctaccaaccaattccacaacccaccacaccggtttcctccttcacatctggctccatgttgggccgaacagacacagccctcacaaacacctacagcgctctgccgcctatgcccagcttcaccatggcaaataacctgcctatgcaacccccagtccccagccagacctcctcatactcctgcatgctgcccaccagcccttcggtgaatgggcggagttatgatacctacacccccccacatatgcagacacacatgaacagtcagccaatgggcacctcgggcaccacttcaacaggactcatttcccctggtgtgtcagttccagttcaagttcccggaagtgaacctgatatgtctcaatactggccaagattacagtaaaaaaaaaaaaaaaaaaaaaaaggaaaggaaatattgtgttaattcagtcagtgactatggggacacaacagttgagctttcaggaaagaaagaaaaatggctgttagagccgcttcagttctacaattgtgtcctgtattgtaccactggggaaggaatggacttgaaacaaggacctttgtatacagaaggcacgatatcagttggaacaaatcttcattttggtatccaaacttttattcattttggtgtattatttgtaaatgggcatttgtatgttataatgaaaaaaagaacaatgtagactggatggatgtttgatctgtgttggtcatgaagttgttttttttttttttaaaaagaaaaccatgatcaacaagctttgccacgaatttaagagttttatcaagatatatcgaatacttctacccatctgttcatagtttatggactgatgttccaagtttgtatcattcctttgcatataattaaacctggaacaacatgcactagatttatgtcagaaatatctgttggttttccaaaggttgttaacagatgaagtttatgtgcaaaaaagggtaagatataaattcaaggaagaaaaaaagttgatagctaaaaggtagagtgtgtcttcgatataatccaatttgttttatgtcaaaatgtaagtatttgtcttccctagaaatcctcagaatgatttctataataaagttaatttcatttatatttgacaagaatataga

SEQ ID NO: 163353 - DNA, 2157 bp, Homo sapiens
  Payload ID: 12182
  Gene Symbol: PAX6
  Gene Name: paired box 6
  Uniprot ID: P26367
  ENST ID: ENST00000379109
  CDS Start-End: 891-2157
ctacttccagcgaaagcccgcgtcggagggcgactgccggcgagcgggagcggcgcagggctcggggcgggcggccagctcagccccagcgccagcgccagcgccagcgcgggctgagctcgcgggaagaagggagactccaggcgcgacagcagccgcggctcctagccccagcgtcgcccaatgctcccgacccgcgggaaaagacgaagaggctctgtggtgcccaaggccctggaacggccgcagagagcaaccgctgccggctgctttgtccagcccgaggcccagcgaacgcgcagagagcgggcgctccgaggactcgccgagggagcgccgagggaacctgctcgccgcgtctccgcccgcccgccggccctcgggctttgtgccgcactgggctccggcgcagaagagtcagccggcactcgagcgccgaggggggcaccgcgcccgccaccagcccgagtggagtcagtcggcaaggcagccgcacgctggaggtagagggaagagcgagctagcgcgagccgggaaggaagccaccaggccaaggcggtggaacgcgcgctccgagggagctcagagccgagcgggaggactgtcagcttccacccagcccccgggctcttgcccccaactccactggagcgctgagctcggaacttgaaaactctctgctccccaggcttcccccgactctcatctcccttgccttgcggaggctggggctcttccctgttctccggccccctgcgcttgggggaagactttaactaggggcgcgcagatgtgtgaggccttttattgtgagagtggacagacatccgagatttcagagccccatattcgagccccgtggaatcccgcggcccccagccagagccagcatgcagaacagtcacagcggagtgaatcagctcggtggtgtctttgtcaacgggcggccactgccggactccacccggcagaagattgtagagctagctcacagcggggcccggccgtgcgacatttcccgaattctgcaggtgtccaacggatgtgtgagtaaaattctgggcaggtattacgagactggctccatcagacccagggcaatcggtggtagtaaaccgagagtagcgactccagaagttgtaagcaaaatagcccagtataagcgggagtgcccgtccatctttgcttgggaaatccgagacagattactgtccgagggggtctgtaccaacgataacataccaagcgtgtcatcaataaacagagttcttcgcaacctggctagcgaaaagcaacagatgggcgcagacggcatgtatgataaactaaggatgttgaacgggcagaccggaagctggggcacccgccctggttggtatccggggacttcggtgccagggcaacctacgcaagatggctgccagcaacaggaaggagggggagagaataccaactccatcagttccaacggagaagattcagatgaggctcaaatgcgacttcagctgaagcggaagctgcaaagaaatagaacatcctttacccaagagcaaattgaggccctggagaaagagtttgagagaacccattatccagatgtgtttgcccgagaaagactagcagccaaaatagatctacctgaagcaagaatacaggtatggttttctaatcgaagggccaaatggagaagagaagaaaaactgaggaatcagagaagacaggccagcaacacacctagtcatattcctatcagcagtagtttcagcaccagtgtctaccaaccaattccacaacccaccacaccggtttcctccttcacatctggctccatgttgggccgaacagacacagccctcacaaacacctacagcgctctgccgcctatgcccagcttcaccatggcaaataacctgcctatgcaacccccagtccccagccagacctcctcatactcctgcatgctgcccaccagcccttcggtgaatgggcggagttatgatacctacacccccccacatatgcagacacacatgaacagtcagccaatgggcacctcgggcaccacttcaacaggactcatttcccctggtgtgtcagttccagttcaagttcccggaagtgaacctgatatgtctcaatactggccaagattacagt

SEQ ID NO: 163354 - DNA, 1627 bp, Homo sapiens
  Payload ID: 12182
  Gene Symbol: PAX6
  Gene Name: paired box 6
  Uniprot ID: P26367
  ENST ID: ENST00000379111
  CDS Start-End: 347-1615
ttttattgtcaatctctgtctccttcccaggaatctgagaattgctctcacacaccaacccagcaacatccgtggagaaaactctcaccagcaactcctttaaaacaccgtcatttcaaaccattgtggtcttcaagcaacaacagcagcacaaaaaaccccaaccaaacaaaactcttgacagaagctgtgacaaccagaaaggatgcctcataaagggggaagactttaactaggggcgcgcagatgtgtgaggccttttattgtgagagtggacagacatccgagatttcagagccccatattcgagccccgtggaatcccgcggcccccagccagagccagcatgcagaacagtcacagcggagtgaatcagctcggtggtgtctttgtcaacgggcggccactgccggactccacccggcagaagattgtagagctagctcacagcggggcccggccgtgcgacatttcccgaattctgcaggtgtccaacggatgtgtgagtaaaattctgggcaggtattacgagactggctccatcagacccagggcaatcggtggtagtaaaccgagagtagcgactccagaagttgtaagcaaaatagcccagtataagcgggagtgcccgtccatctttgcttgggaaatccgagacagattactgtccgagggggtctgtaccaacgataacataccaagcgtgtcatcaataaacagagttcttcgcaacctggctagcgaaaagcaacagatgggcgcagacggcatgtatgataaactaaggatgttgaacgggcagaccggaagctggggcacccgccctggttggtatccggggacttcggtgccagggcaacctacgcaagatggctgccagcaacaggaaggagggggagagaataccaactccatcagttccaacggagaagattcagatgaggctcaaatgcgacttcagctgaagcggaagctgcaaagaaatagaacatcctttacccaagagcaaattgaggccctggagaaagagtttgagagaacccattatccagatgtgtttgcccgagaaagactagcagccaaaatagatctacctgaagcaagaatacaggtatggttttctaatcgaagggccaaatggagaagagaagaaaaactgaggaatcagagaagacaggccagcaacacacctagtcatattcctatcagcagtagtttcagcaccagtgtctaccaaccaattccacaacccaccacaccggtttcctccttcacatctggctccatgttgggccgaacagacacagccctcacaaacacctacagcgctctgccgcctatgcccagcttcaccatggcaaataacctgcctatgcaacccccagtccccagccagacctcctcatactcctgcatgctgcccaccagcccttcggtgaatgggcggagttatgatacctacacccccccacatatgcagacacacatgaacagtcagccaatgggcacctcgggcaccacttcaacaggactcatttcccctggtgtgtcagttccagttcaagttcccggaagtgaacctgatatgtctcaatactggccaagattacagtaaaaaaaaaaaaaa

SEQ ID NO: 163355 - DNA, 1763 bp, Homo sapiens
  Payload ID: 12182
  Gene Symbol: PAX6
  Gene Name: paired box 6
  Uniprot ID: P26367
  ENST ID: ENST00000379115
  CDS Start-End: 436-1746
ggtgcatttgcatgttgcggagtgattagtgggtttgaaaagggaaccgtggctcggcctcatttcccgctctggttcaggcgcaggaggaagtgttttgctggaggatgatgacagaggaatctgagaattgctctcacacaccaacccagcaacatccgtggagaaaactctcaccagcaactcctttaaaacaccgtcatttcaaaccattgtggtcttcaagcaacaacagcagcacaaaaaaccccaaccaaacaaaactcttgacagaagctgtgacaaccagaaaggatgcctcataaagggggaagactttaactaggggcgcgcagatgtgtgaggccttttattgtgagagtggacagacatccgagatttcagagccccatattcgagccccgtggaatcccgcggcccccagccagagccagcatgcagaacagtcacagcggagtgaatcagctcggtggtgtctttgtcaacgggcggccactgccggactccacccggcagaagattgtagagctagctcacagcggggcccggccgtgcgacatttcccgaattctgcagacccatgcagatgcaaaagtccaagtgctggacaatcaaaacgtgtccaacggatgtgtgagtaaaattctgggcaggtattacgagactggctccatcagacccagggcaatcggtggtagtaaaccgagagtagcgactccagaagttgtaagcaaaatagcccagtataagcgggagtgcccgtccatctttgcttgggaaatccgagacagattactgtccgagggggtctgtaccaacgataacataccaagcgtgtcatcaataaacagagttcttcgcaacctggctagcgaaaagcaacagatgggcgcagacggcatgtatgataaactaaggatgttgaacgggcagaccggaagctggggcacccgccctggttggtatccggggacttcggtgccagggcaacctacgcaagatggctgccagcaacaggaaggagggggagagaataccaactccatcagttccaacggagaagattcagatgaggctcaaatgcgacttcagctgaagcggaagctgcaaagaaatagaacatcctttacccaagagcaaattgaggccctggagaaagagtttgagagaacccattatccagatgtgtttgcccgagaaagactagcagccaaaatagatctacctgaagcaagaatacaggtatggttttctaatcgaagggccaaatggagaagagaagaaaaactgaggaatcagagaagacaggccagcaacacacctagtcatattcctatcagcagtagtttcagcaccagtgtctaccaaccaattccacaacccaccacaccggtttcctccttcacatctggctccatgttgggccgaacagacacagccctcacaaacacctacagcgctctgccgcctatgcccagcttcaccatggcaaataacctgcctatgcaacccccagtccccagccagacctcctcatactcctgcatgctgcccaccagcccttcggtgaatgggcggagttatgatacctacacccccccacatatgcagacacacatgaacagtcagccaatgggcacctcgggcaccacttcaacaggactcatttcccctggtgtgtcagttccagttcaagttcccggaagtgaacctgatatgtctcaatactggccaagattacagtaaaaaaaaaaaaaaaaaaa

SEQ ID NO: 163356 - DNA, 2160 bp, Homo sapiens
  Payload ID: 12182
  Gene Symbol: PAX6
  Gene Name: paired box 6
  Uniprot ID: P26367
  ENST ID: ENST00000379123
  CDS Start-End: 880-2148
tgcaccctccgaggactgggagtcccgagtccagcttagggggagtgggggcgcgacccccaacccagaaaccttcacttgaccgctcaagttcgcggcagcagggcgggccgcgccgaatctcggcgtgcgcggagcggggagatgcaggcgagcgccagagcccgggctcgggggccctgcgccggggagaggagccgggacccaccggcggagccgaaaacaagtgtattcatattcaaacaaacggaccaattgcaccaggcggggagagggagcatccaatcggctggcgcgaggccccggcgctgctttgcataaagcaatattttgtgtgagagcgagcggtgcatttgcatgttgcggagtgattagtgggtttgaaaagggaaccgtggctcggcctcatttcccgctctggttcaggcgcaggaggaagtgttttgctggaggatgatgacagaggtcaggcttcgctaatgggccagtgaggagcggtggaggcgaggccgggcgccggcacacacacattaacacacttgagccatcaccaatcagcataggaatctgagaattgctctcacacaccaacccagcaacatccgtggagaaaactctcaccagcaactcctttaaaacaccgtcatttcaaaccattgtggtcttcaagcaacaacagcagcacaaaaaaccccaaccaaacaaaactcttgacagaagctgtgacaaccagaaaggatgcctcataaagggggaagactttaactaggggcgcgcagatgtgtgaggccttttattgtgagagtggacagacatccgagatttcagagccccatattcgagccccgtggaatcccgcggcccccagccagagccagcatgcagaacagtcacagcggagtgaatcagctcggtggtgtctttgtcaacgggcggccactgccggactccacccggcagaagattgtagagctagctcacagcggggcccggccgtgcgacatttcccgaattctgcaggtgtccaacggatgtgtgagtaaaattctgggcaggtattacgagactggctccatcagacccagggcaatcggtggtagtaaaccgagagtagcgactccagaagttgtaagcaaaatagcccagtataagcgggagtgcccgtccatctttgcttgggaaatccgagacagattactgtccgagggggtctgtaccaacgataacataccaagcgtgtcatcaataaacagagttcttcgcaacctggctagcgaaaagcaacagatgggcgcagacggcatgtatgataaactaaggatgttgaacgggcagaccggaagctggggcacccgccctggttggtatccggggacttcggtgccagggcaacctacgcaagatggctgccagcaacaggaaggagggggagagaataccaactccatcagttccaacggagaagattcagatgaggctcaaatgcgacttcagctgaagcggaagctgcaaagaaatagaacatcctttacccaagagcaaattgaggccctggagaaagagtttgagagaacccattatccagatgtgtttgcccgagaaagactagcagccaaaatagatctacctgaagcaagaatacaggtatggttttctaatcgaagggccaaatggagaagagaagaaaaactgaggaatcagagaagacaggccagcaacacacctagtcatattcctatcagcagtagtttcagcaccagtgtctaccaaccaattccacaacccaccacaccggtttcctccttcacatctggctccatgttgggccgaacagacacagccctcacaaacacctacagcgctctgccgcctatgcccagcttcaccatggcaaataacctgcctatgcaacccccagtccccagccagacctcctcatactcctgcatgctgcccaccagcccttcggtgaatgggcggagttatgatacctacacccccccacatatgcagacacacatgaacagtcagccaatgggcacctcgggcaccacttcaacaggactcatttcccctggtgtgtcagttccagttcaagttcccggaagtgaacctgatatgtctcaatactggccaagattacagtaaaaaaaaaaaaaa

SEQ ID NO: 163357 - DNA, 2616 bp, Homo sapiens
  Payload ID: 12182
  Gene Symbol: PAX6
  Gene Name: paired box 6
  Uniprot ID: P26367
  ENST ID: ENST00000379129
  CDS Start-End: 282-1592
accctcttttcttatcattgacatttaaactctggggcaggtcctcgcgtagaacgcggctgtcagatctgccacttcccctgccgagcggcggtgagaagtgtgggaaccggcgctgccaggctcacctgcctccccgccctccgctcccagggggaagactttaactaggggcgcgcagatgtgtgaggccttttattgtgagagtggacagacatccgagatttcagagccccatattcgagccccgtggaatcccgcggcccccagccagagccagcatgcagaacagtcacagcggagtgaatcagctcggtggtgtctttgtcaacgggcggccactgccggactccacccggcagaagattgtagagctagctcacagcggggcccggccgtgcgacatttcccgaattctgcagacccatgcagatgcaaaagtccaagtgctggacaatcaaaacgtgtccaacggatgtgtgagtaaaattctgggcaggtattacgagactggctccatcagacccagggcaatcggtggtagtaaaccgagagtagcgactccagaagttgtaagcaaaatagcccagtataagcgggagtgcccgtccatctttgcttgggaaatccgagacagattactgtccgagggggtctgtaccaacgataacataccaagcgtgtcatcaataaacagagttcttcgcaacctggctagcgaaaagcaacagatgggcgcagacggcatgtatgataaactaaggatgttgaacgggcagaccggaagctggggcacccgccctggttggtatccggggacttcggtgccagggcaacctacgcaagatggctgccagcaacaggaaggagggggagagaataccaactccatcagttccaacggagaagattcagatgaggctcaaatgcgacttcagctgaagcggaagctgcaaagaaatagaacatcctttacccaagagcaaattgaggccctggagaaagagtttgagagaacccattatccagatgtgtttgcccgagaaagactagcagccaaaatagatctacctgaagcaagaatacaggtatggttttctaatcgaagggccaaatggagaagagaagaaaaactgaggaatcagagaagacaggccagcaacacacctagtcatattcctatcagcagtagtttcagcaccagtgtctaccaaccaattccacaacccaccacaccggtttcctccttcacatctggctccatgttgggccgaacagacacagccctcacaaacacctacagcgctctgccgcctatgcccagcttcaccatggcaaataacctgcctatgcaacccccagtccccagccagacctcctcatactcctgcatgctgcccaccagcccttcggtgaatgggcggagttatgatacctacacccccccacatatgcagacacacatgaacagtcagccaatgggcacctcgggcaccacttcaacaggactcatttcccctggtgtgtcagttccagttcaagttcccggaagtgaacctgatatgtctcaatactggccaagattacagtaaaaaaaaaaaaaaaaaaaaaaaggaaaggaaatattgtgttaattcagtcagtgactatggggacacaacagttgagctttcaggaaagaaagaaaaatggctgttagagccgcttcagttctacaattgtgtcctgtattgtaccactggggaaggaatggacttgaaacaaggacctttgtatacagaaggcacgatatcagttggaacaaatcttcattttggtatccaaacttttattcattttggtgtattatttgtaaatgggcatttgtatgttataatgaaaaaaagaacaatgtagactggatggatgtttgatctgtgttggtcatgaagttgttttttttttttttaaaaagaaaaccatgatcaacaagctttgccacgaatttaagagttttatcaagatatatcgaatacttctacccatctgttcatagtttatggactgatgttccaagtttgtatcattcctttgcatataattaaacctggaacaacatgcactagatttatgtcagaaatatctgttggttttccaaaggttgttaacagatgaagtttatgtgcaaaaaagggtaagatataaattcaaggaagaaaaaaagttgatagctaaaaggtagagtgtgtcttcgatataatccaatttgttttatgtcaaaatgtaagtatttgtcttccctagaaatcctcagaatgatttctataataaagttaatttcatttatatttgacaagaatatagatgttttatacacattttcatgcaatcatacgtttcttttttggccagcaaaagttaattgttcttagatatagttgtattactgttcacggtccaatcattttgtgcatctagagttcattcctaatcaattaaaagtgcttgcaagagttttaaacttaagtgttttgaagttgttcacaactacatatcaaaattaaccattgttgattgtaaaaaaccatgccaaagcctttgtatttcctttattatacagttttctttttaacctta

SEQ ID NO: 163358 - DNA, 2574 bp, Homo sapiens
  Payload ID: 12182
  Gene Symbol: PAX6
  Gene Name: paired box 6
  Uniprot ID: P26367
  ENST ID: ENST00000379132
  CDS Start-End: 282-1550
accctcttttcttatcattgacatttaaactctggggcaggtcctcgcgtagaacgcggctgtcagatctgccacttcccctgccgagcggcggtgagaagtgtgggaaccggcgctgccaggctcacctgcctccccgccctccgctcccagggggaagactttaactaggggcgcgcagatgtgtgaggccttttattgtgagagtggacagacatccgagatttcagagccccatattcgagccccgtggaatcccgcggcccccagccagagccagcatgcagaacagtcacagcggagtgaatcagctcggtggtgtctttgtcaacgggcggccactgccggactccacccggcagaagattgtagagctagctcacagcggggcccggccgtgcgacatttcccgaattctgcaggtgtccaacggatgtgtgagtaaaattctgggcaggtattacgagactggctccatcagacccagggcaatcggtggtagtaaaccgagagtagcgactccagaagttgtaagcaaaatagcccagtataagcgggagtgcccgtccatctttgcttgggaaatccgagacagattactgtccgagggggtctgtaccaacgataacataccaagcgtgtcatcaataaacagagttcttcgcaacctggctagcgaaaagcaacagatgggcgcagacggcatgtatgataaactaaggatgttgaacgggcagaccggaagctggggcacccgccctggttggtatccggggacttcggtgccagggcaacctacgcaagatggctgccagcaacaggaaggagggggagagaataccaactccatcagttccaacggagaagattcagatgaggctcaaatgcgacttcagctgaagcggaagctgcaaagaaatagaacatcctttacccaagagcaaattgaggccctggagaaagagtttgagagaacccattatccagatgtgtttgcccgagaaagactagcagccaaaatagatctacctgaagcaagaatacaggtatggttttctaatcgaagggccaaatggagaagagaagaaaaactgaggaatcagagaagacaggccagcaacacacctagtcatattcctatcagcagtagtttcagcaccagtgtctaccaaccaattccacaacccaccacaccggtttcctccttcacatctggctccatgttgggccgaacagacacagccctcacaaacacctacagcgctctgccgcctatgcccagcttcaccatggcaaataacctgcctatgcaacccccagtccccagccagacctcctcatactcctgcatgctgcccaccagcccttcggtgaatgggcggagttatgatacctacacccccccacatatgcagacacacatgaacagtcagccaatgggcacctcgggcaccacttcaacaggactcatttcccctggtgtgtcagttccagttcaagttcccggaagtgaacctgatatgtctcaatactggccaagattacagtaaaaaaaaaaaaaaaaaaaaaaaggaaaggaaatattgtgttaattcagtcagtgactatggggacacaacagttgagctttcaggaaagaaagaaaaatggctgttagagccgcttcagttctacaattgtgtcctgtattgtaccactggggaaggaatggacttgaaacaaggacctttgtatacagaaggcacgatatcagttggaacaaatcttcattttggtatccaaacttttattcattttggtgtattatttgtaaatgggcatttgtatgttataatgaaaaaaagaacaatgtagactggatggatgtttgatctgtgttggtcatgaagttgttttttttttttttaaaaagaaaaccatgatcaacaagctttgccacgaatttaagagttttatcaagatatatcgaatacttctacccatctgttcatagtttatggactgatgttccaagtttgtatcattcctttgcatataattaaacctggaacaacatgcactagatttatgtcagaaatatctgttggttttccaaaggttgttaacagatgaagtttatgtgcaaaaaagggtaagatataaattcaaggaagaaaaaaagttgatagctaaaaggtagagtgtgtcttcgatataatccaatttgttttatgtcaaaatgtaagtatttgtcttccctagaaatcctcagaatgatttctataataaagttaatttcatttatatttgacaagaatatagatgttttatacacattttcatgcaatcatacgtttcttttttggccagcaaaagttaattgttcttagatatagttgtattactgttcacggtccaatcattttgtgcatctagagttcattcctaatcaattaaaagtgcttgcaagagttttaaacttaagtgttttgaagttgttcacaactacatatcaaaattaaccattgttgattgtaaaaaaccatgccaaagcctttgtatttcctttattatacagttttctttttaacctta

SEQ ID NO: 163359 - DNA, 567 bp, Homo sapiens
  Payload ID: 12182
  Gene Symbol: PAX6
  Gene Name: paired box 6
  ENST ID: ENST00000423822
  CDS Start-End: 383-567
gcggcggtgagaagtgtgggaaccggcgctgccaggctcacctgcctccccgccctccgctcccaggaatctgagaattgctctcacacaccaacccagcaacatccgtggagaaaactctcaccagcaactcctttaaaacaccgtcatttcaaaccattgtggtcttcaagcaacaacagcagcacaaaaaaccccaaccaaacaaaactcttgacagaagctgtgacaaccagaaaggatgcctcataaagggggaagactttaactaggggcgcgcagatgtgtgaggccttttattgtgagagtggacagacatccgagatttcagagccccatattcgagccccgtggaatcccgcggcccccagccagagccagcatgcagaacagtcacagcggagtgaatcagctcggtggtgtctttgtcaacgggcggccactgccggactccacccggcagaagattgtagagctagctcacagcggggcccggccgtgcgacatttcccgaattctgcagacccatgcagatgcaaaagtccaagtgctggacaatcaaaacgt

SEQ ID NO: 163360 - DNA, 497 bp, Homo sapiens
  Payload ID: 12182
  Gene Symbol: PAX6
  Gene Name: paired box 6
  ENST ID: ENST00000455099
  CDS Start-End: 125-497
aagactttaactaggggcgcgcagatgtgtgaggccttttattgtgagagtggacagacatccgagatttcagagccccatattcgagccccgtggaatcccgcggcccccagccagagccagcatgcagaacagtcacagcggagtgaatcagctcggtggtgtctttgtcaacgggcggccactgccggactccacccggcagaagattgtagagctagctcacagcggggcccggccgtgcgacatttcccgaattctgcagacccatgcagatgcaaaagtccaagtgctggacaatcaaaacgtgtccaacggatgtgtgtcatcaataaacagagttcttcgcaacctggctagcgaaaagcaacagatgggcgcagacggcatgtatgataaactaaggatgttgaacgggcagaccggaagctggggcacccgccctggttggtatccggggacttcggtgccagggcaacctacgcaagatggctgcc

SEQ ID NO: 163361 - DNA, 6922 bp, Homo sapiens
  Payload ID: 12182
  Gene Symbol: PAX6
  Gene Name: paired box 6
  Uniprot ID: P26367
  ENST ID: ENST00000419022
  CDS Start-End: 470-1780
accctcttttcttatcattgacatttaaactctggggcaggtcctcgcgtagaacgcggctgtcagatctgccacttcccctgccgagcggcggtgagaagtgtgggaaccggcgctgccaggctcacctgcctccccgccctccgctcccaggaatctgagaattgctctcacacaccaacccagcaacatccgtggagaaaactctcaccagcaactcctttaaaacaccgtcatttcaaaccattgtggtcttcaagcaacaacagcagcacaaaaaaccccaaccaaacaaaactcttgacagaagctgtgacaaccagaaaggatgcctcataaagggggaagactttaactaggggcgcgcagatgtgtgaggccttttattgtgagagtggacagacatccgagatttcagagccccatattcgagccccgtggaatcccgcggcccccagccagagccagcatgcagaacagtcacagcggagtgaatcagctcggtggtgtctttgtcaacgggcggccactgccggactccacccggcagaagattgtagagctagctcacagcggggcccggccgtgcgacatttcccgaattctgcagacccatgcagatgcaaaagtccaagtgctggacaatcaaaacgtgtccaacggatgtgtgagtaaaattctgggcaggtattacgagactggctccatcagacccagggcaatcggtggtagtaaaccgagagtagcgactccagaagttgtaagcaaaatagcccagtataagcgggagtgcccgtccatctttgcttgggaaatccgagacagattactgtccgagggggtctgtaccaacgataacataccaagcgtgtcatcaataaacagagttcttcgcaacctggctagcgaaaagcaacagatgggcgcagacggcatgtatgataaactaaggatgttgaacgggcagaccggaagctggggcacccgccctggttggtatccggggacttcggtgccagggcaacctacgcaagatggctgccagcaacaggaaggagggggagagaataccaactccatcagttccaacggagaagattcagatgaggctcaaatgcgacttcagctgaagcggaagctgcaaagaaatagaacatcctttacccaagagcaaattgaggccctggagaaagagtttgagagaacccattatccagatgtgtttgcccgagaaagactagcagccaaaatagatctacctgaagcaagaatacaggtatggttttctaatcgaagggccaaatggagaagagaagaaaaactgaggaatcagagaagacaggccagcaacacacctagtcatattcctatcagcagtagtttcagcaccagtgtctaccaaccaattccacaacccaccacaccggtttcctccttcacatctggctccatgttgggccgaacagacacagccctcacaaacacctacagcgctctgccgcctatgcccagcttcaccatggcaaataacctgcctatgcaacccccagtccccagccagacctcctcatactcctgcatgctgcccaccagcccttcggtgaatgggcggagttatgatacctacacccccccacatatgcagacacacatgaacagtcagccaatgggcacctcgggcaccacttcaacaggactcatttcccctggtgtgtcagttccagttcaagttcccggaagtgaacctgatatgtctcaatactggccaagattacagtaaaaaaaaaaaaaaaaaaaaaaaggaaaggaaatattgtgttaattcagtcagtgactatggggacacaacagttgagctttcaggaaagaaagaaaaatggctgttagagccgcttcagttctacaattgtgtcctgtattgtaccactggggaaggaatggacttgaaacaaggacctttgtatacagaaggcacgatatcagttggaacaaatcttcattttggtatccaaacttttattcattttggtgtattatttgtaaatgggcatttgtatgttataatgaaaaaaagaacaatgtagactggatggatgtttgatctgtgttggtcatgaagttgttttttttttttttaaaaagaaaaccatgatcaacaagctttgccacgaatttaagagttttatcaagatatatcgaatacttctacccatctgttcatagtttatggactgatgttccaagtttgtatcattcctttgcatataattaaacctggaacaacatgcactagatttatgtcagaaatatctgttggttttccaaaggttgttaacagatgaagtttatgtgcaaaaaagggtaagatataaattcaaggaagaaaaaaagttgatagctaaaaggtagagtgtgtcttcgatataatccaatttgttttatgtcaaaatgtaagtatttgtcttccctagaaatcctcagaatgatttctataataaagttaatttcatttatatttgacaagaatatagatgttttatacacattttcatgcaatcatacgtttcttttttggccagcaaaagttaattgttcttagatatagttgtattactgttcacggtccaatcattttgtgcatctagagttcattcctaatcaattaaaagtgcttgcaagagttttaaacttaagtgttttgaagttgttcacaactacatatcaaaattaaccattgttgattgtaaaaaaccatgccaaagcctttgtatttcctttattatacagttttctttttaaccttatagtgtggtgttacaaattttatttccatgttagatcaacattctaaaccaatggttactttcacacacactctgttttacatcctgatgatccttaaaaaataatccttatagataccataaatcaaaaacgtgttagaaaaaaattccacttacagcagggtgtagatctgtgcccatttatacccacaacatatatacaaaatggtaacatttcccagttagccatttaattctaaagctcaaagtctagaaataatttaaaaatgcaacaagcgattagctaggaattgttttttgaattaggactggcattttcaatctgggcagatttccattgtcagcctatttcaacaatgatttcactgaagtatattcaaaagtagatttcttaaaggagactttctgaaagctgttgcctttttcaaataggccctctcccttttctgtctccctcccctttgcacaagaggcatcatttcccattgaaccactacagctgttcccatttgaatcttgctttctgtgcggttgtggatggttggagggtggaggggggatgttgcatgtcaaggaataatgagcacagacacatcaacagacaacaacaaagcagactgtgactggccggtgggaattaaaggccttcagtcattggcagcttaagccaaacattcccaaatctatgaagcagggcccattgttggtcagttgttatttgcaatgaagcacagttctgatcatgtttaaagtggaggcacgcagggcaggagtgcttgagcccaagcaaaggatggaaaaaaataagcctttgttgggtaaaaaaggactgtctgagactttcatttgttctgtgcaacatataagtcaatacagataagtcttcctctgcaaacttcactaaaaagcctgggggttctggcagtctagattaaaatgcttgcacatgcagaaacctctggggacaaagacacacttccactgaattatactctgctttaaaaaaatccccaaaagcaaatgatcagaaatgtagaaattaatggaaggatttaaacatgaccttctcgttcaatatctactgttttttagttaaggaattacttgtgaacagataattgagattcattgctccggcatgaaatatactaataattttattccaccagagttgctgcacatttggagacaccttcctaagttgcagtttttgtatgtgtgcatgtagttttgttcagtgtcagcctgcactgcacagcagcacatttctgcaggggagtgagcacacatacgcactgttggtacaattgccggtgcagacatttctacctcctgacattttgcagcctacattccctgagggctgtgtgctgagggaactgtcagagaagggctatgtgggagtgcatgccacagctgctggctggcttacttcttccttctcgctggctgtaatttccaccacggtcaggcagccagttccggcccacggttctgttgtgtagacagcagagactttggagacccggatgtcgcacgccaggtgcaagaggtgggaatgggagaaaaggagtgacgtgggagcggagggtctgtatgtgtgcacttgggcacgtatatgtgtgctctgaaggtcaggattgccagggcaaagtagcacagtctggtatagtctgaagaagcggctgctcagctgcagaagccctctggtccggcaggatgggaacggctgccttgccttctgcccacaccctagggacatgagctgtccttccaaacagagctccaggcactctcttggggacagcatggcaggctctgtgtggtagcagtgcctgggagttggccttttactcattgttgaaataatttttgtttattatttatttaacgatacatatatttatatatttatcaatggggtatctgcagggatgttttgacaccatcttccaggatggagattatttgtgaagacttcagtagaatcccaggactaaacgtctaaattttttctccaaacttgactgacttgggaaaaccaggtgaatagaataagagctgaatgttttaagtaataaacgttcaaactgctctaagtaaaaaaatgcattttactgcaatgaatttctagaatatttttcccccaaagctatgcctcctaacccttaaatggtgaacaactggtttcttgctacagctcactgccatttcttcttactatcatcactaggtttcctaagattcactcatacagtattatttgaagattcagctttgttctgtgaatgtcatcttaggattgtgtctatattcttttgcttatttctttttactctgggcctctcatactagtaagattttaaaaagccttttcttctctgtatgtttggctcaccaaggcgaaatatatattcttctctttttcatttctcaagaataaacctcatctgcttttttgtttttctgtgttttggcttggtactgaatgactcaactgctcggttttaaagttcaaagtgtaagtacttagggttagtactgcttatttcaataatgttgacggtgactatctttggaaagcagtaacatgctgtcttagaaatgacattaataatgggcttaaacaaatgaataggggggtccccccactctccttttgtatgcctatgtgtgtctgatttgttaaaagatggacagggaattgattgcagagtgtcgcttccttctaaagtagttttattttgtctactgttagtatttaaagatcctggaggtggacataaggaataaatggaagagaaaagtagatattgtatggtggctactaaaaggaaattcaaaaagtcttagaacccgagcacctgagcaaactgcagtagtcaaaatatttatctcatgttaaagaaaggcaaatctagtgtaagaaatgagtaccatatagggttttgaagttcatatactagaaacacttaaaagatatcatttcagatattacgtttggcattgttcttaagtatttatatctttgagtcaagctgataattaaaaaaaatctgttaatggagtgtatatttcataatgtatcaaaatggtgtctatacctaaggtagcattattgaagagagatatgtttatgtagtaagttattaacataatgagtaacaaataatgtttccagaagaaaggaaaacacattttcagagtgcgtttttatcagaggaagacaaaaatacacacccctctccagtagcttatttttacaaagccggcccagtgaattagaaaaacaaagcacttggatatgatttttggaaagcccaggtacacttattattcaaaatgcacttttactgagtttgaaaagtttcttttatatttaaaataagggttcaaatatgcatattcaatttttatagtagttatctatttgcaaagcatatattaactagtaattggctgttaattttatagacatggtagccagggaagtatatcaatgacctattaagtattttgacaagcaatttacatatctgatgacctcgtatctctttttcagcaagtcaaatgctatgtaattgttccattgtgtgttgtataaaatgaatcaacacggtaagaaaaaggttagagttattaaaataataaactgactaaaatactcatttgaatttattcagaatgttcataatgctttcaaaggacatagcagagcttttgtggagtatccgcacaacattatttattatctatggactaaatcaattttttgaagttgctttaaaatttaaaagcacctttgcttaatataaagccctttaattttaactgacagatcaattctgaaactttattttgaaaagaaaatggggaagaatctgtgtctttagaattaaaagaaatgaaaaaaataaacccgacattctaaaaaaatagaataagaaacctgatttttagtactaatgaaatagcgggtgacaaaatagttgtctttttgattttgatcacaaaaaataaactggtagtgacaggatatgatggagagatttgacatcctggcaaatcactgtcattgattcaattattctaattctgaataaaagctgtatacagta

SEQ ID NO: 163362 - DNA, 455 bp, Homo sapiens
  Payload ID: 12182
  Gene Symbol: PAX6
  Gene Name: paired box 6
  ENST ID: ENST00000438681
  CDS Start-End: 340-455
tgagccatcaccaatcagcataggaatctgagaattgctctcacacaccaacccagcaacatccgtggagaaaactctcaccagcaactcctttaaaacaccgtcatttcaaaccattgtggtcttcaagcaacaacagcagcacaaaaaaccccaaccaaacaaaactcttgacagaagctgtgacaaccagaaaggatgcctcataaagggggaagactttaactaggggcgcgcagatgtgtgaggccttttattgtgagagtggacagacatccgagatttcagagccccatattcgagccccgtggaatcccgcggcccccagccagagccagcatgcagaacagtcacagcggagtgaatcagctcggtggtgtctttgtcaacgggcggccactgccggactccacccggcagaagattgtagagctagctcacagcggggcccggcc

SEQ ID NO: 163363 - DNA, 574 bp, Homo sapiens
  Payload ID: 12182
  Gene Symbol: PAX6
  Gene Name: paired box 6
  ENST ID: ENST00000524853
  CDS Start-End: 402-574
agtcaacaaatggcacgtgggagaagttggtgagtgtttggtgaggactcttcagggcttttcacaagaaccctctgtacacaaagaatctgagaattgctctcacacaccaacccagcaacatccgtggagaaaactctcaccagcaactcctttaaaacaccgtcatttcaaaccattgtggtcttcaagcaacaacagcagcacaaaaaaccccaaccaaacaaaactcttgacagaagctgtgacaaccagaaaggatgcctcataaagggggaagactttaactaggggcgcgcagatgtgtgaggccttttattgtgagagtggacagacatccgagatttcagagccccatattcgagccccgtggaatcccgcggcccccagccagagccagcatgcagaacagtcacagcggagtgaatcagctcggtggtgtctttgtcaacgggcggccactgccggactccacccggcagaagattgtagagctagctcacagcggggcccggccgtgcgacatttcccgaattctgcaggtgtccaacggatgtgtgagtaaaattctggg

SEQ ID NO: 163364 - DNA, 677 bp, Homo sapiens
  Payload ID: 12182
  Gene Symbol: PAX6
  Gene Name: paired box 6
  ENST ID: ENST00000525535
  CDS Start-End: 672-677
gcagcgtcctcactgtcccggctgccaggggctgcggcgacgcggccagtcagcagcgagttcaggtcgcgcagattttattgatgagctctgactttcagcactttccctaagtcaagaagagtctagcgtacccttcggctgcttcatttcagcctccctgcctcagctcttcagccctattccccctcgccctgtcctggggtgtgtacagcagcccaggccttccttctccttcccggctccgtggcccgaagccgccgagagagctcgggacagcgcaggaccaggcagccgctcgctctcctgtcaccttaactgcaggctccgaggggcgcctttggagtgtactgaggaatctgagaattgctctcacacaccaacccagcaacatccgtggagaaaactctcaccagcaactcctttaaaacaccgtcatttcaaaccattgtggtcttcaagcaacaacagcagcacaaaaaaccccaaccaaacaaaactcttgacagaagctgtgacaaccagaaaggatgcctcataaagggggaagactttaactaggggcgcgcagatgtgtgaggccttttattgtgagagtggacagacatccgagatttcagagccccatattcgagccccgtggaatcccgcggcccccagccagagccagcatgcag

SEQ ID NO: 163365 - DNA, 6860 bp, Homo sapiens
  Payload ID: 12182
  Gene Symbol: PAX6
  Gene Name: paired box 6
  Uniprot ID: P26367
  ENST ID: ENST00000606377
  CDS Start-End: 408-1718
gcacttagtcaacaaatggcacgtgggagaagttggtgagtgtttggtgaggactcttcagggcttttcacaagaaccctctgtacacaaagaatctgagaattgctctcacacaccaacccagcaacatccgtggagaaaactctcaccagcaactcctttaaaacaccgtcatttcaaaccattgtggtcttcaagcaacaacagcagcacaaaaaaccccaaccaaacaaaactcttgacagaagctgtgacaaccagaaaggatgcctcataaagggggaagactttaactaggggcgcgcagatgtgtgaggccttttattgtgagagtggacagacatccgagatttcagagccccatattcgagccccgtggaatcccgcggcccccagccagagccagcatgcagaacagtcacagcggagtgaatcagctcggtggtgtctttgtcaacgggcggccactgccggactccacccggcagaagattgtagagctagctcacagcggggcccggccgtgcgacatttcccgaattctgcagacccatgcagatgcaaaagtccaagtgctggacaatcaaaacgtgtccaacggatgtgtgagtaaaattctgggcaggtattacgagactggctccatcagacccagggcaatcggtggtagtaaaccgagagtagcgactccagaagttgtaagcaaaatagcccagtataagcgggagtgcccgtccatctttgcttgggaaatccgagacagattactgtccgagggggtctgtaccaacgataacataccaagcgtgtcatcaataaacagagttcttcgcaacctggctagcgaaaagcaacagatgggcgcagacggcatgtatgataaactaaggatgttgaacgggcagaccggaagctggggcacccgccctggttggtatccggggacttcggtgccagggcaacctacgcaagatggctgccagcaacaggaaggagggggagagaataccaactccatcagttccaacggagaagattcagatgaggctcaaatgcgacttcagctgaagcggaagctgcaaagaaatagaacatcctttacccaagagcaaattgaggccctggagaaagagtttgagagaacccattatccagatgtgtttgcccgagaaagactagcagccaaaatagatctacctgaagcaagaatacaggtatggttttctaatcgaagggccaaatggagaagagaagaaaaactgaggaatcagagaagacaggccagcaacacacctagtcatattcctatcagcagtagtttcagcaccagtgtctaccaaccaattccacaacccaccacaccggtttcctccttcacatctggctccatgttgggccgaacagacacagccctcacaaacacctacagcgctctgccgcctatgcccagcttcaccatggcaaataacctgcctatgcaacccccagtccccagccagacctcctcatactcctgcatgctgcccaccagcccttcggtgaatgggcggagttatgatacctacacccccccacatatgcagacacacatgaacagtcagccaatgggcacctcgggcaccacttcaacaggactcatttcccctggtgtgtcagttccagttcaagttcccggaagtgaacctgatatgtctcaatactggccaagattacagtaaaaaaaaaaaaaaaaaaaaaaaggaaaggaaatattgtgttaattcagtcagtgactatggggacacaacagttgagctttcaggaaagaaagaaaaatggctgttagagccgcttcagttctacaattgtgtcctgtattgtaccactggggaaggaatggacttgaaacaaggacctttgtatacagaaggcacgatatcagttggaacaaatcttcattttggtatccaaacttttattcattttggtgtattatttgtaaatgggcatttgtatgttataatgaaaaaaagaacaatgtagactggatggatgtttgatctgtgttggtcatgaagttgttttttttttttttaaaaagaaaaccatgatcaacaagctttgccacgaatttaagagttttatcaagatatatcgaatacttctacccatctgttcatagtttatggactgatgttccaagtttgtatcattcctttgcatataattaaacctggaacaacatgcactagatttatgtcagaaatatctgttggttttccaaaggttgttaacagatgaagtttatgtgcaaaaaagggtaagatataaattcaaggaagaaaaaaagttgatagctaaaaggtagagtgtgtcttcgatataatccaatttgttttatgtcaaaatgtaagtatttgtcttccctagaaatcctcagaatgatttctataataaagttaatttcatttatatttgacaagaatatagatgttttatacacattttcatgcaatcatacgtttcttttttggccagcaaaagttaattgttcttagatatagttgtattactgttcacggtccaatcattttgtgcatctagagttcattcctaatcaattaaaagtgcttgcaagagttttaaacttaagtgttttgaagttgttcacaactacatatcaaaattaaccattgttgattgtaaaaaaccatgccaaagcctttgtatttcctttattatacagttttctttttaaccttatagtgtggtgttacaaattttatttccatgttagatcaacattctaaaccaatggttactttcacacacactctgttttacatcctgatgatccttaaaaaataatccttatagataccataaatcaaaaacgtgttagaaaaaaattccacttacagcagggtgtagatctgtgcccatttatacccacaacatatatacaaaatggtaacatttcccagttagccatttaattctaaagctcaaagtctagaaataatttaaaaatgcaacaagcgattagctaggaattgttttttgaattaggactggcattttcaatctgggcagatttccattgtcagcctatttcaacaatgatttcactgaagtatattcaaaagtagatttcttaaaggagactttctgaaagctgttgcctttttcaaataggccctctcccttttctgtctccctcccctttgcacaagaggcatcatttcccattgaaccactacagctgttcccatttgaatcttgctttctgtgcggttgtggatggttggagggtggaggggggatgttgcatgtcaaggaataatgagcacagacacatcaacagacaacaacaaagcagactgtgactggccggtgggaattaaaggccttcagtcattggcagcttaagccaaacattcccaaatctatgaagcagggcccattgttggtcagttgttatttgcaatgaagcacagttctgatcatgtttaaagtggaggcacgcagggcaggagtgcttgagcccaagcaaaggatggaaaaaaataagcctttgttgggtaaaaaaggactgtctgagactttcatttgttctgtgcaacatataagtcaatacagataagtcttcctctgcaaacttcactaaaaagcctgggggttctggcagtctagattaaaatgcttgcacatgcagaaacctctggggacaaagacacacttccactgaattatactctgctttaaaaaaatccccaaaagcaaatgatcagaaatgtagaaattaatggaaggatttaaacatgaccttctcgttcaatatctactgttttttagttaaggaattacttgtgaacagataattgagattcattgctccggcatgaaatatactaataattttattccaccagagttgctgcacatttggagacaccttcctaagttgcagtttttgtatgtgtgcatgtagttttgttcagtgtcagcctgcactgcacagcagcacatttctgcaggggagtgagcacacatacgcactgttggtacaattgccggtgcagacatttctacctcctgacattttgcagcctacattccctgagggctgtgtgctgagggaactgtcagagaagggctatgtgggagtgcatgccacagctgctggctggcttacttcttccttctcgctggctgtaatttccaccacggtcaggcagccagttccggcccacggttctgttgtgtagacagcagagactttggagacccggatgtcgcacgccaggtgcaagaggtgggaatgggagaaaaggagtgacgtgggagcggagggtctgtatgtgtgcacttgggcacgtatatgtgtgctctgaaggtcaggattgccagggcaaagtagcacagtctggtatagtctgaagaagcggctgctcagctgcagaagccctctggtccggcaggatgggaacggctgccttgccttctgcccacaccctagggacatgagctgtccttccaaacagagctccaggcactctcttggggacagcatggcaggctctgtgtggtagcagtgcctgggagttggccttttactcattgttgaaataatttttgtttattatttatttaacgatacatatatttatatatttatcaatggggtatctgcagggatgttttgacaccatcttccaggatggagattatttgtgaagacttcagtagaatcccaggactaaacgtctaaattttttctccaaacttgactgacttgggaaaaccaggtgaatagaataagagctgaatgttttaagtaataaacgttcaaactgctctaagtaaaaaaatgcattttactgcaatgaatttctagaatatttttcccccaaagctatgcctcctaacccttaaatggtgaacaactggtttcttgctacagctcactgccatttcttcttactatcatcactaggtttcctaagattcactcatacagtattatttgaagattcagctttgttctgtgaatgtcatcttaggattgtgtctatattcttttgcttatttctttttactctgggcctctcatactagtaagattttaaaaagccttttcttctctgtatgtttggctcaccaaggcgaaatatatattcttctctttttcatttctcaagaataaacctcatctgcttttttgtttttctgtgttttggcttggtactgaatgactcaactgctcggttttaaagttcaaagtgtaagtacttagggttagtactgcttatttcaataatgttgacggtgactatctttggaaagcagtaacatgctgtcttagaaatgacattaataatgggcttaaacaaatgaataggggggtccccccactctccttttgtatgcctatgtgtgtctgatttgttaaaagatggacagggaattgattgcagagtgtcgcttccttctaaagtagttttattttgtctactgttagtatttaaagatcctggaggtggacataaggaataaatggaagagaaaagtagatattgtatggtggctactaaaaggaaattcaaaaagtcttagaacccgagcacctgagcaaactgcagtagtcaaaatatttatctcatgttaaagaaaggcaaatctagtgtaagaaatgagtaccatatagggttttgaagttcatatactagaaacacttaaaagatatcatttcagatattacgtttggcattgttcttaagtatttatatctttgagtcaagctgataattaaaaaaaatctgttaatggagtgtatatttcataatgtatcaaaatggtgtctatacctaaggtagcattattgaagagagatatgtttatgtagtaagttattaacataatgagtaacaaataatgtttccagaagaaaggaaaacacattttcagagtgcgtttttatcagaggaagacaaaaatacacacccctctccagtagcttatttttacaaagccggcccagtgaattagaaaaacaaagcacttggatatgatttttggaaagcccaggtacacttattattcaaaatgcacttttactgagtttgaaaagtttcttttatatttaaaataagggttcaaatatgcatattcaatttttatagtagttatctatttgcaaagcatatattaactagtaattggctgttaattttatagacatggtagccagggaagtatatcaatgacctattaagtattttgacaagcaatttacatatctgatgacctcgtatctctttttcagcaagtcaaatgctatgtaattgttccattgtgtgttgtataaaatgaatcaacacggtaagaaaaaggttagagttattaaaataataaactgactaaaatactcatttgaatttattcagaatgttcataatgctttcaaaggacatagcagagcttttgtggagtatccgcacaacattatttattatctatggactaaatcaattttttgaagttgctttaaaatttaaaagcacctttgcttaatataaagccctttaattttaactgacagatcaattctgaaactttattttgaaaagaaaatggggaagaatctgtgtctttagaattaaaagaaatgaaaaaaataaacccgacattctaaaaaaatagaataagaaacctgatttttagtactaatgaaatagcgggtgacaaaatagttgtctttttgattttgatcacaaaaaataaactggtagtgacaggatatgatggagagatttgacatcctggcaaatcactgtcattgattcaattattctaattctgaataaaagctgtatacagta

SEQ ID NO: 163366 - DNA, 2260 bp, Homo sapiens
  Payload ID: 12183
  Gene Symbol: PAX7
  Gene Name: paired box 7
  Uniprot ID: P23759
  ENST ID: ENST00000375375
  CDS Start-End: 599-2161
gaaagctggtgtggagggagaagcgagtgtggtccggagaaagaaggcgtggagaagagggagggagcgagagcgagagaataaatatataaataaatacgagaacgaaatccactccgcagtctccgggctcggaaactttggccccgagcgccagagcgccagagcgcgagagcgcggcgctcgccactctgaggctggcggcctcgattccggccgcgttcccccggcccccctccgccgcggggcctggtctccgggttctgccaggcgcatcagcccgcacaacttctggccgaggccagccggcagaggcggacttggggttggagtgtttgtttgtttgaacttcctcgtcgtcgccaccttccctccccccaacctccaccccacctcacccccctccccagcttctggacgcgtttgactgcagccaggggtggggggtgggggtagggagtgtgtgtggaggggagggagaagaggttaaaaaaaagaagacgaagaagacggaaagaaagagatcgcagcaggggtgaagggagcggacgggaagcgatttttgccgactttggattcgtccccggcgtgcgcaagaatggcggcccttcccggcacggtaccgagaatgatgcggccggctccggggcagaactacccccgcacgggattccctttggaagtgtccaccccgcttggccaaggccgggtcaatcagctgggaggggtcttcatcaatgggcgacccctgcctaaccacatccgccacaagatagtggagatggcccaccatggcatccggccctgtgtcatctcccgacagctgcgtgtctcccacggctgcgtctccaagattctttgccgctaccaggagaccgggtccatccggcctggggccatcggcggcagcaagcccagacaggtggcgactccggatgtagagaaaaagattgaggagtacaagagggaaaacccaggcatgttcagctgggagatccgggacaggctgctgaaggatgggcactgtgaccgaagcactgtgccctcaggtttagtgagttcgattagccgcgtgctcagaatcaagttcgggaagaaagaggaggaggatgaagcggacaagaaggaggacgacggcgaaaagaaggccaaacacagcatcgacggcatcctgggcgacaaagggaaccggctggacgagggctcggatgtggagtcggaacctgacctcccactgaagcgcaagcagcgacgcagtcggaccacattcacggccgagcagctggaggagctggagaaggcctttgagaggacccactacccagacatatacacccgcgaggagctggcgcagaggaccaagctgacagaggcgcgtgtgcaggtctggttcagtaaccgccgcgcccgttggcgtaagcaggcaggagccaaccagctggcggcgttcaaccaccttctgccaggaggcttcccacccaccggcatgcccacgctgcccccctaccagctgccggactccacctaccccaccaccaccatctcccaagatgggggcagcactgtgcaccggcctcagcccctgccaccgtccaccatgcaccagggcgggctggctgcagcggctgcagccgccgacaccagctctgcctacggagcccgccacagcttctccagctactctgacagcttcatgaatccggcggcgccctccaaccacatgaacccggtcagcaacggcctgtctcctcaggtgatgagcatcttgggcaaccccagtgcggtgcccccgcagccacaggctgacttctccatctccccgctgcatggcggcctggactcggccacctccatctcagccagctgcagccagcgggccgactccatcaagccaggagacagcctgcccacctcccaggcctactgcccacccacctacagcaccaccggctacagcgtggaccccgtggccggctatcagtacggccagtacggccagagtgagtgcctggtgccctgggcgtcccccgtccccattccttctcccacccccagggcctcctgcttgtttatggagagctacaaggtggtgtcagggtggggaatgtccatttcacagatggaaaaattgaagtccagccagatggaacagttcacctaaaatgacactgagttgggcaaaacccaggacatctcctggctaagcctctgcttccgtactatggctccaacagaaataaaatacacaacacaaatatca

SEQ ID NO: 163367 - DNA, 1700 bp, Homo sapiens
  Payload ID: 12183
  Gene Symbol: PAX7
  Gene Name: paired box 7
  Uniprot ID: P23759
  ENST ID: ENST00000400661
  CDS Start-End: 81-1637
aagagatcgcagcaggggtgaagggagcggacgggaagcgatttttgccgactttggattcgtccccggcgtgcgcaagaatggcggcccttcccggcacggtaccgagaatgatgcggccggctccggggcagaactacccccgcacgggattccctttggaagtgtccaccccgcttggccaaggccgggtcaatcagctgggaggggtcttcatcaatgggcgacccctgcctaaccacatccgccacaagatagtggagatggcccaccatggcatccggccctgtgtcatctcccgacagctgcgtgtctcccacggctgcgtctccaagattctttgccgctaccaggagaccgggtccatccggcctggggccatcggcggcagcaagcccagacaggtggcgactccggatgtagagaaaaagattgaggagtacaagagggaaaacccaggcatgttcagctgggagatccgggacaggctgctgaaggatgggcactgtgaccgaagcactgtgccctcagtgagttcgattagccgcgtgctcagaatcaagttcgggaagaaagaggaggaggatgaagcggacaagaaggaggacgacggcgaaaagaaggccaaacacagcatcgacggcatcctgggcgacaaagggaaccggctggacgagggctcggatgtggagtcggaacctgacctcccactgaagcgcaagcagcgacgcagtcggaccacattcacggccgagcagctggaggagctggagaaggcctttgagaggacccactacccagacatatacacccgcgaggagctggcgcagaggaccaagctgacagaggcgcgtgtgcaggtctggttcagtaaccgccgcgcccgttggcgtaagcaggcaggagccaaccagctggcggcgttcaaccaccttctgccaggaggcttcccacccaccggcatgcccacgctgcccccctaccagctgccggactccacctaccccaccaccaccatctcccaagatgggggcagcactgtgcaccggcctcagcccctgccaccgtccaccatgcaccagggcgggctggctgcagcggctgcagccgccgacaccagctctgcctacggagcccgccacagcttctccagctactctgacagcttcatgaatccggcggcgccctccaaccacatgaacccggtcagcaacggcctgtctcctcaggtgatgagcatcttgggcaaccccagtgcggtgcccccgcagccacaggctgacttctccatctccccgctgcatggcggcctggactcggccacctccatctcagccagctgcagccagcgggccgactccatcaagccaggagacagcctgcccacctcccaggcctactgcccacccacctacagcaccaccggctacagcgtggaccccgtggccggctatcagtacggccagtacggccagagtgagtgcctggtgccctgggcgtcccccgtccccattccttctcccacccccagggcctcctgcttgtttatggagagctacaaggtggtgtcagggtggggaatgtccatttcacagatggaaaaattgaagtccagccagatggaacagttcacctaaaatgacactgagttgggcaaaacccaggacatctcctggctaagcctctgcttccgtactatg

SEQ ID NO: 163368 - DNA, 5538 bp, Homo sapiens
  Payload ID: 12183
  Gene Symbol: PAX7
  Gene Name: paired box 7
  Uniprot ID: P23759
  ENST ID: ENST00000420770
  CDS Start-End: 84-1601
agaaagagatcgcagcaggggtgaagggagcggacgggaagcgatttttgccgactttggattcgtccccggcgtgcgcaagaatggcggcccttcccggcacggtaccgagaatgatgcggccggctccggggcagaactacccccgcacgggattccctttggaagtgtccaccccgcttggccaaggccgggtcaatcagctgggaggggtcttcatcaatgggcgacccctgcctaaccacatccgccacaagatagtggagatggcccaccatggcatccggccctgtgtcatctcccgacagctgcgtgtctcccacggctgcgtctccaagattctttgccgctaccaggagaccgggtccatccggcctggggccatcggcggcagcaagcccagacaggtggcgactccggatgtagagaaaaagattgaggagtacaagagggaaaacccaggcatgttcagctgggagatccgggacaggctgctgaaggatgggcactgtgaccgaagcactgtgccctcaggtttagtgagttcgattagccgcgtgctcagaatcaagttcgggaagaaagaggaggaggatgaagcggacaagaaggaggacgacggcgaaaagaaggccaaacacagcatcgacggcatcctgggcgacaaagggaaccggctggacgagggctcggatgtggagtcggaacctgacctcccactgaagcgcaagcagcgacgcagtcggaccacattcacggccgagcagctggaggagctggagaaggcctttgagaggacccactacccagacatatacacccgcgaggagctggcgcagaggaccaagctgacagaggcgcgtgtgcaggtctggttcagtaaccgccgcgcccgttggcgtaagcaggcaggagccaaccagctggcggcgttcaaccaccttctgccaggaggcttcccacccaccggcatgcccacgctgcccccctaccagctgccggactccacctaccccaccaccaccatctcccaagatgggggcagcactgtgcaccggcctcagcccctgccaccgtccaccatgcaccagggcgggctggctgcagcggctgcagccgccgacaccagctctgcctacggagcccgccacagcttctccagctactctgacagcttcatgaatccggcggcgccctccaaccacatgaacccggtcagcaacggcctgtctcctcaggtgatgagcatcttgggcaaccccagtgcggtgcccccgcagccacaggctgacttctccatctccccgctgcatggcggcctggactcggccacctccatctcagccagctgcagccagcgggccgactccatcaagccaggagacagcctgcccacctcccaggcctactgcccacccacctacagcaccaccggctacagcgtggaccccgtggccggctatcagtacggccagtacggccagactgctgttgattatctggccaaaaatgtgagcctctccacccagcgtcgcatgaagctcggggagcactctgctgtgctgggactcctgcctgtggaaactggccaggcctactagggcccctggggcgacttgccccagcccaattcccagcccaaccctaactgacccctgagcttcccagccttgccgcctcacccccctgttgtcctaggaggccaggaaaggagcccacctgcttctcatcaccagccccctggaggtagacagccagcttgtcactcacctgtggttagggatccagagtgatgcccttggagtctgctccccactttccccaaggagggtttctggtcagcctgaggtcctcccctgtcaaatcccatggtggcctctgtgccatctcaggcatggagattggggcccaccttgaacaccttgggtgtccagaggaggatggtgcctgagaggaggtcctacagccctttggacccaactccagtgggggccctagctagaagtggaggtgaagctttcagggctgctctcagctggatgtactgggagccagccctgcaaggagggtctctggctcagtgtcagaaccacagccctttcctcctctagacattgggactccagcaaagaggggaccctggccctggggtcttcccaggggagtcagcaggggggcagtctcacccccacccaggaatttgaaggacttcagaaccctccccagacacctctactgggtgcatggggaaatctagcacaggcagggagactggggagaccaggaagaggcttaaccagagggtaggggcacatgggggtggggcttgtcagccgtgggcccgcccaggatacaaggacccaactcaggcttctggaagcagagggctcttatcctgaagcccaagttcccagcatgtccactccatctggggcctggggagcccacagaacttttcagtttccttcattagctgaatcagatgagatggggaggggataaagtcttgaggatacatgagtggaggagcaggaagtgggctcagaaggcactttcataaccagatccctctgtttgtgggagggcaagcctttgttgcccaaggcttcagctctctgcctgcaagtccacaccccagggagttgagattttgcccaaagccttccgcagaggcccgagcccatccttaccatgccccatcctctaggaagaggtctccatcttccccaaacccctttcagtttgtggggatgcagagagctaccctcagagctttggaggagggttgtagactgggcagggatggtttgccccacagacaagatgatcccccctggcatgttgttaggggcaaattgctgtcctgctcagagtggcatctttcaatgttgcctccatcttggccaagaggtccctgcctcctgatccggcacagctgagctgaggcagatgtgaccagttttcaagctaccagccctgggcagaggaagatgtcaacaattccagagcagagggaagaggcaccttccttgaccacaccagtggcctcctgaagttccatgcttttaagagctgggaccttgggaggatgattcaaaccctcaattcctcctccctgggaactttttaccacctttacctatttatcaaaatcatattcatctttaccatcactgtcactgtaatctacattccatcacctttatcaggtgctgctgagtacaaagcacttgggatgggagacacagcactgaattcacaaacattggaccaaactgtttgtccccatctgggttcatgaggccacctctttgctcaatccatgcctcttgccctcagtcaacaagacattcctagagggaaagggctgctgctctgggagtcaacctgagttcctccctcctgggaagctgggttggcaagattctaggacactcacctgcatggacatcacctctgtgacaaatgcttacctgtttctcatcttcagacttggcgatatcaagcctgttctggaccatgaccaggctggctcatatctctggtttagagaaacctatgaataactggggacaaacagactctttggtagcagcagacacatgtgatccatcaagatcaaccaaggttgcaactggagcgtccactgccagagacctttggctcttcaagctcgggacaaaaaagaagactctgttgtcccttggtaacccagtccctgcttttgtagctatcacagcagaaagcaactcttcctgaagaccaaacactcgtcatccacattccttgaatggccaatccttccatctggaggcctggctcagaaagtatctgagtatcctgacaccctctgtgactcaggagcagggatctcaggcagctgatatcaaaaccacccagccccatccccaggaggcgacattccaatgctaggaccaatcccagatatctggtcccgatggtgaaatggaacaaagacctgcttgggaataaaccaaatgatttctcatgacgttgaacataagttctcccaagccatcatcttggtagaaaatgggacttattccttgacaggccccacccccttcagaaagaggcccttgaccctgataggttctctctaaaacccgtatattaacgcatctggccaacttgggttataaaattcagccttgtgttggcaactcgaaacatcaccagagaggtgatgttgaatgagagacacaaggcctccatctctttggggctgaccacagcctgagaaagaaggtctgggttccagtggccaggccgtcccagaaacaacccccatccatccctgtaaatagagtctgtagcaaaataagagctgcttcctccaacttatcacaagtcgccgttggtcctctctaaggagggctctcttctgagttcattgtacaatagttggaaacgtggtgatgtgctgttcgtttatagaaagctgactttttataaatatatatatatactaaaaaaggaaagaaatcccccacagtgtgtgtcgtgctagtgccagagaccatctgtagggatatatcttcatattgtgtgtttcaaattatgcattccaggctctagtgggttctttcaatcttgttcctttatttttttcatttggtatttctctcttgctatataaagaaaaaaagaagtgatgtgtaagaaccaagctatgcttttatacttccattttatacttgatttagctttgttgttcttttgccagaggaacatcaaagggcagagcaaacagagaactagggggataagagagaagaaaagaagaatggagagagaggtttgcccagaaggaaaacgaagagccagattgaaatctgactctggcttgagaacaggacgggtcccagagtttgaccactgccagaatccagtgtttcaagatggagttggtgaagcatccaagattttggatcctgggcctcagtgacactccatcacccaactaaaaagatgttctctgggacctctctcaggctgatgttcttctcatcaagctcccgaatgtgtctcgcactattggacactttttgggggtacacaggtcttctctcctcccctcctgcagaggcaccaaaaccaagaccaaatgggggttctctagccgccaacttgaaacgctctgagacttctgtgtatttgatgcttcttcaagtcagctctgacgtggccaattccctgacctgggaaatatttacatagtactctagatcattccttcttcctagtaactgcaactttgttgcttctgtgtttgactcacagccactttcccccatgcggaagtgagtgggtgtacgtgagggtgtgagtggggtgtgtgcgtgggcgtgtgggcgtgaggtgtgtgtttaaatataatcacaccataatttattcagctatatggagtagtagactagaaagagaaactggtatttgctttaactacctgctgcttgtaagcgcttcctctgtaactcaggcgtaactgttatacattaaaagaaattaaaagca

SEQ ID NO: 163369 - DNA, 4152 bp, Homo sapiens
  Payload ID: 12184
  Gene Symbol: PAX8
  Gene Name: paired box 8
  Uniprot ID: Q06710
  ENST ID: ENST00000263334
  CDS Start-End: 264-1616
gggaacaaacttcagaaggaggagagacaccgggcccagggcaccctcgcgggcggacccaagcagtgagggcctgcagccggccggccagacgatgcaggtgtaaaggatgaggcctggggagggggcctgaggatgcaggcatcgaatctcatcgcatctcatgcccttctcctgggtttgtgcagggcagcggcaggcgcggcccggacctacgggaggaagccccgagccctcggcgggctgcgagcgactccccggcgatgcctcacaactccatcagatctggccatggagggctgaaccagctgggaggggcctttgtgaatggcagacctctgccggaagtggtccgccagcgcatcgtagacctggcccaccagggtgtaaggccctgcgacatctctcgccagctccgcgtcagccatggctgcgtcagcaagatccttggcaggtactacgagactggcagcatccggcctggagtgatagggggctccaagcccaaggtggccacccccaaggtggtggagaagattggggactacaaacgccagaaccctaccatgtttgcctgggagatccgagaccggctcctggctgagggcgtctgtgacaatgacactgtgcccagtgtcagctccattaatagaatcatccggaccaaagtgcagcaaccattcaacctccctatggacagctgcgtggccaccaagtccctgagtcccggacacacgctgatccccagctcagctgtaactcccccggagtcaccccagtcggattccctgggctccacctactccatcaatgggctcctgggcatcgctcagcctggcagcgacaagaggaaaatggatgacagtgatcaggatagctgccgactaagcattgactcacagagcagcagcagcggaccccgaaagcaccttcgcacggatgccttcagccagcaccacctcgagccgctcgagtgcccatttgagcggcagcactacccagaggcctatgcctcccccagccacaccaaaggcgagcagggcctctacccgctgcccttgctcaacagcaccctggacgacgggaaggccaccctgaccccttccaacacgccactggggcgcaacctctcgactcaccagacctaccccgtggtggcagatcctcactcacccttcgccataaagcaggaaacccccgaggtgtccagttctagctccaccccttcctctttatctagctccgcctttttggatctgcagcaagtcggctccggggtcccgcccttcaatgcctttccccatgctgcctccgtgtacgggcagttcacgggccaggccctcctctcagggcgagagatggtggggcccacgctgcccggatacccaccccacatccccaccagcggacagggcagctatgcctcctctgccatcgcaggcatggtggcaggaagtgaatactctggcaatgcctatggccacaccccctactcctcctacagcgaggcctggcgcttccccaactccagcttgctgagttccccatattattacagttccacatcaaggccgagtgcaccgcccaccactgccacggcctttgaccatctgtagttgccatggggacagtgggagcgactgagcaacaggaggactcagcctgggacaggccccagagagtcacacaaaggaatctttatttattacatgaaaaataaccacaagtccagcattgcggcacactccctgtgtggttaatttaatgaaccatgaaagacaggatgaccttggacaaggccaaactgtcctccaagactccttaatgaggggcaggagtcccagggaaagagaaccatgccatgctgaaaaagacaaaattgaagaagaaatgtagcccccagccggtacccaccaaaggagagaagaagcaatagccgaggaacttggggggatggcgaatggttcctgcccgggcccaaggggtgcacagggcacctccatggctccattattaacacaactctagcaattatggaccataagcacttccctccagcccacaagtcacagcctggtgccgaggctctcctcaccagccacccagggagtcacctccctcagcctcccgcctgccccacacggaggctctggctgtcctctttctccactccatttgcttggctctttctacacctccctcttgggcatgggctgagggctggagcgagtccctcagaaattccaccaggctgtcagctgacctcttttgcctgctgctgtgaaggtatagcaccaccccaggtcctcctgcagtgcggcatccccttggcagctgccgtcagccaggccagccccagggagcttaaaacagacattccacagggcctgggcccctgggaggtgaggtgtggtgtgcggcttcacccagggcagaacaaggcagaatcgcaggaaacccgcttccccttcctgacagctcctgccaagccaaatgtgcttcctgcagctcacgcccaccagctactgaagggacccaaggcaccccctgaagccagcgatagagggtccctctctgctccccagcagctcctgcccccaaggcctgactgtatatactgtaaatgaaactttgtttgggtcaagcttccttctttctaacccccagactttggcctctgagtgaaatgtctctctttgccctgtggggcttctctccttgatgcttctttctttttttaaagacaacctgccattaccacatgactcaataaaccattgctcttcatctcaggctttggggttggctggggaaggaggcatcccggggctgggctttctcccaagaacatcagagctgagtagccgacaaactcactttggggccgtgggctggaagggaccatctgatgccccagagctctggcttggccttctccctctgcctttaattcacgttgaacgctgggtacctcactcatcccaagttcttcaacactgagcaaatgcaaggatagcacagtactgagccaaccatagactccccacaaggagttgctgttgttattaacaggaagccagagaatcagcagggtgggttagtgagggatccgggaatagctgtgactggagcctgcataaacagctctgaagggagagagaagactgggctctcttgtgtgccaggcacagtatggaaggcttcatataagttaagctgaaattagccctgttttacatacagcttcattttacatatgaggaaactgaggctttgaaaaaaatgagatgtcttgtccaagatgaaaagtagtagattcaaccaagtcctcttactctaagcccaacgcttttacccaaaaccccagagtcctcatcagggatgccaaatggttctagacccagtggaggttctggagctgccactggggatttaatttcttttgatttgctaaagatttgacctgactgaatggagaggtagagtgtagtgtggccaggacaaggtgagggaggctgtagagacttagcactttaggccaaccacctccaggaaatctgggaaatgcaatgtgacagctcgggctctgcactccagggggctgtctggtgtccacatggaccttctccatgtgggacacagctggaacaagggggcaggggcctgcagctgggatgcccaggtgaatatgggcagctggacaaacaacactgggattgagtcagatagaaggggcccaaggactccagggctgggaggacagaggctgggagagagggctcttacctccttaggcctcccaaagagcggttagggatgctgccatggatggcatggcagggggaaccctcctggaagaaaatccatctcttctgaagggatctgagatgcggctggtttttcaatggcagaacttccctctgcagcgcgactccgaatccatgacatctgagagtcttcctgaccacaaacctctgggatcccgagggctccctacccaagaatcactttgagcacagcatcccaaggagcccatagagcgatcccttgcattcacagccacagcccctctggggacactctgtacccccggcagaccctttccaactcacaaccaataaaggggcttgggctgtgctttgactaaggtga

SEQ ID NO: 163370 - DNA, 3735 bp, Homo sapiens
  Payload ID: 12184
  Gene Symbol: PAX8
  Gene Name: paired box 8
  Uniprot ID: Q06710
  ENST ID: ENST00000263335
  CDS Start-End: 157-1122
ttcagaaggaggagagacaccgggcccagggcaccctcgcgggcggacccaagcagtgagggcctgcagccggccggccagggcagcggcaggcgcggcccggacctacgggaggaagccccgagccctcggcgggctgcgagcgactccccggcgatgcctcacaactccatcagatctggccatggagggctgaaccagctgggaggggcctttgtgaatggcagacctctgccggaagtggtccgccagcgcatcgtagacctggcccaccagggtgtaaggccctgcgacatctctcgccagctccgcgtcagccatggctgcgtcagcaagatccttggcaggtactacgagactggcagcatccggcctggagtgatagggggctccaagcccaaggtggccacccccaaggtggtggagaagattggggactacaaacgccagaaccctaccatgtttgcctgggagatccgagaccggctcctggctgagggcgtctgtgacaatgacactgtgcccagtgtcagctccattaatagaatcatccggaccaaagtgcagcaaccattcaacctccctatggacagctgcgtggccaccaagtccctgagtcccggacacacgctgatccccagctcagctgtaactcccccggagtcaccccagtcggattccctgggctccacctactccatcaatgggctcctgggcatcgctcagcctggcagcgacaagaggaaaatggatgacagtgatcaggatagctgccgactaagcattgactcacagagcagcagcagcggaccccgaaagcaccttcgcacggatgccttcagccagcaccacctcgagccgctcgagtgcccatttgagcggcagcactacccagaggcctatgcctcccccagccacaccaaaggcgagcagggcgagagatggtggggcccacgctgcccggatacccaccccacatccccaccagcggacagggcagctatgcctcctctgccatcgcaggcatggtggcaggaagtgaatactctggcaatgcctatggccacaccccctactcctcctacagcgaggcctggcgcttccccaactccagcttgctgagttccccatattattacagttccacatcaaggccgagtgcaccgcccaccactgccacggcctttgaccatctgtagttgccatggggacagtgggagcgactgagcaacaggaggactcagcctgggacaggccccagagagtcacacaaaggaatctttatttattacatgaaaaataaccacaagtccagcattgcggcacactccctgtgtggttaatttaatgaaccatgaaagacaggatgaccttggacaaggccaaactgtcctccaagactccttaatgaggggcaggagtcccagggaaagagaaccatgccatgctgaaaaagacaaaattgaagaagaaatgtagcccccagccggtacccaccaaaggagagaagaagcaatagccgaggaacttggggggatggcgaatggttcctgcccgggcccaaggggtgcacagggcacctccatggctccattattaacacaactctagcaattatggaccataagcacttccctccagcccacaagtcacagcctggtgccgaggctctcctcaccagccacccagggagtcacctccctcagcctcccgcctgccccacacggaggctctggctgtcctctttctccactccatttgcttggctctttctacacctccctcttgggcatgggctgagggctggagcgagtccctcagaaattccaccaggctgtcagctgacctcttttgcctgctgctgtgaaggtatagcaccaccccaggtcctcctgcagtgcggcatccccttggcagctgccgtcagccaggccagccccagggagcttaaaacagacattccacagggcctgggcccctgggaggtgaggtgtggtgtgcggcttcacccagggcagaacaaggcagaatcgcaggaaacccgcttccccttcctgacagctcctgccaagccaaatgtgcttcctgcagctcacgcccaccagctactgaagggacccaaggcaccccctgaagccagcgatagagggtccctctctgctccccagcagctcctgcccccaaggcctgactgtatatactgtaaatgaaactttgtttgggtcaagcttccttctttctaacccccagactttggcctctgagtgaaatgtctctctttgccctgtggggcttctctccttgatgcttctttctttttttaaagacaacctgccattaccacatgactcaataaaccattgctcttcatctcaggctttggggttggctggggaaggaggcatcccggggctgggctttctcccaagaacatcagagctgagtagccgacaaactcactttggggccgtgggctggaagggaccatctgatgccccagagctctggcttggccttctccctctgcctttaattcacgttgaacgctgggtacctcactcatcccaagttcttcaacactgagcaaatgcaaggatagcacagtactgagccaaccatagactccccacaaggagttgctgttgttattaacaggaagccagagaatcagcagggtgggttagtgagggatccgggaatagctgtgactggagcctgcataaacagctctgaagggagagagaagactgggctctcttgtgtgccaggcacagtatggaaggcttcatataagttaagctgaaattagccctgttttacatacagcttcattttacatatgaggaaactgaggctttgaaaaaaatgagatgtcttgtccaagatgaaaagtagtagattcaaccaagtcctcttactctaagcccaacgcttttacccaaaaccccagagtcctcatcagggatgccaaatggttctagacccagtggaggttctggagctgccactggggatttaatttcttttgatttgctaaagatttgacctgactgaatggagaggtagagtgtagtgtggccaggacaaggtgagggaggctgtagagacttagcactttaggccaaccacctccaggaaatctgggaaatgcaatgtgacagctcgggctctgcactccagggggctgtctggtgtccacatggaccttctccatgtgggacacagctggaacaagggggcaggggcctgcagctgggatgcccaggtgaatatgggcagctggacaaacaacactgggattgagtcagatagaaggggcccaaggactccagggctgggaggacagaggctgggagagagggctcttacctccttaggcctcccaaagagcggttagggatgctgccatggatggcatggcagggggaaccctcctggaagaaaatccatctcttctgaagggatctgagatgcggctggtttttcaatggcagaacttccctctgcagcgcgactccgaatccatgacatctgagagtcttcctgaccacaaacctctgggatcccgagggctccctacccaagaatcactttgagcacagcatcccaaggagcccatagagcgatcccttgcattcacagccacagcccctctggggacactctgtacccccggcagaccctttccaactcacaaccaataaaggggcttgggctgtgctttgactaaggtga

SEQ ID NO: 163371 - DNA, 3966 bp, Homo sapiens
  Payload ID: 12184
  Gene Symbol: PAX8
  Gene Name: paired box 8
  Uniprot ID: Q06710
  ENST ID: ENST00000348715
  CDS Start-End: 157-1353
ttcagaaggaggagagacaccgggcccagggcaccctcgcgggcggacccaagcagtgagggcctgcagccggccggccagggcagcggcaggcgcggcccggacctacgggaggaagccccgagccctcggcgggctgcgagcgactccccggcgatgcctcacaactccatcagatctggccatggagggctgaaccagctgggaggggcctttgtgaatggcagacctctgccggaagtggtccgccagcgcatcgtagacctggcccaccagggtgtaaggccctgcgacatctctcgccagctccgcgtcagccatggctgcgtcagcaagatccttggcaggtactacgagactggcagcatccggcctggagtgatagggggctccaagcccaaggtggccacccccaaggtggtggagaagattggggactacaaacgccagaaccctaccatgtttgcctgggagatccgagaccggctcctggctgagggcgtctgtgacaatgacactgtgcccagtgtcagctccattaatagaatcatccggaccaaagtgcagcaaccattcaacctccctatggacagctgcgtggccaccaagtccctgagtcccggacacacgctgatccccagctcagctgtaactcccccggagtcaccccagtcggattccctgggctccacctactccatcaatgggctcctgggcatcgctcagcctggcagcgacaagaggaaaatggatgacagtgatcaggatagctgccgactaagcattgactcacagagcagcagcagcggaccccgaaagcaccttcgcacggatgccttcagccagcaccacctcgagccgctcgagtgcccatttgagcggcagcactacccagaggcctatgcctcccccagccacaccaaaggcgagcagggcctctacccgctgcccttgctcaacagcaccctggacgacgggaaggccaccctgaccccttccaacacgccactggggcgcaacctctcgactcaccagacctaccccgtggtggcagctccgcctttttggatctgcagcaagtcggctccggggtcccgcccttcaatgcctttccccatgctgcctccgtgtacgggcagttcacgggccaggccctcctctcagggcgagagatggtggggcccacgctgcccggatacccaccccacatccccaccagcggacagggcagctatgcctcctctgccatcgcaggcatggtggcaggaagtgaatactctggcaatgcctatggccacaccccctactcctcctacagcgaggcctggcgcttccccaactccagcttgctgagttccccatattattacagttccacatcaaggccgagtgcaccgcccaccactgccacggcctttgaccatctgtagttgccatggggacagtgggagcgactgagcaacaggaggactcagcctgggacaggccccagagagtcacacaaaggaatctttatttattacatgaaaaataaccacaagtccagcattgcggcacactccctgtgtggttaatttaatgaaccatgaaagacaggatgaccttggacaaggccaaactgtcctccaagactccttaatgaggggcaggagtcccagggaaagagaaccatgccatgctgaaaaagacaaaattgaagaagaaatgtagcccccagccggtacccaccaaaggagagaagaagcaatagccgaggaacttggggggatggcgaatggttcctgcccgggcccaaggggtgcacagggcacctccatggctccattattaacacaactctagcaattatggaccataagcacttccctccagcccacaagtcacagcctggtgccgaggctctcctcaccagccacccagggagtcacctccctcagcctcccgcctgccccacacggaggctctggctgtcctctttctccactccatttgcttggctctttctacacctccctcttgggcatgggctgagggctggagcgagtccctcagaaattccaccaggctgtcagctgacctcttttgcctgctgctgtgaaggtatagcaccaccccaggtcctcctgcagtgcggcatccccttggcagctgccgtcagccaggccagccccagggagcttaaaacagacattccacagggcctgggcccctgggaggtgaggtgtggtgtgcggcttcacccagggcagaacaaggcagaatcgcaggaaacccgcttccccttcctgacagctcctgccaagccaaatgtgcttcctgcagctcacgcccaccagctactgaagggacccaaggcaccccctgaagccagcgatagagggtccctctctgctccccagcagctcctgcccccaaggcctgactgtatatactgtaaatgaaactttgtttgggtcaagcttccttctttctaacccccagactttggcctctgagtgaaatgtctctctttgccctgtggggcttctctccttgatgcttctttctttttttaaagacaacctgccattaccacatgactcaataaaccattgctcttcatctcaggctttggggttggctggggaaggaggcatcccggggctgggctttctcccaagaacatcagagctgagtagccgacaaactcactttggggccgtgggctggaagggaccatctgatgccccagagctctggcttggccttctccctctgcctttaattcacgttgaacgctgggtacctcactcatcccaagttcttcaacactgagcaaatgcaaggatagcacagtactgagccaaccatagactccccacaaggagttgctgttgttattaacaggaagccagagaatcagcagggtgggttagtgagggatccgggaatagctgtgactggagcctgcataaacagctctgaagggagagagaagactgggctctcttgtgtgccaggcacagtatggaaggcttcatataagttaagctgaaattagccctgttttacatacagcttcattttacatatgaggaaactgaggctttgaaaaaaatgagatgtcttgtccaagatgaaaagtagtagattcaaccaagtcctcttactctaagcccaacgcttttacccaaaaccccagagtcctcatcagggatgccaaatggttctagacccagtggaggttctggagctgccactggggatttaatttcttttgatttgctaaagatttgacctgactgaatggagaggtagagtgtagtgtggccaggacaaggtgagggaggctgtagagacttagcactttaggccaaccacctccaggaaatctgggaaatgcaatgtgacagctcgggctctgcactccagggggctgtctggtgtccacatggaccttctccatgtgggacacagctggaacaagggggcaggggcctgcagctgggatgcccaggtgaatatgggcagctggacaaacaacactgggattgagtcagatagaaggggcccaaggactccagggctgggaggacagaggctgggagagagggctcttacctccttaggcctcccaaagagcggttagggatgctgccatggatggcatggcagggggaaccctcctggaagaaaatccatctcttctgaagggatctgagatgcggctggtttttcaatggcagaacttccctctgcagcgcgactccgaatccatgacatctgagagtcttcctgaccacaaacctctgggatcccgagggctccctacccaagaatcactttgagcacagcatcccaaggagcccatagagcgatcccttgcattcacagccacagcccctctggggacactctgtacccccggcagaccctttccaactcacaaccaataaaggggcttgggctgtgctttgactaaggtga

SEQ ID NO: 163372 - DNA, 3633 bp, Homo sapiens
  Payload ID: 12184
  Gene Symbol: PAX8
  Gene Name: paired box 8
  Uniprot ID: Q06710
  ENST ID: ENST00000397647
  CDS Start-End: 157-1020
ttcagaaggaggagagacaccgggcccagggcaccctcgcgggcggacccaagcagtgagggcctgcagccggccggccagggcagcggcaggcgcggcccggacctacgggaggaagccccgagccctcggcgggctgcgagcgactccccggcgatgcctcacaactccatcagatctggccatggagggctgaaccagctgggaggggcctttgtgaatggcagacctctgccggaagtggtccgccagcgcatcgtagacctggcccaccagggtgtaaggccctgcgacatctctcgccagctccgcgtcagccatggctgcgtcagcaagatccttggcaggtactacgagactggcagcatccggcctggagtgatagggggctccaagcccaaggtggccacccccaaggtggtggagaagattggggactacaaacgccagaaccctaccatgtttgcctgggagatccgagaccggctcctggctgagggcgtctgtgacaatgacactgtgcccagtgtcagctccattaatagaatcatccggaccaaagtgcagcaaccattcaacctccctatggacagctgcgtggccaccaagtccctgagtcccggacacacgctgatccccagctcagctgtaactcccccggagtcaccccagtcggattccctgggctccacctactccatcaatgggctcctgggcatcgctcagcctggcagcgacaagaggaaaatggatgacagtgatcaggatagctgccgactaagcattgactcacagagcagcagcagcggaccccgaaagcaccttcgcacggatgccttcagccagcaccacctcgagccgctcgagtgcccatttgagcggcagcactacccagaggcctatgcctcccccagccacaccaaaggcgagcaggaagtgaatactctggcaatgcctatggccacaccccctactcctcctacagcgaggcctggcgcttccccaactccagcttgctgagttccccatattattacagttccacatcaaggccgagtgcaccgcccaccactgccacggcctttgaccatctgtagttgccatggggacagtgggagcgactgagcaacaggaggactcagcctgggacaggccccagagagtcacacaaaggaatctttatttattacatgaaaaataaccacaagtccagcattgcggcacactccctgtgtggttaatttaatgaaccatgaaagacaggatgaccttggacaaggccaaactgtcctccaagactccttaatgaggggcaggagtcccagggaaagagaaccatgccatgctgaaaaagacaaaattgaagaagaaatgtagcccccagccggtacccaccaaaggagagaagaagcaatagccgaggaacttggggggatggcgaatggttcctgcccgggcccaaggggtgcacagggcacctccatggctccattattaacacaactctagcaattatggaccataagcacttccctccagcccacaagtcacagcctggtgccgaggctctcctcaccagccacccagggagtcacctccctcagcctcccgcctgccccacacggaggctctggctgtcctctttctccactccatttgcttggctctttctacacctccctcttgggcatgggctgagggctggagcgagtccctcagaaattccaccaggctgtcagctgacctcttttgcctgctgctgtgaaggtatagcaccaccccaggtcctcctgcagtgcggcatccccttggcagctgccgtcagccaggccagccccagggagcttaaaacagacattccacagggcctgggcccctgggaggtgaggtgtggtgtgcggcttcacccagggcagaacaaggcagaatcgcaggaaacccgcttccccttcctgacagctcctgccaagccaaatgtgcttcctgcagctcacgcccaccagctactgaagggacccaaggcaccccctgaagccagcgatagagggtccctctctgctccccagcagctcctgcccccaaggcctgactgtatatactgtaaatgaaactttgtttgggtcaagcttccttctttctaacccccagactttggcctctgagtgaaatgtctctctttgccctgtggggcttctctccttgatgcttctttctttttttaaagacaacctgccattaccacatgactcaataaaccattgctcttcatctcaggctttggggttggctggggaaggaggcatcccggggctgggctttctcccaagaacatcagagctgagtagccgacaaactcactttggggccgtgggctggaagggaccatctgatgccccagagctctggcttggccttctccctctgcctttaattcacgttgaacgctgggtacctcactcatcccaagttcttcaacactgagcaaatgcaaggatagcacagtactgagccaaccatagactccccacaaggagttgctgttgttattaacaggaagccagagaatcagcagggtgggttagtgagggatccgggaatagctgtgactggagcctgcataaacagctctgaagggagagagaagactgggctctcttgtgtgccaggcacagtatggaaggcttcatataagttaagctgaaattagccctgttttacatacagcttcattttacatatgaggaaactgaggctttgaaaaaaatgagatgtcttgtccaagatgaaaagtagtagattcaaccaagtcctcttactctaagcccaacgcttttacccaaaaccccagagtcctcatcagggatgccaaatggttctagacccagtggaggttctggagctgccactggggatttaatttcttttgatttgctaaagatttgacctgactgaatggagaggtagagtgtagtgtggccaggacaaggtgagggaggctgtagagacttagcactttaggccaaccacctccaggaaatctgggaaatgcaatgtgacagctcgggctctgcactccagggggctgtctggtgtccacatggaccttctccatgtgggacacagctggaacaagggggcaggggcctgcagctgggatgcccaggtgaatatgggcagctggacaaacaacactgggattgagtcagatagaaggggcccaaggactccagggctgggaggacagaggctgggagagagggctcttacctccttaggcctcccaaagagcggttagggatgctgccatggatggcatggcagggggaaccctcctggaagaaaatccatctcttctgaagggatctgagatgcggctggtttttcaatggcagaacttccctctgcagcgcgactccgaatccatgacatctgagagtcttcctgaccacaaacctctgggatcccgagggctccctacccaagaatcactttgagcacagcatcccaaggagcccatagagcgatcccttgcattcacagccacagcccctctggggacactctgtacccccggcagaccctttccaactcacaaccaataaaggggcttgggctgtgctttgactaaggtga

SEQ ID NO: 163373 - DNA, 4084 bp, Homo sapiens
  Payload ID: 12184
  Gene Symbol: PAX8
  Gene Name: paired box 8
  Uniprot ID: Q06710
  ENST ID: ENST00000429538
  CDS Start-End: 196-1548
ataaaaccggtcggtgatgccgggtggatgggaacaaacttcagaaggaggagagacaccgggcccagggcaccctcgcgggcggacccaagcagtgagggcctgcagccggccggccagggcagcggcaggcgcggcccggacctacgggaggaagccccgagccctcggcgggctgcgagcgactccccggcgatgcctcacaactccatcagatctggccatggagggctgaaccagctgggaggggcctttgtgaatggcagacctctgccggaagtggtccgccagcgcatcgtagacctggcccaccagggtgtaaggccctgcgacatctctcgccagctccgcgtcagccatggctgcgtcagcaagatccttggcaggtactacgagactggcagcatccggcctggagtgatagggggctccaagcccaaggtggccacccccaaggtggtggagaagattggggactacaaacgccagaaccctaccatgtttgcctgggagatccgagaccggctcctggctgagggcgtctgtgacaatgacactgtgcccagtgtcagctccattaatagaatcatccggaccaaagtgcagcaaccattcaacctccctatggacagctgcgtggccaccaagtccctgagtcccggacacacgctgatccccagctcagctgtaactcccccggagtcaccccagtcggattccctgggctccacctactccatcaatgggctcctgggcatcgctcagcctggcagcgacaagaggaaaatggatgacagtgatcaggatagctgccgactaagcattgactcacagagcagcagcagcggaccccgaaagcaccttcgcacggatgccttcagccagcaccacctcgagccgctcgagtgcccatttgagcggcagcactacccagaggcctatgcctcccccagccacaccaaaggcgagcagggcctctacccgctgcccttgctcaacagcaccctggacgacgggaaggccaccctgaccccttccaacacgccactggggcgcaacctctcgactcaccagacctaccccgtggtggcagatcctcactcacccttcgccataaagcaggaaacccccgaggtgtccagttctagctccaccccttcctctttatctagctccgcctttttggatctgcagcaagtcggctccggggtcccgcccttcaatgcctttccccatgctgcctccgtgtacgggcagttcacgggccaggccctcctctcagggcgagagatggtggggcccacgctgcccggatacccaccccacatccccaccagcggacagggcagctatgcctcctctgccatcgcaggcatggtggcaggaagtgaatactctggcaatgcctatggccacaccccctactcctcctacagcgaggcctggcgcttccccaactccagcttgctgagttccccatattattacagttccacatcaaggccgagtgcaccgcccaccactgccacggcctttgaccatctgtagttgccatggggacagtgggagcgactgagcaacaggaggactcagcctgggacaggccccagagagtcacacaaaggaatctttatttattacatgaaaaataaccacaagtccagcattgcggcacactccctgtgtggttaatttaatgaaccatgaaagacaggatgaccttggacaaggccaaactgtcctccaagactccttaatgaggggcaggagtcccagggaaagagaaccatgccatgctgaaaaagacaaaattgaagaagaaatgtagcccccagccggtacccaccaaaggagagaagaagcaatagccgaggaacttggggggatggcgaatggttcctgcccgggcccaaggggtgcacagggcacctccatggctccattattaacacaactctagcaattatggaccataagcacttccctccagcccacaagtcacagcctggtgccgaggctctcctcaccagccacccagggagtcacctccctcagcctcccgcctgccccacacggaggctctggctgtcctctttctccactccatttgcttggctctttctacacctccctcttgggcatgggctgagggctggagcgagtccctcagaaattccaccaggctgtcagctgacctcttttgcctgctgctgtgaaggtatagcaccaccccaggtcctcctgcagtgcggcatccccttggcagctgccgtcagccaggccagccccagggagcttaaaacagacattccacagggcctgggcccctgggaggtgaggtgtggtgtgcggcttcacccagggcagaacaaggcagaatcgcaggaaacccgcttccccttcctgacagctcctgccaagccaaatgtgcttcctgcagctcacgcccaccagctactgaagggacccaaggcaccccctgaagccagcgatagagggtccctctctgctccccagcagctcctgcccccaaggcctgactgtatatactgtaaatgaaactttgtttgggtcaagcttccttctttctaacccccagactttggcctctgagtgaaatgtctctctttgccctgtggggcttctctccttgatgcttctttctttttttaaagacaacctgccattaccacatgactcaataaaccattgctcttcatctcaggctttggggttggctggggaaggaggcatcccggggctgggctttctcccaagaacatcagagctgagtagccgacaaactcactttggggccgtgggctggaagggaccatctgatgccccagagctctggcttggccttctccctctgcctttaattcacgttgaacgctgggtacctcactcatcccaagttcttcaacactgagcaaatgcaaggatagcacagtactgagccaaccatagactccccacaaggagttgctgttgttattaacaggaagccagagaatcagcagggtgggttagtgagggatccgggaatagctgtgactggagcctgcataaacagctctgaagggagagagaagactgggctctcttgtgtgccaggcacagtatggaaggcttcatataagttaagctgaaattagccctgttttacatacagcttcattttacatatgaggaaactgaggctttgaaaaaaatgagatgtcttgtccaagatgaaaagtagtagattcaaccaagtcctcttactctaagcccaacgcttttacccaaaaccccagagtcctcatcagggatgccaaatggttctagacccagtggaggttctggagctgccactggggatttaatttcttttgatttgctaaagatttgacctgactgaatggagaggtagagtgtagtgtggccaggacaaggtgagggaggctgtagagacttagcactttaggccaaccacctccaggaaatctgggaaatgcaatgtgacagctcgggctctgcactccagggggctgtctggtgtccacatggaccttctccatgtgggacacagctggaacaagggggcaggggcctgcagctgggatgcccaggtgaatatgggcagctggacaaacaacactgggattgagtcagatagaaggggcccaaggactccagggctgggaggacagaggctgggagagagggctcttacctccttaggcctcccaaagagcggttagggatgctgccatggatggcatggcagggggaaccctcctggaagaaaatccatctcttctgaagggatctgagatgcggctggtttttcaatggcagaacttccctctgcagcgcgactccgaatccatgacatctgagagtcttcctgaccacaaacctctgggatcccgagggctccctacccaagaatcactttgagcacagcatcccaaggagcccatagagcgatcccttgcattcacagccacagcccctctggggacactctgtacccccggcagaccctttccaactcacaaccaataaaggggcttgggctgtgctttgactaaggtga

SEQ ID NO: 163374 - DNA, 556 bp, Homo sapiens
  Payload ID: 12184
  Gene Symbol: PAX8
  Gene Name: paired box 8
  ENST ID: ENST00000554830
  CDS Start-End: 209-556
gagacaccgggcccagggcaccctcgcgggcggacccaagcagtgagggcctgcagccggccggccagggcagcggcaggcgcggcccggacctacgggaggaagccccgagccctcggcgggctgcgagcgactccccggcgatgcctcacaactccatcagatctgaatcatccggaccaaagtgcagcaaccattcaacctccctatggacagctgcgtggccaccaagtccctgagtcccggacacacgctgatccccagctcagctgtaactcccccggagtcaccccagtcggattccctgggctccacctactccatcaatgggctcctgggcatcgctcagcctggcagcgacaagaggaaaatggatgacagtgatcaggatagctgccgactaagcattgactcacagagcagcagcagcggaccccgaaagcaccttcgcacggatgccttcagccagcaccacctcgagccgctcgagtgcccatttgagcggcagcactacccagaggcctatgcctcccccagccacaccaaaggcgagcag

SEQ ID NO: 163375 - DNA, 525 bp, Homo sapiens
  Payload ID: 12184
  Gene Symbol: PAX8
  Gene Name: paired box 8
  ENST ID: ENST00000468980
  CDS Start-End: 1-520
cagcagcggaccccgaaagcaccttcgcacggatgccttcagccagcaccacctcgagccgctcgagtgcccatttgagcggcagcactacccagaggcctatgcctcccccagccacaccaaaggcgagcagggcctctacccgctgcccttgctcaacagcaccctggacgacgggaaggccaccctgaccccttccaacacgccactggggcgcaacctctcgactcaccagacctaccccgtggtggcagggcgagagatggtggggcccacgctgcccggatacccaccccacatccccaccagcggacagggcagctatgcctcctctgccatcgcaggcatggtggcaggaagtgaatactctggcaatgcctatggccacaccccctactcctcctacagcgaggcctggcgcttccccaactccagcttgctgagttccccatattattacagttccacatcaaggccgagtgcaccgcccaccactgccacggcctttgaccatctgtagttgcc

SEQ ID NO: 163376 - DNA, 816 bp, Homo sapiens
  Payload ID: 12184
  Gene Symbol: PAX8
  Gene Name: paired box 8
  ENST ID: ENST00000497038
  CDS Start-End: 548-805
agcatgaatagataggtcccctaaaagctttcttccttcccggggggtaccaggtgatcaggatagctgccgactaagcattgactcacagagcagcagcagcggaccccgaaagcaccttcgcacggatgccttcagccagcaccacctcgagccgctcgagtgcccatttgagcggcagcactacccagaggcctatgcctcccccagccacaccaaaggcgagcagggcctctacccgctgcccttgctcaacagcaccctggacgacgggaaggccaccctgaccccttccaacacgccactggggcgcaacctctcgactcaccagacctaccccgtggtggcagatcctcactcacccttcgccataaagcaggaaacccccgaggtgtccagttctagctccaccccttcctctttatctagctccgcctttttggatctgcagcaagtcggctccggggtcccgcccttcaatgcctttccccatgctgcctccgtgtacgggcagttcacgggccaggccctcctctcagggcgagagatggtggggcccacgctgcccggatacccaccccacatccccaccagcggacagggcagctatgcctcctctgccatcgcaggcatggtggcaggaagtgaatactctggcaatgcctatggccacaccccctactcctcctacagcgaggcctggcgcttccccaactccagcttgctgagttccccatattattacagttccacatcaaggccgagtgcaccgcccaccactgccacggcctttgaccatctgtagttgccatgggg

SEQ ID NO: 163377 - DNA, 656 bp, Homo sapiens
  Payload ID: 12184
  Gene Symbol: PAX8
  Gene Name: paired box 8
  ENST ID: ENST00000465084
  CDS Start-End: 1-295
ccatgctgcctccgtgtacgggcagttcacgggccaggccctcctctcagggcgagagatggtggggcccacgctgcccggatacccaccccacatccccaccagcggacagggcagctatgcctcctctgccatcgcaggcatggtggcaggtaaggagagggccggcaggaaggggagcactgcaaagaggaagtattggagcaaggaagtgaatactctggcaatgcctatggccacaccccctactcctcctacagcgaggcctggcgcttccccaactccagcttgctgagttccccatattattacagttccacatcaaggccgagtgcaccgcccaccactgccacggcctttgaccatctgtagttgccatggggacagtgggagcgactgagcaacaggaggactcagcctgggacaggccccagagagtcacacaaaggaatctttatttattacatgaaaaataaccacaagtccagcattgcggcacactccctgtgtggttaatttaatgaaccatgaaagacaggatgaccttggacaaggccaaactgtcctccaagactccttaatgaggggcaggagtcccagggaaagagaaccatgccatgctgaaaaagacaaaattgaagaagaaatgtagcccc

SEQ ID NO: 163378 - DNA, 4514 bp, Homo sapiens
  Payload ID: 12185
  Gene Symbol: PAX9
  Gene Name: paired box 9
  Uniprot ID: P55771
  ENST ID: ENST00000361487
  CDS Start-End: 226-1251
agcccacgttgctgcttagattgaaatgcagaactcaagcctctttcatcggggcacagacttccttttacttcttccttttgccctctcgcctcctcctcctgggaagaagcggaggcgccggcggtcggccgggatagcaacaggccgggccactgaggcggtgcggaaagtttctgtctgggagtgcggaactggggccgggttggtgtactgctcggagcaatggagccagccttcggggaggtgaaccagctgggaggagtgttcgtgaacgggaggccgctgcccaacgccatccggcttcgcatcgtggaactggcccaactgggcatccgaccgtgtgacatcagccgccagctacgggtctcgcacggctgcgtcagcaagatcctggcgcgatacaacgagacgggctcgatcttgccaggagccatcgggggcagcaagccccgggtcactacccccaccgtggtgaaacacatccggacctacaagcagagagaccccggcatcttcgcctgggagatccgggaccgcctgctggcggacggcgtgtgcgacaagtacaatgtgccctccgtgagctccatcagccgcattctgcgcaacaagatcggcaacttggcccagcagggtcattacgactcatacaagcagcaccagccgacgccgcagccagcgctgccctacaaccacatctactcgtaccccagccctatcacggcggcggccgccaaggtgcccacgccacccggggtgcctgccatccccggttcggtggccatgccgcgcacctggccctcctcgcactccgtcaccgacatcctgggcatccgctccatcaccgaccaagtgagcgacagctccccctaccacagccccaaggtggaggagtggagcagcctgggccgcaacaacttccccgccgccgccccgcacgcggtgaacgggttggagaagggagccctggagcaggaagccaagtacggtcaggcaccaaatggtctcccagctgtgggcagttttgtgtcagcatccagcatggctccttaccctaccccagcccaagtgtcgccttacatgacctacagtgctgctccttctggttatgttgctggacatgggtggcaacatgctgggggcacctcattgtctccccacaactgtgacattccggcatcgctggcgttcaagggaatgcaggcagccagagaaggtagtcattctgtcacggcttccgcgctctgatgggaaattccgtctccagcagcttcacccgggtctccctgtctcagcacctcctcccccaattcccaggtctcacatcccacccctcctgccctccaacccttctgccttgaaagctggctgtacggactcacatcctttgtgctaatgacacttacatatttcttgccataacttttctcttgcagaaaaactgacatgactttaggatttaaaaacaagagcaacaataagcattgaatgagacatttgtgttgcccacatactgtcttaacataacaaagaaacctacacccctcaaagggtttaaggaactttacaaactagtctttggtaaaaccacatgtgtatatttattctaaatcaacctgaacttttgaaatgtgcaattgttgagattttgcaaaatcaataaaggaaaatacttatagaaaaaattatgctacaccctctaatcaaatatggtaaccaagtaagctttaattcatcattaggaaacaaatcaataagtgacttgtttgagtgatcctttgtttaagacatgacctattttgttgaaaaatatatgtagaacccaagcaatatctgaatctagctctccctggtgttttgacttggttccaaatacaataatgtttatattttctattagtttgtaaatacggactctggatggtgcatttgtgtcttcattccataagatattcccctcccctcagccccaccccctctctatttttttctttcttttttgcaaaggtgactttctggcaacgtctttgtctctgtttggtggtgggctgctcgggctcctggacctggacttgcccccaaattttgtgtatgcagtgaaggcttcaacatctcatgaaggacactttatttctacagcagaggacacgaaaaacagataaaacaagccagtctcccattttgtacctaatcaaacaacacacatgctaagcatataaagacaagagggtggaaaatatctgaacaagaaggctctaaaggaagtcacttagaaacttaagtttaatgtgaaatgttttgcaaagatgcttaaaatgaactttgtgttaagaaaaccactgtgaaactaaattgtcctattattgttggcttacctgtgtgttcagcaatctcagccccaaataatgttgtaatttaaagaaaatggaaaattctgctctaatgaatgtaacaatggcttgctgtgaagtttacattgttgtacagaagcatgtttcgcatgtaggtaaactggtggtggtactagaaatacaatgttatttaattttaacaaattccctttattcatttctgaaattacaggacacagtttaactcataaacctttctagaccaatttatttttcactttaatgttaataacagttgtggagtatatgtgtgtgtgagcatgtgagtatgtgttgtattttaaaacaattgattttctggggcaaaattctacagtttttaatcccttctgtttaggaagttcttcctgtttggcaatataggcttaaaaatatgtttttaggacattggtacaattcagctgttggaaaattaatatattgagggttttttggtactaattctgtgcaataactaaaagagcacctcactggatatggatgttgaagatggattccctaggtgattttaatttcttccggtctgtgctgtgcacagtctacatggcaatgcggttccaccacatcggtttcgtggcttcgtttaaaactcagatggctagattagttaggttttcaaatcactaggatgtaaacagtaagcagatttctgacacacaaattatgttagagtgactgcttttttcagacagcagatatcttatagagagctttgaactgcatttatttctaaagcaaccgaaattcagtgctacaaatagaggattataacttcaggagaagaataagcagaaggagcagatgaactctcagggccatagtcttcctttgatcttgtaaaacttccattgacatctggagttcccagtctggtgagaaaatagactataaactgaatggaacaaagatccaatccaatattttggtggagacttctttaaaaccataccatacagggactctcctgtcatctgaaaaactgatgtaaggtacagaactattctttatcaaatgtttttaggtggctgttagggggctttaaaaaatattacttgcttgtgtggaaatgcaaataatgttattttctttatctaaattaagaaatctcttgttattgtgctatttataatttttttctggttcttgtattttaaaaaatctaatattaatggtattgaagtttccttttctccctctaggtcttaacagtgaattcacatggagtaatttttaaaagatatcagatacaatttgctattcaaagaaaattatgatttaaagccactttttaaaatacgagaaggaaaataggatggattaaagggttaacttttaaagattattattggttaatgttgacatatttcctctatctcatagatggtaaaagtgttgcttttaaactggcaaatgcactcttcagaaatccttttctatctgatccacatggagaggttaaaggttcaatttcatgacctctatgcaggcagcgctctcattggatgtaagaatattacctgcaaggatagaatgcagttgtgcaacagagacacattcttatttcttttttttcacaattttgttttgtttttaatgacccttttattgaatattggactgaaatataaattttaaaaaacacgttggaaaggatgtacaacagaaggctatgtatgtatatacagtatgtcaaaagccttttatttttatacttcaaatgctctaaattaataaaaagtaataattaccatgttatcttttactttttattttcaaaatgctttagtgaaatagccccgtagtagaaatagcccacggtagtaacttaggacaggtgtcatatggactttcagttattcttgttgactttactgaatcagcatcatctctggatgcagatataaaatcaagtttggttacatcaagaccaaggagatatttttgttgatacatgttagtatagtaatccttagaaatgctaagtgtatttctttttcagaacatttccccttcatcatacatattttaatactgcagacagctgacttcccacctgaagttgtcgtttaaaactaataacctgaaaatgcagttctgttc

SEQ ID NO: 163379 - DNA, 3104 bp, Homo sapiens
  Payload ID: 12185
  Gene Symbol: PAX9
  Gene Name: paired box 9
  Uniprot ID: P55771
  ENST ID: ENST00000402703
  CDS Start-End: 727-1752
ccctcccctgctctcgcaaggagaaagcgggcgacgagcgctcgcagcccgtggggctgatcccacctcccgcagggctccggtcgtgtcgctgtcggaccgcagaacgccgggacgcatttccgagctcgggcccgacccaacccgctgccattctagctacctagtggagccgcggagagactcttgaaccgtgaggctccttgatgagaaggtggagaggctgccgggctattctccgagcatcttccggccgagctctgctcctctccgtgcgcttgcggcttctccttgggctagcgcgtccgcagtccctccaagtccaggccgcagtcacccaggtggggagctagcctgaaagagacagcggaaggagtttcctggactgcgctgtcgctcaccgacccgcaccaatcaccatgcagcttgccctcggacccgccccttttagggcgtgtccccagtgagtgatagacggagccgccctgccctgctcagcccagcccacgttgctgcttagattgaaatgcagaactcaagcctctttcatcggggcacagacttccttttacttcttccttttgccctctcgcctcctcctcctgggaagaagcggaggcgccggcggtcggccgggatagcaacaggccgggccactgaggcggtgcggaaagtttctgtctgggagtgcggaactggggccgggttggtgtactgctcggagcaatggagccagccttcggggaggtgaaccagctgggaggagtgttcgtgaacgggaggccgctgcccaacgccatccggcttcgcatcgtggaactggcccaactgggcatccgaccgtgtgacatcagccgccagctacgggtctcgcacggctgcgtcagcaagatcctggcgcgatacaacgagacgggctcgatcttgccaggagccatcgggggcagcaagccccgggtcactacccccaccgtggtgaaacacatccggacctacaagcagagagaccccggcatcttcgcctgggagatccgggaccgcctgctggcggacggcgtgtgcgacaagtacaatgtgccctccgtgagctccatcagccgcattctgcgcaacaagatcggcaacttggcccagcagggtcattacgactcatacaagcagcaccagccgacgccgcagccagcgctgccctacaaccacatctactcgtaccccagccctatcacggcggcggccgccaaggtgcccacgccacccggggtgcctgccatccccggttcggtggccatgccgcgcacctggccctcctcgcactccgtcaccgacatcctgggcatccgctccatcaccgaccaagtgagcgacagctccccctaccacagccccaaggtggaggagtggagcagcctgggccgcaacaacttccccgccgccgccccgcacgcggtgaacgggttggagaagggagccctggagcaggaagccaagtacggtcaggcaccaaatggtctcccagctgtgggcagttttgtgtcagcatccagcatggctccttaccctaccccagcccaagtgtcgccttacatgacctacagtgctgctccttctggttatgttgctggacatgggtggcaacatgctgggggcacctcattgtctccccacaactgtgacattccggcatcgctggcgttcaagggaatgcaggcagccagagaaggtagtcattctgtcacggcttccgcgctctgatgggaaattccgtctccagcagcttcacccgggtctccctgtctcagcacctcctcccccaattcccaggtctcacatcccacccctcctgccctccaacccttctgccttgaaagctggctgtacggactcacatcctttgtgctaatgacacttacatatttcttgccataacttttctcttgcagaaaaactgacatgactttaggatttaaaaacaagagcaacaataagcattgaatgagacatttgtgttgcccacatactgtcttaacataacaaagaaacctacacccctcaaagggtttaaggaactttacaaactagtctttggtaaaaccacatgtgtatatttattctaaatcaacctgaacttttgaaatgtgcaattgttgagattttgcaaaatcaataaaggaaaatacttatagaaaaaattatgctacaccctctaatcaaatatggtaaccaagtaagctttaattcatcattaggaaacaaatcaataagtgacttgtttgagtgatcctttgtttaagacatgacctattttgttgaaaaatatatgtagaacccaagcaatatctgaatctagctctccctggtgttttgacttggttccaaatacaataatgtttatattttctattagtttgtaaatacggactctggatggtgcatttgtgtcttcattccataagatattcccctcccctcagccccaccccctctctatttttttctttcttttttgcaaaggtgactttctggcaacgtctttgtctctgtttggtggtgggctgctcgggctcctggacctggacttgcccccaaattttgtgtatgcagtgaaggcttcaacatctcatgaaggacactttatttctacagcagaggacacgaaaaacagataaaacaagccagtctcccattttgtacctaatcaaacaacacacatgctaagcatataaagacaagagggtggaaaatatctgaacaagaaggctctaaaggaagtcacttagaaacttaagtttaatgtgaaatgttttgcaaagatgcttaaaatgaactttgtgttaagaaaaccactgtgaaactaaattgtcctattattgttggcttacctgtgtgttcagcaatctcagccccaaataatgttgtaatttaaagaaaatggaaaattctgctctaatgaatgtaacaatggcttgctgtgaagtttacattgttgtacagaagcatgtttcgcatgtaggtaaactggtggtggtactagaaatacaatgttatttaattttaacaaattccctttattcatttctgaaattacaggacacagtttaactcat

SEQ ID NO: 163380 - DNA, 1289 bp, Homo sapiens
  Payload ID: 12185
  Gene Symbol: PAX9
  Gene Name: paired box 9
  ENST ID: ENST00000554201
  CDS Start-End: 881-1171
aggagcacgttcaggcgtcaagaccgatttctccccctgcttcgggagacttttgaacgctcggagaggcccggcatctcaccactttacttggccgtaggggcctccggcacggcaggaatgagggagggggtccgattggacagtgacggtttggggccgttcggctatgttcagggaccatatggtttggggacagccccagtagttagtaggggacgggtgcgttcgcccagtccccggatgcgtagggaggcccagtggcaggcagctgtcccaagcagcgggtgcgcgtccctgcgcgctgtgtgttcattttgcagagccagccttcggggaggtgaaccagctgggaggagtgttcgtgaacgggaggccgctgcccaacgccatccggcttcgcatcgtggaactggcccaactgggcatccgaccgtgtgacatcagccgccagctacgggtctcgcacggctgcgtcagcaagatcctggcgcgatacaacgagacgggctcgatcttgccaggagccatcgggggcagcaagccccgggtcactacccccaccgtggtgaaacacatccggacctacaagcagagagaccccggcatcttcgcctgggagatccgggaccgcctgctggcggacggcgtgtgcgacaagtacaatgtgccctccgtgagctccatcagccgcattctgcgcaacaagatcggcaacttggcccagcagggtcattacgactcatacaagcagcaccagccgacgccgcagccagcgctgccctacaaccacatctactcgtaccccagccctatcacggcggcggccgccaaggtgcccacgccacccggggtgcctgccatccccggttcggtggccatgccgcgcacctggccctcctcgcactccgtcaccgacatcctgggcatccgctccatcaccgaccaagtgagcgacagctccccctaccacagccccaaggtggaggagtggagcagcctgggccgcaacaacttccccgccgccgccccgcacgcggtgaacgggttggagaagggagccctggagcaggaagccaagcaccaaatggtctcccagctgtgggcagttttgtgtcagcatccagcatggctccttaccctaccccagcccaagtgtcgccttacatgacctacagtgctgctccttctggttatgttgctggacatgggtggcaacatgctgggggcacctcattgtctccccacaactgtgacattccggcatcgctggcgttcaagggaatgca

SEQ ID NO: 163381 - DNA, 1316 bp, Homo sapiens
  Payload ID: 12186
  Gene Symbol: PILRA
  Gene Name: paired immunoglobin-like type 2 receptor alpha
  Uniprot ID: Q9UKJ1
  ENST ID: ENST00000198536
  CDS Start-End: 213-1124
aataggggaaaataagccagatggataaaggaagtgctggtcaccctggaggtgcactggtttggggaaggctcctggcccccacagccctcttcggagcctgagcccggctctcctcactcacctcaacccccaggcggcccctccacagggcccctctcctgcctggacggctctgctggtctccccgtcccctggagaagaacaaggccatgggtcggcccctgctgctgcccctactgcccttgctgctgccgccagcatttctgcagcctagtggctccacaggatctggtccaagctacctttatggggtcactcaaccaaaacacctctcagcctccatgggtggctctgtggaaatccccttctccttctattacccctgggagttagccacagctcccgacgtgagaatatcctggagacggggccacttccacaggcagtccttctacagcacaaggccgccttccattcacaaggattatgtgaaccggctctttctgaactggacagagggtcagaagagcggcttcctcaggatctccaacctgcagaagcaggaccagtctgtgtatttctgccgagttgagctggacacacggagctcagggaggcagcagtggcagtccatcgaggggaccaaactctccatcacccaggctgtcacgaccaccacccagaggcccagcagcatgactaccacctggaggctcagtagcacaaccaccacaaccggcctcagggtcacacagggcaaacgacgctcagactcttggcacataagtctggagactgctgtgggggtggcagtggctgtcactgtgctcggaatcatgattttgggactgatctgcctcctcaggtggaggagaaggaaaggtcagcagcggactaaagccacaaccccagccagggaacccttccaaaacacagaggagccatatgagaatatcaggaatgaaggacaaaatacagatcccaagctaaatcccaaggatgacggcatcgtctatgcttcccttgccctctccagctccacctcacccagagcacctcccagccaccgtcccctcaagagcccccagaacgagaccctgtactctgtcttaaaggcctaaccaatggacagccctctcaagactgaatggtgaggccaggtacagtggcgcacacctgtaatcccagctactctgaagcctgaggcagaatcaagtgagcccaggagttcagggccagctttgataatggagcgagatgccatctctagttaaaaatatatattaacaataaagtaacaaatttaaaaagat

SEQ ID NO: 163382 - DNA, 1011 bp, Homo sapiens
  Payload ID: 12186
  Gene Symbol: PILRA
  Gene Name: paired immunoglobin-like type 2 receptor alpha
  Uniprot ID: Q9UKJ1
  ENST ID: ENST00000350573
  CDS Start-End: 130-822
acagccctcttcggagcctgagcccggctctcctcactcacctcaacccccaggcggcccctccacagggcccctctcctgcctggacggctctgctggtctccccgtcccctggagaagaacaaggccatgggtcggcccctgctgctgcccctactgcccttgctgctgccgccagcatttctgcagcctagtggctccacaggatctggtccaagctacctttatggggtcactcaaccaaaacacctctcagcctccatgggtggctctgtggaaatccccttctccttctattacccctgggagttagccacagctcccgacgtgagaatatcctggagacggggccacttccacaggcagtccttctacagcacaaggccgccttccattcacaaggattatgtgaaccggctctttctgaactggacagagggtcagaagagcggcttcctcaggatctccaacctgcagaagcaggaccagtctgtgtatttctgccgagttgagctggacacacggagctcagggaggcagcagtggcagtccatcgaggggaccaaactctccatcacccagggtcagcagcggactaaagccacaaccccagccagggaacccttccaaaacacagaggagccatatgagaatatcaggaatgaaggacaaaatacagatcccaagctaaatcccaaggatgacggcatcgtctatgcttcccttgccctctccagctccacctcacccagagcacctcccagccaccgtcccctcaagagcccccagaacgagaccctgtactctgtcttaaaggcctaaccaatggacagccctctcaagactgaatggtgaggccaggtacagtggcgcacacctgtaatcccagctactctgaagcctgaggcagaatcaagtgagcccaggagttcagggccagctttgataatggagcgagatgccatctctagttaaaaatatatattaacaataaagtaacaaatttaaaaa

SEQ ID NO: 163383 - DNA, 909 bp, Homo sapiens
  Payload ID: 12186
  Gene Symbol: PILRA
  Gene Name: paired immunoglobin-like type 2 receptor alpha
  Uniprot ID: Q9UKJ1
  ENST ID: ENST00000394000
  CDS Start-End: 130-657
acagccctcttcggagcctgagcccggctctcctcactcacctcaacccccaggcggcccctccacagggcccctctcctgcctggacggctctgctggtctccccgtcccctggagaagaacaaggccatgggtcggcccctgctgctgcccctactgcccttgctgctgccgccagcatttctgcagcctagtggctccacaggatctggtccaagctacctttatggggtcactcaaccaaaacacctctcagcctccatgggtggctctgtggaaatccccttctccttctattacccctgggagttagccacagctcccgacgtgagaatatcctggagacggggccacttccacaggcagtccttctacagcacaaggccgccttccattcacaaggattatgtgaaccggctctttctgaactggacagagggtcagaagagcggcttcctcaggatctccaacctgcagaagcaggaccagtctgtgtatttctgccgagttgagctggacacacggagctcagggaggcagcagtggcagtccatcgaggggaccaaactctccatcacccaggggaacccttccaaaacacagaggagccatatgagaatatcaggaatgaaggacaaaatacagatcccaagctaaatcccaaggatgacggcatcgtctatgcttcccttgccctctccagctccacctcacccagagcacctcccagccaccgtcccctcaagagcccccagaacgagaccctgtactctgtcttaaaggcctaaccaatggacagccctctcaagactgaatggtgaggccaggtacagtggcgcacacctgtaatcccagctactctgaagcctgaggcagaatcaagtgagcccaggagttcagggccagctt

SEQ ID NO: 163384 - DNA, 1043 bp, Homo sapiens
  Payload ID: 12186
  Gene Symbol: PILRA
  Gene Name: paired immunoglobin-like type 2 receptor alpha
  ENST ID: ENST00000453419
  CDS Start-End: 200-880
aagccagatggataaaggaagtgctggtcaccctggaggtgcactggtttggggaaggctcctggcccccacagccctcttcggagcctgagcccggctctcctcactcacctcaacccccaggcggcccctccacagggcccctctcctgcctggacggctctgctggtctccccgtcccctggagaagaacaaggccatgggtcggcccctgctgctgcccctactgcccttgctgctgccgccagcatttctgcagcctagtggctccacaggatctggtccaagctacctttatggggtcactcaaccaaaacacctctcagcctccatgggtggctctgtggaaatccccttctccttctattacccctgggagttagccacagctcccgacgtgagaatatcctggagacggggccacttccacaggcagtccttctacagcacaaggccgccttccattcacaaggattatgtgaaccggctctttctgaactggacagagggtcagaagagcggcttcctcaggatctccaacctgcagaagcaggaccagtctgtgtatttctgccgagttgagctggacacacggagctcagggaggcagcagtggcagtccatcgaggggaccaaactctccatcacccagggtcagcagcggactaaagccacaaccccagccagggaacccttccaaaacacagaggagccatatgagaatatcaggaatgaaggacaaaatacagatcccaagctaaatcccaagctccacctcacccagagcacctcccagccaccgtcccctcaagagcccccagaacgagaccctgtactctgtcttaaaggcctaaccaatggacagccctctcaagactgaatggtgaggccaggtacagtggcgcacacctgtaatcccagctactctgaagcctgaggcagaatcaagtgagcccaggagttcagggccagctttgataatggagcgagatgccatctctagttaaaaatatatattaacaataaagtaacaaatttaaaaa

SEQ ID NO: 163385 - DNA, 664 bp, Homo sapiens
  Payload ID: 12186
  Gene Symbol: PILRA
  Gene Name: paired immunoglobin-like type 2 receptor alpha
  ENST ID: ENST00000432297
  CDS Start-End: 165-664
gctgggtccctgaatcaccgactggaggagagttacctacaagagccttcatccaggagcatccacactgcaatgatataggaatgaggcggcccctccacagggcccctctcctgcctggacggctctgctggtctccccgtcccctggagaagaacaaggccatgggtcggcccctgctgctgcccctactgcccttgctgctgccgccagcatttctgcagcctagtggctccacaggatctggtccaagctacctttatggggtcactcaaccaaaacacctctcagcctccatgggtggctctgtggaaatccccttctccttctattacccctgggagttagccacagctcccgacgtgagaatatcctggagacggggccacttccacaggcagtccttctacagcacaaggccgccttccattcacaaggattatgtgaaccggctctttctgaactggacagagggtcagaagagcggcttcctcaggatctccaacctgcagaagcaggaccagtctgtgtatttctgccgagttgagctggacacacggagctcagggaggcagcagtggcagtccatcgaggggaccaaactctccatcacccagggtcagcagcggactaaagccacaaccccagccagggaacccttcca

SEQ ID NO: 163386 - DNA, 1599 bp, Homo sapiens
  Payload ID: 12187
  Gene Symbol: PILRB
  Gene Name: paired immunoglobin-like type 2 receptor beta
  ENST ID: ENST00000422808
  CDS Start-End: 1217-1599
tgaagacttcctgcgatgagaacagaggcacaggtgccggccctgcagcccccagaacccggactggagggggccatggggcgccggaccctggccctgccctgggtgctgctgaccctgcgtgtcactgcagggaccccggaggtgtgagtacaagttcggatggaggccaccgagctctcgtccttcaccatccgttgtgggttcctggagtctggctccatctccctggtgactgtgagcagggggggccccgatggtgctggggggaccacgctggctgtgttgcacccggaacttggcatccagcaatgggcccctgctcgccaggcccgctgggaaacccagagcagcatctctctcatcctggaaggctctggggccagcagcccctgcgccaacaccaccttctgctgcaagtttgcgtccttccctgagggctcctgggaggcctgtgggagcctcccgcccagctcagacccagggctctctgtcccgccgactcctgcccccattctgcgggcagacctggccgggatcttgggggtctcaggagtccttctctttgactgtggctacctccttcatctgctgtgccgacagaagcaccgccctgcccctaggctccagccatcccacaccagctcctaggcactgagagcacgagcatgggcacccagccaggcctcccaggctgctctccacgtcccttatgccactatcaacaccagctgctgcccagctactttggacacagctcacccccgacagggggccgtcctgtcgtttcctgctgtgactaagtcagcaacacagttcctctgacatgggccttggctgtgcttctttgggggtgaagagattggggaggaagtctccacccctgggaggcagaagccaggcatagcgcgctggctaggactccagtaccgtgaagggaggcagtgagagcagacatctgtgcctcattcctgatctcaaggggaaagcaagaacaagggaggcttcctcaggatctcgaacctgcggaaggaggaccagtctgtgtacttctgccaagtccagctggacatacagatcagggaggctgtcgtggcagtccatcaaggggacccacctcaccatcacccaggccctcaggcagcccctccacagggcccctctcctgcctggacagctctgctggtctccccgtcccctggagaagaacaaggccatgggtcggcccctgctgctgcccctgctgctcctgctgcagccgccagcatttctgcagcctggtggctccacaggatctggtccaagctacctttatggggtcactcaaccaaaacacctctcagcctccatgggtggctctgtggaaatccccttctccttctattacccctgggagttagccatagttcccaacgtgagaatatcctggagacggggccacttccacgggcagtccttctacagcacaaggccgccttccattcacaaggattatgtgaaccggctctttctgaactggacagagggtcaggagagcggcttcctcaggatctcaaacctgcggaaggaggaccagtctgtgtatttctgccgagtcga

SEQ ID NO: 163387 - DNA, 2099 bp, Homo sapiens
  Payload ID: 12187
  Gene Symbol: PILRB
  Gene Name: paired immunoglobin-like type 2 receptor beta
  Uniprot ID: Q9UKJ0
  ENST ID: ENST00000452089
  CDS Start-End: 1060-1743
tgagttctcacccacctgtgccgccctgccttgttacctggaagcacagccttggggactgagcaggccctcactgtcactttaagaagggaatcagccactttgtgctcaccacctctggggaaggtgtgagaggagagaaggaagtggctgtttggctgctgacaacatgaagacttcctgcgatgagaacagaggcacaggtgccggccctgcagcccccagaacccggactggagggggccatggggcgccggaccctggccctgccctgggtgctgctgaccctgcgtgtcactgcagggaccccggaggtgtgagtacaagttcggatggaggccaccgagctctcgtccttcaccatccgttgtgggttcctggagtctggctccatctccctggtgactgtgagcagggggggccccgatggtgctggggggaccacgctggctgtgttgcacccggaacttggcatccagcaatgggcccctgctcgccaggcccgctgggaaacccagagcagcatctctctcatcctggaaggctctggggccagcagcccctgcgccaacaccaccttctgctgcaagtttgcgtccttccctgagggctcctgggaggcctgtgggagcctcccgcccagctcagacccagggctctctgtcccgccgactcctgcccccattctgcgggcagacctggccgggatcttgggggtctcaggagtccttctctttgactgtggctacctccttcatctgctgtgccgacagaagcaccgccctgcccctaggctccagccatcccacaccagctcctaggcactgagagcacgagcatggggaggcttcctcaggatctcgaacctgcggaaggaggaccagtctgtgtacttctgccaagtccagctggacatacagatcagggaggctgtcgtggcagtccatcaaggggacccacctcaccatcacccaggccctcaggcagcccctccacagggcccctctcctgcctggacagctctgctggtctccccgtcccctggagaagaacaaggccatgggtcggcccctgctgctgcccctgctgctcctgctgcagccgccagcatttctgcagcctggtggctccacaggatctggtccaagctacctttatggggtcactcaaccaaaacacctctcagcctccatgggtggctctgtggaaatccccttctccttctattacccctgggagttagccatagttcccaacgtgagaatatcctggagacggggccacttccacgggcagtccttctacagcacaaggccgccttccattcacaaggattatgtgaaccggctctttctgaactggacagagggtcaggagagcggcttcctcaggatctcaaacctgcggaaggaggaccagtctgtgtatttctgccgagtcgagctggacacccggagatcagggaggcagcagttgcagtccatcaaggggaccaaactcaccatcacccaggctgtcacaaccaccaccacctggaggcccagcagcacaaccaccatagccggcctcagggtcacagaaagcaaagggcactcagaatcatggcacctaagtctggacactgccatcagggttgcattggctgtcgctgtgctcaaaactgtcattttgggactgctgtgcctcctcctcctgtggtggaggagaaggaaaggtagcagggcgccaagcagtgacttctgaccaacagagtgtggggagaagggatgtgtattagccccggaggacgtgatgtgagacccgcttgtgagtcctccacactcgttccccattggcaagatacatggagagcaccctgaggacctttaaaaggcaaagccgcaaggcagaaggaggctgggtccctgaatcaccgactggaggagagttacctacaagagccttcatccaggagcatccacactgcaatgatataggaatgaggtctgaactccactgaattaaaccactggcatttgggggctgtttattatagcagtgcaaagagttcctttatcctccccaaggatggaaaaatacaatttattttgcttaccata

SEQ ID NO: 163388 - DNA, 902 bp, Homo sapiens
  Payload ID: 12187
  Gene Symbol: PILRB
  Gene Name: paired immunoglobin-like type 2 receptor beta
  ENST ID: ENST00000455145
  CDS Start-End: 580-902
ctgcgggcagacctggccgggatcttgggggtctcaggagtccttctctttgactgtggctacctccttcatctgctgtgccgacagaagcaccgccctgcccctaggctccagccatcccacaccagctcctaggcactgagagcacgagcatggtcgtttcctgctgtgactaagtcagcaacacagttcctctgacatgggccttggctgtgcttctttgggggtgaagagattggggaggaagtctccacccctgggaggcagaagccaggcatagcgcgctggctaggactccagtaccgtgaagggaggcagtgagagcagacatctgtgcctcattcctgatctcaaggggaaagcaagaacaagacctgtgaagggaaggagggtggatcggcctgactggccctgggaagcacagaggagcctactgggaccagggaagagactgacaagagaagggaggcctgtccctgcctgcttctgtctcaagaagattgttatcacttcctctggtgaaatcctgccttcctgtccccacggcccctcagctgatgccaccttactctggagaggatgggcagagcctcctatggagggagccctgtgggtcaccaaagctccagtgaccacccccgggcaaagacctgcagatcccctgttagagacgggcccaggactttgtgcggggtgcccactgttgctctgagccttcacttcctcagggaggcttcctcaggatctcgaacctgcggaaggaggaccagtctgtgtacttctgccaagtccagctggacatacagatcagggaggctgtcgtggcagtccatcaaggggacccacctcaccatcacccaggccctcaggcagcccctccacagggcccctctcctgcctgg

SEQ ID NO: 163389 - DNA, 1364 bp, Homo sapiens
  Payload ID: 12187
  Gene Symbol: PILRB
  Gene Name: paired immunoglobin-like type 2 receptor beta
  ENST ID: ENST00000443526
  CDS Start-End: 982-1364
tgaagacttcctgcgatgagaacagaggcacaggtgccggccctgcagcccccagaacccggactggagggggccatggggcgccggaccctggccctgccctgggtgctgctgaccctgcgtgtcactgcagggaccccggaggtgtgagtacaagttcggatggaggccaccgagctctcgtccttcaccatccgttgtgggttcctggagtctggctccatctccctggtgactgtgagcagggggggccccgatggtgctggggggaccacgctggctgtgttgcacccggaacttggcatccagcaatgggcccctgctcgccaggcccgctgggaaacccagagcagcatctctctcatcctggaaggctctggggccagcagcccctgcgccaacaccaccttctgctgcaagtttgcgtccttccctgagggctcctgggaggcctgtgggagcctcccgcccagctcagacccagggctctctgtcccgccgactcctgcccccattctgcgggcagacctggccgggatcttgggggtctcaggagtccttctctttgactgtggctacctccttcatctgctgtgccgacagaagcaccggcatagcgcgctggctaggactccagtaccgtgaagggaggcagtgagagcagacatctgtgcctcattcctgatctcaaggggaaagcaagaacaagggaggcttcctcaggatctcgaacctgcggaaggaggaccagtctgtgtacttctgccaagtccagctggacatacagatcagggaggctgtcgtggcagtccatcaaggggacccacctcaccatcacccagggtgagtccagctgccctggcaccaaggaaccttcctggttcagccataggctcagccctcaggcagcccctccacagggcccctctcctgcctggacagctctgctggtctccccgtcccctggagaagaacaaggccatgggtcggcccctgctgctgcccctgctgctcctgctgcagccgccagcatttctgcagcctggtggctccacaggatctggtccaagctacctttatggggtcactcaaccaaaacacctctcagcctccatgggtggctctgtggaaatccccttctccttctattacccctgggagttagccatagttcccaacgtgagaatatcctggagacggggccacttccacgggcagtccttctacagcacaaggccgccttccattcacaaggattatgtgaaccggctctttctgaactggacagagggtcaggagagcggcttcctcaggatctcaaacctgcggaaggaggaccagtctgtgtatttctgccgagtcga

SEQ ID NO: 163390 - DNA, 1506 bp, Homo sapiens
  Payload ID: 12187
  Gene Symbol: PILRB
  Gene Name: paired immunoglobin-like type 2 receptor beta
  ENST ID: ENST00000419749
  CDS Start-End: 1124-1506
tgaagacttcctgcgatgagaacagaggcacaggtgccggccctgcagcccccagaacccggactggagggggccatggggcgccggaccctggccctgccctgggtgctgctgaccctgcgtgtcactgcagggaccccggaggtgtgagtacaagttcggatggaggccaccgagctctcgtccttcaccatccgttgtgggttcctggagtctggctccatctccctggtgactgcccgctgggaaacccagagcagcatctctctcatcctggaaggctctggggccagcagcccctgcgccaacaccaccttctgctgcaagtttgcgtccttccctgagggctcctgggaggcctgtgggagcctcccgcccagctcagacccagggctctctgtcccgccgactcctgcccccattctgcgggcagacctggccgggatcttgggggtctcaggagtccttctctttgactgtggctacctccttcatctgctgtgccgacagaagcaccgccctgcccctaggctccagccatcccacaccagctcctaggcactgagagcacgagcatgggcacccagccaggcctcccaggctgctctccacgtcccttatgccactatcaacaccagctgctgcccagctactttggacacagctcacccccgacagggggccgtcctgtcgtttcctgctgtgactaagtcagcaacacagttcctctgacatgggccttggctgtgcttctttgggggtgaagagattggggaggaagtctccacccctgggaggcagaagccaggcatagcgcgctggctaggactccagtaccgtgaagggaggcagtgagagcagacatctgtgcctcattcctgatctcaaggggaaagcaagaacaagggaggcttcctcaggatctcgaacctgcggaaggaggaccagtctgtgtacttctgccaagtccagctggacatacagatcagggaggctgtcgtggcagtccatcaaggggacccacctcaccatcacccaggccctcaggcagcccctccacagggcccctctcctgcctggacagctctgctggtctccccgtcccctggagaagaacaaggccatgggtcggcccctgctgctgcccctgctgctcctgctgcagccgccagcatttctgcagcctggtggctccacaggatctggtccaagctacctttatggggtcactcaaccaaaacacctctcagcctccatgggtggctctgtggaaatccccttctccttctattacccctgggagttagccatagttcccaacgtgagaatatcctggagacggggccacttccacgggcagtccttctacagcacaaggccgccttccattcacaaggattatgtgaaccggctctttctgaactggacagagggtcaggagagcggcttcctcaggatctcaaacctgcggaaggaggaccagtctgtgtatttctgccgagtcga

SEQ ID NO: 163391 - DNA, 603 bp, Homo sapiens
  Payload ID: 12187
  Gene Symbol: PILRB
  Gene Name: paired immunoglobin-like type 2 receptor beta
  ENST ID: ENST00000438231
  CDS Start-End: 240-603
gcttgggctgggggctgagcgcctgtgacctccactggcttcctccttctcctctctgaggactgaatctggggtgcagcagagcacagactcaggcccgcctttcctctccctgaaagagcctgcgctggccttggacagagaaagggatgagaaccctcaggcagcccctccacagggcccctctcctgcctggacagctctgctggtctccccgtcccctggagaagaacaaggccatgggtcggcccctgctgctgcccctgctgctcctgctgcagccgccagcatttctgcagcctggtggctccacaggatctggtccaagctacctttatggggtcactcaaccaaaacacctctcagcctccatgggtggctctgtggaaatccccttctccttctattacccctgggagttagccatagttcccaacgtgagaatatcctggagacggggccacttccacgggcagtccttctacagcacaaggccgccttccattcacaaggattatgtgaaccggctctttctgaactggacagagggtcaggagagcggcttcctcaggatctcaaacctgcggaaggaggaccagtctg

SEQ ID NO: 163392 - DNA, 1822 bp, Homo sapiens
  Payload ID: 12187
  Gene Symbol: PILRB
  Gene Name: paired immunoglobin-like type 2 receptor beta
  ENST ID: ENST00000438028
  CDS Start-End: 1683-1822
tgaagacttcctgcgatgagaacagaggcacaggtgccggccctgcagcccccagaacccggactggagggggccatggggcgccggaccctggccctgccctgggtgctgctgaccctgcgtgtcactgcagggaccccggaggtgtgagtacaagttcggatggaggccaccgagctctcgtccttcaccatccgttgtgggttcctggagtctggctccatctccctggtgactgtgagcagggggggccccgatggtgctggggggaccacgctggctgtgttgcacccggaacttggcatccagcaatgggcccctgctcgccaggcccgctgggaaacccagagcagcatctctctcatcctggaaggctctggggccagcagcccctgcgccaacaccaccttctgctgcaagtttgcgtccttccctgagggctcctgggaggcctgtgggagcctcccgcccagctcagacccagggctctctgtcccgccgactcctgcccccattctgcgggcagacctggccgggatcttgggggtctcaggagtccttctctttgactgtggctacctccttcatctgctgtgccgacagaagcaccgccctgcccctaggctccagccatcccacaccagctcctaggcactgagagcacgagcatgggcacccagccaggcctcccaggctgctctccacgtcccttatgccactatcaacaccagctgctgcccagctactttggacacagctcacccccgacagggggccgtcctggtgggcatcactccccacccacaccgcacactggccccagggccctgctgcctgggcctccacatccatccctgcacatggcagctttgtctctgttgagaatggactctacgcttaggctgggcagaggcctccctgcactggtcctggcctcactcttttccctgacccttggggcccagggccatggagggacccttaggagttcaatgagagagaccatgaggccactgggctttccccttcccaggcctcctgggtgccacccccttacgttattcttgggcctctaataagtgtcccacaggtgcctggccaggcccacctgctgcagatgtggtctgtgtgtgtgcatgtgtgggtgtgtgtgggcacaggtgtgagtgtgtgagcaacagtaccccattccagtcgtttcctgctgtgactaagtcagcaacacagttcctctgacatgggccttggctgtgcttctttgggggtgaagagattggggaggaagtctccacccctgggaggcagaagccaggcatagcgcgctggctaggactccagtaccgtgaagggaggcagtgagagcagacatctgtgcctcattcctgatctcaaggggaaagcaagaacaagggaggcttcctcaggatctcgaacctgcggaaggaggaccagtctgtgtacttctgccaagtccagctggacatacagatcagggaggctgtcgtggcagtccatcaaggggacccacctcaccatcacccagggtgagtccagctgccctggcaccaaggaaccttcctggttcagccataggctcagccctcaggcagcccctccacagggcccctctcctgcctggacagctctgctggtctccccgtcccctggagaagaacaaggccatgggtcggcccctgctgctgcccctgctgctcctgctgcagccgccagcatttctgcagcctgagggtcaggagagcggcttcctcaggatctcaaacctgcggaaggaggaccagtctgtgtatttctgccgagtcga

SEQ ID NO: 163393 - DNA, 2074 bp, Homo sapiens
  Payload ID: 12187
  Gene Symbol: PILRB
  Gene Name: paired immunoglobin-like type 2 receptor beta
  ENST ID: ENST00000457519
  CDS Start-End: 1692-2074
gctcaccacctctggggaaggtgtgagaggagagaaggaagtggctgtttggctgctgacaacatgaagacttcctgcgatgagaacagaggcacaggtgccggccctgcagcccccagaacccggactggagggggccatggggcgccggaccctggccctgccctgggtgctgctgaccctgcgtgtcactgcagggaccccggaggtgtgagtacaagttcggatggaggccaccgagctctcgtccttcaccatccgttgtgggttcctggagtctggctccatctccctggtgactgtgagcagggggggccccgatggtgctggggggaccacgctggctgtgttgcacccggaacttggcatccagcaatgggcccctgctcgccaggcccgctgggaaacccagagcagcatctctctcatcctggaaggctctggggccagcagcccctgcgccaacaccaccttctgctgcaagtttgcgtccttccctgagggctcctgggaggcctgtgggagcctcccgcccagctcagacccagggctctctgtcccgccgactcctgcccccattctgcgggcagacctggccgggatcttgggggtctcaggagtccttctctttgactgtggctacctccttcatctgctgtgccgacagaagcaccgccctgcccctaggctccagccatcccacaccagctcctaggcactgagagcacgagcatgggcacccagccaggcctcccaggctgctctccacgtcccttatgccactatcaacaccagctgctgcccagctactttggacacagctcacccccgacagggggccgtcctggtgggcatcactccccacccacaccgcacactggccccagggccctgctgcctgggcctccacatccatccctgcacatggcagctttgtctctgttgagaatggactctacgcttaggctgggcagaggcctccctgcactggtcctggcctcactcttttccctgacccttggggcccagggccatggagggacccttaggagttcaatgagagagaccatgaggccactgggctttccccttcccaggcctcctgggtgccacccccttacgttattcttgggcctctaataagtgtcccacaggtgcctggccaggcccacctgctgcagatgtggtctgtgtgtgtgcatgtgtgggtgtgtgtgggcacaggtgtgagtgtgtgagcaacagtaccccattccagtcgtttcctgctgtgactaagtcagcaacacagttcctctgacatgggccttggctgtgcttctttgggggtgaagagattggggaggaagtctccacccctgggaggcagaagccaggcatagcgcgctggctaggactccagtaccgtgaagggaggcagtgagagcagacatctgtgcctcattcctgatctcaaggggaaagcaagaacaagggaggcttcctcaggatctcgaacctgcggaaggaggaccagtctgtgtacttctgccaagtccagctggacatacagatcagggaggctgtcgtggcagtccatcaaggggacccacctcaccatcacccaggccctcaggcagcccctccacagggcccctctcctgcctggacagctctgctggtctccccgtcccctggagaagaacaaggccatgggtcggcccctgctgctgcccctgctgctcctgctgcagccgccagcatttctgcagcctggtggctccacaggatctggtccaagctacctttatggggtcactcaaccaaaacacctctcagcctccatgggtggctctgtggaaatccccttctccttctattacccctgggagttagccatagttcccaacgtgagaatatcctggagacggggccacttccacgggcagtccttctacagcacaaggccgccttccattcacaaggattatgtgaaccggctctttctgaactggacagagggtcaggagagcggcttcctcaggatctcaaacctgcggaaggaggaccagtctgtgtatttctgccgagtcga

SEQ ID NO: 163394 - DNA, 2314 bp, Homo sapiens
  Payload ID: 12187
  Gene Symbol: PILRB
  Gene Name: paired immunoglobin-like type 2 receptor beta
  Uniprot ID: Q9UKJ0
  ENST ID: ENST00000448382
  CDS Start-End: 1118-1933
cacctctggggaaggtgtgagaggagagaaggaagtggctgtttggctgctgacaacatgaagacttcctgcgatgagaacagaggcacaggtgccggccctgcagcccccagaacccggactggagggggccatggggcgccggaccctggccctgccctgggtgctgctgaccctgcgtgtcactgcagggaccccggaggtgtgagtacaagttcggatggaggccaccgagctctcgtccttcaccatccgttgtgggttcctggagtctggctccatctccctggtgactgtgagcagggggggccccgatggtgctggggggaccacgctggctgtgttgcacccggaacttggcatccagcaatgggcccctgctcgccaggcccgctgggaaacccagagcagcatctctctcatcctggaaggctctggggccagcagcccctgcgccaacaccaccttctgctgcaagtttgcgtccttccctgagggctcctgggaggcctgtgggagcctcccgcccagctcagacccaggtggggccggggtgaggggtccaggagggcagggaggggctcgggaactggccatccatctgattcttgcctctgtgcccagggctctctgtcccgccgactcctgcccccattctgcgggcagacctggccgggatcttgggggtctcaggagtccttctctttgactgtggctacctccttcatctgctgtgccgacagaagcaccgccctgcccctaggctccagccatcccacaccagctcctaggcactgagagcacgagcatgggcatagcgcgctggctaggactccagtaccgtgaagggaggcagtgagagcagacatctgtgcctcattcctgatctcaaggggaaagcaagaacaagacctgtgaagggaaggagggtggatcggcctgactggccctgggaagcacagaggagcctactgggaccagggaagagactgacaagagaagggaggcctgtccctgcctgcttctgtctcaagaagattgttatcacttcctctggtgaaatcctgccttcctgtccccacggcccctcagctgatgccaccttactctggagaggatgggcagagcctcctatggagggagccctgtgggtcaccaaagctccagtgaccacccccgggcaaagacctgcagatcccctgttagagacgggcccaggactttgtgcggggtgcccactgttgctctgagccttcacttcctcagggaggcttcctcaggatctcgaacctgcggaaggaggaccagtctgtgtacttctgccaagtccagctggacatacagatcagggaggctgtcgtggcagtccatcaaggggacccacctcaccatcacccaggccctcaggcagcccctccacagggcccctctcctgcctggacagctctgctggtctccccgtcccctggagaagaacaaggccatgggtcggcccctgctgctgcccctgctgctcctgctgcagccgccagcatttctgcagcctggattatgtgaaccggctctttctgaactggacagagggtcaggagagcggcttcctcaggatctcaaacctgcggaaggaggaccagtctgtgtatttctgccgagtcgagctggacacccggagatcagggaggcagcagttgcagtccatcaaggggaccaaactcaccatcacccaggctgtcacaaccaccaccacctggaggcccagcagcacaaccaccatagccggcctcagggtcacagaaagcaaagggcactcagaatcatggcacctaagtctggacactgccatcagggttgcattggctgtcgctgtgctcaaaactgtcattttgggactgctgtgcctcctcctcctgtggtggaggagaaggaaaggtagcagggcgccaagcagtgacttctgaccaacagagtgtggggagaagggatgtgtattagccccggaggacgtgatgtgagacccgcttgtgagtcctccacactcgttccccattggcaagatacatggagagcaccctgaggacctttaaaaggcaaagccgcaaggcagaaggaggctgggtccctgaatcaccgactggaggagagttacctacaagagccttcatccaggagcatccacactgcaatgatataggaatgaggtctgaactccactgaattaaaccactggcatttgggggctgtttattatagcagtgcaaagagttcctttatcctccccaaggatggaaaaatacaatttattttgcttaccata

SEQ ID NO: 163395 - DNA, 772 bp, Homo sapiens
  Payload ID: 12187
  Gene Symbol: PILRB
  Gene Name: paired immunoglobin-like type 2 receptor beta
  ENST ID: ENST00000431140
  CDS Start-End: 593-772
ctcctgggtgccacccccttacgttattcttgggcctctaataagtgtcccacaggtgcctggccaggcccacctgctgcagatgtggtctgtgtgtgtgcatgtgtgggtgtgtgtgggcacaggtgtgagtgtgtgagcaacagtaccccattccagtcgtttcctgctgtgactaagtcagcaacacagttcctctgacatgggccttggctgtgcttctttgggggtgaagagattggggaggaagtctccacccctgggaggcagaagccaggcatagcgcgctggctaggactccagtaccgtgaagggaggcagtgagagcagacatctgtgcctcattcctgatctcaaggggaaagcaagaacaagggaggcttcctcaggatctcgaacctgcggaaggaggaccagtctgtgtacttctgccaagtccagctggacatacagatcagggaggctgtcgtggcagtccatcaaggggacccacctcaccatcacccaggccctcaggcagcccctccacagggcccctctcctgcctggacagctctgctggtctccccgtcccctggagaagaacaaggccatgggtcggcccctgctgctgcccctgctgctcctgctgcagccgccagcatttctgcagcctggattatgtgaaccggctctttctgaactggacagagggtcaggagagcggcttcctcaggatctcaaacctgcggaaggaggaccagtctgtgtatttctgccgagtcgagctgga

SEQ ID NO: 163396 - DNA, 587 bp, Homo sapiens
  Payload ID: 12187
  Gene Symbol: PILRB
  Gene Name: paired immunoglobin-like type 2 receptor beta
  ENST ID: ENST00000608825
  CDS Start-End: 174-587
ggaggcttcctcaggatctcgaacctgcggaaggaggaccagtctgtgtacttctgccaagtccagctggacatacagatcagggaggctgtcgtggcagtccatcaaggggacccacctcaccatcacccaggctctgctggtctccccgtcccctggagaagaacaaggccatgggtcggcccctgctgctgcccctgctgctcctgctgcagccgccagcatttctgcagcctggtggctccacaggatctggtccaagctacctttatggggtcactcaaccaaaacacctctcagcctccatgggtggctctgtggaaatccccttctccttctattacccctgggagttagccatagttcccaacgtgagaatatcctggagacggggccacttccacgggcagtccttctacagcacaaggccgccttccattcacaaggattatgtgaaccggctctttctgaactggacagagggtcaggagagcggcttcctcaggatctcaaacctgcggaaggaggaccagtctgtgtatttctgccgagtcgagctggacacccggagatcagggaggcagcag

SEQ ID NO: 163397 - DNA, 993 bp, Homo sapiens
  Payload ID: 12187
  Gene Symbol: PILRB
  Gene Name: paired immunoglobin-like type 2 receptor beta
  Uniprot ID: Q9UKJ0
  ENST ID: ENST00000609309
  CDS Start-End: 289-972
taaaaaaaaaaaaaaaaaaaggatttgaagtcctggccggagcaattaggcaagggataaaaaggcacctaaggcccttttgcaataagaagccagatggataaaggaagtgctggtcaccctggaggtgtactggtttggggaaggtccccggcccccacagccctctggggagcctcaccctggctctccccactcacctcagccctcaggcagcccctccacagggcccctctcctgcctggacagctctgctggtctccccgtcccctggagaagaacaaggccatgggtcggcccctgctgctgcccctgctgctcctgctgcagccgccagcatttctgcagcctggtggctccacaggatctggtccaagctacctttatggggtcactcaaccaaaacacctctcagcctccatgggtggctctgtggaaatccccttctccttctattacccctgggagttagccatagttcccaacgtgagaatatcctggagacggggccacttccacgggcagtccttctacagcacaaggccgccttccattcacaaggattatgtgaaccggctctttctgaactggacagagggtcaggagagcggcttcctcaggatctcaaacctgcggaaggaggaccagtctgtgtatttctgccgagtcgagctggacacccggagatcagggaggcagcagttgcagtccatcaaggggaccaaactcaccatcacccaggctgtcacaaccaccaccacctggaggcccagcagcacaaccaccatagccggcctcagggtcacagaaagcaaagggcactcagaatcatggcacctaagtctggacactgccatcagggttgcattggctgtcgctgtgctcaaaactgtcattttgggactgctgtgcctcctcctcctgtggtggaggagaaggaaaggtagcagggcgccaagcagtgacttctgaccaacagagtgtggggagaag

SEQ ID NO: 163398 - DNA, 4284 bp, Homo sapiens
  Payload ID: 12188
  Gene Symbol: PRRX1
  Gene Name: paired related homeobox 1
  Uniprot ID: P54821
  ENST ID: ENST00000239461
  CDS Start-End: 314-1051
tttttaatattgtattttactgtggattatctctttggaccgcgccggacttggcctcaggaaatcaaccaatgctgcggaaggcggctggtgcacaacgctctgctctacagaagggggtcccccaccctcttttccaattttttttttttggccttcctctccttccctccctcttcctccctctctctctctctctctccactacccccctctttcttccccactcggctcctctcccccctcgcgcccacagcgtttggtgttgattcgagcgggaagaggggggtgggtgggatcggtgggggagaccatgacctccagctacgggcacgttctggagcggcaaccggcgctgggcggccgcttggacagcccgggcaacctcgacaccctgcaggcgaaaaagaacttctccgtcagtcacctgctagacctggaggaagccggggacatggtggcggcacaggcggatgagaacgtgggcgaggctggccggagcctgctggagtcgccgggactcaccagcggcagcgacaccccgcagcaggacaatgaccagctgaactcagaagaaaaaaagaagagaaagcagcgaaggaataggacaaccttcaatagcagccagctgcaggctttggagcgtgtctttgagcggacacactatcctgatgcttttgtgcgagaagaccttgcccgccgggtgaacctcaccgaggcgagagtgcaggtgtggtttcagaaccgaagagccaagttccgcaggaatgagagagccatgctagccaataaaaacgcttccctcctcaaatcctactcaggagacgtgactgctgtggagcagcccatcgtacctcgtcctgctccgagacccaccgattatctctcctgggggacagcgtctccgtacagcgccatggctacttattctgccacatgtgccaacaatagccctgcacagggcatcaacatggccaacagcattgccaacctgagactgaaggccaaggaatatagtttacagaggaaccaggtgccaacagtcaactgaggaaaaaaaataattaaacaggcctaagaagaaatcaaaaaccataagacacctatcctgctctgttatttcttcatctgctggggggaaaaagtaaattacaaacaaacaaacaaagcagaactaaaatattgggaccatggcagagaaaagcaggagaggagcaaaatgaaaattagttaacaaatgttcctcctccctctgggataccaccaccacttgtttctgtgtgtgtttattttgtttttctttcattcatgctttgcttaatgtactccaggcttcttcagctaggttcagcccacccacccccatgattgtatgaagttttaaaaaaaactacagcagccaaagaaactatatatatatatatatatatatatatccagaatgattgcctctactgtcctcattgacttgtttgaaccttagtgccttaccctgtcctcttcccagttctctttatagaagctctaggagctttcgaaaagccaaagtctttctgaagaatctgtgctggacagacataattccctttctcattgtctccatctttgttggtcatggtaaggtttttccatcagcctctgaaaaaatagttgtgcacaacatctgctcactggactgtctgatccaatgtaattggctgcgtctggctaattctaagcactaaagtctacatctaagctatagatttaagcttgaagctacagattatatcactatcaccaccacccctcaccctatgcaatcaatcaatcaatcatcttaagttaaagatatttgttgtctttgaatgatttgctgtcacagactatttggtagaagaaatatttttcacctgagagaggaagagaaatttctctagtaacacaaagagtgagttctaaaaggcatgcccacatctctttcgtgccttaaggatagtgagatgcacacttatatatatactgtatatatttatatatttatatatatatttcatatatatatataatattgcaagcttaagtttgcaatttcccaaacaatacaaaaagcaaattacacaccctcaccactgttcttatctctatagtgatgaaacattaattagggatcttgctgcttttctttttctacacgaagttttcattaaagccacagaataattgatagggcagctgtttgagaacaggtcccattttcacattagggctttaaatgaattagaaactatttgaggctataaaaatgtccttgagtttggagcctgagctctggtgaaatgctgatacatctgatctatcatgggaattgcagttagagagagtaaggaataccatttagtcatctatccgttcttcacttagcaggaatatgaaagaaaggcacatgtttaagaggaatacctaaaggtttttctaaattccaacatttaaaaggcaattgtgggctatttttattttttaatattttgaaataaagtttagtgtctagggctgggagccaggactgatcttccatttctttttctttgttcccagccatgcttttgtaacttgccaggtggacttgaccaactacattaccatgctgtgcctcagtttacccatttgtaaaatgggattaataatacttacctacctcacaggggtgttgtgaggctctattcatttgctcctttattctttcctgtattctctgtatgtccagcactttgtagccatgggaggaaagggactataaaagtgtacaatgttaatggaatgatacggtacctgaaagccttgttttctagtaagaaaatgctaccttgctgtacatacttataaccttgtatttggaaatgagaaataggtttatattttcagatctctcaaaaatcacatcatttgaccaaagaataatttaagacacatagaacagatttttttaatttatattttcatcctgaccagcttagttctaataatttttagttgtgagtgattaaaaaactttggatcaattttggtcaaacatgccaactttgtagtctgagtgacaggcaaggatttttgggtttaagatgcacttttagcacacatttgtatttcccttggcatatcagattgagctaatggtgatgttatttcaatctaacagccaccaatctgaaattgtatttcaaatgttgattctgtagttctttaaataataatgaagctcatcttatacattttgctttcaccaattgattccttcttcttttagcccactattaaaacatttcttactgaatggttcatgtaggcttgctgaacagcacgcattacttgcttcctgaagagttcccccattcatccatttgtcccattagttgctgtggattatcaagttttgaaggaactgtacatcccaacagactgaaacattctaagtgaaatgagtataatccaagtaactggtgaactttggaggtttggagcttgaagagaatggctaagaagatttgaattatagggagggaacagaaatcatacatgaaaaggttttactgagaaggggaaaaccttagatagagggacatgtgaaacaaaatcatttgaaattttgattcagacatccatttccagtggcaaacagcaaagcctgaacccataaacccaaatgataggtgaagttgggtggttttatccaatgtctcaagcaagcaatgtctgggaatatcatagagtaacaagtgctggtcagccaaagaaacattcactgctggtgaaccaataccataagcatgtattatctaagcacttgatcaagaaatatacatgttgtacaagctctcaattttgttcatttattatcaaatttttaaaatacaagtttggtatgtgatttggaaaagatgccttctggatcttaagccagttgtcagtggaggtcctcagggctgcaaatgtcaagacataaccctgttcctcaccatcatgataccagatacaggtgaatacataggaactatctgcctgtgtcctcaatctcccttcaaacaagatgctgatttgtagggtacttggcaggttaaattaaaccagaagaggtgacttaataaaaaagggaatgacatttagggtataaagatctcataagaaatgtaatatgtaaattatatcttgctttatgttgtaaaatatacattgtttgcgctagaatagaaatgatttcttttcaataaaaagaaagaaggactctaccatgtcttttgttatata

SEQ ID NO: 163399 - DNA, 2217 bp, Homo sapiens
  Payload ID: 12188
  Gene Symbol: PRRX1
  Gene Name: paired related homeobox 1
  Uniprot ID: P54821
  ENST ID: ENST00000367760
  CDS Start-End: 1086-1739
gatgttggcaaagggggttttcttaatcagactgttttttggtcccagggaaaggaggaagaaggagattgtgatggagaaagggggtctgtgaaacgtcaggcacagcacaaaggctttgccacgtaattacaggctcctattaagtcgagatctgccctcccaggggtctccaattttcttgtattccctacaaagcctcctctgcatgccagtttgtgccttttgaagtgccagagagcttcttgatccaactgagaaggaaaaaggagcccagcaagaagagggggagagagagaaggggaaaggggggaacccaccagcaccctccgtcggactcttgaagccttttttttttaattcttaatttttttttttactctttacaaaaagtaaagtgagaatcctgctctctaatacatctgcaagacatcaccctctcctcctgaaactttagtcactcctgagaatccacaggagtgcagagaggggggaacacgttttcttgaagatgttttaaagctggaacaagccttcttctgttggtgcttgaactcttgcctgggaataacttttttaacctttaaaaaaaccattcactttgattcttctctcccaccccttcttctctcttcttctgtttgcctaactcccccgccctgctggcctccgctttcctctctcccccttgttattatttttagtctgtgcgtgtggacacttttggagagttggaagggatttttttctcctgacttgaacatagggtgactttttaatattgtattttactgtggattatctctttggaccgcgccggacttggcctcaggaaatcaaccaatgctgcggaaggcggctggtgcacaacgctctgctctacagaagggggtcccccaccctcttttccaattttttttttttggccttcctctccttccctccctcttcctccctctctctctctctctctccactacccccctctttcttccccactcggctcctctcccccctcgcgcccacagcgtttggtgttgattcgagcgggaagaggggggtgggtgggatcggtgggggagaccatgacctccagctacgggcacgttctggagcggcaaccggcgctgggcggccgcttggacagcccgggcaacctcgacaccctgcaggcgaaaaagaacttctccgtcagtcacctgctagacctggaggaagccggggacatggtggcggcacaggcggatgagaacgtgggcgaggctggccggagcctgctggagtcgccgggactcaccagcggcagcgacaccccgcagcaggacaatgaccagctgaactcagaagaaaaaaagaagagaaagcagcgaaggaataggacaaccttcaatagcagccagctgcaggctttggagcgtgtctttgagcggacacactatcctgatgcttttgtgcgagaagaccttgcccgccgggtgaacctcaccgaggcgagagtgcaggtgtggtttcagaaccgaagagccaagttccgcaggaatgagagagccatgctagccaataaaaacgcttccctcctcaaatcctactcaggagacgtgactgctgtggagcagcccatcgtacctcgtcctgctccgagacccaccgattatctctcctgggggacagcgtctccgtacagatcctcgtccctcccaagatgttgtttacacgaggggcttcataacggattctaacggaagacactgaaaagcgccatggctacttattctgccacatgtgccaacaatagccctgcacagggcatcaacatggccaacagcattgccaacctgagactgaaggccaaggaatatagtttacagaggaaccaggtgccaacagtcaactgaggaaaaaaaataattaaacaggcctaagaagaaatcaaaaaccataagacacctatcctgctctgttatttcttcatctgctggggggaaaaagtaaattacaaacaaacaaacaaagcagaactaaaatattgggaccatggcagagaaaagcaggagaggagcaaaatgaaaattagttaacaaatgttcctcctccctctgggataccaccaccacttgtttctgtgtgtgtttattttgtttttctttcattcatgctttgcttaatgtactccaggcttcttcagctaggttcagcccacccacccccatgattgta

SEQ ID NO: 163400 - DNA, 3501 bp, Homo sapiens
  Payload ID: 12188
  Gene Symbol: PRRX1
  Gene Name: paired related homeobox 1
  ENST ID: ENST00000497230
  CDS Start-End: 283-885
tctttggaccgcgccggacttggcctcaggaaatcaaccaatgctgcggaaggcggctggtgcacaacgctctgctctacagaagggggtcccccaccctcttttccaattttttttttttggccttcctctccttccctccctcttcctccctctctctctctctctctccactacccccctctttcttccccactcggctcctctcccccctcgcgcccacagcgtttggtgttgattcgagcgggaagaggggggtgggtgggatcggtgggggagaccatgacctccagctacgggcacgttctggagcggcaaccggcgctgggcggccgcttggacagcccgggcaacctcgacaccctgcaggcgaaaaagaacttctccgtcagtcacctgctagacctggaggaagccggggacatggtggcggcacaggcggatgagaacgtgggcgaggctggccggagcctgctggagtcgccgggactcaccagcggcagcgacaccccgcagcaggacaatgaccagctgaactcagaagaaaaaaagaagagaaagcagcgaaggaataggacaaccttcaatagcagccagctgcaggctttggagcgtgtctttgagcggacacactatcctgatgcttttgtgcgagaagaccttgcccgccgggtgaacctcaccgaggcgagagtgcaggtgtggtttcagaaccgaagagccaagttccgcaggaatgagagagccatgctagccaataaaaacgcttccctcctcaaatcctactcaggagacgtgactgctgtggagcagcccatcgtacctcgtcctgctccgagacccaccgattatctctcctgggggacagcgtctccgtacaggtgaatgactggcccactctcccttgctccacttccacatgtttctcagcggtcggtcatgtttcaagctgcttgtgcagctcaccgacatttcttactgggttaatctcttcagagacattcaacttgctgacatccccacattttcccaggagattataagctgccccagcagcagggtttggggcagaagtgagaggggcaggctatctcaccaatctcctcttggactcaggaactcttgcaaaggtttcaaagatgaggaagaatctaaaagaaaagatcattaagctgtgcccagtgttcctcttgcaacaattctggaacaaaactttaccctgtttccaaatttaagctaaattcgttgtattatgcaaatgtagggacgtaacttgtaaaactccaagtatagggccaaaggcaaactttgcagtaaaactggctttgaattaaaaaaaggaagaaggaaggaaggaagaaagaaaggaaagaaggaaggaaggagagagacgagagggactatgacagagagaggaggaaagaaaagccaagttcattctgatcactttcatggccaaggttctttgttagtaggtgtgaatttcttataatgccaaatgccttcctaatctattgctaattcttgtctacttgtctgaagttttctctggggatcagtttgtgtgtatttgtgtgtgtgcgtgtgtgtgtgtgtctgtgtgtgtttcttttaaataaaaaaggaatgtataatttacactaaacttttatattaaaaagttgaacatttttaaagaaacaaatatcagagtactatttcaatctcataaagaggcttttaacctcccattattatgctgttcagaaaatataggctgccagaagggaagctgagacacaaattcctaacccattggattagtctagagtgactttctttgaaaatatacctgagtactctgagaaaccaggccaagcctacgtgttctccctggctgatttcagtggaggaagaactattcaaaaattcatttattatgcttttgtttacctttttattgtcaaggttaattattggtttaaggagaggttttaaatgaaatataggagattatgtctcagatgaagttgaatttctgacatgaaatgctacatttttgaaatgcaagtgtttttcaaaggttcttagctttaatcaaagcaaaaagcctcatctaaaagtttctttctgttccaaatcagttcctttagagaaacatggtaaatgcacttggaaatttgttttaatcccctgttataaaattagcctgaattctttttgtcttagcacatagagaccctacatctaggaaagtcttattctgggccctattgcactcagatgtggtgtgccttactgatcttgaaacattagttatatctgtgtgccctattttaaatttaaactcctctcctataagatttactacaaatacattttttgaagaccactgtaaaatcacatattctctaatattttaaataaatgaaaggctgctttatttctcttataaacattggtataagagaaatttggtgtgttcatgaacacgctaaatggcttggaaaatgggtgtggttcaaagcctgatgcttcaagatctctggtttgaatttggtcacaaccaggaagtattgcccctttttctgtctgggtcctccataggaacttttcataccagccataaacaatccagatggctgccacgtggtccttaccagtgagaggcgtcacacagcacacactgcatgaatggggatgaaatcattcctgaattaatatagggttatattacttggacctcagccatttgagcctcagtgtctgcatcatatgtgtttagtatatggacatctaactgaaattattaacgtggcaatttatgcgtgccttttttggaaatattctattttaatggaaagaattatgtagaaatactggatacatttttaaaaacatccataattcaccatcttgacataactagtatattcatttttgtgattagagttcaatgttttatatagatgtagctttagtgtatatattattttgtattctgctcttttcacttaaagtcatatgacctagtacattttactcatttcttggtatgcttttatatcatttctctcttagaaattggatttgtaaaaattaatttagaaaatcataaaatctgttcatattctgtatgaagaataaattaatcttcagatataagcagaaaagtgatgttaaaacaataatttaatcaataataatgttttttgatccaatgttgactgaagtgtttatattttggttgatttctaaaagtagcaaaaagctattctgttatttggagaattttctgctatgtttagaaccaaactatgttatgatttcacactttgaagcttgataggaaatattgttaaggaaataaaaaagaaaaacaagtgatccaaagcaaaggaaatgatagacttttgtgttatgaaaaattaactcactgttcttgttggtactattatgtcaagttagttatctcacatgtgacactcattaaaaggcatttctcttggttaattcttggaa

SEQ ID NO: 163401 - DNA, 1311 bp, Homo sapiens
  Payload ID: 12189
  Gene Symbol: PRRX2
  Gene Name: paired related homeobox 2
  Uniprot ID: Q99811
  ENST ID: ENST00000372469
  CDS Start-End: 228-989
cgcagcgcgtgcaccagcggctccggagcgagcggccgtggctgagaaggggagggcggaaagtttgtttccccgacgtcagcgccgggcgggccgcgaggctaggaggcggcgggagctgggcagagcgcggggcggccggggctctcgctccgacccgcgcccgcgacccttcctgggacccgagcccgagacccccgccggcccccccggggccgctcgcgggcatggacagcgcggccgccgccttcgccctggacaagccggcgctgggcccggggccgccgccgcctccacccgcgctggggcccggcgactgcgcccaggcgcgcaagaacttctcggtgagccacctcctggacctggaagaggtggcggcggccgggcggctggcggcgcgccccggggccagggccgaggcgcgggagggcgcagcacgggagccgtccgggggcagcagcggcagcgaggcggcgccgcaggatggtgagtgtcccagcccggggcgcggtagcgccgccaagcggaagaagaagcagcggcggaaccgcaccacgttcaacagcagccaactgcaggcgctggagcgcgtgttcgagcgcacgcactaccccgacgcctttgtgcgcgaggagcttgcccggcgcgtcaacctcagcgaggcgcgcgttcaggtctggtttcagaaccgccgcgccaagttccgcaggaatgaaagggccatgctggccagccgctctgcctcgctgctcaagtcctacagccaggaggccgccatcgagcagcccgtggctccccggcccaccgccctgagtccagattatctctcctggacagcctcgtccccctacagcacagtgccaccctacagccctgggagctcaggccccgcaaccccaggggtcaacatggccaacagcatcgccagcctccgtctcaaggccaaggagttcagcctgcaccacagccaggtgcctacggtgaactgaagtccagtcccaccaggacccagacgcctccctgggtggacagcaatagaaaagggggcagacgcccaggaagtgaccttctcctggatgagctctcctggcccgtctgtccagcctggactcccgagcccacgaggctgttgaggcccctgcagccgggcccagctcttctgtccttggccaccagagactgcagcccacaacccttggaggggttgggccggaaggtggaagagcctgccaaggacctcatttagtttgtgtattaaaaccaaaaagcttttgtctttaagaaataaaaccatttttttaagccccaaaa

SEQ ID NO: 163402 - DNA, 1699 bp, Homo sapiens
  Payload ID: 12190
  Gene Symbol: PHOX2A
  Gene Name: paired-like homeobox 2a
  Uniprot ID: O14813
  ENST ID: ENST00000298231
  CDS Start-End: 173-1027
acttgcgttgcacccgggctgagtgcggccgcgacggggcgggcggactctcgggcgctcagagctggcctcgggtcctcggagcctggcgctcgaacctcccttccgacctccacccggaccccgaccccgacccggcctggcccggcccccgcccccgccccccgggccgatggactactcctacctcaattcgtacgactcgtgcgtggcggccatggaggcgtccgcctacggcgactttggcgcctgcagccagcccggcggcttccaatacagccccctgcggcccgctttccccgcggcagggccgccctgccccgcgctcggctcctccaactgcgcacttggcgccctacgcgaccaccagcccgcgccctactcggcagtgccctacaagttcttcccagagccatccggcctgcacgagaagcgcaagcagcggcgcatccgcaccacgttcaccagcgcgcagctcaaggagctggagcgcgttttcgctgagacccactaccccgacatttacacgcgtgaggagctggcgctcaagatcgacctcactgaggctcgcgtgcaggtctggttccagaaccgccgggccaagttccgcaaacaggagcgcgcggccagcgccaagggcgcggcgggcgcggcgggcgccaaaaagggcgaggcgcgctgctcctccgaggacgacgattccaaggagtccacgtgcagccccacgcccgatagcaccgcctcgctgccgccgccgcctgcgcccggcctggccagcccgcgcctgagccccagcccgctgcccgtcgcactgggctccgggccgggacctgggccggggccacagccgctcaagggcgcactgtgggccggtgtggcgggcggtgggggcggcgggcctggcgcgggagcggccgaactacttaaggcttggcagccggcggagtccggccccgggcccttctccggggttctgtcctcctttcaccggaagcccggccccgccctgaagaccaatctcttctagctgccggcctctggaggctccgagcctgcccccagagacgtccctgcccctccaggacctgacagcccctcccatcctggccacccgcctggaagtccccatccgtctccactccctactgtctcacccctcggtgtgtcctccccaactttggagaccaagtcagggccactctcgtcctcacccaccctctaccagcagagcggagttctttataccgggacctcctccaggagaaccccggagctccttctagcttggccttctttggatgcggtatcacatgaggcctgtccctaacagtgccctcaaagtgaaggtcctcaaggaggatcggcacagcccccttccctggctctgcagcggctgggtcaccccttacgctggtgatcaggaaagcccgctgccccacccctcgggcccacccgtacagaggctggtggtcgccgggataattaatgaccaccgccaattcatccctcacgtgtctcctctcttccctagcccgtctggcacagagggtggacctgttagaggagtggaggggctgcctggggaatgggacagagggattctctttccctaatttttttggttgtcctttttctttgaaaaacttgtaatttattgaagttttactcaatccaaataaaacttaatttattgaagaca

SEQ ID NO: 163403 - DNA, 928 bp, Homo sapiens
  Payload ID: 12190
  Gene Symbol: PHOX2A
  Gene Name: paired-like homeobox 2a
  ENST ID: ENST00000546310
  CDS Start-End: 1-256
ggagcgcgttttcgctgagacccactaccccgacatttacacgcgtgaggagctggcgctcaagatcgacctcactgaggctcgcggcgcactgtgggccggtgtggcgggcggtgggggcggcgggcctggcgcgggagcggccgaactacttaaggcttggcagccggcggagtccggccccgggcccttctccggggttctgtcctcctttcaccggaagcccggccccgccctgaagaccaatctcttctagctgccggcctctggaggctccgagcctgcccccagagacgtccctgcccctccaggacctgacagcccctcccatcctggccacccgcctggaagtccccatccgtctccactccctactgtctcacccctcggtgtgtcctccccaactttggagaccaagtcagggccactctcgtcctcacccaccctctaccagcagagcggagttctttataccgggacctcctccaggagaaccccggagctccttctagcttggccttctttggatgcggtatcacatgaggcctgtccctaacagtgccctcaaagtgaaggtcctcaaggaggatcggcacagcccccttccctggctctgcagcggctgggtcaccccttacgctggtgatcaggaaagcccgctgccccacccctcgggcccacccgtacagaggctggtggtcgccgggataattaatgaccaccgccaattcatccctcacgtgtctcctctcttccctagcccgtctggcacagagggtggacctgttagaggagtggaggggctgcctggggaatgggacagagggattctctttccctaatttttttggttgtcctttttctttgaaaaacttgtaatttattgaagttttactcaatccaaataaaacttaatttattgaagaca

SEQ ID NO: 163404 - DNA, 3030 bp, Homo sapiens
  Payload ID: 12191
  Gene Symbol: PHOX2B
  Gene Name: paired-like homeobox 2b
  Uniprot ID: Q99453
  ENST ID: ENST00000226382
  CDS Start-End: 361-1305
ttaaattctaattagagatgcaggaatcaatgatagggaggttggacagctcagttccccagtgccagcccaatagacggatgagttattgtcatgtaaaaagcgccagcaataagaccaaccgctttgctattgtccaagtggaaagagccaagtttattatgaggactatatgctctagagacctcagacaaggcatctcataggaggctttttcataaaactaggctctgctggtagtaaggaggccagtttggaggcaggcgttgagctgtgcacatctccccactccagccaccttctccatatccatcttttatttcatttttccacttggctgagccatccagaaccttttcaatgtataaaatggaatattcttacctcaattcctctgcctacgagtcctgtatggctgggatggacacctcgagcctggcttcagcctatgctgacttcagttcctgcagccaggccagtggcttccagtataacccgataaggaccacttttggggccacgtccggctgcccttccctcacgccgggatcctgcagcctgggcaccctcagggaccaccagagcagtccgtacgccgcagttccttacaaactcttcacggaccacggcggcctcaacgagaagcgcaagcagcggcgcatccgcaccactttcaccagtgcccagctcaaagagctggaaagggtcttcgcggagactcactaccccgacatctacactcgggaggagctggccctgaagatcgacctcacagaggcgcgagtccaggtgtggttccagaaccgccgcgccaagtttcgcaagcaggagcgcgcagcggcagccgcagcggccgcggccaagaacggctcctcgggcaaaaagtctgactcttccagggacgacgagagcaaagaggccaagagcactgacccggacagcactgggggcccaggtcccaatcccaaccccacccccagctgcggggcgaatggaggcggcggcggcgggcccagcccggctggagctccgggggcggcggggcccgggggcccgggaggcgaacccggcaagggcggcgcagcagcagcggcggcggccgcggcagcggcggcggcggcagcggcagcggcggcagctggaggcctggctgcggctgggggccctggacaaggctgggctcccggccccggccccatcacctccatcccggattcgcttgggggtcccttcgccagcgtcctatcttcgctccaaagacccaacggtgccaaagccgccttagtgaagagcagtatgttctgatctggaatcctgcggcggcggcggcggcggcgacagcgggcgagccagggcccgggcgggcgagtgggcgagcgggtaggcccaaggctattgtcgtcgctgctgccatggctttttcattgagggcctaaagtaatcgcgctaagaataaagggaaaacggcgtcgccctcatttcaaccccactcctacccccttcctcaacccccaaacaaaacaaacaaacttccctggcttcgcacctgcctggggcctcgcagcggggccagggctccgcctgctgatcgggggttgtgagcagcgcggcctggacgcggggcactctcagggggctgtgtctgcgtgtcagtttgtgtctgtctcggggaatgtgtgtctgtggcccaagcaggtgacaggaagagatggggggcctcaaccaacttagtgacttgtttagaaaaaaaagacaaaaaagtaaaaataaaaacaaaaaagttggaaggcagaaaccattaaaaaacaaaaagccaacaacccagaaaggtttaaaaaacataaggaaaaaaaagacaaattaaaggaggggctaggggagaagctgcagctggagctgaaggctcgatcttgtgaacccctaaatccgctccctcctaacagcacggattctcttggggctcttcttcagggaagagtagggacgccgttccagccccccttcctatcgtgtccttgggttcgggtcactgcggcgacgacttgctcagactgtcccggcggccggagtgactttctcgcacccccttgcctgtcccacctcgctgaacaccatcccgccattagcgcatcggaaccccacacagttgcaactcccaaccccgaatctttgcagccgttcggccctgaaagatgccctatccatgagatgccttttcatctgcaaactctgcaaaatgtgtctcatgtttcgcaactctttttttccccctcgctcccgcctaccccgtcggcattttcttcttccaccagcttttactgaactttttggcactgctttggattggggtcaattgcagtccacgtaactggctgcagagaaatctaccgagcaaggaaaaggcacacacacacgtttgcaggggtgtctcggtttgcatttctgttggaatgatccgaactggactcacatcctgtatggtggatggactgtatattgagggttccattcttcgcgcagtttagacatctctgttttgattctttgttgttgtttttattttaaaaggcacaaactctagatattagttgaatgttgaggctttaactttttcggtgtctttctacaactgtgttctgtgactcaattgtatcgtgttaatatcagtgcagactgtctcctctacgtgaccgtataatgtttttctcttcttgtagtctctatggcgtgtctttatggtgtaataaggttctcacgggttcaatcttttgtgtttagagaggccacggttcagacaatggtatatatttttgttatcaggtgcatgtctgtctgatttctttttttttcctgttggactatgtttgtgaacataattgtcataagttatgtttcagatttttgaatttatttatatgtgttataatgaatgcttctatttaaaagggaaatatttctacatgtgcatatagttttccaagagtgtaccattaacttgattgttgataataaaaacaaaaagcaagtcta

SEQ ID NO: 163405 - DNA, 2406 bp, Homo sapiens
  Payload ID: 12192
  Gene Symbol: PITX1
  Gene Name: paired-like homeodomain 1
  Uniprot ID: P78337
  ENST ID: ENST00000265340
  CDS Start-End: 418-1362
cccaggcccaccccacccagcacccctggcgcagggactgctggaacctggctgtgcgcgctgtcgctttaagacagactctgccggcgccgtccggagccttagaaaccggccccggatcgcgagccggagccggagccggagccggggccggccgggctgctgaggcccgagcggcaggagcgcagcgcggagcgctgagccaggcgcccagtcgcgagaagctgccgccgcctctgcccgcccggcgccgcagccccgggcggtccatggggcgggcacggcgtcgctgcaggcgccggcagccctggagggcagccgcttaggcgctgcgctcttgtccccgcaggtcgcagccagggcggcggggcgcgcccagccccggcccctggagcgcccgccgcggtccccacctccatggacgccttcaaggggggcatgagcctggagcggctgccggaggggctccggccgccgccgccgccaccccatgacatggggcccgccttccacctggcccggcccgccgacccccgcgagccgctcgagaactccgccagcgagtcgtctgacacggagctgccagagaaggagcgcggcggggaacccaaggggcccgaggacagtggtgcgggaggcacgggctgcggcggcgcagacgacccagccaagaagaagaagcagcggcggcaacgtacgcacttcacaagccagcagttgcaagagctagaggccacgttccagaggaaccgctaccccgacatgagcatgagggaggagatcgccgtgtggaccaacctcaccgagccgcgcgtgcgggtctggttcaagaaccggcgagccaagtggcgtaagcgcgagcgtaaccagcagctggacctgtgcaagggtggctacgtgccgcagttcagcggcctagtgcagccctacgaggacgtgtacgccgccggctactcctacaacaactgggccgccaagagcctggcgccagcgccgctctccaccaagagcttcaccttcttcaactccatgagcccgctgtcgtcgcagtccatgttctcagcacccagctccatctcctccatgaccatgccgtccagcatgggcccaggcgccgtgcctggcatgcccaactcgggcctcaacaacatcaacaacctcaccggctcctcgctcaactcggccatgtcgccgggcgcttgcccgtacggcactcccgcctcgccctacagcgtctaccgggacacgtgcaactcgagcctagccagcctgcggctcaagtccaaacagcactcgtcgtttggctacggcggcctgcagggcccggcctcgggcctcaacgcgtgccagtacaacagctgaccgccccgccgcaccacgcgggccggcggccggagcggggaagggcgcgggcgcgggcgcggaggacgcacgcggggccccggctcgcaagccccagctcaccgcgccgcggacctcacacctgcgcagccccctcctcccacttcccactccgggttggttttgtgtttgcttttccggaccccactctgccctccaaaaagacaaaaaaaaaaaaaaaaaaaaaaaagcaaaaagacgtcggagaaaagtgccgcgaaaaaatggatgagttgcaatttctctcgggatggcgcgggtggtgtgtgtgttcccacgggccccggaggcccactccgcggagggcacgcggcgcggtaggcgagcgccgaggcccagcggccgggggaggacgacctcgtatcccgcgtccccgccgcgctggatccggactgagtggccgggcctgcggactggatgtgcggggcctggacttgcctaggatttcccgaccccgtacaaaccaagttgccctctccgagctaggcccggccgagagcgccttagctcgagtcggatccgtgttggggcgggcgttgggtttggggggacggtgcccccagcccaggatcgggcactcagtggagccgcacacggccccggcgcgcctggtagagcctcgctggccccgcgccccggagccctatattaaggccacggagcgacagcgggcagtgcgggcctggcgggaggtgggggaggtccatctcagaacaccccagccttgagcttagctgcaggcccaggccctctgctctgctcccgggctaggaggtggccctctgtctgggcgaacagccccctcctcaccgcccgccgtgcaagagtcgagccggcagagcaaggggcgcggccccagggccctgcgcccactttgcacacccgctctccggcccgcgcccctgtttacagcgtccctgtgtatgttggactgactgtaataaatctgtctatatcgacttgtccatgtacgtctattaaaaccatagtccgagcgtgctaagc

SEQ ID NO: 163406 - DNA, 587 bp, Homo sapiens
  Payload ID: 12192
  Gene Symbol: PITX1
  Gene Name: paired-like homeodomain 1
  ENST ID: ENST00000507253
  CDS Start-End: 196-587
agttcccgggagaagaggctggagaaggaggggcaggcggcccctcgacgaggacaccgctgggagctgccggaacgggccccgggctctgcccccgccccggcgctggctcgaaggcgcccgctcggtcgcagccagggcggcggggcgcgcccagccccggcccctggagcgcccgccgcggtccccacctccatggacgccttcaaggggggcatgagcctggagcggctgccggaggggctccggccgccgccgccgccaccccatgacatggggcccgccttccacctggcccggcccgccgacccccgcgagccgctcgagaactccgccagcgagtcgtctgacacggagctgccagagaaggagcgcggcggggaacccaaggggcccgaggacagtggtgcgggaggcacgggctgcggcggcgcagacgacccagccaagaagaagaagcagcggcggcaacgtacgcacttcacaagccagcagttgcaagagctagaggccacgttccagaggaaccgctaccccgacatgagcatgagggaggagatcgccgtgtggaccaacctcaccgagcc

SEQ ID NO: 163407 - DNA, 666 bp, Homo sapiens
  Payload ID: 12192
  Gene Symbol: PITX1
  Gene Name: paired-like homeodomain 1
  ENST ID: ENST00000502676
  CDS Start-End: 325-666
ccgctgggagctgccggaacgggccccgggctctgcccccgccccggcgctggctcgaaggcgcccgctcggtgcgatcctgttcggcaaacattcactcatcctgggctgttctcgccagggctggggacttcgaggcggccgagacgggagttgattctaggcgaaacaagtcatttgaggcctgaggtgtgcacgagccgcccgggactcgcaggccagatgcgtttcttttgtgaggccgagggagaactcggtcgcagccagggcggcggggcgcgcccagccccggcccctggagcgcccgccgcggtccccacctccatggacgccttcaaggggggcatgagcctggagcggctgccggaggggctccggccgccgccgccgccaccccatgacatggggcccgccttccacctggcccggcccgccgacccccgcgagccgctcgagaactccgccagcgagtcgtctgacacggagctgccagagaaggagcgcggcggggaacccaaggggcccgaggacagtggtgcgggaggcacgggctgcggcggcgcagacgacccagccaagaagaagaagcagcggcggcaacgtacgcacttcacaagccagcagttgcaagagctagaggccacgttccagaggaaccgctacccc

SEQ ID NO: 163408 - DNA, 1305 bp, Homo sapiens
  Payload ID: 12192
  Gene Symbol: PITX1
  Gene Name: paired-like homeodomain 1
  Uniprot ID: P78337
  ENST ID: ENST00000506438
  CDS Start-End: 135-1079
ctggggacttcgaggcggccgagacgggagttgattctaggcgaaacaagtcatttgaggcctgaggtcgcagccagggcggcggggcgcgcccagccccggcccctggagcgcccgccgcggtccccacctccatggacgccttcaaggggggcatgagcctggagcggctgccggaggggctccggccgccgccgccgccaccccatgacatggggcccgccttccacctggcccggcccgccgacccccgcgagccgctcgagaactccgccagcgagtcgtctgacacggagctgccagagaaggagcgcggcggggaacccaaggggcccgaggacagtggtgcgggaggcacgggctgcggcggcgcagacgacccagccaagaagaagaagcagcggcggcaacgtacgcacttcacaagccagcagttgcaagagctagaggccacgttccagaggaaccgctaccccgacatgagcatgagggaggagatcgccgtgtggaccaacctcaccgagccgcgcgtgcgggtctggttcaagaaccggcgagccaagtggcgtaagcgcgagcgtaaccagcagctggacctgtgcaagggtggctacgtgccgcagttcagcggcctagtgcagccctacgaggacgtgtacgccgccggctactcctacaacaactgggccgccaagagcctggcgccagcgccgctctccaccaagagcttcaccttcttcaactccatgagcccgctgtcgtcgcagtccatgttctcagcacccagctccatctcctccatgaccatgccgtccagcatgggcccaggcgccgtgcctggcatgcccaactcgggcctcaacaacatcaacaacctcaccggctcctcgctcaactcggccatgtcgccgggcgcttgcccgtacggcactcccgcctcgccctacagcgtctaccgggacacgtgcaactcgagcctagccagcctgcggctcaagtccaaacagcactcgtcgtttggctacggcggcctgcagggcccggcctcgggcctcaacgcgtgccagtacaacagctgaccgccccgccgcaccacgcgggccggcggccggagcggggaagggcgcgggcgcgggcgcggaggacgcacgcggggccccggctcgcaagccccagctcaccgcgccgcggacctcacacctgcgcagccccctcctcccacttcccactccgggttggttttgtgtttgcttttccggaccccactctgccctccaaaaagacaaaaaaaaaaaaaaaaaaaaa

SEQ ID NO: 163409 - DNA, 624 bp, Homo sapiens
  Payload ID: 12192
  Gene Symbol: PITX1
  Gene Name: paired-like homeodomain 1
  ENST ID: ENST00000503586
  CDS Start-End: 1-624
gccgatcaagggatccggcccacgtgcgcggccgaagcccggagcagcccggctctggcccccgccccggctcctgcgcgtctccctccgcgctgcctttttttgtccgagctggagcttttttccagcagcgaactgggcccgcgggtggccggcgcgggcagtggggcagcgaatccgctgcccagcgcagccggccgggttccggaggggctccgagctccccggtgtgggcgcctcttctgcgttcatttcttaatacacagctgaatgtttctctccactttcttaagaaggagcgcggcggggaacccaaggggcccgaggacagtggtgcgggaggcacgggctgcggcggcgcagacgacccagccaagaagaagaagcagcggcggcaacgtacgcacttcacaagccagcagttgcaagagctagaggccacgttccagaggaaccgctaccccgacatgagcatgagggaggagatcgccgtgtggaccaacctcaccgagccgcgcgtgcgggtctggttcaagaaccggcgagccaagtggcgtaagcgcgagcgtaaccagcagctggacctgtgcaagggtggctacgtgccgcagttcagcggcctag

SEQ ID NO: 163410 - DNA, 2320 bp, Homo sapiens
  Payload ID: 12193
  Gene Symbol: PITX2
  Gene Name: paired-like homeodomain 2
  Uniprot ID: Q99697
  ENST ID: ENST00000306732
  CDS Start-End: 644-1618
aagatgttaggccaacagggaagcgcggagccgcagatctggtccgtcgctcgcctgggtgcctggagctgagctgcggcaaggcccggctcctgttcgaccgcccgaggggtgtgcgtgtgcgcgttgcggagggtgcgctcagagggccgcgtcgtggctgcagcggctgctgccgccgcaggggatctaatatcacctacctgtccctgtcactcttgacacttctctgtcagggctgccgcgtggggggggggcgggcagagcgcggtcggcgttagctttccttattggaggggttcttgggggagggagggagagaagaagggggtctttgcccactcttgtttcgctttggagcttggaagcctgctccctaaagacgctctgagtggtgcccttctgcccacatcccatgtcttcgtttgcccgctgactttccgtctccggactttttcgcttgagccttccggaggagacgggggcagcttggcttgagaactcggcgggggttgcgtcccctggctctccccgcagcggggaaactccgcgcctagagcgcgacccggagcgggcagcggcggctacgggggctcggcggggcagtagccaaggactagtagagcgtcgcgctccctcgtccatgaactgcatgaaaggcccgcttcacttggagcaccgagcagcggggaccaagctgtcggccgtctcctcatcttcctgtcaccatccccagccgttagccatggcttcggttctggctcccggtcagccccggtcgctggactcctccaagcacaggctggaggtgcacaccatctccgacacctccagcccggaggccgcagagaaagataaaagccagcaggggaagaatgaggacgtgggcgccgaggacccgtctaagaagaagcggcaaaggcggcagcggactcactttaccagccagcagctccaggagctggaggccactttccagaggaaccgctacccggacatgtccacacgcgaagaaatcgctgtgtggaccaaccttacggaagcccgagtccgggtttggttcaagaatcgtcgggccaaatggagaaagagggagcgcaaccagcaggccgagctatgcaagaatggcttcgggccgcagttcaatgggctcatgcagccctacgacgacatgtacccaggctattcctacaacaactgggccgccaagggccttacatccgcctccctatccaccaagagcttccccttcttcaactctatgaacgtcaaccccctgtcatcacagagcatgttttccccacccaactctatctcgtccatgagcatgtcgtccagcatggtgccctcagcagtgacaggcgtcccgggctccagtctcaacagcctgaataacttgaacaacctgagtagcccgtcgctgaattccgcggtgccgacgcctgcctgtccttacgcgccgccgactcctccgtatgtttatagggacacgtgtaactcgagcctggccagcctgagactgaaagcaaagcagcactccagcttcggctacgccagcgtgcagaacccggcctccaacctgagtgcttgccagtatgcagtggaccggcccgtgtgagccgcacccacagcgccgggatcctaggaccttgccggatggggcaactccgcccttgaaagactgggaattatgctagaaggtcgtgggcactaaagaaagggagagaaagagaagctatatagagaaaaggaaaccactgaatcaaagagagagctcctttgatttcaaagggatgtcctcagtgtctgacatctttcactacaagtatttctaacagttgcaaggacacatacacaaacaaatgtttgactggatatgacattttaacattactataagcttgttattttttaagtttagcattgttaacatttaaatgactgaaaggatgtatatatatcgaaatgtcaaattaattttataaaagcagttgttagtaatatcacaacagtgtttttaaaggttaggctttaaaataaagcatgttatacagaagcgattaggatttttcgcttgcgagcaagggagtgtatatactaaatgccacactgtatgtttctaacatattattattattataaaaaatgtgtgaatatcagttttagaatagtttctctggtggatgcaatgatgtttctgaaactgctatgtacaacctaccctgtgtataacatttcgtacaatattattgttttacttttcagcaaatatgaaacaaatgtgttttatttcatgggagtaaaatatactgcatacaaa

SEQ ID NO: 163411 - DNA, 3359 bp, Homo sapiens
  Payload ID: 12193
  Gene Symbol: PITX2
  Gene Name: paired-like homeodomain 2
  Uniprot ID: Q99697
  ENST ID: ENST00000354925
  CDS Start-End: 1707-2660
tcagagggatcaatatacaggccctaccacggaaaggcggggaaaaggttcgaatagaaaactgctgcagaagggaagccactgagaggagcaaatgtggacttgagggaaactctctcccccacccccacttctatcccgtgcaatttaataccatcctcgccaggaaccttaacctcgtcattttaaaaaatgagatatccgtgacccagggtgaacttgttgaatgtaggtacagcagaggaaattctagactctatgagcgtctgagccttgtccagtgcaaacccttcgtgaacactgggtcagtgcgtggccgtgcccacctgtgcgccgacactctcagcatgcctggtccacccgccttgacctcgggcgcggtgtcccagctaagctgggcccagcgtcccggccttccccagctgacaagcctagctcgttcgctcccggctgtggccctcccaccctctcccactagctcactccattcttctagatttctcttcactcatcctctcccatccccaccgcgcccacctccactcccgccctctaccggtctctcactttcctccctccgcagtccctctttgctgtgacctctttcctcaactctgcaggcctgaaagaaggtcacacacgcacgctcacacccacactccacacgcctcgtcccaaacaaccccatgaacattgtcctttgttccgtctcttgggccactttccctgtcgcttcctcccagcccgtcctgatttgctccccaaaagtacgtttctgtctccccgctgccctggcgctccccctttgatttattagggctgccgggttggcgcagattgctttttcttctcttccatcccatcctcccttctggtcctcctttccacagtgggagtccgtgctcctgctcctcggttggctcctaagtgccccgccaggtcccctctcctttcgctctcccggctccggctcccgactcttcggcccgctggcatctgcttccctcccctgcctcgtttctcgtcgcccctgctcgctccccccggcgctcgcccgggcgctgtgctcgctcctggatcgccagccgcgcagccgggctcggccggccgcccgcgcgccactgtgcagtggagtttggtggaatctctgctgacgtcacgtcactccccacacggagtaggagcagagggaagagagagggatgagagggagggagaggagagagagtgcgagaccgagcgagaaagctggagaggagcagaaagaaactgccagtggcggctagatttcggaggccccagtgcacccgtggactccttcggaacttggcaccctcaggagccctgcagtcctctcaggcccggctttcgggcgcttgccgtgcagccggaggctcggctcgctggaaatcgccccgggaagcagtgggacgcggagacagcagctctctcccggtagccgaatcactaaatctggagccgccaaactgctacttctgggcccacgggcccacaaggatcgaatcggcagagtccccgcccgcgttctcgctagcgggtgggggaaccgcctggccgtccccaccctggatccccacgccacagcgccgggcagcccctcctgtaggcagcgaccttggccagaggctccccagggcccagctcccttcaggagaggccgagacgcagggaaacgataacggggaatggagaccaactgccgcaaactggtgtcggcgtgtgtgcaattaggcgtgcagccggcggccgttgaatgtctcttctccaaagactccgaaatcaaaaaggtcgagttcacggactctcctgagagccgaaaagaggcagccagcagcaagttcttcccgcggcagcatcctggcgccaatgagaaagataaaagccagcaggggaagaatgaggacgtgggcgccgaggacccgtctaagaagaagcggcaaaggcggcagcggactcactttaccagccagcagctccaggagctggaggccactttccagaggaaccgctacccggacatgtccacacgcgaagaaatcgctgtgtggaccaaccttacggaagcccgagtccgggtttggttcaagaatcgtcgggccaaatggagaaagagggagcgcaaccagcaggccgagctatgcaagaatggcttcgggccgcagttcaatgggctcatgcagccctacgacgacatgtacccaggctattcctacaacaactgggccgccaagggccttacatccgcctccctatccaccaagagcttccccttcttcaactctatgaacgtcaaccccctgtcatcacagagcatgttttccccacccaactctatctcgtccatgagcatgtcgtccagcatggtgccctcagcagtgacaggcgtcccgggctccagtctcaacagcctgaataacttgaacaacctgagtagcccgtcgctgaattccgcggtgccgacgcctgcctgtccttacgcgccgccgactcctccgtatgtttatagggacacgtgtaactcgagcctggccagcctgagactgaaagcaaagcagcactccagcttcggctacgccagcgtgcagaacccggcctccaacctgagtgcttgccagtatgcagtggaccggcccgtgtgagccgcacccacagcgccgggatcctaggaccttgccggatggggcaactccgcccttgaaagactgggaattatgctagaaggtcgtgggcactaaagaaagggagagaaagagaagctatatagagaaaaggaaaccactgaatcaaagagagagctcctttgatttcaaagggatgtcctcagtgtctgacatctttcactacaagtatttctaacagttgcaaggacacatacacaaacaaatgtttgactggatatgacattttaacattactataagcttgttattttttaagtttagcattgttaacatttaaatgactgaaaggatgtatatatatcgaaatgtcaaattaattttataaaagcagttgttagtaatatcacaacagtgtttttaaaggttaggctttaaaataaagcatgttatacagaagcgattaggatttttcgcttgcgagcaagggagtgtatatactaaatgccacactgtatgtttctaacatattattattattataaaaaatgtgtgaatatcagttttagaatagtttctctggtggatgcaatgatgtttctgaaactgctatgtacaacctaccctgtgtataacatttcgtacaatattattgttttacttttcagcaaatatgaaacaaatgtgttttatttcatgggagtaaaatatactgcatac

SEQ ID NO: 163412 - DNA, 2100 bp, Homo sapiens
  Payload ID: 12193
  Gene Symbol: PITX2
  Gene Name: paired-like homeodomain 2
  Uniprot ID: Q99697
  ENST ID: ENST00000355080
  CDS Start-End: 583-1398
tgggagtccgtgctcctgctcctcggttggctcctaagtgccccgccaggtcccctctcctttcgctctcccggctccggctcccgactcttcggcccgctggcatctgcttccctcccctgcctcgtttctcgtcgcccctgctcgctccccccggcgctcgcccgggcgctgtgctcgctcctggatcgccagccgcgcagccgggctcggccggccgcccgcgcgccactgtgcagtggagtttggtggaatctctgctgacgtcacgtcactccccacacggagtaggagcagagggaagagagagggatgagagggagggagaggagagagagtgcgagaccgagcgagaaagctggagaggagcagaaagaaactgccagtggcggctagatttcggaggccccagtgcacccgtggactccttcggaacttggcaccctcaggagccctgcagtcctctcaggcccggctttcgggcgcttgccgtgcagccggaggctcggctcgctggaaatcgccccgggaagcagtgggacgcggagacagcagctctctcccggtagccgataacggggaatggagaccaactgccgcaaactggtgtcggcgtgtgtgcaattagagaaagataaaagccagcaggggaagaatgaggacgtgggcgccgaggacccgtctaagaagaagcggcaaaggcggcagcggactcactttaccagccagcagctccaggagctggaggccactttccagaggaaccgctacccggacatgtccacacgcgaagaaatcgctgtgtggaccaaccttacggaagcccgagtccgggtttggttcaagaatcgtcgggccaaatggagaaagagggagcgcaaccagcaggccgagctatgcaagaatggcttcgggccgcagttcaatgggctcatgcagccctacgacgacatgtacccaggctattcctacaacaactgggccgccaagggccttacatccgcctccctatccaccaagagcttccccttcttcaactctatgaacgtcaaccccctgtcatcacagagcatgttttccccacccaactctatctcgtccatgagcatgtcgtccagcatggtgccctcagcagtgacaggcgtcccgggctccagtctcaacagcctgaataacttgaacaacctgagtagcccgtcgctgaattccgcggtgccgacgcctgcctgtccttacgcgccgccgactcctccgtatgtttatagggacacgtgtaactcgagcctggccagcctgagactgaaagcaaagcagcactccagcttcggctacgccagcgtgcagaacccggcctccaacctgagtgcttgccagtatgcagtggaccggcccgtgtgagccgcacccacagcgccgggatcctaggaccttgccggatggggcaactccgcccttgaaagactgggaattatgctagaaggtcgtgggcactaaagaaagggagagaaagagaagctatatagagaaaaggaaaccactgaatcaaagagagagctcctttgatttcaaagggatgtcctcagtgtctgacatctttcactacaagtatttctaacagttgcaaggacacatacacaaacaaatgtttgactggatatgacattttaacattactataagcttgttattttttaagtttagcattgttaacatttaaatgactgaaaggatgtatatatatcgaaatgtcaaattaattttataaaagcagttgttagtaatatcacaacagtgtttttaaaggttaggctttaaaataaagcatgttatacagaagcgattaggatttttcgcttgcgagcaagggagtgtatatactaaatgccacactgtatgtttctaacatattattattattataaaaaatgtgtgaatatcagttttagaatagtttctctggtggatgcaatgatgtttctgaaactgctatgtacaacctaccctgtgtataacatttcgtacaatattattgttttacttttcagcaaatatgaaacaaatgtgttttatttcatgggagtaaaatatactgcatacaaa

SEQ ID NO: 163413 - DNA, 1693 bp, Homo sapiens
  Payload ID: 12193
  Gene Symbol: PITX2
  Gene Name: paired-like homeodomain 2
  ENST ID: ENST00000394595
  CDS Start-End: 257-781
gaggagagagagtgcgagaccgagcgagaaagctggagaggagcagaaagaaactgccagtggcggctagatttcggaggccccagtgcacccgtggactccttcggaacttggcaccctcaggagccctgcagtcctctcaggcccggctttcgggcgcttgccgtgcagccggaggctcggctcgctggaaatcgccccgggaagcagtgggacgcggagacagcagctctctcccggtagccgataacggggaatggagaccaactgccgcaaactggtgtcggcgtgtgtgcaattaggcgtgcagccggcggccgttgaatgtctcttctccaaagactccgaaatcaaaaaggtcgagttcacggactctcctgagagccgaaaagaggcagccagcagcaagttcttcccgcggcagcatcctggcgccaatggtttggttcaagaatcgtcgggccaaatggagaaagagggagcgcaaccagcaggccgagctatgcaagaatggcttcgggccgcagttcaatgggctcatgcagccctacgacgacatgtacccaggctattcctacaacaactgggccgccaagggccttacatccgcctccctatccaccaagagcttccccttcttcaactctatgaacgtcaaccccctgtcatcacagagcatgttttccccacccaactctatctcgtccatgagcatgtcgtccagcatggtgccctcagcagtgacaggcgtcccgggctccagtctcaacagcctgaataacttgaacaacctgagtagcccgtcgctgaattccgcggtgccgacgcctgcctgtccttacgcgccgccgactcctccgtatgtttatagggacacgtgtaactcgagcctggccagcctgagactgaaagcaaagcagcactccagcttcggctacgccagcgtgcagaacccggcctccaacctgagtgcttgccagtatgcagtggaccggcccgtgtgagccgcacccacagcgccgggatcctaggaccttgccggatggggcaactccgcccttgaaagactgggaattatgctagaaggtcgtgggcactaaagaaagggagagaaagagaagctatatagagaaaaggaaaccactgaatcaaagagagagctcctttgatttcaaagggatgtcctcagtgtctgacatctttcactacaagtatttctaacagttgcaaggacacatacacaaacaaatgtttgactggatatgacattttaacattactataagcttgttattttttaagtttagcattgttaacatttaaatgactgaaaggatgtatatatatcgaaatgtcaaattaattttataaaagcagttgttagtaatatcacaacagtgtttttaaaggttaggctttaaaataaagcatgttatacagaagcgattaggatttttcgcttgcgagcaagggagtgtatatactaaatgccacactgtatgtttctaacatattattattattataaaaaatgtgtgaatatcagttttagaatagtttctctggtggatgcaatgatgtttctgaaactgctatgtacaacctaccctgtgtataacatttcgtacaatattattgttttacttttcagcaaatatgaaacaaatgtgttttatttcatgggagtaaaata

SEQ ID NO: 163414 - DNA, 1906 bp, Homo sapiens
  Payload ID: 12193
  Gene Symbol: PITX2
  Gene Name: paired-like homeodomain 2
  Uniprot ID: Q99697
  ENST ID: ENST00000394598
  CDS Start-End: 251-1204
agagagtgcgagaccgagcgagaaagctggagaggagcagaaagaaactgccagtggcggctagatttcggaggccccagtgcacccgtggactccttcggaacttggcaccctcaggagccctgcagtcctctcaggcccggctttcgggcgcttgccgtgcagccggaggctcggctcgctggaaatcgccccgggaagcagtgggacgcggagacagcagctctctcccggtagccgataacggggaatggagaccaactgccgcaaactggtgtcggcgtgtgtgcaattaggcgtgcagccggcggccgttgaatgtctcttctccaaagactccgaaatcaaaaaggtcgagttcacggactctcctgagagccgaaaagaggcagccagcagcaagttcttcccgcggcagcatcctggcgccaatgagaaagataaaagccagcaggggaagaatgaggacgtgggcgccgaggacccgtctaagaagaagcggcaaaggcggcagcggactcactttaccagccagcagctccaggagctggaggccactttccagaggaaccgctacccggacatgtccacacgcgaagaaatcgctgtgtggaccaaccttacggaagcccgagtccgggtttggttcaagaatcgtcgggccaaatggagaaagagggagcgcaaccagcaggccgagctatgcaagaatggcttcgggccgcagttcaatgggctcatgcagccctacgacgacatgtacccaggctattcctacaacaactgggccgccaagggccttacatccgcctccctatccaccaagagcttccccttcttcaactctatgaacgtcaaccccctgtcatcacagagcatgttttccccacccaactctatctcgtccatgagcatgtcgtccagcatggtgccctcagcagtgacaggcgtcccgggctccagtctcaacagcctgaataacttgaacaacctgagtagcccgtcgctgaattccgcggtgccgacgcctgcctgtccttacgcgccgccgactcctccgtatgtttatagggacacgtgtaactcgagcctggccagcctgagactgaaagcaaagcagcactccagcttcggctacgccagcgtgcagaacccggcctccaacctgagtgcttgccagtatgcagtggaccggcccgtgtgagccgcacccacagcgccgggatcctaggaccttgccggatggggcaactccgcccttgaaagactgggaattatgctagaaggtcgtgggcactaaagaaagggagagaaagagaagctatatagagaaaaggaaaccactgaatcaaagagagagctcctttgatttcaaagggatgtcctcagtgtctgacatctttcactacaagtatttctaacagttgcaaggacacatacacaaacaaatgtttgactggatatgacattttaacattactataagcttgttattttttaagtttagcattgttaacatttaaatgactgaaaggatgtatatatatcgaaatgtcaaattaattttataaaagcagttgttagtaatatcacaacagtgtttttaaaggttaggctttaaaataaagcatgttatacagaagcgattaggatttttcgcttgcgagcaagggagtgtatatactaaatgccacactgtatgtttctaacatattattattattataaaaaatgtgtgaatatcagttttagaatagtttctctggtggatgcaatgatgtttctgaaactgctatgtacaacctaccctgtgtataacatttcgtacaatattattgttttacttttcagcaaatatgaaacaaatgtgttttatttcatgggagtaaaatatactgcatacaaa

SEQ ID NO: 163415 - DNA, 1085 bp, Homo sapiens
  Payload ID: 12193
  Gene Symbol: PITX2
  Gene Name: paired-like homeodomain 2
  ENST ID: ENST00000511837
  CDS Start-End: 216-1085
gcagtctgtgtaagttttcatatctctgagtgtgtgcacacagtggagagggtggagcctgccatcctcaaatctgaaaagattgagagatttcagagggcccagatgtgccaaaggtcagagggatcaatatacaggccctaccacggaaaggcggggaaaaggttcgaatagaaaactgctgcagaagggaagccactgagagataacggggaatggagaccaactgccgcaaactggtgtcggcgtgtgtgcaattaggcgtgcagccggcggccgttgaatgtctcttctccaaagactccgaaatcaaaaaggtcgagttcacggactctcctgagagccgaaaagaggcagccagcagcaagttcttcccgcggcagcatcctggcgccaatgagaaagataaaagccagcaggggaagaatgaggacgtgggcgccgaggacccgtctaagaagaagcggcaaaggcggcagcggactcactttaccagccagcagctccaggagctggaggccactttccagaggaaccgctacccggacatgtccacacgcgaagaaatcgctgtgtggaccaaccttacggaagcccgagtccgggtttggttcaagaatcgtcgggccaaatggagaaagagggagcgcaaccagcaggccgagctatgcaagaatggcttcgggccgcagttcaatgggctcatgcagccctacgacgacatgtacccaggctattcctacaacaactgggccgccaagggccttacatccgcctccctatccaccaagagcttccccttcttcaactctatgaacgtcaaccccctgtcatcacagagcatgttttccccacccaactctatctcgtccatgagcatgtcgtccagcatggtgccctcagcagtgacaggcgtcccgggctccagtctcaacagcctgaataacttgaacaacctgagtagcccgtcgctgaattccgcggtgccgacgcctgcctgtccttacgcgccgccgactcctccgtatgtttatagggacacgtgtaactcgagcctggccagcctgagactgaaagcaaagcag

SEQ ID NO: 163416 - DNA, 463 bp, Homo sapiens
  Payload ID: 12193
  Gene Symbol: PITX2
  Gene Name: paired-like homeodomain 2
  ENST ID: ENST00000511990
  CDS Start-End: 109-463
gtgccaaaggtcagagggatcaatatacaggccctaccacggaaaggcggggaaaaggttcgaatagaaaactgctgcagaagggaagccactgagagataacggggaatggagaccaactgccgcaaactggtgtcggcgtgtgtgcaattagagaaagataaaagccagcaggggaagaatgaggacgtgggcgccgaggacccgtctaagaagaagcggcaaaggcggcagcggactcactttaccagccagcagctccaggagctggaggccactttccagaggaaccgctacccggacatgtccacacgcgaagaaatcgctgtgtggaccaaccttacggaagcccgagtccgggtttggttcaagaatcgtcgggccaaatggagaaagagggagcgcaaccagcaggccgagctatgcaagaatggcttcgggccgcagttcaatgggctcatgc

SEQ ID NO: 163417 - DNA, 1889 bp, Homo sapiens
  Payload ID: 12193
  Gene Symbol: PITX2
  Gene Name: paired-like homeodomain 2
  ENST ID: ENST00000557119
  CDS Start-End: 592-1386
gcctgggtgcctggagctgagctgcggcaaggcccggctcctgttcgaccgcccgaggggtgtgcgtgtgcgcgttgcggagggtgcgctcagagggccgcgtcgtggctgcagcggctgctgccgccgcaggggatctaatatcacctacctgtccctgtcactcttgacacttctctgtcagggctgccgcgtggggggggggcgggcagagcgcggtcggcgttagctttccttattggaggggttcttgggggagggagggagagaagaagggggtctttgcccactcttgtttcgctttggagcttggaagcctgctccctaaagacgctctgagtggtgcccttctgcccacatcccatgtcttcgtttgcccgctgactttccgtctccggactttttcgcttgagccttccggaggagacgggggcagcttggcttgagaactcggcgggggttgcgtcccctggctctccccgcagcggggaaactccgcgcctagagcgcgacccggagcgggcagcggcggctacgggggctcggcggggcagtagccaaggactagtagagcgtcgcgctccctcgtccatgaactgcatgaaaggcccgcttcacttggagcaccgagcagcggggaccaagctgtcggccgtctcctcatcttcctgtcaccatccccagccgttagccatggcttcggttctggctcccggtcagccccggtcgctggactcctccaagcacaggctggaggtgcacaccatctccgacacctccagcccggaggccgcagagaaagataaaagccagcaggggaagaatgaggacgtgggcgccgaggacccgtctaagaagaagcggcaaaggcggcagcggactcactttaccagccagcagctccaggagctggaggccactttccagaggaaccgctacccggacatgtccacacgcgaagaaatcgctgtgtggaccaaccttacggaagcccgagtccgggtaggagccagcacggagtctgggagggatggggggaggatgttgtggaggtacaggccaagtagaccaggagagaatgtggaaggcagcgccgcctgggagggcgccggtggggcgcagctttgcaaaggcagaaggcctcgcggcggcctggttgcgagattacagttccctctccgaggccgacaggactgccgccctggctcaggctcccagagcggcaccggctcactgccccgccatcccgcgatctcacgagctgggctgcatgggcaatcccctgcacaggacattgtgttcctggcttgcagttgccagagcagagctaataaaatccctaccaggccaagagccgcgaacaggctccaacctgtgagcctttaacaaggaaaacccgccagagacacggaagagttggccctccctgggaaacctttgtcccggccctggcccagctttttccctcctgggctcgcgcttcttacaccttctttacggttgtttcggccattcaggtctctcccacacaccctatttcctagttttgtgatctccgggagcaaagttttaatacacaactactagtcctcttagaaggagaaagaaaaaaagaagaaagacttttctgcttggtttatttatcttctctcaggagttgaactctggaaattgaaactcacaccccctcttctaaattataatcatagttttgtaaaaagggcttaccttaactttgtagcaaatctgtactttatggattggcaaaaatgagctcaaataaataacccaatagcaacgtcctggtttatgctggtcggtggaagattccaaatttgttaggattctggaagcagaaaacagaatcaagcaaatcaagcggcatccag

SEQ ID NO: 163418 - DNA, 1866 bp, Homo sapiens
  Payload ID: 12193
  Gene Symbol: PITX2
  Gene Name: paired-like homeodomain 2
  Uniprot ID: Q99697
  ENST ID: ENST00000614423
  CDS Start-End: 216-1169
gcagtctgtgtaagttttcatatctctgagtgtgtgcacacagtggagagggtggagcctgccatcctcaaatctgaaaagattgagagatttcagagggcccagatgtgccaaaggtcagagggatcaatatacaggccctaccacggaaaggcggggaaaaggttcgaatagaaaactgctgcagaagggaagccactgagagataacggggaatggagaccaactgccgcaaactggtgtcggcgtgtgtgcaattaggcgtgcagccggcggccgttgaatgtctcttctccaaagactccgaaatcaaaaaggtcgagttcacggactctcctgagagccgaaaagaggcagccagcagcaagttcttcccgcggcagcatcctggcgccaatgagaaagataaaagccagcaggggaagaatgaggacgtgggcgccgaggacccgtctaagaagaagcggcaaaggcggcagcggactcactttaccagccagcagctccaggagctggaggccactttccagaggaaccgctacccggacatgtccacacgcgaagaaatcgctgtgtggaccaaccttacggaagcccgagtccgggtttggttcaagaatcgtcgggccaaatggagaaagagggagcgcaaccagcaggccgagctatgcaagaatggcttcgggccgcagttcaatgggctcatgcagccctacgacgacatgtacccaggctattcctacaacaactgggccgccaagggccttacatccgcctccctatccaccaagagcttccccttcttcaactctatgaacgtcaaccccctgtcatcacagagcatgttttccccacccaactctatctcgtccatgagcatgtcgtccagcatggtgccctcagcagtgacaggcgtcccgggctccagtctcaacagcctgaataacttgaacaacctgagtagcccgtcgctgaattccgcggtgccgacgcctgcctgtccttacgcgccgccgactcctccgtatgtttatagggacacgtgtaactcgagcctggccagcctgagactgaaagcaaagcagcactccagcttcggctacgccagcgtgcagaacccggcctccaacctgagtgcttgccagtatgcagtggaccggcccgtgtgagccgcacccacagcgccgggatcctaggaccttgccggatggggcaactccgcccttgaaagactgggaattatgctagaaggtcgtgggcactaaagaaagggagagaaagagaagctatatagagaaaaggaaaccactgaatcaaagagagagctcctttgatttcaaagggatgtcctcagtgtctgacatctttcactacaagtatttctaacagttgcaaggacacatacacaaacaaatgtttgactggatatgacattttaacattactataagcttgttattttttaagtttagcattgttaacatttaaatgactgaaaggatgtatatatatcgaaatgtcaaattaattttataaaagcagttgttagtaatatcacaacagtgtttttaaaggttaggctttaaaataaagcatgttatacagaagcgattaggatttttcgcttgcgagcaagggagtgtatatactaaatgccacactgtatgtttctaacatattattattattataaaaaatgtgtgaatatcagttttagaatagtttctctggtggatgcaatgatgtttctgaaactgctatgtacaacctaccctgtgtataacatttcgtacaatattattgttttacttttcagcaaatatgaaacaaatgtgttttatttcatgggagtaaaatatactgcat

SEQ ID NO: 163419 - DNA, 3240 bp, Homo sapiens
  Payload ID: 12193
  Gene Symbol: PITX2
  Gene Name: paired-like homeodomain 2
  Uniprot ID: Q99697
  ENST ID: ENST00000613094
  CDS Start-End: 1590-2543
gcagtctgtgtaagttttcatatctctgagtgtgtgcacacagtggagagggtggagcctgccatcctcaaatctgaaaagattgagagatttcagagggcccagatgtgccaaaggtcagagggatcaatatacaggccctaccacggaaaggcggggaaaaggttcgaatagaaaactgctgcagaagggaagccactgagaggagcaaatgtggacttgagggaaactctctcccccacccccacttctatcccgtgcaatttaataccatcctcgccaggaaccttaacctcgtcattttaaaaaatgagatatccgtgacccagggtgaacttgttgaatgtaggtacagcagaggaaattctagactctatgagcgtctgagccttgtccagtgcaaacccttcgtgaacactgggtcagtgcgtggccgtgcccacctgtgcgccgacactctcagcatgcctggtccacccgccttgacctcgggcgcggtgtcccagctaagctgggcccagcgtcccggccttccccagctgacaagcctagctcgttcgctcccggctgtggccctcccaccctctcccactagctcactccattcttctagatttctcttcactcatcctctcccatccccaccgcgcccacctccactcccgccctctaccggtctctcactttcctccctccgcagtccctctttgctgtgacctctttcctcaactctgcaggcctgaaagaaggtcacacacgcacgctcacacccacactccacacgcctcgtcccaaacaaccccatgaacattgtcctttgttccgtctcttgggccactttccctgtcgcttcctcccagcccgtcctgatttgctccccaaaagtacgtttctgtctccccgctgccctggcgctccccctttgatttattagggctgccgggttggcgcagattgctttttcttctcttccatcccatcctcccttctggtcctcctttccacagtgggagtccgtgctcctgctcctcggttggctcctaagtgccccgccaggtcccctctcctttcgctctcccggctccggctcccgactcttcggcccgctggcatctgcttccctcccctgcctcgtttctcgtcgcccctgctcgctccccccggcgctcgcccgggcgctgtgctcgctcctggatcgccagccgcgcagccgggctcggccggccgcccgcgcgccactgtgcagtggagtttggtggaatctctgctgacgtcacgtcactccccacacggagtaggagcagagggaagagagagggatgagagggagggagaggagagagagtgcgagaccgagcgagaaagctggagaggagcagaaagaaactgccagtggcggctagatttcggaggccccagtgcacccgtggactccttcggaacttggcaccctcaggagccctgcagtcctctcaggcccggctttcgggcgcttgccgtgcagccggaggctcggctcgctggaaatcgccccgggaagcagtgggacgcggagacagcagctctctcccggtagccgataacggggaatggagaccaactgccgcaaactggtgtcggcgtgtgtgcaattaggcgtgcagccggcggccgttgaatgtctcttctccaaagactccgaaatcaaaaaggtcgagttcacggactctcctgagagccgaaaagaggcagccagcagcaagttcttcccgcggcagcatcctggcgccaatgagaaagataaaagccagcaggggaagaatgaggacgtgggcgccgaggacccgtctaagaagaagcggcaaaggcggcagcggactcactttaccagccagcagctccaggagctggaggccactttccagaggaaccgctacccggacatgtccacacgcgaagaaatcgctgtgtggaccaaccttacggaagcccgagtccgggtttggttcaagaatcgtcgggccaaatggagaaagagggagcgcaaccagcaggccgagctatgcaagaatggcttcgggccgcagttcaatgggctcatgcagccctacgacgacatgtacccaggctattcctacaacaactgggccgccaagggccttacatccgcctccctatccaccaagagcttccccttcttcaactctatgaacgtcaaccccctgtcatcacagagcatgttttccccacccaactctatctcgtccatgagcatgtcgtccagcatggtgccctcagcagtgacaggcgtcccgggctccagtctcaacagcctgaataacttgaacaacctgagtagcccgtcgctgaattccgcggtgccgacgcctgcctgtccttacgcgccgccgactcctccgtatgtttatagggacacgtgtaactcgagcctggccagcctgagactgaaagcaaagcagcactccagcttcggctacgccagcgtgcagaacccggcctccaacctgagtgcttgccagtatgcagtggaccggcccgtgtgagccgcacccacagcgccgggatcctaggaccttgccggatggggcaactccgcccttgaaagactgggaattatgctagaaggtcgtgggcactaaagaaagggagagaaagagaagctatatagagaaaaggaaaccactgaatcaaagagagagctcctttgatttcaaagggatgtcctcagtgtctgacatctttcactacaagtatttctaacagttgcaaggacacatacacaaacaaatgtttgactggatatgacattttaacattactataagcttgttattttttaagtttagcattgttaacatttaaatgactgaaaggatgtatatatatcgaaatgtcaaattaattttataaaagcagttgttagtaatatcacaacagtgtttttaaaggttaggctttaaaataaagcatgttatacagaagcgattaggatttttcgcttgcgagcaagggagtgtatatactaaatgccacactgtatgtttctaacatattattattattataaaaaatgtgtgaatatcagttttagaatagtttctctggtggatgcaatgatgtttctgaaactgctatgtacaacctaccctgtgtataacatttcgtacaatattattgttttacttttcagcaaatatgaaacaaatgtgttttatttcatgggagtaaaatatactgcat

SEQ ID NO: 163420 - DNA, 3102 bp, Homo sapiens
  Payload ID: 12193
  Gene Symbol: PITX2
  Gene Name: paired-like homeodomain 2
  Uniprot ID: Q99697
  ENST ID: ENST00000616641
  CDS Start-End: 1590-2405
gcagtctgtgtaagttttcatatctctgagtgtgtgcacacagtggagagggtggagcctgccatcctcaaatctgaaaagattgagagatttcagagggcccagatgtgccaaaggtcagagggatcaatatacaggccctaccacggaaaggcggggaaaaggttcgaatagaaaactgctgcagaagggaagccactgagaggagcaaatgtggacttgagggaaactctctcccccacccccacttctatcccgtgcaatttaataccatcctcgccaggaaccttaacctcgtcattttaaaaaatgagatatccgtgacccagggtgaacttgttgaatgtaggtacagcagaggaaattctagactctatgagcgtctgagccttgtccagtgcaaacccttcgtgaacactgggtcagtgcgtggccgtgcccacctgtgcgccgacactctcagcatgcctggtccacccgccttgacctcgggcgcggtgtcccagctaagctgggcccagcgtcccggccttccccagctgacaagcctagctcgttcgctcccggctgtggccctcccaccctctcccactagctcactccattcttctagatttctcttcactcatcctctcccatccccaccgcgcccacctccactcccgccctctaccggtctctcactttcctccctccgcagtccctctttgctgtgacctctttcctcaactctgcaggcctgaaagaaggtcacacacgcacgctcacacccacactccacacgcctcgtcccaaacaaccccatgaacattgtcctttgttccgtctcttgggccactttccctgtcgcttcctcccagcccgtcctgatttgctccccaaaagtacgtttctgtctccccgctgccctggcgctccccctttgatttattagggctgccgggttggcgcagattgctttttcttctcttccatcccatcctcccttctggtcctcctttccacagtgggagtccgtgctcctgctcctcggttggctcctaagtgccccgccaggtcccctctcctttcgctctcccggctccggctcccgactcttcggcccgctggcatctgcttccctcccctgcctcgtttctcgtcgcccctgctcgctccccccggcgctcgcccgggcgctgtgctcgctcctggatcgccagccgcgcagccgggctcggccggccgcccgcgcgccactgtgcagtggagtttggtggaatctctgctgacgtcacgtcactccccacacggagtaggagcagagggaagagagagggatgagagggagggagaggagagagagtgcgagaccgagcgagaaagctggagaggagcagaaagaaactgccagtggcggctagatttcggaggccccagtgcacccgtggactccttcggaacttggcaccctcaggagccctgcagtcctctcaggcccggctttcgggcgcttgccgtgcagccggaggctcggctcgctggaaatcgccccgggaagcagtgggacgcggagacagcagctctctcccggtagccgataacggggaatggagaccaactgccgcaaactggtgtcggcgtgtgtgcaattagagaaagataaaagccagcaggggaagaatgaggacgtgggcgccgaggacccgtctaagaagaagcggcaaaggcggcagcggactcactttaccagccagcagctccaggagctggaggccactttccagaggaaccgctacccggacatgtccacacgcgaagaaatcgctgtgtggaccaaccttacggaagcccgagtccgggtttggttcaagaatcgtcgggccaaatggagaaagagggagcgcaaccagcaggccgagctatgcaagaatggcttcgggccgcagttcaatgggctcatgcagccctacgacgacatgtacccaggctattcctacaacaactgggccgccaagggccttacatccgcctccctatccaccaagagcttccccttcttcaactctatgaacgtcaaccccctgtcatcacagagcatgttttccccacccaactctatctcgtccatgagcatgtcgtccagcatggtgccctcagcagtgacaggcgtcccgggctccagtctcaacagcctgaataacttgaacaacctgagtagcccgtcgctgaattccgcggtgccgacgcctgcctgtccttacgcgccgccgactcctccgtatgtttatagggacacgtgtaactcgagcctggccagcctgagactgaaagcaaagcagcactccagcttcggctacgccagcgtgcagaacccggcctccaacctgagtgcttgccagtatgcagtggaccggcccgtgtgagccgcacccacagcgccgggatcctaggaccttgccggatggggcaactccgcccttgaaagactgggaattatgctagaaggtcgtgggcactaaagaaagggagagaaagagaagctatatagagaaaaggaaaccactgaatcaaagagagagctcctttgatttcaaagggatgtcctcagtgtctgacatctttcactacaagtatttctaacagttgcaaggacacatacacaaacaaatgtttgactggatatgacattttaacattactataagcttgttattttttaagtttagcattgttaacatttaaatgactgaaaggatgtatatatatcgaaatgtcaaattaattttataaaagcagttgttagtaatatcacaacagtgtttttaaaggttaggctttaaaataaagcatgttatacagaagcgattaggatttttcgcttgcgagcaagggagtgtatatactaaatgccacactgtatgtttctaacatattattattattataaaaaatgtgtgaatatcagttttagaatagtttctctggtggatgcaatgatgtttctgaaactgctatgtacaacctaccctgtgtataacatttcgtacaatattattgttttacttttcagcaaatatgaaacaaatgtgttttatttcatgggagtaaaatatactgcat

SEQ ID NO: 163421 - DNA, 1391 bp, Homo sapiens
  Payload ID: 12194
  Gene Symbol: PITX3
  Gene Name: paired-like homeodomain 3
  Uniprot ID: O75364
  ENST ID: ENST00000370002
  CDS Start-End: 155-1063
ggagcgcccgagcggagaggcggcccgggagcaggggggcggcccccactccggccgggtgcccggcccctggcccctgcctgccctctagatcgccgccgcagccgccgctactgggagtctgcctgttgcaggacgcactagccctccctccatggagttcggcctgctcagcgaggcagaggcccggagccctgccctgtcgctgtcagacgctggcactccgcacccccagctcccagagcacggctgcaagggccaggagcacagcgactcagaaaaggcctcggcttcgctgcccggcggctccccagaggacggttcgctgaaaaagaagcagcggcggcagcgcacgcacttcaccagccagcagctacaggagctagaggcgaccttccagaggaaccgctaccccgacatgagcacgcgcgaggagatcgccgtgtggaccaacctcaccgaggcccgcgtgcgggtgtggttcaagaaccggcgcgccaaatggcggaagcgcgagcgcagccagcaggccgagctatgcaaaggcagcttcgcggcgccgctcggggggctggtgccgccctacgaggaggtgtaccccggctactcgtacggcaactggccgcccaaggctcttgccccgccgctcgccgccaagacctttccattcgccttcaactcggtcaacgtggggcctctggcttcgcagcccgtcttctcgccacccagctccatcgccgcctccatggtgccctccgccgcggctgccccgggcaccgtgccagggcctggggccctgcagggcctgggcgggggcccccccgggctggctccggccgccgtgtcctccggggccgtgtcctgcccttatgcctcggccgccgccgccgccgcggctgccgcctcttccccctacgtctatcgggacccgtgtaactcgagcctggccagcctgcggctcaaagccaaacagcacgcctccttcagctaccccgctgtgcacgggccgcccccggcagccaaccttagtccgtgccagtacgccgtggaaaggcccgtatgagcggccccgcccgtagatcatccccgagggcgggggcaacgattcacagcctccgcggactggggtcattttgactggcttgctcccgccccagggtctgaaaggggtgtttgggcagctggggggcaccggctcaggagagggccttcccctcccagccctgaggggtggactaggccctacacacagaccgcgcccctgggactaaagccaggaacagggaccagctccccgggggccaactcacccttggcccatcccgccttctccaggcttcccctccctcgttttcaaagataaatgaaataaacgtgcgcggactgtcgaa

SEQ ID NO: 163422 - DNA, 1187 bp, Homo sapiens
  Payload ID: 12194
  Gene Symbol: PITX3
  Gene Name: paired-like homeodomain 3
  Uniprot ID: O75364
  ENST ID: ENST00000539804
  CDS Start-End: 4-912
tccatggagttcggcctgctcagcgaggcagaggcccggagccctgccctgtcgctgtcagacgctggcactccgcacccccagctcccagagcacggctgcaagggccaggagcacagcgactcagaaaaggcctcggcttcgctgcccggcggctccccagaggacggttcgctgaaaaagaagcagcggcggcagcgcacgcacttcaccagccagcagctacaggagctagaggcgaccttccagaggaaccgctaccccgacatgagcacgcgcgaggagatcgccgtgtggaccaacctcaccgaggcccgcgtgcgggtgtggttcaagaaccggcgcgccaaatggcggaagcgcgagcgcagccagcaggccgagctatgcaaaggcagcttcgcggcgccgctcggggggctggtgccgccctacgaggaggtgtaccccggctactcgtacggcaactggccgcccaaggctcttgccccgccgctcgccgccaagacctttccattcgccttcaactcggtcaacgtggggcctctggcttcgcagcccgtcttctcgccacccagctccatcgccgcctccatggtgccctccgccgcggctgccccgggcaccgtgccagggcctggggccctgcagggcctgggcgggggcccccccgggctggctccggccgccgtgtcctccggggccgtgtcctgcccttatgcctcggccgccgccgccgccgcggctgccgcctcttccccctacgtctatcgggacccgtgtaactcgagcctggccagcctgcggctcaaagccaaacagcacgcctccttcagctaccccgctgtgcacgggccgcccccggcagccaaccttagtccgtgccagtacgccgtggaaaggcccgtatgagcggccccgcccgtagatcatccccgagggcgggggcccagggtctgaaaggggtgtttgggcagctggggggcaccggctcaggagagggccttcccctcccagccctgaggggtggactaggccctacacacagaccgcgcccctgggactaaagccaggaacagggaccagctccccgggggccaactcacccttggcccatcccgccttctccaggcttcccctccctcgttttcaaagataaatgaaataaacgtgcgcggactgtcgaa

SEQ ID NO: 163423 - DNA, 1800 bp, Homo sapiens
  Payload ID: 12195
  Gene Symbol: PAK1IP1
  Gene Name: PAK1 interacting protein 1
  Uniprot ID: Q9NWT1
  ENST ID: ENST00000379568
  CDS Start-End: 292-1470
gctggcaccttcctgagatatgcctgcttgcccccgatttttttctccttgcagtgagaacctcctcatgtggcatctttacttattctcttcttggaaaatccatgtgacctccccgcgcttaaagtgtttccacgttacaggcgacttaaaggcagccctggagcctgacgtataattcgagcgccgatgcagaaaggagtcaggtgtttttttttttttttttttggtttccggttctgtcacctccaggctgagccgggctggcggaagaggcacgtgcgctgctgaatggagctggtcgctggttgctacgagcaggtcctctttgggttcgctgtacacccggagcccgaggcttgcggcgaccacgagcaatggactcttgtggctgacttcactcaccatgctcacactgcctccttgtcagcagtagctgtaaatagtcgttttgtggtcactgggagcaaagatgaaacaattcacatttatgacatgaaaaagaagattgagcatggggctctagtgcatcacagtggtacaataacttgcctgaaattctatggcaacaggcatttaatcagtggagcggaagatggactcatctgtatctgggatgcaaagaaatgggaatgcctgaagtcaattaaagctcacaaaggacaggtgaccttcctttctattcacccatctggcaagttggccctgtcggttggtacagataaaactttaagaacgtggaatcttgtagaaggaagatcagcattcataaaaaatataaaacaaaatgctcacatagtagaatggtccccaagaggagagcagtatgtagttatcatacagaataaaatagacatctatcagcttgacactgcatccattagtggcaccatcacaaatgaaaagagaatttcctctgttaaatttctttcagagtctgtccttgcagtggctggagatgaagaagttataaggttttttgactgtgattcactagtgtgcctctgcgaatttaaagctcatgaaaacagggtaaaggacatgttcagttttgaaattccagagcatcatgttattgtttcagcatcgagtgatggtttcatcaaaatgtggaagcttaagcaggataagaaagttcccccatctttactctgtgaaataaacactaatgccaggctgacgtgtcttggagtgtggctagacaaagtggcagacatgaaagaaagccttcctccagctgcagagccttctcctgtaagtaaagaacagtccaaaattggcaaaaaggagcctggtgacacagtgcacaaagaagaaaagcggtcaaaacctaacacaaagaaacgcggtttaacaggtgacagtaagaaagcaacaaaagaaagtggcctgatatcaaccaagaagaggaaaatggtagaaatgttggaaaagaagaggaaaaagaagaaaataaaaacaatgcagtgaatcacagatgtctcctgaaagaactcttttagatgaaatcattctactcaaatgtaccttaattttttttttttccctgagtaaaagcaagaaatttcttcctttggaaaaaatatatatattaaaaaaccacttttagatggttttttttaaaaaaaaaaaaaaaactggtaaaattacttttggcagacagtgttttatgaattatgtatcatgttgatatataatatgttaatgtgtcatgtaatttttactttgtacaaagcaaataaagatctttctcaaaatatactgtaaaataatataaaatattgaacacattctttatca

SEQ ID NO: 163424 - DNA, 5809 bp, Homo sapiens
  Payload ID: 12196
  Gene Symbol: PALLD
  Gene Name: palladin, cytoskeletal associated protein
  Uniprot ID: Q8WX93
  ENST ID: ENST00000261509
  CDS Start-End: 212-3532
gtgaccacggaccaggcagtctctaatgaataggcaaggccacaacctccattctcccagaaaagaagaaatgctcatctgaaattcatcacctctctggagtcttcaaactgaccaagcattgaaaagaacacagtttcagaaaacagtttccagtgcctctggccttcctactgaaagcagacacagagtgcatgaagaccgttcaaatatgtcagggacctcctcccatgagtccttctatgactccctctcagacatgcaggaagaaagcaagaatactgacttcttcccgggcctttctgctttcctcagccaggaagagataaacaagagtcttgacctggcccggagagccatagccgactccgaaacagaagattttgactcggaaaaggagatctcgcagattttcagtacttctcctgcaagcctctgtgaacatccttcccataaggagaccaaattgggtgaacacgcctcgaggagacctcaggataacaggtcaacacctgtccagcctctggcagagaaacaaactaagagtatctcttcacctgtttcaaagaggaaacctgccatgtcacccctgctcaccaggcccagctacatccggagcctccgaaaggctgaaaagcgtggtgcaaaaactcccagcacaaacgtaaagcccaaaacgccacatcaaagaaagggtggcccccagagccagctgtgtgacaaggcagctaatttaattgaggagctaacatccatatttaaagccgcaaagccaagaaacagaagcccaaatggggagtcctcgtcaccagacagtgggtacctgtctcctaaaaatcagccgtcagccctgctgagtgcctcagccagccagagccctatggaagaccaaggggagatggaaagagaggtcaagtcccctggggccaggcattgctaccaggacaaccaggacttggcagtgccacacaaccgcaagtctcacccacagccccacagcgccctccacttcccagctgcacctcgattcatccaaaagctgaggagccaagaagtagcagaagggagccgagtttatctggagtgtagagtcactggaaaccccactcctcgagtcagatggttctgtgaagggaaagaactgcacaacactcctgatattcaaatccactgtgagggaggggacctccataccctgatcatagcagaggcctttgaggacgacacaggtcgctacacctgtttggctacgaatcccagcggctcagacacaacatctgctgaggtgttcattgaaggtgccagttcaacagattctgacagtgaaagtttagctttcaaatcaagagctggagctatgccacaagctcaaaagaaaacaacttctgtttccttgacaataggatcatcatctccaaagacaggggtgaccacagctgtgattcaaccactgtctgtccctgtgcaacaggttcacagtccaacttcatatctctgccgacctgatggaaccactactgcctactttcctcctgtttttacaaaggaactgcaaaacacagccgtggcggaaggccaggtggtggttctggagtgccgggtccgtggggcaccccctctgcaggtccagtggtttcggcaagggagtgaaatccaagactctccagatttccgaattctacagaaaaaacctagatctacagctgaacctgaggagatttgcaccctagttatcgctgagactttccctgaagatgcagggatctttacatgttcagcaagaaatgattatggatcagcaaccagcactgcccagctggttgtcacctcagccaacactgaaaactgtagttacgagtcaatgggagaatccaacaatgaccacttccaacactttccacctccccctccaatcttggagacaagttccttggagttggcttcaaagaaaccatctgagatccagcaggtgaacaaccctgagttaggcctgagcagggcagcccttcaaatgcaattcaatgctgctgagagggaaacgaacggagtccatcccagccgtggagtaaatggactgattaacggcaaagctaacagtaataaatctcttccaacaccagctgtcctgctttcacccactaaggagccaccacctctgcttgccaaaccaaaactaggatttccaaagaaggccagtagaactgctagaatagcctccgatgaggaaattcaaggcacaaaggatgctgttattcaagacctggaacgaaaacttcgcttcaaggaggacctcctgaacaatggccagccgaggttaacatacgaagaaagaatggctcgtcgactgctaggtgctgacagtgcaactgtctttaatattcaggagccagaagaggaaacagctaatcaggaatacaaagtctccagctgtgaacagagactcatcagtgaaatagagtacaggctagaaaggtctcctgtggatgaatcaggtgatgaagttcagtatggagatgtgcctgtggaaaatggaatggcaccattctttgagatgaagctgaaacattacaagatctttgagggaatgccagtaactttcacatgtagagtggctggaaatccaaagccaaagatctattggtttaaagatgggaagcagatctctccaaagagtgatcactacaccattcaaagagatctcgatgggacctgctccctccataccacagcctccaccctagatgatgatgggaattatacaattatggctgcaaaccctcagggccgcatcagttgtactggacggctaatggtacaggctgtcaaccaaagaggtcgaagtccccggtctccctcaggccatcctcatgtcagaaggcctcgttctagatcaagggacagtggagacgaaaatgaaccaattcaggagcgattcttcagacctcacttcttgcaggctcctggagatctgactgttcaagaaggaaaactctgcagaatggactgcaaagtcagtgggttaccaaccccagatctaagctggcaactagatggaaagcccgtacgccctgacagtgctcacaagatgctggtgcgtgagaacggggtgcactctctgatcatagagccagtcacgtcacgtgatgccggcatctacacatgtatagctaccaaccgagcaggacagaactcattcagcctggagcttgtggttgctgctaaagaagcacacaaaccccctgtgtttattgagaagctccaaaacacaggagttgctgatgggtacccagtgcggctggaatgtcgtgtattgggagtgccaccacctcagatattttggaagaaagaaaatgaatcactcactcacagcactgaccgagtgagcatgcaccaggacaaccacggctacatctgcctgctcattcagggagccacaaaagaagatgctgggtggtatactgtgtcagccaagaatgaagcagggattgtgtcctgtactgccaggctggacgtttacatttctcgacattaatagtgaaccacaccaggagaacaaatacccaacccagtggcatcagcagtcacagagcaccaagccaaaaaaagtacggccctcagccagtcgctatgcagcactttcggaccagggactagacatcaaagcagcgttccaacctgaggccaacccatctcacctgacactgaatactgccttggtagaaagtgaggacctgtaatccagcattcttgttaaagctgaaacactgaaacagccattgccttgaccaacatattcctttgtcacattatgtaaaaggcagaaacatacctttgactataagaaattaaaaaaaaaacaccaaaataatatttttcttacttgatataccaaacttagtttaagtagataatgctaatacaaatatacacattgcacagaaaatacacatttactgtccaatttaaaactttggaattgctgtgattaaagtgatcaaaatgccaaaatactaaaggaaatcaattgttcacaggtaactacaatttgtattatctacaagtgcctttaaacacaagatataggtgctgtgtagcctgatagtgtgaaatgtttaatgagggagttgtaccacaaacagtactacaatgattctgaagcacagtgtattcagacagatacagtgaaccaagtgcaatatgtaaggatgaaagaagaagagatgacaaagaaatccaagtaaatgccttgtctttgcaaatgtttttatattaaatcataaggaaggaactacttgccttaaatgttaatatcaaaagagttttctaacaaggttaataccttagttcttaacattttttttctttatgtgtagtgttttcatgctaccttggtaggaaacttatttacaaaccatattaaaaggctaatttaaatataaataatataaagtgctctgaataaagcagaaatatattacagttcattccacagaaagcatccaaaccacccaaatgaccaaggcatatatagtatttggaggaatcaggggtttggaaggagtagggaggagaatgaaggaaaatgcaaccagcatgattatagtgtgttcatttagataaaagtagaaggcacaggagaggtagcaaaggccaggcttttctttggttttcttcaaacataggtgaaaaaaacactgccattcacaagtcaaggaacccagggccagctggaagtgtggagcacacatgctgtggagcacacatgctgtggagattgcagtgtgtctgaggtttgtgtagtagtggaagattttaggtatgtagagcaagttgaaaatggattgagactgcatggtggcataaatgagaaattgcctgtagcatctagtctacttgaaggaagtggagacataaggagagacaaaaacaggtttgtgccataaagtattttttcaaagacaccaagatgtggtaaatgaaaattattagttcacttccctgctgccatgaaactttgccttaagaaggtgctggattccaaggtttgtaaaggcatctcggtaaagactgctttttgaatgcatatgattttgcatcagctagactgagttgattctgaccagacttgatggttttaagtcggaaccgataaattttaaaaaggagaaaaaataatttgacctagtagtataaaacatgaggctttaatggtactttgctatgaaaagaaaacactgtattccttatgcaaaacacatgtatctttcattatttataagtggcctctcttagctcagttactcaattcatacgtagtattttttaaaataattttatatctgtgtaccaccccatatatttcatattactgtttcacatgtacagctttctacttctttgtaagaacaccaaccaaccaaggtttaagtgattaataggcttgagcaccgggtggcagatgttctatgcagtgtggttcaagtttctttgaccgcacttatatgcattgctaatatggaatttaagataccatacacagtctctcatggacctatctctattgtagaattatgacttatgtcttacttgccaaatttttctgaatgtgacctttttttgctgatttgctgggtttgggattaactagcattattttgccacctttatattgtatttataaaaaaaaaagtactatcaatcaatcatactactttggattgttgtgctggtgtaatgtggatttaacatcaataaatatttgacaaataatagttgcagttttgtgaagcaaaataaatattcagtttta

SEQ ID NO: 163425 - DNA, 817 bp, Homo sapiens
  Payload ID: 12196
  Gene Symbol: PALLD
  Gene Name: palladin, cytoskeletal associated protein
  ENST ID: ENST00000393726
  CDS Start-End: 325-817
ttattttgaagggcggcgggtgaaggctcggagcctcctgagtcacccggcgggcgaggtataaagcccgatacctgccccgcgcccggtccgcggagcccgctgcagctcccgctcgctccggacgcggaatcgggcagcagcgggaggcggcccggagagccgagaggatttccaaagaaggccagtagaactgctagaatagcctccgatgaggaaattcaaggcacaaaggatgctgttattcaagacctggaacgaaaacttcgcttcaaggaggacctcctgaacaatggccagccgaggttaacatacgaagaaagaatggctcgtcgactgctaggtgctgacagtgcaactgtctttaatattcaggagccagaagaggaaacagctaatcaggaatacaaagtctccagctgtgaacagagactcatcagtgaaatagagtacaggctagaaaggtctcctgtggatgaatcaggtgatgaagttcagtatggagatgtgcctgtggaaaatggaatggcaccattctttgagatgaagctgaaacattacaagatctttgagggaatgccagtaactttcacatgtagagtggctggaaatccaaagccaaagatctattggtttaaagatgggaagcagatctctccaaagagtgatcactacaccattcaaagagatctcgatgggacctgctccctccataccacagcctccaccctagatgatgatgggaattatacaattatggctgcaaaccctcagggccgcatcagttgtactggacggctaatggtacaggctgtca

SEQ ID NO: 163426 - DNA, 565 bp, Homo sapiens
  Payload ID: 12196
  Gene Symbol: PALLD
  Gene Name: palladin, cytoskeletal associated protein
  ENST ID: ENST00000513245
  CDS Start-End: 351-565
attttgttttcttcataacatttccctgtctgaaattattttattcatgtggtatcatttaagtgcttattatctctctcaccctgctcccatcaccactggagtaaaagctatggttctgtgaagggaaagaactgcacaacactcctgatattcaaatccactgtgagggaggggacctccataccctgatcatagcagaggcctttgaggacgacacaggtcgctacacctgtttggctacgaatcccagcggctcagacacaacatctgctgaggtgttcattgaaggtgccagttcaacagattctgacagtgaaagtttagctttcaaatcaagagctggagctatgccacaagctcaaaagaaaacaacttctgtttccttgacaataggatcatcatctccaaagacaggggtgaccacagctgtgattcaaccactgtctgtccctgtgcaacaggttcacagtccaacttcatatctctgccgacctgatggaaccactactgcctactttcctcctgtttttacaaaggaactgcaaaacacagccgtggcgga

SEQ ID NO: 163427 - DNA, 545 bp, Homo sapiens
  Payload ID: 12196
  Gene Symbol: PALLD
  Gene Name: palladin, cytoskeletal associated protein
  ENST ID: ENST00000510998
  CDS Start-End: 274-545
gaaaatatctgtgcccagtgtgggcttccaacatacagctaaggatgtagccactccctggaggccatggaaaagggggatctactttcagccctttattaaaagcatttcaaaaaaggatttccaaagaaggccagtagaactgctagaatagcctccgatgaggaaattcaaggcacaaaggatgctgttattcaagacctggaacgaaaacttcgcttcaaggaggacctcctgaacaatggccagccgaggttaacatacgaagaaagaatggctcgtcgactgctaggtgctgacagtgcaactgtctttaatattcaggagccagaagaggaaacagctaatcaggaatacaaagtctccagctgtgaacagagactcatcagtgaaatagagtacaggctagaaaggtctcctgtggatgaatcaggtgatgaagttcagtatggagatgtgcctgtggaaaatggaatggcaccattctttgagatgaagctgaaacattacaagatctttgagggaatgccagtaactttcacatg

SEQ ID NO: 163428 - DNA, 2320 bp, Homo sapiens
  Payload ID: 12196
  Gene Symbol: PALLD
  Gene Name: palladin, cytoskeletal associated protein
  ENST ID: ENST00000508898
  CDS Start-End: 1-1539
aagaatactgacttcttcccgggcctttctgctttcctcagccaggaagagataaacaagagtcttgacctggcccggagagccatagccgactccgaaacagaagattttgactcggaaaaggagatctcgcagattttcagtacttctcctgcaagcctctgtgaacatccttcccataaggagaccaaattgggtgaacacgcctcgaggagacctcaggataacaggtcaacacctgtccagcctctggcagagaaacaaactaagagtatctcttcacctgtttcaaagaggaaacctgccatgtcacccctgctcaccaggcccagctacatccggagcctccgaaaggctgaaaagcgtggtgcaaaaactcccagcacaaacgtaaagcccaaaacgccacatcaaagaaagggtggcccccagagccagctgtgtgacaaggcagctaatttaattgaggagctaacatccatatttaaagccgcaaagccaagaaacagaagcccaaatggggagtcctcgtcaccagacagtgggtacctgtctcctaaaaatcagccgtcagccctgctgagtgcctcagccagccagagccctatggaagaccaaggggagatggaaagagaggtcaagtcccctggggccaggcattgctaccaggacaaccaggacttggcagtgccacacaaccgcaagtctcacccacagccccacagcgccctccacttcccagctgcacctcgattcatccaaaagctgaggagccaagaagtagcagaagggagccgagtttatctggagtgtagagtcactggaaaccccactcctcgagtcagatggttctgtgaagggaaagaactgcacaacactcctgatattcaaatccactgtgagggaggggacctccataccctgatcatagcagaggcctttgaggacgacacaggtcgctacacctgtttggctacgaatcccagcggctcagacacaacatctgctgaggtgttcattgaaggtgccagttcaacagattctgacagtgaaagtttagctttcaaatcaagagctggagctatgccacaagctcaaaagaaaacaacttctgtttccttgacaataggatcatcatctccaaagacaggggtgaccacagctgtgattcaaccactgtctgtccctgtgcaacaggttcacagtccaacttcatatctctgccgacctgatggaaccactactgcctactttcctcctgtttttacaaaggaactgcaaaacacagccgtggcggaaggccaggtggtggttctggagtgccgggtccgtggggcaccccctctgcaggtccagtggtttcggcaagggagtgaaatccaagactctccagatttccgaattctacagaaaaaacctagatctacagctgaacctgatgtcttatacgtctttgttcgagtgagatgccaccagatgaaaattcagtattacaacctggctcatctcatttcctcatggctttcttcatttttataatgtcagaaccatacaagctatgatgcttctttctctcaacaaaatgtgagcctcttgtcactgttggatgaacttttctttgagaagaaaagctgaggaacctgtgggacattgtattcaaattttatctagttaaaaaaaaattatctagcaaaaattgctgtgacatttcaatgcatgaggatcactaaaagaacatcctagtgtttattttttatttttctatttttgttctttaattctgtaatttttctaaatgttccacgtgaactatatacaggcatataccttatttatgcatggaagtattcctataaaatcatacacaatgaattctgctcaatcaactttgaaacacacaaaggaagcttgtaggaaaattggtcttactgagaattcctttagaaaatagtctttttacaaagcaagtgtttttttccttcatctaaatttcatgcatgcatttatttaaacataattatagggagcctaccatgtgtgagatgctaagaatatggccatgaacaaaaattgtttctgcactcagaggttatatttcagcgaaccagaaactaacaaactaattacacaataaattatttagcagggtgaggtggcacatagtcccagctacccaggaggctgaggcaggaggattgcttgagcccaggagttcaaggctgcagtgagctatgatcatgccacttcactccagcctgggcaacagtgaaacccctgtttctaaaaaaaagattttaaaaataaaataaaacaaaattgc

SEQ ID NO: 163429 - DNA, 576 bp, Homo sapiens
  Payload ID: 12196
  Gene Symbol: PALLD
  Gene Name: palladin, cytoskeletal associated protein
  ENST ID: ENST00000511948
  CDS Start-End: 493-576
agaaaagaagaaatgctcatctgaaattcatcacctctctggagtcttcaaactgaccaagcattgaaaagctctcacttcagagtccaagaaggacacatctaatcgctgtctaggccaagtgccaagacttgtgcccagtctccaagcggctgggaaagaaaatacttggagatttcacatcccattacaagtgagttcagtttctcactgagcctcagaatatgaggaattctccaaaatgaagacgtccagatgacagcaacaccaaacgtgaaaccatgataaatgtgtgcaccccctggattactgcacaagccttctcacggaccgccctactgtcagtcttgtcttcctctttccctacctctgtcccggatccagactgcaatcagttatctctcaaaaataacacagtttcagaaaacagtttccagtgcctctggccttcctactgaaagcagacacagagtgcatgaagaccgttcaaatatgtcagggacctcctcccatgagtccttctatgactccctctcagacatgcaggaagaaagcaagaatactgacttcttcccg

SEQ ID NO: 163430 - DNA, 4379 bp, Homo sapiens
  Payload ID: 12196
  Gene Symbol: PALLD
  Gene Name: palladin, cytoskeletal associated protein
  Uniprot ID: Q8WX93
  ENST ID: ENST00000507735
  CDS Start-End: 301-2319
cctgagtcacccggcgggcgaggtataaagcccgatacctgccccgcgcccggtccgcggagcccgctgcagctcccgctcgctccggacgcggaatcgggcagcagcgggaggcggcccggagagccgagggaccctctgaagctccagcaactccagaaccaaatccgactggagcaggaggccggcgctcggcagcctccgccagccccgcgcagcgcgccgccctcgccccccttcccgccgccgcccgccttccccgagctcgcggcctgcacgccgcccgcgtccccggagcccatgagcgcgctggcctcccgctccgcccccgccatgcagtcctccggctccttcaactacgcgcgccccaagcagttcatcgccgcgcagaacctcgggcccgcgtcgggccacggcacgccggcctccagccccagctcgtccagcctcccgtcgcccatgtccccgacgccgaggcagttcggccgcgcccccgtgccgcccttcgcgcagcccttcggcgctgagcccgaggccccgtggggctcctcctcgccgtcgcccccgcccccgccacccccggtcttcagccccacggctgccttcccggtgcccgacgtgttcccactgccgccgccaccaccgccgctcccgagcccgggacaggcgtcccactgctcgtcgcctgccacccgcttcggccacagccagacgcccgcggccttcctcagcgctctgctgccctcgcagccgccgccggcggccgtcaacgccctggggctgcccaagggtgtcacccccgcaggatttccaaagaaggccagtagaactgctagaatagcctccgatgaggaaattcaaggcacaaaggatgctgttattcaagacctggaacgaaaacttcgcttcaaggaggacctcctgaacaatggccagccgaggttaacatacgaagaaagaatggctcgtcgactgctaggtgctgacagtgcaactgtctttaatattcaggagccagaagaggaaacagctaatcaggaatacaaagtctccagctgtgaacagagactcatcagtgaaatagagtacaggctagaaaggtctcctgtggatgaatcaggtgatgaagttcagtatggagatgtgcctgtggaaaatggaatggcaccattctttgagatgaagctgaaacattacaagatctttgagggaatgccagtaactttcacatgtagagtggctggaaatccaaagccaaagatctattggtttaaagatgggaagcagatctctccaaagagtgatcactacaccattcaaagagatctcgatgggacctgctccctccataccacagcctccaccctagatgatgatgggaattatacaattatggctgcaaaccctcagggccgcatcagttgtactggacggctaatggtacaggctgtcaaccaaagaggtcgaagtccccggtctccctcaggccatcctcatgtcagaaggcctcgttctagatcaagggacagtggagacgaaaatgaaccaattcaggagcgattcttcagacctcacttcttgcaggctcctggagatctgactgttcaagaaggaaaactctgcagaatggactgcaaagtcagtgggttaccaaccccagatctaagctggcaactagatggaaagcccgtacgccctgacagtgctcacaagatgctggtgcgtgagaacggggtgcactctctgatcatagagccagtcacgtcacgtgatgccggcatctacacatgtatagctaccaaccgagcaggacagaactcattcagcctggagcttgtggttgctgctaaagaagcacacaaaccccctgtgtttattgagaagctccaaaacacaggagttgctgatgggtacccagtgcggctggaatgtcgtgtattgggagtgccaccacctcagatattttggaagaaagaaaatgaatcactcactcacagcactgaccgagtgagcatgcaccaggacaaccacggctacatctgcctgctcattcagggagccacaaaagaagatgctgggtggtatactgtgtcagccaagaatgaagcagggattgtgtcctgtactgccaggctggacgtttacacccagtggcatcagcagtcacagagcaccaagccaaaaaaagtacggccctcagccagtcgctatgcagcactttcggaccagggactagacatcaaagcagcgttccaacctgaggccaacccatctcacctgacactgaatactgccttggtagaaagtgaggacctgtaatccagcattcttgttaaagctgaaacactgaaacagccattgccttgaccaacatattcctttgtcacattatgtaaaaggcagaaacatacctttgactataagaaattaaaaaaaaaacaccaaaataatatttttcttacttgatataccaaacttagtttaagtagataatgctaatacaaatatacacattgcacagaaaatacacatttactgtccaatttaaaactttggaattgctgtgattaaagtgatcaaaatgccaaaatactaaaggaaatcaattgttcacaggtaactacaatttgtattatctacaagtgcctttaaacacaagatataggtgctgtgtagcctgatagtgtgaaatgtttaatgagggagttgtaccacaaacagtactacaatgattctgaagcacagtgtattcagacagatacagtgaaccaagtgcaatatgtaaggatgaaagaagaagagatgacaaagaaatccaagtaaatgccttgtctttgcaaatgtttttatattaaatcataaggaaggaactacttgccttaaatgttaatatcaaaagagttttctaacaaggttaataccttagttcttaacattttttttctttatgtgtagtgttttcatgctaccttggtaggaaacttatttacaaaccatattaaaaggctaatttaaatataaataatataaagtgctctgaataaagcagaaatatattacagttcattccacagaaagcatccaaaccacccaaatgaccaaggcatatatagtatttggaggaatcaggggtttggaaggagtagggaggagaatgaaggaaaatgcaaccagcatgattatagtgtgttcatttagataaaagtagaaggcacaggagaggtagcaaaggccaggcttttctttggttttcttcaaacataggtgaaaaaaacactgccattcacaagtcaaggaacccagggccagctggaagtgtggagcacacatgctgtggagcacacatgctgtggagattgcagtgtgtctgaggtttgtgtagtagtggaagattttaggtatgtagagcaagttgaaaatggattgagactgcatggtggcataaatgagaaattgcctgtagcatctagtctacttgaaggaagtggagacataaggagagacaaaaacaggtttgtgccataaagtattttttcaaagacaccaagatgtggtaaatgaaaattattagttcacttccctgctgccatgaaactttgccttaagaaggtgctggattccaaggtttgtaaaggcatctcggtaaagactgctttttgaatgcatatgattttgcatcagctagactgagttgattctgaccagacttgatggttttaagtcggaaccgataaattttaaaaaggagaaaaaataatttgacctagtagtataaaacatgaggctttaatggtactttgctatgaaaagaaaacactgtattccttatgcaaaacacatgtatctttcattatttataagtggcctctcttagctcagttactcaattcatacgtagtattttttaaaataattttatatctgtgtaccaccccatatatttcatattactgtttcacatgtacagctttctacttctttgtaagaacaccaaccaaccaaggtttaagtgattaataggcttgagcaccgggtggcagatgttctatgcagtgtggttcaagtttctttgaccgcacttatatgcattgctaatatggaatttaagataccatacacagtctctcatggacctatctctattgtagaattatgacttatgtcttacttgccaaatttttctgaatgtgacctttttttgctgatttgctgggtttgggattaactagcattattttgccacctttatattgtatttataaaaaaaaaagtactatcaatcaatcatactactttggattgttgtgctggtgtaatgtggatttaacatcaataaatatttgacaaataatagttgcagttttgtgaagcaaaataaa

SEQ ID NO: 163431 - DNA, 570 bp, Homo sapiens
  Payload ID: 12196
  Gene Symbol: PALLD
  Gene Name: palladin, cytoskeletal associated protein
  ENST ID: ENST00000504519
  CDS Start-End: 321-570
gcattcgcgcgctggagaccggcggcctctcaccgagcctgagtcgtggccgctgcgccgccaggaggcttcccgggagccggcggggcccaggacctctcgagcgcagcagcgtcccagtcctgcctgtgtttcgagatttgcctcccgttactgcccccagcctgctgctcctctctccttgcacgatctgcgcctcgtccccagacaagctttaccacttcccagttctctttcttcattccagcagaagcctggaaggtgccagttcaacagattctgacagtgaaagtttagctttcaaatcaagagctggagctatgccacaagctcaaaagaaaacaacttctgtttccttgacaataggatcatcatctccaaagacaggggtgaccacagctgtgattcaaccactgtctgtccctgtgcaacaggttcacagtccaacttcatatctctgccgacctgatggaaccactactgcctactttcctcctgtttttacaaaggaactgcaaaacacagccgtggcggaaggccaggtggtggttctggagtgccgggtccgtg

SEQ ID NO: 163432 - DNA, 607 bp, Homo sapiens
  Payload ID: 12196
  Gene Symbol: PALLD
  Gene Name: palladin, cytoskeletal associated protein
  ENST ID: ENST00000503457
  CDS Start-End: 320-607
agctctgcataaccaggctctcaggggaagcagtggaggcagccttcttggacaacagctcacttgtctacacagtcaaaaatggttctgtgaagggaaagaactgcacaacactcctgatattcaaatccactgtgagggaggggacctccataccctgatcatagcagaggcctttgaggacgacacaggtcgctacacctgtttggctacgaatcccagcggctcagacacaacatctgctgaggtgttcattgaaggtgccagttcaacagattctgacagtgaaagtttagctttcaaatcaagagctggagctatgccacaagctcaaaagaaaacaacttctgtttccttgacaataggatcatcatctccaaagacaggggtgaccacagctgtgattcaaccactgtctgtccctgtgcaacaggttcacagtccaacttcatatctctgccgacctgatggaaccactactgcctactttcctcctgtttttacaaaggaactgcaaaacacagccgtggcggaaggccaggtggtggttctggagtgccgggtccgtggggcaccccctctgcaggtccagtggtttcggcaaggg

SEQ ID NO: 163433 - DNA, 3637 bp, Homo sapiens
  Payload ID: 12196
  Gene Symbol: PALLD
  Gene Name: palladin, cytoskeletal associated protein
  Uniprot ID: Q8WX93
  ENST ID: ENST00000505667
  CDS Start-End: 174-3545
gccacaacctccattctcccagaaaagaagaaatgctcatctgaaattcatcacctctctggagtcttcaaactgaccaagcattgaaaagaacacagtttcagaaaacagtttccagtgcctctggccttcctactgaaagcagacacagagtgcatgaagaccgttcaaatatgtcagggacctcctcccatgagtccttctatgactccctctcagacatgcaggaagaaagcaagaatactgacttcttcccgggcctttctgctttcctcagccaggaagagataaacaagagtcttgacctggcccggagagccatagccgactccgaaacagaagattttgactcggaaaaggagatctcgcagattttcagtacttctcctgcaagcctctgtgaacatccttcccataaggagaccaaattgggtgaacacgcctcgaggagacctcaggataacaggtcaacacctgtccagcctctggcagagaaacaaactaagagtatctcttcacctgtttcaaagaggaaacctgccatgtcacccctgctcaccaggcccagctacatccggagcctccgaaaggctgaaaagcgtggtgcaaaaactcccagcacaaacgtaaagcccaaaacgccacatcaaagaaagggtggcccccagagccagctgtgtgacaaggcagctaatttaattgaggagctaacatccatatttaaagccgcaaagccaagaaacagaagcccaaatggggagtcctcgtcaccagacagtgggtacctgtctcctaaaaatcagccgtcagccctgctgagtgcctcagccagccagagccctatggaagaccaaggggagatggaaagagaggtcaagtcccctggggccaggcattgctaccaggacaaccaggacttggcagtgccacacaaccgcaagtctcacccacagccccacagcgccctccacttcccagctgcacctcgattcatccaaaagctgaggagccaagaagtagcagaagggagccgagtttatctggagtgtagagtcactggaaaccccactcctcgagtcagatggttctgtgaagggaaagaactgcacaacactcctgatattcaaatccactgtgagggaggggacctccataccctgatcatagcagaggcctttgaggacgacacaggtcgctacacctgtttggctacgaatcccagcggctcagacacaacatctgctgaggtgttcattgaaggtgccagttcaacagattctgacagtgaaagtttagctttcaaatcaagagctggagctatgccacaagctcaaaagaaaacaacttctgtttccttgacaataggatcatcatctccaaagacaggggtgaccacagctgtgattcaaccactgtctgtccctgtgcaacaggttcacagtccaacttcatatctctgccgacctgatggaaccactactgcctactttcctcctgtttttacaaaggaactgcaaaacacagccgtggcggaaggccaggtggtggttctggagtgccgggtccgtggggcaccccctctgcaggtccagtggtttcggcaagggagtgaaatccaagactctccagatttccgaattctacagaaaaaacctagatctacagctgaacctgaggagatttgcaccctagttatcgctgagactttccctgaagatgcagggatctttacatgttcagcaagaaatgattatggatcagcaaccagcactgcccagctggttgtcacctcagccaacactgaaaactgtagttacgagtcaatgggagaatccaacaatgaccacttccaacactttccacctccccctccaatcttggagacaagttccttggagttggcttcaaagaaaccatctgagatccagcaggtgaacaaccctgagttaggcctgagcagggcagcccttcaaatgcaattcaatgctgctgagagggaaacgaacggagtccatcccagccgtggagtaaatggactgattaacggcaaagctaacagtaataaatctcttccaacaccagctgtcctgctttcacccactaaggagccaccacctctgcttgccaaaccaaaactaggatttccaaagaaggccagtagaactgctagaatagcctccgatgaggaaattcaaggcacaaaggatgctgttattcaagacctggaacgaaaacttcgcttcaaggaggacctcctgaacaatggccagccgaggttaacatacgaagaaagaatggctcgtcgactgctaggtgctgacagtgcaactgtctttaatattcaggagccagaagaggaaacagctaatcaggacattggttctcctcatgcttctgtagggagtcctctggatggtcaaaaggaatacaaagtctccagctgtgaacagagactcatcagtgaaatagagtacaggctagaaaggtctcctgtggatgaatcaggtgatgaagttcagtatggagatgtgcctgtggaaaatggaatggcaccattctttgagatgaagctgaaacattacaagatctttgagggaatgccagtaactttcacatgtagagtggctggaaatccaaagccaaagatctattggtttaaagatgggaagcagatctctccaaagagtgatcactacaccattcaaagagatctcgatgggacctgctccctccataccacagcctccaccctagatgatgatgggaattatacaattatggctgcaaaccctcagggccgcatcagttgtactggacggctaatggtacaggctgtcaaccaaagaggtcgaagtccccggtctccctcaggccatcctcatgtcagaaggcctcgttctagatcaagggacagtggagacgaaaatgaaccaattcaggagcgattcttcagacctcacttcttgcaggctcctggagatctgactgttcaagaaggaaaactctgcagaatggactgcaaagtcagtgggttaccaaccccagatctaagctggcaactagatggaaagcccgtacgccctgacagtgctcacaagatgctggtgcgtgagaacggggtgcactctctgatcatagagccagtcacgtcacgtgatgccggcatctacacatgtatagctaccaaccgagcaggacagaactcattcagcctggagcttgtggttgctgctaaagaagcacacaaaccccctgtgtttattgagaagctccaaaacacaggagttgctgatgggtacccagtgcggctggaatgtcgtgtattgggagtgccaccacctcagatattttggaagaaagaaaatgaatcactcactcacagcactgaccgagtgagcatgcaccaggacaaccacggctacatctgcctgctcattcagggagccacaaaagaagatgctgggtggtatactgtgtcagccaagaatgaagcagggattgtgtcctgtactgccaggctggacgtttacatttctcgacattaatagtgaaccacaccaggagaacaaatacccaacccagtggcatcagcagtcacagagcaccaagccaaaaaaagtacggccctcagccagtc

SEQ ID NO: 163434 - DNA, 628 bp, Homo sapiens
  Payload ID: 12196
  Gene Symbol: PALLD
  Gene Name: palladin, cytoskeletal associated protein
  ENST ID: ENST00000503290
  CDS Start-End: 1-481
tggaaagcccgtacgccctgacagtgctcacaagatgctggtgcgtgagaacggggtgcactctctgatcatagagccagtcacgtcacgtgatgccggcatctacacatgtatagctaccaaccgagcaggacagaactcattcagcctggagcttgtggttgctgctaaagaagcacacaaaccccctgtgtttattgagaagctccaaaacacaggagttgctgatgggtacccagtgcggctggaatgtcgtgtattgggagtgccaccacctcagatattttggaagaaagaaaatgaatcactcactcacagcactgaccgagtgagcatgcaccaggacaaccacggctacatctgcctgctcattcagggagccacaaaagaagatgctgggtggtatactgtgtcagccaagaatgaagcagggattgtgtcctgtactgccaggctggacgtttacatttctcgacattaatagtgaaccacaccaggagaacaaatacccaagtatcattcaggaactttgaattattagcaaaatatgcatgttgatttctcttacattggctagttagttgtggcttccttactcaagcatccttaggagttaacagtaggcaaa

SEQ ID NO: 163435 - DNA, 2958 bp, Homo sapiens
  Payload ID: 12196
  Gene Symbol: PALLD
  Gene Name: palladin, cytoskeletal associated protein
  Uniprot ID: Q8WX93
  ENST ID: ENST00000512127
  CDS Start-End: 523-2856
attcgcgcgctggagaccggcggcctctcaccgagcctgagtcgtggccgctgcgccgccaggaggcttcccgggagccggcggggcccaggacctctcgagcgcagcaggcaaggggccggccttttggcagcgcggctgccagttaattttctccgttgcattctgcaaacgagatcgcattcagagcccagaagttgcaagctgggaataagcgagatctgaaagacccccaagaggagcttgtttgggagtgggggcagacggcgttttgcgcccaactgatggttctgtgaagggaaagaactgcacaacactcctgatattcaaatccactgtgagggaggggacctccataccctgatcatagcagaggcctttgaggacgacacaggtcgctacacctgtttggctacgaatcccagcggctcagacacaacatctgctgaggtgttcattgaaggtgccagttcaacagattctgacagtgaaagtttagctttcaaatcaagagctggagctatgccacaagctcaaaagaaaacaacttctgtttccttgacaataggatcatcatctccaaagacaggggtgaccacagctgtgattcaaccactgtctgtccctgtgcaacaggttcacagtccaacttcatatctctgccgacctgatggaaccactactgcctactttcctcctgtttttacaaaggaactgcaaaacacagccgtggcggaaggccaggtggtggttctggagtgccgggtccgtggggcaccccctctgcaggtccagtggtttcggcaagggagtgaaatccaagactctccagatttccgaattctacagaaaaaacctagatctacagctgaacctgaggagatttgcaccctagttatcgctgagactttccctgaagatgcagggatctttacatgttcagcaagaaatgattatggatcagcaaccagcactgcccagctggttgtcacctcagccaacactgaaaactgtagttacgagtcaatgggagaatccaacaatgaccacttccaacactttccacctccccctccaatcttggagacaagttccttggagttggcttcaaagaaaccatctgagatccagcaggtgaacaaccctgagttaggcctgagcagggcagcccttcaaatgcaattcaatgctgctgagagggaaacgaacggagtccatcccagccgtggagtaaatggactgattaacggcaaagctaacagtaataaatctcttccaacaccagctgtcctgctttcacccactaaggagccaccacctctgcttgccaaaccaaaactaggatttccaaagaaggccagtagaactgctagaatagcctccgatgaggaaattcaaggcacaaaggatgctgttattcaagacctggaacgaaaacttcgcttcaaggaggacctcctgaacaatggccagccgaggttaacatacgaagaaagaatggctcgtcgactgctaggtgctgacagtgcaactgtctttaatattcaggagccagaagaggaaacagctaatcaggaatacaaagtctccagctgtgaacagagactcatcagtgaaatagagtacaggctagaaaggtctcctgtggatgaatcaggtgatgaagttcagtatggagatgtgcctgtggaaaatggaatggcaccattctttgagatgaagctgaaacattacaagatctttgagggaatgccagtaactttcacatgtagagtggctggaaatccaaagccaaagatctattggtttaaagatgggaagcagatctctccaaagagtgatcactacaccattcaaagagatctcgatgggacctgctccctccataccacagcctccaccctagatgatgatgggaattatacaattatggctgcaaaccctcagggccgcatcagttgtactggacggctaatggtacaggctgtcaaccaaagaggtcgaagtccccggtctccctcaggccatcctcatgtcagaaggcctcgttctagatcaagggacagtggagacgaaaatgaaccaattcaggagcgattcttcagacctcacttcttgcaggctcctggagatctgactgttcaagaaggaaaactctgcagaatggactgcaaagtcagtgggttaccaaccccagatctaagctggcaactagatggaaagcccgtacgccctgacagtgctcacaagatgctggtgcgtgagaacggggtgcactctctgatcatagagccagtcacgtcacgtgatgccggcatctacacatgtatagctaccaaccgagcaggacagaactcattcagcctggagcttgtggttgctgctaaagaagcacacaaaccccctgtgtttattgagaagctccaaaacacaggagttgctgatgggtacccagtgcggctggaatgtcgtgtattgggagtgccaccacctcagatattttggaagaaagaaaatgaatcactcactcacagcactgaccgagtgagcatgcaccaggacaaccacggctacatctgcctgctcattcagggagccacaaaagaagatgctgggtggtatactgtgtcagccaagaatgaagcagggattgtgtcctgtactgccaggctggacgtttacacccagtggcatcagcagtcacagagcaccaagccaaaaaaagtacggccctcagccagtcgctatgcagcactttcggaccagggactagacatcaaagcagcgttccaacctgaggccaacccatctcacctgacactgaatactgccttggtagaaagtgaggacctgtaatccagcattcttgttaaagctgaaacactgaaacagccattgccttgaccaacatattcctttgtcacattatgtaaaaggcagaaacatacctttgactat

SEQ ID NO: 163436 - DNA, 4718 bp, Homo sapiens
  Payload ID: 12197
  Gene Symbol: PALM2-AKAP2
  Gene Name: PALM2-AKAP2 readthrough
  ENST ID: ENST00000302798
  CDS Start-End: 34-3306
cctctttcccctgcctgtgtgcccttctccaggatggcagaggcggaattgcacaaggaaaggctgcaagccatagcagaaaaaagaaagaggcagactgaaatagaaggcaagcgacaacagcttgacgagcagatacttctgctgcagcattccaagtccaaagtgcttcgggagaaatggctgctgcagggcatacccgctggaactgccgaagaggaggaagccaggaggcggcagtctgaagaggatgagttcagagtcaagcaacttgaagataacattcagaggctggagcaagaaatacaaacgctagaaagtgaagagtcccagatatctgccaaagagcaaatcatcctagagaaactgaaggaaacagaaaaatccttcaaggactttcagaagggtttctccagtacggatggagatgcagtaaattacatttcctcccagcttcccgacctgccaatcctctgttcacgaacagcagaaccatcacctgggcaggacgggaccagcagagcggctggagtcgggtgggagaatgtgctgctaaaggaaggtgagtcagcctcgaacgccacagaaacatccggcccagacatgactatcaagaagcctccccagctttctgaggatgatatctggctaaaaagcgagggagacaactatagtgccaccctcctggagcctgctgccagctctctttccccagatcacaaaaacatggaaattgaggtgtctgttgcagaatgtaaaagtgttcctggaatcacctctaccccacatcccatggaccatccctccgctttctattcacccccgcataatggcctccttactgatcaccacgaatccctggataatgatgttgccagagagatccgctatctagatgaggtgctagaggccaactgctgtgattctgctgtggatggaacgtacaatggaacatcctccccagagcctggtgcagtggttctggtgggcggcctaagcccccctgtccacgaggcgacccagccagaacccactgaaagaacagctagccggcaggcacctcctcacatcgagctcagtaatagcagccctgaccccatggcagaggcagaaagaacaaatggccattcccccagccagcctagagatgcgctgggggacagcctgcaggtgcctgtcagccccagctccacaaccagctcacggtgttcttcccgagatggagagttcactctcaccacactgaaaaaggaggccaagtttgagctgcgtgccttccatgaggacaagaagccctccaagctctttgaggatgacgagcatgagaaagaacaatactgcattagaaaagtgaggccttcagaggagatgctggagctggaaaaggagaggagagagctcatccgcagccaggccgtcaagaagaatcctggcattgcagcaaaatggtggaatcccccgcaggaaaaaaccatcgaggagcagctggacgaggaacatctggagtcgcacaaaaagtacaaggagcgcaaagagagaagggcacagcaggaacagttgctgctgcagaagcagttacagcagcagcagcagcagcccccatcgcagctctgcacagcccctgcctcttctcatgaacgcgcaagcatgattgacaaagcaaaggaggacattgtcacagagcagatagatttctctgctgctcgcaaacaatttcagctgatggagaattccaggcaagcggtggccaagggccagagtacacccaggctgttctccatcaagcctttctacaggcctctggggtcagtcaactcagacaagccactgactaatccgagaccaccttctgtcgggggacctccagaagacagtggtgcctcagccgccaagggacagaaatcccccggtgccctggagaccccatcggcagcaggaagccagggcaacacagcctctcaggggaaggaagggccctacagcgagccttctaaacgtgggcccttatctaaactgtgggctgaggatggagaatttacgagcgcccgggctgtcctcactgtggtcaaggatgatgaccatgggattttggatcagttctcaagatctgtcaatgtctccttgacccaagaggagcttgactctggtctggacgaattgtcggtgaggtctcaggataccacagtcctggagaccctatccaatgatttcagcatggacaacatcagtgacagcggggcatccaatgagacaaccaatgccctccaggaaaattcactggctgatttttctctgccccagacaccacaaactgacaacccctcagagggccgaggagaaggcgtctccaagtcatttagtgatcatggtttctattccccttcctccacgctgggggactctccgttggttgatgaccccttggagtatcaggctggcctcctggtgcagaatgccattcaacaagccatagccgagcaggtggataaagctgtgtccaaaaccagcagggatggagcagagcaacagggacctgaagcgactgtagaggaagctgaagctgcggctttcggctcagaaaagcctcagagcatgtttgagccacctcaggtgtcttctcctgttcaagagaaaagggatgtattaccaaagattctgcctgctgaagacagggcgctcagggaaagggggcccccccagccactgccagctgtgcagcccagtggcccgattaacatggaggagaccaggcccgaaggaagctatttcagcaagtactcggaggcagctgagctgagaagcacagcctccctcctggccactcaagaatctgacgtgatggttgggcctttcaagctgaggtccaggaaacagcggactttgtccatgattgaggaagagatccgagcagctcaggaaagggaagaggagctgaagaggcagagacaagtcttgcagagtacgcagagccccaggacaaagaatgccccatcactgccctccagaacatgctacaaaactgctccagggaaaatagagaaagtcaaacctcctccatcccccaccactgaaggccccagcttgcagcctgacttagcccctgaagaggctgccggaacccagcggcccaagaatctgatgcagaccctcatggaagactatgagacacacaaatctaaaaggcgcgagagaatggatgatagtagtgtcctcgaggccacacgggttaatcgaagaaagagcgcactggctttgcgctgggaagcagggatctatgccaaccaggaggaagaagacaacgaataaacttccttcaacccaggaagcgtctttggtgcttgggagaccaagaaaccaagaaattaacaactgaaagcattttaatggactatttattaaagtgcaaacaaactcagcaatccttatgtagaccagaagctgcaatatacaatgatgaaaatgaaacgaaaaggaagtccccccatcagactctggacacccaggaatcaaaagagaaaggacttttttggtgactcaatcccagtgtctggtttggggccaatctacaatggatccaaaaggacaaaacatgttacaagcaaatcaacatagttgctgcaggcggaactgagaccagcctctctgggcgatgaaggacaatggtggtagggccacttagagagcagtagggcccaggctggtgcagcctacatggcacaggatatttccctgcaccagtttcccacctgtcacttgcagcatcagagggtgttgcattaactccattttctccagcagccataaaatgaatggcgtttctctccatatttgcccagaagaggcagttatgattccacttctcctacatttaattatttttaattgagaacaactcatgatcacaattcataaaatccatattttaagacaatagttcttcatgtcacaaacacaatctattctacatgaggaggctgagaaaggggaagagaaaaacaaaccaaatggatgatgttagctttaggatcgtgtctgcttataatattcactgatctgcagtttatgagaacacattttcacagttatgtttcttcataggaaaactatatttagtgggcaacaactatttttatgatgggatgggggagtatatacacgtatagaatctgtacgcgttgaacaacttggttcaagatggtgggggcatttttagagcggcaataattgaaaaaaaaggcgaactctgccttggagaggtagatgataagaaataaaaaggtgtttataactattttgtattataaagtgggccttagagataggaagaagaatgatggattccttttggatcaatcagaaaggaaacacgaaagaaaagtcaggaaggtagagagagaaaaagggagggaaggagaaagaatgggaataaaataaggaggtaagagatactatttttgctgagcaaccagtgtgtttcaggatgatacaaagaaaaatatagaatagaaataagtgcaggcttggaatcagctacaaatcctaaagatggggtgtgtgtggatgtgtgtgtgtgtgtgtgtacaccattgtgtgtttgtaaaatgtgtatgttcatgagtaagggtgtgtgtgtgtgtgtattaaaattccagagtgaccgtggcacttgggtgtacaggtaattcctccagagctgtttgctggcttcaggagtggag

SEQ ID NO: 163437 - DNA, 7507 bp, Homo sapiens
  Payload ID: 12197
  Gene Symbol: PALM2-AKAP2
  Gene Name: PALM2-AKAP2 readthrough
  ENST ID: ENST00000374530
  CDS Start-End: 181-3492
cccgggcgagcccgccgtgcgcacagctctgcccgccgcccctggagcggatccccagccgtccctgggcgttctcccgggttctagcaaagccccccggggtgcccatcagtttccttgggtgactacagcgtgtgttttttctttcctctttcccctgcctgtgtgcccttctccaggatggcagaggcggaattgcacaaggaaaggctgcaagccatagcagaaaaaagaaagaggcagactgaaatagaaggcaagcgacaacagcttgacgagcagatacttctgctgcagcattccaagtccaaagtgcttcgggagaaatggctgctgcagggcatacccgctggaactgccgaagaggaggaagccaggaggcggcagtctgaagaggatgagttcagagtcaagcaacttgaagataacattcagaggctggagcaagaaatacaaacgctagaaagtgaagagtcccagatatctgccaaagagcaaatcatcctagagaaactgaaggaaacagaaaaatccttcaaggactttcagaagggtttctccagtacggatggagatgcagtaaattacatttcctcccagcttcccgacctgccaatcctctgttcacgaacagcagaaccatcacctgggcaggacgggaccagcagagcggctggagtcgggtgggagaatgtgctgctaaaggaaggtgagtcagcctcgaacgccacagaaacatccggcccagacatgactatcaagaagcctccccagctttctgaggatgatatctggctaaaaagcgagggagacaactatagtgccaccctcctggagcctgctgccagctctctttccccagatcacaaaaacatggaaattgaggtgtctgttgcagaatgtaaaagtgttcctggaatcacctctaccccacatcccatggaccatccctccgctttctattcacccccgcataatggcctccttactgatcaccacgaatccctggataatgatgttgccagagagatccgctatctagatgaggtgctagaggccaactgctgtgattctgctgtggatggaacgtacaatggaacatcctccccagagcctggtgcagtggttctggtgggcggcctaagcccccctgtccacgaggcgacccagccagaacccactgaaagaacagctagccggcaggcacctcctcacatcgagctcagtaatagcagccctgaccccatggcagaggcagaaagaacaaatggccattcccccagccagcctagagatgcgctgggggacagcctgcaggtgcctgtcagccccagctccacaaccagctcacggtgttcttcccgagatggagagttcactctcaccacactgaaaaaggaggccaagtttgagctgcgtgccttccatgaggacaagaagccctccaagctctttgaggatgacgagcatgagaaagaacaatactgcattagaaaagtgaggccttcagaggagatgctggagctggaaaaggagaggagagagctcatccgcagccaggccgtcaagaagaatcctggcattgcagcaaaatggtggaatcccccgcaggaaaaaaccatcgaggagcagctggacgaggaacatctggagtcgcacaaaaagtacaaggagcgcaaagagagaagggcacagcaggaacagttgctgctgcagaagcagttacagcagcagcagcagcagcccccatcgcagctctgcacagcccctgcctcttctcatgaacgcgcaagcatgattgacaaagcaaaggaggacattgtcacagagcagatagatttctctgctgctcgcaaacaatttcagctgatggagaattccaggcaagcggtggccaagggccagagtacacccaggctgttctccatcaagcctttctacaggcctctggggtcagtcaactcagacaagccactgactaatccgagaccaccttctgtcgggggacctccagaagacagtggtgcctcagccgccaagggacagaaatcccccggtgccctggagaccccatcggcagcaggaagccagggcaacacagcctctcaggggaaggaagggccctacagcgagccttctaaacgtgggcccttatctaaactgtgggctgaggatggagaatttacgagcgcccgggctgtcctcactgtggtcaaggatgatgaccatgggattttggatcagttctcaagatctgtcaatgtctccttgacccaagaggagcttgactctggtctggacgaattgtcggtgaggtctcaggataccacagtcctggagaccctatccaatgatttcagcatggacaacatcagtgacagcggggcatccaatgagacaaccaatgccctccaggaaaattcactggctgatttttctctgccccagacaccacaaactgacaacccctcagagggccgaggagaaggcgtctccaagtcatttagtgatcatggtttctattccccttcctccacgctgggggactctccgttggttgatgaccccttggagtatcaggctggcctcctggtgcagaatgccattcaacaagccatagccgagcaggtggataaagctgtgtccaaaaccagcagggatggagcagagcaacagggacctgaagcgactgtagaggaagctgaagctgcggctttcggctcagaaaagcctcagagcatgtttgagccacctcaggtgtcttctcctgttcaagagaaaagggatgtattaccaaagattctgcctgctgaagacagggcgctcagggaaagggggcccccccagccactgccagctgtgcagcccagtggcccgattaacatggaggagaccaggcccgaaggaagctatttcagcaagtactcggaggcagctgagctgagaagcacagcctccctcctggccactcaagaatctgacgtgatggttgggcctttcaagctgaggtccaggaaacagcggactttgtccatgattgaggaagagatccgagcagctcaggaaagggaagaggagctgaagaggcagagacaagtcttgcagagtacgcagagccccaggacaaagaatgccccatcactgccctccagaacatgctacaaaactgctccagggaaaatagagaaagtcaaacctcctccatcccccaccactgaaggccccagcttgcagcctgacttagcccctgaagaggctgccggaacccagcggcccaagaatctgatgcagaccctcatggaagactatgagacacacaaatctaaaaggcgcgagagaatggatgatagtagttacacttctaagttactgtcttgcaaggtgacttccgaggtcctcgaggccacacgggttaatcgaagaaagagcgcactggctttgcgctgggaagcagggatctatgccaaccaggaggaagaagacaacgaataaacttccttcaacccaggaagcgtctttggtgcttgggagaccaagaaaccaagaaattaacaactgaaagcattttaatggactatttattaaagtgcaaacaaactcagcaatccttatgtagaccagaagctgcaatatacaatgatgaaaatgaaacgaaaaggaagtccccccatcagactctggacacccaggaatcaaaagagaaaggacttttttggtgactcaatcccagtgtctggtttggggccaatctacaatggatccaaaaggacaaaacatgttacaagcaaatcaacatagttgctgcaggcggaactgagaccagcctctctgggcgatgaaggacaatggtggtagggccacttagagagcagtagggcccaggctggtgcagcctacatggcacaggatatttccctgcaccagtttcccacctgtcacttgcagcatcagagggtgttgcattaactccattttctccagcagccataaaatgaatggcgtttctctccatatttgcccagaagaggcagttatgattccacttctcctacatttaattatttttaattgagaacaactcatgatcacaattcataaaatccatattttaagacaatagttcttcatgtcacaaacacaatctattctacatgaggaggctgagaaaggggaagagaaaaacaaaccaaatggatgatgttagctttaggatcgtgtctgcttataatattcactgatctgcagtttatgagaacacattttcacagttatgtttcttcataggaaaactatatttagtgggcaacaactatttttatgatgggatgggggagtatatacacgtatagaatctgtacgcgttgaacaacttggttcaagatggtgggggcatttttagagcggcaataattgaaaaaaaaggcgaactctgccttggagaggtagatgataagaaataaaaaggtgtttataactattttgtattataaagtgggccttagagataggaagaagaatgatggattccttttggatcaatcagaaaggaaacacgaaagaaaagtcaggaaggtagagagagaaaaagggagggaaggagaaagaatgggaataaaataaggaggtaagagatactatttttgctgagcaaccagtgtgtttcaggatgatacaaagaaaaatatagaatagaaataagtgcaggcttggaatcagctacaaatcctaaagatggggtgtgtgtggatgtgtgtgtgtgtgtgtgtacaccattgtgtgtttgtaaaatgtgtatgttcatgagtaagggtgtgtgtgtgtgtgtattaaaattccagagtgaccgtggcacttgggtgtacaggtaattcctccagagctgtttgctggcttcaggagtggagtgagaatttcttttttatgaaaagggatataaaggcaccgagctgatgcagtatttgtaatattaagttgacctaacaaggtatttgcatgagtcacaattacaaagttttgagcggttttgtaatttgacatttaggagagtctcctatttattctcatactttacattcatgcttagtatactatagaggatgccagctttaatctttctgtcatttaaagcaatatgataagggtattcaataattgggtgccctaaatttctggatgagaaaattttcaattctggccatgagaaagaaaaaaaaataaacagccttctttttttttcctttgttttaaaactgtggttttttaaaaaagcaataattaactcagacctcactaaaaatcatttttgtttttatattgttatgtcataagctctattatgttattctaacaagtagcaatttcacaaaatttgtatgtagatgttaacgcacatttcctttgcttcttttattagactagtgttgactttggggggggacatttattcacaaatgagaagtaggcacaaagtaaaaaatggaaccatctactaacaaggatcctttaaaactgccaagggagctctaacttgaagccacatcctacagatggcagcccaaatagcacatgggcaattggcaccatctttatatggttgagtctcctgaatattttgaatgaattctcaacaaaatgtgctagccactggggacgcaaaacaagtaagatccctgttgcaagaaattcattttatagtgagggaggttggcatggagactaaaattctcaggaaaatgagatccgtgttagattagaagtcctgatgtgaaatgggaggactcaggaaggaggatcgtctttacctgaggatttctagccagaggtcccagatgcctgggctgagaacccagcgataagggggcgttcccaaagcagacacagggataagaacagaggaggcagcagcattgcacagccccaggcacagtggcagttaggatggctggagagtaggatagttctatgggttgcccaaaaaatgtgatgcgcttcatgttttctctgactcatggatctggtagagaccatagacatgatatagactaacttccccatttttcacaagaggaaaccatccttatgacttaccttaaagttttttgttctgttttgaaggaaaccatgtgcttcatgaaacctacagttgacaagagaatgtacagctaagagaaaagcttaagaggccacactattcgcggaatggctttagaggcagatgaagtggtctttgaccacagttgattgaaccagagcacttattgcttaaagaataacagagttctagagctgggggttcttgggccatgctccgtgtgtggataaggaaagaaatactgtttctgggactctcccacagtcacaaagctgttttcactgtggcccctacatctcttaacttttgctattactcctatgctgccttccggattactgctgtctatcttcttgctccactcactgaagatcctattataatcccatgaaaatgtaaattacagtttacttgggagagccagattttctctgtgctcttgagttttttattcattcaagaaaccttgggccaccgctttgtacatagcaccgtgctaggctctgggatcccaaatggacccttttaactttctgaagatgggaccgtcccctggaggaaagtcattcctgcctaatccatcgagagaaagaggcttacgaaaaactttgcctctgatgctcagccccacccccaaatagcacacaagcttgttaaccccacctcttacaaaatgtttagattctgtaggtgttaaaagcctttctggaagtattgcattctgccgtgtttataggtgttcactttcctccagagctgattaactactgacatgacttggctttctcatccagaaattatggaaacagggtctgtcagtggcaggaggccgtgctgtgttttacttggatgacacaatgcagtttacttgcctcttcatacccatgcatgctgctcaccctagacaatgacatataagccgtatatagatcaatgtccacatatatatacacacacacatatatatatataaagtgtaacaaggaacactaaaacagtgttgattcttgtctctgaagacaaataattaaaccttttttttcccaactaaagaatggatttaattaaactatgtattgaaaaaaaagtagcctaagtgttagagatggtgaatatattccattttagttaaagaacaaatttcctgaattttaagcattcagtgagctgccaattttgattttgtgttgctctttacccaaattattttttctttgtttttctttttttgggggaggaggggaaaaaagcagcaatactgtgtttggaaattatactctgtatctggttttcctgtgtatgttaaccacttaaatgttattatcctgctttggttttagagtgattgtgaggcattcaatgcaagtatacagttattttctcattaaaatccaatgtgtgttgagtttttataaa

SEQ ID NO: 163438 - DNA, 1351 bp, Homo sapiens
  Payload ID: 12197
  Gene Symbol: PALM2-AKAP2
  Gene Name: PALM2-AKAP2 readthrough
  ENST ID: ENST00000413420
  CDS Start-End: 51-1351
gcgtgtgttttttctttcctctttcccctgcctgtgtgcccttctccaggatggcagaggcggaattgcacaaggaaaggctgcaagccatagcagaaaaaagaaagaggcagactgaaatagaaggcaagcgacaacagcttgacgagcagatacttctgctgcagcattccaagtccaaagtgcttcgggagaaatggctgctgcagggcatacccgctggaactgccgaagaggaggaagccaggaggcggcagtctgaagaggatgagttcagagtcaagcaacttgaagataacattcagaggctggagcaagaaatacaaacgctagaaagtgaagagtcccagatatctgccaaagagcaaatcatcctagagaaactgaaggaaacagaaaaatccttcaaggactttcagaagggtttctccagtacggatggagatgcagtaaattacatttcctcccagcttcccgacctgccaatcctctgttcacgaacagcagaaccatcacctgggcaggacgggaccagcagagcggctgctgtgtacgccatggaaattaatgtggagaaagacaaacaaacaggagagaccaagattctctctacatctaccattggcccagagggggtccatcagaaaggagtcaaagtctatgatgatggtaccaaagtagtgtatgaggtgcgctcaggaggcaccgtagtagaaaatggagtgcacaaattaagcacaaaggatgtagaagagcttattcagaaggctggacaatcaagcttaggaggagggcacgtgtctgaaaggactgtgattgcagatgggagcctcagccatcccaaggaacacatgctctgcaaagaagctaagttagaaatggtacataagtctaggaaagaccattcttccgggaacccagggcagcaggcccaagcccccagcgctgcagggccggaggcaaacttggatcagcccgtcaccatgatttttatgggctaccaaaatatcgaggatgaagaggagacgaaaaaggtgctaggctatgatgaaaccatcaaggctgaattggtcctcattgatgaagatgatgagaagtcattgagggagaagacagtgacggacgtgtccactattgacgggaacgcggctgagcttgtgtccgggaggccggtctcagacaccacagagccctcatccccagaagggaaggaagagagcctagctacagagccagccccaggagtcgggtgggagaatgtgctgctaaaggaaggtgagtcagcctcgaacgccacagaaacatccggcccagacatgactatcaagaagcctccccagctttctgagga

SEQ ID NO: 163439 - DNA, 2510 bp, Homo sapiens
  Payload ID: 12198
  Gene Symbol: PALMD
  Gene Name: palmdelphin
  Uniprot ID: Q9NP74
  ENST ID: ENST00000263174
  CDS Start-End: 376-2031
ataatgaattgggtaaggaacagttaataagaaaatgtgccttgctaactgtgcacattacaacaaagagctggcagctcctgaaggaaaagggcttgtgccgctgccgttcaaacttgtcagtcaactcatgccagcagcctcagcgtctgcctccccagcacaccctcattacatgtgtctgtctggcctgatctgtgcatctgctcggagacgctcctgacaagtcgggaatttctctatttctccactggtgcaaagagcggatttctccctgcttctcttctgtcacccccgctcctctcccccaggaggctccttgatttatggtagctttggacttgcttccccgtctgactgtccttgacttctagaatggaagaagctgagctggtgaagggaagactccaggccatcacagataaaagaaaaatacaggaagaaatctcacagaagcgtctgaaaatagaggaagacaaactaaagcaccagcatttgaagaaaaaggccttgagggagaaatggcttctagatggaatcagcagcggaaaagaacaggaagagatgaagaagcaaaatcaacaagaccagcaccagatccaggttctagaacaaagtatcctcaggcttgagaaagagatccaagatcttgaaaaagctgaactgcaaatctcaacgaaggaagaggccattttaaagaaactaaagtcaattgagcggacaacagaagacattataagatctgtgaaagtggaaagagaagaaagagcagaagagtcaattgaggacatctatgctaatatccctgaccttccaaagtcctacataccttctaggttaaggaaggagataaatgaagaaaaagaagatgatgaacaaaataggaaagctttatatgccatggaaattaaagttgaaaaagacttgaagactggagaaagtacagttctgtcttcaatacctctgccatcagatgactttaaaggtacaggaataaaagtttatgatgatgggcaaaagtcagtgtatgcagtaagttctaatcacagtgcagcatacaatggcaccgatggcctggcaccagttgaagtagaggaacttctaagacaagcctcagagagaaactctaaatccccaacagagtatcatgagcctgtatatgccaatcccttttacaggcctacaaccccacagagagaaacggtgacccctggaccaaactttcaagaaaggataaagattaaaactaatggactgggtattggtgtaaatgaatccatacacaatatgggcaatggtctttcagaggaaaggggaaacaacttcaatcacatcagtcccattccgccagtgcctcatccccgatcagtgattcaacaagcagaagagaagcttcacaccccgcaaaaaaggctaatgactccttgggaagaatcgaatgtcatgcaggacaaagatgcaccctctccaaagccaaggctgagccccagagagacaatatttgggaaatctgaacaccagaattcttcacccacttgtcaggaggacgaggaagatgtcagatataatatcgttcattccctgcctccagacataaatgatacagaaccggtgacaatgattttcatggggtatcagcaggcagaagacagtgaagaagataagaagtttctgacaggatatgatgggatcatccatgctgagctggttgtgattgatgatgaggaggaggaggatgaaggagaagcagagaaaccgtcctaccaccccatagctccccatagtcaggtgtaccagccagccaaaccaacaccacttcctagaaaaagatcagaagctagtcctcatgaaaacacaaatcataaatccccccacaaaaattccatatctctgaaagagcaagaagaaagcttaggcagccctgtccaccattccccatttgatgctcagacaactggagatgggactgaggatccatccttaacagctttaaggatgagaatggcaaagctgggaaaaaaggtgatctaagagttgtaccacctatataaacatcctttgaagaagaaactaagaagcatttgcaaatttctcttctggatattttgtttattttttctgaagtccaaaaaattatcattacagtgtaccatattaagccatgtgaataagtagtagtcattatttgtgaaaaattcccaaaaagctggggaaaacaaatgtgtaacttttccagttacttgacacgattcagtgggggaaaaccagcattttttattctattgataccaaagcatttctaataagagcttgttaaatttaagaataaagttatttaaaatattctgagtatagtatattaactggcattgtaattttgatgatacaaagattgaaagatcataggaaagcattgcccttcatcacagaagtattcaactctgacaaataaatatgtcatcctgaattaataatgccttaataaaagtacatcctcctgctaactatca

SEQ ID NO: 163440 - DNA, 1942 bp, Homo sapiens
  Payload ID: 12198
  Gene Symbol: PALMD
  Gene Name: palmdelphin
  ENST ID: ENST00000605497
  CDS Start-End: 126-1781
ctggtgcaaagagcggatttctccctgcttctcttctgtcacccccgctcctctcccccaggaggctccttgatttatggtagctttggacttgcttccccgtctgactgtccttgacttctagaatggaagaagctgagctggtgaagggaagactccaggccatcacagataaaagaaaaatacaggaagaaatctcacagaagcgtctgaaaatagaggaagacaaactaaagcaccagcatttgaagaaaaaggccttgagggagaaatggcttctagatggaatcagcagcggaaaagaacaggaagagatgaagaagcaaaatcaacaagaccagcaccagatccaggttctagaacaaagtatcctcaggcttgagaaagagatccaagatcttgaaaaagctgaactgcaaatctcaacgaaggaagaggccattttaaagaaactaaagtcaattgagcggacaacagaagacattataagatctgtgaaagtggaaagagaagaaagagcagaagagtcaattgaggacatctatgctaatatccctgaccttccaaagtcctacataccttctaggttaaggaaggagataaatgaagaaaaagaagatgatgaacaaaataggaaagctttatatgccatggaaattaaagttgaaaaagacttgaagactggagaaagtacagttctgtcttcaatacctctgccatcagatgactttaaaggtacaggaataaaagtttatgatgatgggcaaaagtcagtgtatgcagtaagttctaatcacagtgcagcatacaatggcaccgatggcctggcaccagttgaagtagaggaacttctaagacaagcctcagagagaaactctaaatccccaacagagtatcatgagcctgtatatgccaatcccttttacaggcctacaaccccacagagagaaacggtgacccctggaccaaactttcaagaaaggataaagattaaaactaatggactgggtattggtgtaaatgaatccatacacaatatgggcaatggtctttcagaggaaaggggaaacaacttcaatcacatcagtcccattccgccagtgcctcatccccgatcagtgattcaacaagcagaagagaagcttcacaccccgcaaaaaaggctaatgactccttgggaagaatcgaatgtcatgcaggacaaagatgcaccctctccaaagccaaggctgagccccagagagacaatatttgggaaatctgaacaccagaattcttcacccacttgtcaggaggacgaggaagatgtcagatataatatcgttcattccctgcctccagacataaatgatacagaaccggtgacaatgattttcatggggtatcagcaggcagaagacagtgaagaagataagaagtttctgacaggatatgatgggatcatccatgctgagctggttgtgattgatgatgaggaggaggaggatgaaggagaagcagagaaaccgtcctaccaccccatagctccccatagtcaggtgtaccagccagccaaaccaacaccacttcctagaaaaagatcagaagctagtcctcatgaaaacacaaatcataaatccccccacaaaaattccatatctctgaaagagcaagaagaaagcttaggcagccctgtccaccattccccatttgatgctcagacaactggagatgggactgaggatccatccttaacaggtaataaaaatgacaaggcatgccactgctgttcagtcatgtgaccagcttctcttgtgctaatgcagtcttgctttcaggcttctctgaccacctcataaactaatacgcactgagatttttttattaatgctgatagagattattatcaccacagtaaagtgattaagtcacttcaaaagataaagaaagtaaaaataaatca

SEQ ID NO: 163441 - DNA, 1844 bp, Homo sapiens
  Payload ID: 12198
  Gene Symbol: PALMD
  Gene Name: palmdelphin
  Uniprot ID: Q9NP74
  ENST ID: ENST00000615664
  CDS Start-End: 123-1538
ggaagactccaggccatcacagataaaagaaaaatacaggaagaaatctcacagaagcgtctgaaaatagaggaagacaaactaaagcaccagcatttgaagaaaaaggccttgagggagaaatggcttctagatggaatcagcagcggaaaagaacaggaagagatgaagaagcaaaatctacgaaggaagaggccattttaaagaaactaaagtcaattgagcggacaacagaagacattataagatctgtgaaagtggaaagagaagaaagagcagaagagtcaattgaggacatctatgctaatatccctgaccttccaaagtcctacataccttctaggttaaggaaggagataaatgaagaaaaagaagatgatgaacaaaataggaaagctttatatgccatggaaattaaagttgaaaaagacttgaagactggagaaagtacagttctgtcttcaatacctctgccatcagatgactttaaaggtacaggaataaaagtttatgatgatgggcaaaagtcagtgtatgcagtaagttctaatcacagtgcagcatacaatggcaccgatggcctggcaccagttgaagtagaggaacttctaagacaagcctcagagagaaactctaaatccccaacagagtatcatgagcctgtatatgccaatcccttttacaggcctacaaccccacagagagaaacggtgacccctggaccaaactttcaagaaaggataaagattaaaactaatggactgggtattggtgtaaatgaatccatacacaatatgggcaatggtctttcagaggaaaggggaaacaacttcaatcacatcagtcccattccgccagtgcctcatccccgatcagtgattcaacaagcagaagagaagcttcacaccccgcaaaaaaggctaatgactccttgggaagaatcgaatgtcatgcaggacaaagatgcaccctctccaaagccaaggctgagccccagagagacaatatttgggaaatctgaacaccagaattcttcacccacttgtcaggaggacgaggaagatgtcagatataatatcgttcattccctgcctccagacataaatgatacagaaccggtgacaatgattttcatggggtatcagcaggcagaagacagtgaagaagataagaagtttctgacaggatatgatgggatcatccatgctgagctggttgtgattgatgatgaggaggaggaggatgaaggagaagcagagaaaccgtcctaccaccccatagctccccatagtcaggtgtaccagccagccaaaccaacaccacttcctagaaaaagatcagaagctagtcctcatgaaaacacaaatcataaatccccccacaaaaattccatatctctgaaagagcaagaagaaagcttaggcagccctgtccaccattccccatttgatgctcagacaactggagatgggactgaggatccatccttaacagctttaaggatgagaatggcaaagctgggaaaaaaggtgatctaagagttgtaccacctatataaacatcctttgaagaagaaactaagaagcatttgcaaatttctcttctggatattttgtttattttttctgaagtccaaaaaattatcattacagtgtaccatattaagccatgtgaataagtagtagtcattatttgtgaaaaattcccaaaaagctggggaaaacaaatgtgtaacttttccagttacttgacacgattcagtgggggaaaaccagcattttttattctattgataccaaagcatttctaataagagcttgttaaatttaagaataaagttattt

SEQ ID NO: 163442 - DNA, 827 bp, Homo sapiens
  Payload ID: 12199
  Gene Symbol: PPT1
  Gene Name: palmitoyl-protein thioesterase 1
  ENST ID: ENST00000372779
  CDS Start-End: 15-827
gtgacacagcgaagatggcgtcgcccggctgcctgtggctcttggctgtggctctcctgccatggacctgcgcttctcgggcgctgcagcatctggacccgccggcgccgctgccgttggtgatctggcatgggatggggtctcgttatgttgcccaaactggtctcgaactcttggcctcaagcaatcctcctgcctcgtcttaccaaagcgctgggatgataggagacagctgttgcaatcccttaagcatgggtgctattaaaaaaatggtggagaagaaaatacctggaatttacgtcttatctttagagattgggaagaccctgatggaggacgtggagaacagcttcttcttgaatgtcaattcccaagtaacaacagtgtgtcaggcacttgctaaggatcctaaattgcagcaaggctacaatgctatgggattctcccagggaggccaatttctgagggcagtggctcagagatgcccttcacctcccatgatcaatctgatctcggttgggggacaacatcaaggtgtttttggactccctcgatgcccaggagagagctctcacatctgtgacttcatccgaaaaacactgaatgctggggcgtactccaaagttgttcaggaacgcctcgtgcaagccgaatactggcatgaccccataaaggaggatgtgtatcgcaaccacagcatcttcttggcagatataaatcaggagcggggtatcaatgagtcctacaagaaaaacctgatggccctgaagaagtttgtgatggtgaaattcctcaatgattccattgtggaccctgtagattcggag

SEQ ID NO: 163443 - DNA, 849 bp, Homo sapiens
  Payload ID: 12199
  Gene Symbol: PPT1
  Gene Name: palmitoyl-protein thioesterase 1
  Uniprot ID: P50897
  ENST ID: ENST00000449045
  CDS Start-End: 15-626
gtgacacagcgaagatggcgtcgcccggctgcctgtggctcttggctgtggctctcctgccatggacctgcgcttctcgggcgctgcagcatctggacccgccggcgccgctgccgttggtgatctggcatgggatgggtgtttttggactccctcgatgcccaggagagagctctcacatctgtgacttcatccgaaaaacactgaatgctggggcgtactccaaagttgttcaggaacgcctcgtgcaagccgaatactggcatgaccccataaaggaggatgtgtatcgcaaccacagcatcttcttggcagatataaatcaggagcggggtatcaatgagtcctacaagaaaaacctgatggccctgaagaagtttgtgatggtgaaattcctcaatgattccattgtggaccctgtagattcggagtggtttggattttacagaagtggccaagccaaggaaaccattcccttacaggagacctccctgtacacacaggaccgcctggggctaaaggaaatggacaatgcaggacagctagtgtttctggctacagaaggggaccatcttcagttgtctgaagaatggttttatgcccacatcataccattccttggatgaaacccgtatagttcacaatagagctcagggagcccctaactcttccaaaccacatgggagacagtttccttcatgcccaagcctgagctcagatccagcttgcaactaatccttctatcatctaacatgccctacttggaaagatctaagatctgaatcttatcctttgccatcttctgttaccatatggtgttgaatgcaagtttaattaccatggagattg

SEQ ID NO: 163444 - DNA, 2742 bp, Homo sapiens
  Payload ID: 12199
  Gene Symbol: PPT1
  Gene Name: palmitoyl-protein thioesterase 1
  Uniprot ID: P50897
  ENST ID: ENST00000433473
  CDS Start-End: 466-1386
atgtttcttgcaaaggcagtacagggcagtggtgaagagcaacgactttggaaccaccaatttgctatctctgtgaccttgggcaccttactcagtgccaattcgcagtgcctcagtgtcctcacctgtcagggggagaagtgcatacagcattgttatgaagagtgaattagttaaaggttgtaagaatagtgcctgatagcatctgatcagcactgaatatatgttagcaattattttgattcaccgcagagggcggtctacgagagcgcagagccccactcggccagcggggtctggcgggggacctgtcgcgctgaaagctccagggtagggccgacgcccatcaggctgggcatccgttcgggatgcgcaggttgcgatctgcaaccggcggcgccacgcccaggcgggcggagcgcggttcccggagtctcgcgcccgcggtcatgtgacacagcgaagatggcgtcgcccggctgcctgtggctcttggctgtggctctcctgccatggacctgcgcttctcgggcgctgcagcatctggacccgccggcgccgctgccgttggtgatctggcatgggatgggagacagctgttgcaatcccttaagcatgggtgctattaaaaaaatggtggagaagaaaatacctggaatttacgtcttatctttagagattgggaagaccctgatggaggacgtggagaacagcttcttcttgaatgtcaattcccaagtaacaacagtgtgtcaggcacttgctaaggatcctaaattgcagcaaggctacaatgctatgggattctcccagggaggccaatttctgagggcagtggctcagagatgcccttcacctcccatgatcaatctgatctcggttgggggacaacatcaaggtgtttttggactccctcgatgcccaggagagagctctcacatctgtgacttcatccgaaaaacactgaatgctggggcgtactccaaagttgttcaggaacgcctcgtgcaagccgaatactggcatgaccccataaaggaggatgtgtatcgcaaccacagcatcttcttggcagatataaatcaggagcggggtatcaatgagtcctacaagaaaaacctgatggccctgaagaagtttgtgatggtgaaattcctcaatgattccattgtggaccctgtagattcggagtggtttggattttacagaagtggccaagccaaggaaaccattcccttacaggagacctccctgtacacacaggaccgcctggggctaaaggaaatggacaatgcaggacagctagtgtttctggctacagaaggggaccatcttcagttgtctgaagaatggttttatgcccacatcataccattccttggatgaaacccgtatagttcacaatagagctcagggagcccctaactcttccaaaccacatgggagacagtttccttcatgcccaagcctgagctcagatccagcttgcaactaatccttctatcatctaacatgccctacttggaaagatctaagatctgaatcttatcctttgccatcttctgttaccatatggtgttgaatgcaagtttaattaccatggagattgttttacaaacttttgatgtggtcaagttcagttttagaaaagggagtctgttccagatcagtgccagaactgtgcccaggcccaaaggagacaactaactaaagtagtgagatagattctaagggcaaacatttttccaagtcttgccatatttcaagcaaagaggtgcccaggcctgaggtactcacataaatgctttgttttgctggtgatttaaccagtgcttggaaaaatcttgcttggctatttctgcatcatttcttaaggctgccttcctctctcagtacgttgccctctgtgctatcatcttatcatcaattattagacaaatcccactggcctacagtcttgcttctgcagcacccactttgtctcctcaggtagtgatgaattagttgctgtcacaaaaggagggaagtagcacccaaattaagttgcttaagagaggaaatgtacatcttgtataacttagggagcgaagaaaatgtaggcgcgaaagtgaaaagtgaggcagctagttcttcctattccattctcgaccaacctgccctttcttaatatgactagtggtcttgatgctagagtcaacttactctgttgctggctttagcagagaataggaggaaccatatgaaaaagatcaggctttctgacttccatccccaaaacacatttaccagcatactccaaactgtttctgatgtgttccatgagaaaaggattgtttgctcaaaaagcttggaaaatactacacactccctttctccttctggagatcaacccacattagagtgtctaaggactcctgagaattcctgttacagtaaacaaaactaacgtaatctaccatttcctacactatttgagcatggaaatcatagtccccactctgtgaaaacttaacgctttttggaagacatttctgtagcatgtcagtttggagaaatgatgagctacgccttgatgaaagaaccgtgttggtgctgctaagtttagccattatggtttttcctttctctctcttaagccttattcttcaactaaaagatgaggattaagagcaagaagttgggggggatgtgaaaataattttatgaggttgtctaaaataaagagtagtttcttatccttgg

SEQ ID NO: 163445 - DNA, 659 bp, Homo sapiens
  Payload ID: 12199
  Gene Symbol: PPT1
  Gene Name: palmitoyl-protein thioesterase 1
  ENST ID: ENST00000439754
  CDS Start-End: 1-534
cagcaaggctacaatgctatgggattctcccagggaggccaatttctgagggcagtggctcagagatgcccttcacctcccatgatcaatctgatctcggttgggggacaacatcaaggtgtttttggactccctcgatgcccaggagagagctctcacatctgtgacttcatccgaaaaacactgaatgctggggcgtactccaaagttgttcaggaacgcctcgtgcaagccgaatactggcatgaccccataaaggaggatgtgtatcgcaaccacagcatcttcttggcagatataaatcaggagcggggtatcaatgagtcctacaagaaaaacctgatggccctgaagaagtttgtgatggtgaaattcctcaatgattccattgtggaccctgtagattcggaggaccgcctggggctaaaggaaatggacaatgcaggacagctagtgtttctggctacagaaggggaccatcttcagttgtctgaagaatggttttatgcccacatcataccattccttggatgaaacccgtatagttcacaatagagctcagggagcccctaactcttccaaaccacatgggagacagtttccttcatgcccaagcctgagctcagatccagcttgcaactaatccttctatcatctaa

SEQ ID NO: 163446 - DNA, 1314 bp, Homo sapiens
  Payload ID: 12199
  Gene Symbol: PPT1
  Gene Name: palmitoyl-protein thioesterase 1
  ENST ID: ENST00000530704
  CDS Start-End: 15-461
gtgacacagcgaagatggcgtcgcccggctgcctgtggctcttggctgtggctctcctgccatggacctgcgcttctcgggcgctgcagcatctggacccgccggcgccgctgccgttggtgatctggcatgggatgggagacagctgttgcaatcccttaagcatgggtgctattaaaaaaatggtggagaagaaaatacctggaatttacgtcttatctttagagattgggaagaccctgatggaggacgtggagaacagcttcttcttgaatgtcaattcccaagtaacaacagtgtgtcaggcacttgctaaggatcctaaattgcagcaaggctacaatgctatgggattctcccagggaggccaatttctgagggcagtggctcagagatgcccttcacctcccatgatcaatctgatctcggttgggggacaacatcaagtgccttgtgcatagtgggtattcgatacatcattattgaaggagtggatatttgtcatctaccactgtaggtgtttttggactccctcgatgcccaggagagagctctcacatctgtgacttcatccgaaaaacactgaatgctggggcgtactccaaagttgttcaggaacgcctcgtgcaagccgaatactggcatgaccccataaaggaggatgtgtatcgcaaccacagcatcttcttggcagatataaatcaggagcggggtatcaatgagtcctacaagaaaaacctgatggccctgaagaagtttgtgatggtgaaattcctcaatgattccattgtggaccctgtagattcggagtggtttggattttacagaagtggccaagccaaggaaaccattcccttacaggagacctccctgtacacacaggaccgcctggggctaaaggaaatggacaatgcaggacagctagtgtttctggctacagaaggggaccatcttcagttgtctgaagaatggttttatgcccacatcataccattccttggatgaaacccgtatagttcacaatagagctcagggagcccctaactcttccaaaccacatgggagacagtttccttcatgcccaagcctgagctcagatccagcttgcaactaatccttctatcatctaacatgccctacttggaaagatctaagatctgaatcttatcctttgccatcttctgttaccatatggtgttgaatgcaagtttaattaccatggagattgttttacaaacttttgatgtggtcaagttcagttttagaaaagggagtctgttccagatcagtgccagaactgtgcccaggcccaaa

SEQ ID NO: 163447 - DNA, 1836 bp, Homo sapiens
  Payload ID: 12199
  Gene Symbol: PPT1
  Gene Name: palmitoyl-protein thioesterase 1
  Uniprot ID: P50897
  ENST ID: ENST00000529905
  CDS Start-End: 8-928
agcgaagatggcgtcgcccggctgcctgtggctcttggctgtggctctcctgccatggacctgcgcttctcgggcgctgcagcatctggacccgccggcgccgctgccgttggtgatctggcatgggatgggagacagctgttgcaatcccttaagcatgggtgctattaaaaaaatggtggagaagaaaatacctggaatttacgtcttatctttagagattgggaagaccctgatggaggacgtggagaacagcttcttcttgaatgtcaattcccaagtaacaacagtgtgtcaggcacttgctaaggatcctaaattgcagcaaggctacaatgctatgggattctcccagggaggccaatttctgagggcagtggctcagagatgcccttcacctcccatgatcaatctgatctcggttgggggacaacatcaaggtgtttttggactccctcgatgcccaggagagagctctcacatctgtgacttcatccgaaaaacactgaatgctggggcgtactccaaagttgttcaggaacgcctcgtgcaagccgaatactggcatgaccccataaaggaggatgtgtatcgcaaccacagcatcttcttggcagatataaatcaggagcggggtatcaatgagtcctacaagaaaaacctgatggccctgaagaagtttgtgatggtgaaattcctcaatgattccattgtggaccctgtagattcggagtggtttggattttacagaagtggccaagccaaggaaaccattcccttacaggagacctccctgtacacacaggaccgcctggggctaaaggaaatggacaatgcaggacagctagtgtttctggctacagaaggggaccatcttcagttgtctgaagaatggttttatgcccacatcataccattccttggatgaaacccgtatagttcacaatagagctcagggagcccctaactcttccaaaccacatgggagacagtttccttcatgcccaagcctgagctcagatccagcttgcaactaatccttctatcatctaacatgccctacttggaaagatctaagatctgaatcttatcctttgccatcttctgttaccatatggtgttgaatgcaagtttaattaccatggagattgttttacaaacttttgatgtggtcaagttcagttttagaaaagggagtctgttccagatcagtgccagaactgtgcccaggcccaaaggagacaactaactaaagtagtgagatagattctaagggcaaacatttttccaagtcttgccatatttcaagcaaagaggtagtgatgaattagttgctgtcacaaaaggagggaagtagcacccaaattaagttgcttaagagaggaaatgtacatcttgtataacttagggagcgaagaaaatgtaggcgcgaaagtgaaaagtgaggcagctagttcttcctattccattctcgaccaacctgccctttcttaatatgactagtggtcttgatgctagagtcaacttactctgttgctggctttagcagagaataggaggaaccatatgaaaaagatcaggctttctgacttccatccccaaaacacatttaccagcatactccaaactgtttctgatgtgttccatgagaaaaggattgtttgctcaaaaagcttggaaaatactacacactccctttctccttctggagatcaacccacattagagtgtctaaggactcctgagaattcctgttacagtaaacaaaactaacgtaatctaccatttcctacactatttgagcatggaaatcatagtccccactctgtgaaaact

SEQ ID NO: 163448 - DNA, 550 bp, Homo sapiens
  Payload ID: 12199
  Gene Symbol: PPT1
  Gene Name: palmitoyl-protein thioesterase 1
  ENST ID: ENST00000530076
  CDS Start-End: 260-523
agtctcatctgctcctgggagggagagctccatctctgacgtagctggctctgttgggctttagcgccagcctgctccaccgagtggcgttttcaggaccactgcctctgggcagctcttccactctggctacggagccctcgtgcaagccgaatactggcatgaccccataaaggaggatgtgtatcgcaaccacagcatcttcttggcagatataaatcaggagcggggtatcaatgagtcctacaagaaaaacctgatggccctgaagaagtttgtgatggtgaaattcctcaatgattccattgtggaccctgtagattcggagtggtttggattttacagaagtggccaagccaaggaaaccattcccttacaggagacctccctgtacacacaggaccgcctggggctaaaggaaatggacaatgcaggacagctagtgtttctggctacagaaggggaccatcttcagttgtctgaagaatggttttatgcccacatcataccattccttggatgaaacccgtatagttcacaatagagctca

SEQ ID NO: 163449 - DNA, 565 bp, Homo sapiens
  Payload ID: 12199
  Gene Symbol: PPT1
  Gene Name: palmitoyl-protein thioesterase 1
  ENST ID: ENST00000526547
  CDS Start-End: 272-565
atctgcaaaatgcgggtgtagagggcgaggacgtggtcccacagcacgcggctgcctcgacattttaggatttgaaggatctgcattggaaagagagaaggggaaggagccgtccccttcactggaaagagagaaggggaaggaaagagagagccgcgcacggcgttgaagttttacatgctgtccttgattaatccttacagtagtggcgtcaggatgcagcatctctcacttggtcaggctaggagacagctgttgcaatcccttaagcatgggtgctattaaaaaaatggtggagaagaaaatacctggaatttacgtcttatctttagagattgggaagaccctgatggaggacgtggagaacagcttcttcttgaatgtcaattcccaagtaacaacagtgtgtcaggcacttgctaaggatcctaaattgcagcaaggctacaatgctatgggattctcccagggaggccaatttctgagggcagtggctcagagatgcccttcacctcccatgatcaatctgatctcggttgggggacaacatcaaggtgtttttgga

SEQ ID NO: 163450 - DNA, 623 bp, Homo sapiens
  Payload ID: 12199
  Gene Symbol: PPT1
  Gene Name: palmitoyl-protein thioesterase 1
  ENST ID: ENST00000527311
  CDS Start-End: 10-623
acagcgaagatggcgtcgcccggctgcctgtggctcttggctgtggctctcctgccatggacctgcgcttctcgggcgctgcagcatctggacccgccggcgccgctgccgttggtgatctggcatgggatgggaggccaatttctgagggcagtggctcagagatgcccttcacctcccatgatcaatctgatctcggttgggggacaacatcaaggtgtttttggactccctcgatgcccaggagagagctctcacatctgtgacttcatccgaaaaacactgaatgctggggcgtactccaaagttgttcaggaacgcctcgtgcaagccgaatactggcatgaccccataaaggaggatgtgtatcgcaaccacagcatcttcttggcagatataaatcaggagcggggtatcaatgagtcctacaagaaaaacctgatggccctgaagaagtttgtgatggtgaaattcctcaatgattccattgtggaccctgtagattcggagtggtttggattttacagaagtggccaagccaaggaaaccattcccttacaggagacctccctgtacacacaggaccgcctggggctaaaggaaatggacaatgcaggacagct

SEQ ID NO: 163451 - DNA, 2053 bp, Homo sapiens
  Payload ID: 12200
  Gene Symbol: PPT2
  Gene Name: palmitoyl-protein thioesterase 2
  Uniprot ID: Q9UMR5
  ENST ID: ENST00000324816
  CDS Start-End: 415-1323
cacctagggcgcaatggaatattccattgcccctcctgtcctgggtctgtgttgcggggaacgctcgcgcggttgccagagaaagccccggacgtgacggatttgcgcgaccccaagcagcccgcccttccccctcccatccgtcattcccctgcgctctctttcctcacccttccccccgccaccgtgggttccagacttgggataagtaaacagcgggtggagcgaggcctacggacccaggccaggtgggagtctgcactcttcaaggggcctgggctgctgctcacgggtattaaagaactccgcgttgttcatggctgaggcgatgcattaggaagatcctggacctagagaacaagtcccccgaacgctgagttggaggcgggacttcgggtgcgcgttggcgggagcatgctggggctctgcgggcagcggctccccgcggcgtgggtcctgcttctgttgcctttcctgccgctgctgctgcttgcagcccccgcgccccaccgcgcgtcctacaagccggtcatcgtggtgcatgggctcttcgacagctcgtacagcttccgccacctgctggaatacatcaatgagacacaccccgggactgtggtgacagtgctcgatctcttcgatgggagagagagcttgcgacccctgtgggaacaggtgcaagggttccgagaggctgtggtccccatcatggcaaaggcccctcaaggggtgcatctcatctgctactcgcaggggggccttgtgtgccgggctctgctttctgtcatggatgatcacaacgtggattctttcatctccctctcctctccacagatgggacagtatggagacacggactacttgaagtggctgttccccacctccatgcggtctaacctctatcggatctgctatagcccctggggccaggaattctccatctgcaactactggcatgatccccaccacgatgacttgtacctcaatgccagcagcttcctggccctgatcaatggggaaagagaccatcccaatgccacagtatggcggaagaactttctgcgtgtgggccacctggtgctgattgggggccctgatgatggtgttattactccctggcagtccagcttctttggtttctatgatgcaaatgagaccgtcctggagatggaggagcaactggtttatctgcgggattcttttgggttgaagactctattggcccggggggccatagtgaggtgtccaatggccggtatctcccacacagcctggcactccaaccgtaccctttatgagacctgcattgaaccttggctctcctgaggatatattcaggggtccccaggaactcctcggtccagagaccaagtggtggccttggaaagcagatgtcaggctttggtgtgcctgtgaccacctcattgctcccatattatcccccatttttagtagagacggggttttagtagagacttggcctcccagaacccccttcctctgctcctccatgaatgacaattccaggcctcccctacctcatgtcctctcatttgggggattgctccgtgctgtccctttctctcaaggccgaagttgggaagtgagaaaccatgtttttaacttgtggctgcttttgctgctgctgctcctccgtatctggctgtatgggtggagaacccaccccctgcccaccacaggggtctccttccaggccactcaggacatttttagcttctctcctccccatgttcccttttttctctaaagtcccctgacatcagccctcccaactcctaagagggactacccatgagagtggggttctgaggctcccctatggggacagttccgttcttgaagtgtcagtgttggggaatatctgtggcctatgaggcccatctcaggtttggggatcccccagtccctatgatcagtgttggagtacccccctgggagagcctagtttctttgaggccccaggccctcttttaactacctttgaataggtgttatccctgtatttatggaaataaagttccatttcctcagtgtg

SEQ ID NO: 163452 - DNA, 1759 bp, Homo sapiens
  Payload ID: 12200
  Gene Symbol: PPT2
  Gene Name: palmitoyl-protein thioesterase 2
  Uniprot ID: Q9UMR5
  ENST ID: ENST00000361568
  CDS Start-End: 105-1031
ggagtagagtagggcaggagaaactgggccaggctgcacttagctcaaggggcctcgaggactctctgcgtctctggagacaagggcactacacgcacttcagaatgaagagttgcgggagcatgctggggctctgcgggcagcggctccccgcggcgtgggtcctgcttctgttgcctttcctgccgctgctgctgcttgcagcccccgcgccccaccgcgcgtcctacaagccggtcatcgtggtgcatgggctcttcgacagctcgtacagcttccgccacctgctggaatacatcaatgagacacaccccgggactgtggtgacagtgctcgatctcttcgatgggagagagagcttgcgacccctgtgggaacaggtgcaagggttccgagaggctgtggtccccatcatggcaaaggcccctcaaggggtgcatctcatctgctactcgcaggggggccttgtgtgccgggctctgctttctgtcatggatgatcacaacgtggattctttcatctccctctcctctccacagatgggacagtatggagacacggactacttgaagtggctgttccccacctccatgcggtctaacctctatcggatctgctatagcccctggggccaggaattctccatctgcaactactggcatgatccccaccacgatgacttgtacctcaatgccagcagcttcctggccctgatcaatggggaaagagaccatcccaatgccacagtatggcggaagaactttctgcgtgtgggccacctggtgctgattgggggccctgatgatggtgttattactccctggcagtccagcttctttggtttctatgatgcaaatgagaccgtcctggagatggaggagcaactggtttatctgcgggattcttttgggttgaagactctattggcccggggggccatagtgaggtgtccaatggccggtatctcccacacagcctggcactccaaccgtaccctttatgagacctgcattgaaccttggctctcctgaggatatattcaggggtccccaggaactcctcggtccagagaccaagtggtggccttggaaagcagatgtcaggctttggtgtgcctgtgaccacctcattgctcccatattatcccccatttttagtagagacggggttttagtagagacttggcctcccagaacccccttcctctgctcctccatgaatgacaattccaggcctcccctacctcatgtcctctcatttgggggattgctccgtgctgtccctttctctcaaggccgaagttgggaagtgagaaaccatgtttttaacttgtggctgcttttgctgctgctgctcctccgtatctggctgtatgggtggagaacccaccccctgcccaccacaggggtctccttccaggccactcaggacatttttagcttctctcctccccatgttcccttttttctctaaagtcccctgacatcagccctcccaactcctaagagggactacccatgagagtggggttctgaggctcccctatggggacagttccgttcttgaagtgtcagtgttggggaatatctgtggcctatgaggcccatctcaggtttggggatcccccagtccctatgatcagtgttggagtacccccctgggagagcctagtttctttgaggccccaggccctcttttaactacctttgaataggtgttatccctgtatttatggaaataaagttccatttcctcagtg

SEQ ID NO: 163453 - DNA, 1945 bp, Homo sapiens
  Payload ID: 12200
  Gene Symbol: PPT2
  Gene Name: palmitoyl-protein thioesterase 2
  Uniprot ID: Q9UMR5
  ENST ID: ENST00000375137
  CDS Start-End: 309-1217
acggatttgcgcgaccccaagcagcccgcccttccccctcccatccgtcattcccctgcgctctctttcctcacccttccccccgccaccgtgggttccagacttgggataagtaaacagcgggtggagcgaggcctacggacccaggccaggtgggagtctgcactcttcaaggggcctgggctgctgctcacgggtattaaagaactccgcgttgttcatggctgaggcgatgcattaggaagatcctggacctagagaacaagtcccccgaacgctgagttggaggcgggacttcgggcgggagcatgctggggctctgcgggcagcggctccccgcggcgtgggtcctgcttctgttgcctttcctgccgctgctgctgcttgcagcccccgcgccccaccgcgcgtcctacaagccggtcatcgtggtgcatgggctcttcgacagctcgtacagcttccgccacctgctggaatacatcaatgagacacaccccgggactgtggtgacagtgctcgatctcttcgatgggagagagagcttgcgacccctgtgggaacaggtgcaagggttccgagaggctgtggtccccatcatggcaaaggcccctcaaggggtgcatctcatctgctactcgcaggggggccttgtgtgccgggctctgctttctgtcatggatgatcacaacgtggattctttcatctccctctcctctccacagatgggacagtatggagacacggactacttgaagtggctgttccccacctccatgcggtctaacctctatcggatctgctatagcccctggggccaggaattctccatctgcaactactggcatgatccccaccacgatgacttgtacctcaatgccagcagcttcctggccctgatcaatggggaaagagaccatcccaatgccacagtatggcggaagaactttctgcgtgtgggccacctggtgctgattgggggccctgatgatggtgttattactccctggcagtccagcttctttggtttctatgatgcaaatgagaccgtcctggagatggaggagcaactggtttatctgcgggattcttttgggttgaagactctattggcccggggggccatagtgaggtgtccaatggccggtatctcccacacagcctggcactccaaccgtaccctttatgagacctgcattgaaccttggctctcctgaggatatattcaggggtccccaggaactcctcggtccagagaccaagtggtggccttggaaagcagatgtcaggctttggtgtgcctgtgaccacctcattgctcccatattatcccccatttttagtagagacggggttttagtagagacttggcctcccagaacccccttcctctgctcctccatgaatgacaattccaggcctcccctacctcatgtcctctcatttgggggattgctccgtgctgtccctttctctcaaggccgaagttgggaagtgagaaaccatgtttttaacttgtggctgcttttgctgctgctgctcctccgtatctggctgtatgggtggagaacccaccccctgcccaccacaggggtctccttccaggccactcaggacatttttagcttctctcctccccatgttcccttttttctctaaagtcccctgacatcagccctcccaactcctaagagggactacccatgagagtggggttctgaggctcccctatggggacagttccgttcttgaagtgtcagtgttggggaatatctgtggcctatgaggcccatctcaggtttggggatcccccagtccctatgatcagtgttggagtacccccctgggagagcctagtttctttgaggccccaggccctcttttaactacctttgaataggtgttatccctgtatttatggaaataaagttccatttcctcagtg

SEQ ID NO: 163454 - DNA, 1754 bp, Homo sapiens
  Payload ID: 12200
  Gene Symbol: PPT2
  Gene Name: palmitoyl-protein thioesterase 2
  Uniprot ID: Q9UMR5
  ENST ID: ENST00000375143
  CDS Start-End: 118-1026
tccgtcattcccctgcgctctctttcctcacccttccccccgccaccgtgggttccagacttgggataagtaaacagcgggtggagcgaggcctacggacccaggccaggcgggagcatgctggggctctgcgggcagcggctccccgcggcgtgggtcctgcttctgttgcctttcctgccgctgctgctgcttgcagcccccgcgccccaccgcgcgtcctacaagccggtcatcgtggtgcatgggctcttcgacagctcgtacagcttccgccacctgctggaatacatcaatgagacacaccccgggactgtggtgacagtgctcgatctcttcgatgggagagagagcttgcgacccctgtgggaacaggtgcaagggttccgagaggctgtggtccccatcatggcaaaggcccctcaaggggtgcatctcatctgctactcgcaggggggccttgtgtgccgggctctgctttctgtcatggatgatcacaacgtggattctttcatctccctctcctctccacagatgggacagtatggagacacggactacttgaagtggctgttccccacctccatgcggtctaacctctatcggatctgctatagcccctggggccaggaattctccatctgcaactactggcatgatccccaccacgatgacttgtacctcaatgccagcagcttcctggccctgatcaatggggaaagagaccatcccaatgccacagtatggcggaagaactttctgcgtgtgggccacctggtgctgattgggggccctgatgatggtgttattactccctggcagtccagcttctttggtttctatgatgcaaatgagaccgtcctggagatggaggagcaactggtttatctgcgggattcttttgggttgaagactctattggcccggggggccatagtgaggtgtccaatggccggtatctcccacacagcctggcactccaaccgtaccctttatgagacctgcattgaaccttggctctcctgaggatatattcaggggtccccaggaactcctcggtccagagaccaagtggtggccttggaaagcagatgtcaggctttggtgtgcctgtgaccacctcattgctcccatattatcccccatttttagtagagacggggttttagtagagacttggcctcccagaacccccttcctctgctcctccatgaatgacaattccaggcctcccctacctcatgtcctctcatttgggggattgctccgtgctgtccctttctctcaaggccgaagttgggaagtgagaaaccatgtttttaacttgtggctgcttttgctgctgctgctcctccgtatctggctgtatgggtggagaacccaccccctgcccaccacaggggtctccttccaggccactcaggacatttttagcttctctcctccccatgttcccttttttctctaaagtcccctgacatcagccctcccaactcctaagagggactacccatgagagtggggttctgaggctcccctatggggacagttccgttcttgaagtgtcagtgttggggaatatctgtggcctatgaggcccatctcaggtttggggatcccccagtccctatgatcagtgttggagtacccccctgggagagcctagtttctttgaggccccaggccctcttttaactacctttgaataggtgttatccctgtatttatggaaataaagttccatttcctcagtg

SEQ ID NO: 163455 - DNA, 1759 bp, Homo sapiens
  Payload ID: 12200
  Gene Symbol: PPT2
  Gene Name: palmitoyl-protein thioesterase 2
  ENST ID: ENST00000383152
  CDS Start-End: 105-1031
ggagtagagtagggcaggagaaactgggccaggctgcacttagctcaaggggcctcgaggactctctgcgtctctggagacaagggcactacacgcacttcagaatgaagagttgcgggagcatgctggggctctgggggcagcggctccccgcggcgtgggtcctgcttctgttgcctttcctgccgctgctgctgcttgcagcccccgcgccccaccgcgagtcctacaagccggtcatcgtggtgcatgggctcttcgacagctcgtacagcttccgccacctgctggaatacatcaatgagacacaccccgggactgtggtgacagtgctcgatctcttcgatgggagagagagcttgcgacccctgtgggaacaggtgcaagggttccgagaggctgtggtccccatcatggcaaaggcccctcaaggggtgcatctcatctgctactcgcaggggggccttgtgtgccgggctctgctttctgtcatggatgatcacaacgtggattctttcatctccctctcctctccacagatgggacagtatggagacacggactacttgaagtggctgttccccacctccatgcggtctaacctctatcggatctgctatagcccctggggccaggaattctccatctgcaactactggcatgatccccaccacgatgacttgtacctcaatgccagcagcttcctggccctgatcaatggggaaagagaccatcccaatgccacagtatggcggaagaactttctgcgtgtgggccacctggtgctgattgggggccctgatgatggtgttattactccctggcagtccagcttctttggtttctatgatgcaaatgagaccgtcctggagatggaggagcaactggtttatctgcgggattcttttgggttgaagactctattggcccggggggccatagtgaggtgtccaatggccggtatctcccacacagcctggcactccaaccgtaccctttatgagacctgcattgaaccttggctctcctgaggatatattcaggggtccccaggaactcctcggtccagagaccaagtggtggccttggaaagcagatgtcaggctttggtgtgcctgtgaccacctcattgctcccatattatcccccatttttagtagagacggggttttagtagagacttggcctcccagaacccccttcctctgctcctccatgaatgacaattccaggcctcccctacctcatgtcctctcatttgggggattgctccgtgctgtccctttctctcaaggccgaagttgggaagtgagaaaccatgtttttaacttgtggctgcttttgctgctgctgctcctccgtatctggctgtatgggtggagaacccaccccctgcccaccacaggggtctccttccaggccactcaggacatttttagcttctctcctccccatgttcccttttttctctaaagtcccctgacatcagccctcccaactcctaagagggactacccatgagagtggggttctgaggctcccctatggggacagttccgttcttgaagtgtcagtgttggggaatatctgtggcctatgaggcccatctcaggtttggggatcccccagtccctatgatcagtgttggagtacccccctgggagagcctagtttctttgaggccccaggccctcttttaactacctttgaataggtgttatccctgtatttatggaaataaagttccatttcctcagtg

SEQ ID NO: 163456 - DNA, 1759 bp, Homo sapiens
  Payload ID: 12200
  Gene Symbol: PPT2
  Gene Name: palmitoyl-protein thioesterase 2
  Uniprot ID: Q9UMR5
  ENST ID: ENST00000383301
  CDS Start-End: 105-1031
ggagtagagtagggcaggagaaactgggccaggctgcacttagctcaaggggcctcgaggactctctgcgtctctggagacaagggcactacacgcacttcagaatgaagagttgcgggagcatgctggggctctgggggcagcggctccccgcggcgtgggtcctgcttctgttgcctttcctgccgctgctgctgcttgcagcccccgcgccccaccgcgcgtcctacaagccggtcatcgtggtgcatgggctcttcgacagctcgtacagcttccgccacctgctggaatacatcaatgagacacaccccgggactgtggtgacagtgctcgatctcttcgatgggagagagagcttgcgacccctgtgggaacaggtgcaagggttccgagaggctgtggtccccatcatggcaaaggcccctcaaggggtgcatctcatctgctactcgcaggggggccttgtgtgccgggctctgctttctgtcatggatgatcacaacgtggattctttcatctccctctcctctccacagatgggacagtatggagacacggactacttgaagtggctgttccccacctccatgcggtctaacctctatcggatctgctatagcccctggggccaggaattctccatctgcaactactggcatgatccccaccacgatgacttgtacctcaatgccagcagcttcctggccctgatcaatggggaaagagaccatcccaatgccacagtatggcggaagaactttctgcgtgtgggccacctggtgctgattgggggccctgatgatggtgttattactccctggcagtccagcttctttggtttctatgatgcaaatgagaccgtcctggagatggaggagcaactggtttatctgcgggattcttttgggttgaagactctattggcccggggggccatagtgaggtgtccaatggccggtatctcccacacagcctggcactccaaccgtaccctttatgagacctgcattgaaccttggctctcctgaggatatattcaggggtccccaggaactcctcggtccagagaccaagtggtggccttggaaagcagatgtcaggctttggtgtgcctgtgaccacctcattgctcccatattatcccccatttttagtagagacggggttttagtagagacttggcctcccagaacccccttcctctgctcctccatgaatgacaattccaggcctcccctacctcatgtcctctcatttgggggattgctccgtgctgtccctttctctcaaggccgaagttgggaagtgagaaaccatgtttttaacttgtggctgcttttgctgctgctgctcctccgtatctggctgtatgggtggagaacccaccccctgcccaccacaggggtctccttccaggccactcaggacatttttagcttctctcctccccatgttcccttttttctctaaagtcccctgacatcagccctcccaactcctaagagggactacccatgagagtggggttctgaggctcccctatggggacagttccgttcttgaagtgtcagtgttggggaatatctgtggcctatgaggcccatctcaggtttggggatcccccagtccctatgatcagtgttggagtacccccctgggagagcctagtttctttgaggccccaggccctcttttaactacctttgaataggtgttatccctgtatttatggaaataaagttccatttcctcagtg

SEQ ID NO: 163457 - DNA, 2111 bp, Homo sapiens
  Payload ID: 12200
  Gene Symbol: PPT2
  Gene Name: palmitoyl-protein thioesterase 2
  Uniprot ID: Q9UMR5
  ENST ID: ENST00000395523
  CDS Start-End: 475-1383
tcgaggactctctgcgtctctggagacaagggcactacacgcacttcagaatgaagagttcacctagggcgcaatggaatattccattgcccctcctgtcctgggtctgtgttgcggggaacgctcgcgcggttgccagagaaagccccggacgtgacggatttgcgcgaccccaagcagcccgcccttccccctcccatccgtcattcccctgcgctctctttcctcacccttccccccgccaccgtgggttccagacttgggataagtaaacagcgggtggagcgaggcctacggacccaggccaggtgggagtctgcactcttcaaggggcctgggctgctgctcacgggtattaaagaactccgcgttgttcatggctgaggcgatgcattaggaagatcctggacctagagaacaagtcccccgaacgctgagttggaggcgggacttcgggtgcgcgttggcgggagcatgctggggctctgcgggcagcggctccccgcggcgtgggtcctgcttctgttgcctttcctgccgctgctgctgcttgcagcccccgcgccccaccgcgcgtcctacaagccggtcatcgtggtgcatgggctcttcgacagctcgtacagcttccgccacctgctggaatacatcaatgagacacaccccgggactgtggtgacagtgctcgatctcttcgatgggagagagagcttgcgacccctgtgggaacaggtgcaagggttccgagaggctgtggtccccatcatggcaaaggcccctcaaggggtgcatctcatctgctactcgcaggggggccttgtgtgccgggctctgctttctgtcatggatgatcacaacgtggattctttcatctccctctcctctccacagatgggacagtatggagacacggactacttgaagtggctgttccccacctccatgcggtctaacctctatcggatctgctatagcccctggggccaggaattctccatctgcaactactggcatgatccccaccacgatgacttgtacctcaatgccagcagcttcctggccctgatcaatggggaaagagaccatcccaatgccacagtatggcggaagaactttctgcgtgtgggccacctggtgctgattgggggccctgatgatggtgttattactccctggcagtccagcttctttggtttctatgatgcaaatgagaccgtcctggagatggaggagcaactggtttatctgcgggattcttttgggttgaagactctattggcccggggggccatagtgaggtgtccaatggccggtatctcccacacagcctggcactccaaccgtaccctttatgagacctgcattgaaccttggctctcctgaggatatattcaggggtccccaggaactcctcggtccagagaccaagtggtggccttggaaagcagatgtcaggctttggtgtgcctgtgaccacctcattgctcccatattatcccccatttttagtagagacggggttttagtagagacttggcctcccagaacccccttcctctgctcctccatgaatgacaattccaggcctcccctacctcatgtcctctcatttgggggattgctccgtgctgtccctttctctcaaggccgaagttgggaagtgagaaaccatgtttttaacttgtggctgcttttgctgctgctgctcctccgtatctggctgtatgggtggagaacccaccccctgcccaccacaggggtctccttccaggccactcaggacatttttagcttctctcctccccatgttcccttttttctctaaagtcccctgacatcagccctcccaactcctaagagggactacccatgagagtggggttctgaggctcccctatggggacagttccgttcttgaagtgtcagtgttggggaatatctgtggcctatgaggcccatctcaggtttggggatcccccagtccctatgatcagtgttggagtacccccctgggagagcctagtttctttgaggccccaggccctcttttaactacctttgaataggtgttatccctgtatttatggaaataaagttccatttcctcagtg

SEQ ID NO: 163458 - DNA, 1754 bp, Homo sapiens
  Payload ID: 12200
  Gene Symbol: PPT2
  Gene Name: palmitoyl-protein thioesterase 2
  ENST ID: ENST00000399660
  CDS Start-End: 118-1026
tccgtcattcccctgcgctctctttcctcacccttccccccgccaccgtgggttccagacttgggataagtaaacagcgggtggagcgaggcctacggacccaggccaggcgggagcatgctggggctctgggggcagcggctccccgcggcgtgggtcctgcttctgttgcctttcctgccgctgctgctgcttgcagcccccgcgccccaccgcgagtcctacaagccggtcatcgtggtgcatgggctcttcgacagctcgtacagcttccgccacctgctggaatacatcaatgagacacaccccgggactgtggtgacagtgctcgatctcttcgatgggagagagagcttgcgacccctgtgggaacaggtgcaagggttccgagaggctgtggtccccatcatggcaaaggcccctcaaggggtgcatctcatctgctactcgcaggggggccttgtgtgccgggctctgctttctgtcatggatgatcacaacgtggattctttcatctccctctcctctccacagatgggacagtatggagacacggactacttgaagtggctgttccccacctccatgcggtctaacctctatcggatctgctatagcccctggggccaggaattctccatctgcaactactggcatgatccccaccacgatgacttgtacctcaatgccagcagcttcctggccctgatcaatggggaaagagaccatcccaatgccacagtatggcggaagaactttctgcgtgtgggccacctggtgctgattgggggccctgatgatggtgttattactccctggcagtccagcttctttggtttctatgatgcaaatgagaccgtcctggagatggaggagcaactggtttatctgcgggattcttttgggttgaagactctattggcccggggggccatagtgaggtgtccaatggccggtatctcccacacagcctggcactccaaccgtaccctttatgagacctgcattgaaccttggctctcctgaggatatattcaggggtccccaggaactcctcggtccagagaccaagtggtggccttggaaagcagatgtcaggctttggtgtgcctgtgaccacctcattgctcccatattatcccccatttttagtagagacggggttttagtagagacttggcctcccagaacccccttcctctgctcctccatgaatgacaattccaggcctcccctacctcatgtcctctcatttgggggattgctccgtgctgtccctttctctcaaggccgaagttgggaagtgagaaaccatgtttttaacttgtggctgcttttgctgctgctgctcctccgtatctggctgtatgggtggagaacccaccccctgcccaccacaggggtctccttccaggccactcaggacatttttagcttctctcctccccatgttcccttttttctctaaagtcccctgacatcagccctcccaactcctaagagggactacccatgagagtggggttctgaggctcccctatggggacagttccgttcttgaagtgtcagtgttggggaatatctgtggcctatgaggcccatctcaggtttggggatcccccagtccctatgatcagtgttggagtacccccctgggagagcctagtttctttgaggccccaggccctcttttaactacctttgaataggtgttatccctgtatttatggaaataaagttccatttcctcagtg

SEQ ID NO: 163459 - DNA, 1945 bp, Homo sapiens
  Payload ID: 12200
  Gene Symbol: PPT2
  Gene Name: palmitoyl-protein thioesterase 2
  ENST ID: ENST00000399662
  CDS Start-End: 309-1217
acggatttgcgcgaccccaagcagcccgcccttccccctcccatccgtcattcccctgcgctctctttcctcacccttccccccgccaccgtgggttccagacttgggataagtaaacagcgggtggagcgaggcctacggacccaggccaggtgggagtctgcactcttcaaggggcctgggctgctgctcacgggtattaaagaactccgcgttgttcatggctgaggcgatgcattaggaagatcctggacctagagaacaagtcccccgaacgctgagttggaggcgggacttcgggcgggagcatgctggggctctgggggcagcggctccccgcggcgtgggtcctgcttctgttgcctttcctgccgctgctgctgcttgcagcccccgcgccccaccgcgagtcctacaagccggtcatcgtggtgcatgggctcttcgacagctcgtacagcttccgccacctgctggaatacatcaatgagacacaccccgggactgtggtgacagtgctcgatctcttcgatgggagagagagcttgcgacccctgtgggaacaggtgcaagggttccgagaggctgtggtccccatcatggcaaaggcccctcaaggggtgcatctcatctgctactcgcaggggggccttgtgtgccgggctctgctttctgtcatggatgatcacaacgtggattctttcatctccctctcctctccacagatgggacagtatggagacacggactacttgaagtggctgttccccacctccatgcggtctaacctctatcggatctgctatagcccctggggccaggaattctccatctgcaactactggcatgatccccaccacgatgacttgtacctcaatgccagcagcttcctggccctgatcaatggggaaagagaccatcccaatgccacagtatggcggaagaactttctgcgtgtgggccacctggtgctgattgggggccctgatgatggtgttattactccctggcagtccagcttctttggtttctatgatgcaaatgagaccgtcctggagatggaggagcaactggtttatctgcgggattcttttgggttgaagactctattggcccggggggccatagtgaggtgtccaatggccggtatctcccacacagcctggcactccaaccgtaccctttatgagacctgcattgaaccttggctctcctgaggatatattcaggggtccccaggaactcctcggtccagagaccaagtggtggccttggaaagcagatgtcaggctttggtgtgcctgtgaccacctcattgctcccatattatcccccatttttagtagagacggggttttagtagagacttggcctcccagaacccccttcctctgctcctccatgaatgacaattccaggcctcccctacctcatgtcctctcatttgggggattgctccgtgctgtccctttctctcaaggccgaagttgggaagtgagaaaccatgtttttaacttgtggctgcttttgctgctgctgctcctccgtatctggctgtatgggtggagaacccaccccctgcccaccacaggggtctccttccaggccactcaggacatttttagcttctctcctccccatgttcccttttttctctaaagtcccctgacatcagccctcccaactcctaagagggactacccatgagagtggggttctgaggctcccctatggggacagttccgttcttgaagtgtcagtgttggggaatatctgtggcctatgaggcccatctcaggtttggggatcccccagtccctatgatcagtgttggagtacccccctgggagagcctagtttctttgaggccccaggccctcttttaactacctttgaataggtgttatccctgtatttatggaaataaagttccatttcctcagtg

SEQ ID NO: 163460 - DNA, 2111 bp, Homo sapiens
  Payload ID: 12200
  Gene Symbol: PPT2
  Gene Name: palmitoyl-protein thioesterase 2
  ENST ID: ENST00000399665
  CDS Start-End: 475-1383
tcgaggactctctgcgtctctggagacaagggcactacacgcacttcagaatgaagagttcacctagggcgcaatggaatattccattgcccctcctgtcctgggtctgtgttgcggggaacgctcgcgcggttgccagagaaagccccggacgtgacggatttgcgcgaccccaagcagcccgcccttccccctcccatccgtcattcccctgcgctctctttcctcacccttccccccgccaccgtgggttccagacttgggataagtaaacagcgggtggagcgaggcctacggacccaggccaggtgggagtctgcactcttcaaggggcctgggctgctgctcacgggtattaaagaactccgcgttgttcatggctgaggcgatgcattaggaagatcctggacctagagaacaagtcccccgaacgctgagttggaggcgggacttcgggtgcgcgttggcgggagcatgctggggctctgggggcagcggctccccgcggcgtgggtcctgcttctgttgcctttcctgccgctgctgctgcttgcagcccccgcgccccaccgcgagtcctacaagccggtcatcgtggtgcatgggctcttcgacagctcgtacagcttccgccacctgctggaatacatcaatgagacacaccccgggactgtggtgacagtgctcgatctcttcgatgggagagagagcttgcgacccctgtgggaacaggtgcaagggttccgagaggctgtggtccccatcatggcaaaggcccctcaaggggtgcatctcatctgctactcgcaggggggccttgtgtgccgggctctgctttctgtcatggatgatcacaacgtggattctttcatctccctctcctctccacagatgggacagtatggagacacggactacttgaagtggctgttccccacctccatgcggtctaacctctatcggatctgctatagcccctggggccaggaattctccatctgcaactactggcatgatccccaccacgatgacttgtacctcaatgccagcagcttcctggccctgatcaatggggaaagagaccatcccaatgccacagtatggcggaagaactttctgcgtgtgggccacctggtgctgattgggggccctgatgatggtgttattactccctggcagtccagcttctttggtttctatgatgcaaatgagaccgtcctggagatggaggagcaactggtttatctgcgggattcttttgggttgaagactctattggcccggggggccatagtgaggtgtccaatggccggtatctcccacacagcctggcactccaaccgtaccctttatgagacctgcattgaaccttggctctcctgaggatatattcaggggtccccaggaactcctcggtccagagaccaagtggtggccttggaaagcagatgtcaggctttggtgtgcctgtgaccacctcattgctcccatattatcccccatttttagtagagacggggttttagtagagacttggcctcccagaacccccttcctctgctcctccatgaatgacaattccaggcctcccctacctcatgtcctctcatttgggggattgctccgtgctgtccctttctctcaaggccgaagttgggaagtgagaaaccatgtttttaacttgtggctgcttttgctgctgctgctcctccgtatctggctgtatgggtggagaacccaccccctgcccaccacaggggtctccttccaggccactcaggacatttttagcttctctcctccccatgttcccttttttctctaaagtcccctgacatcagccctcccaactcctaagagggactacccatgagagtggggttctgaggctcccctatggggacagttccgttcttgaagtgtcagtgttggggaatatctgtggcctatgaggcccatctcaggtttggggatcccccagtccctatgatcagtgttggagtacccccctgggagagcctagtttctttgaggccccaggccctcttttaactacctttgaataggtgttatccctgtatttatggaaataaagttccatttcctcagtg

SEQ ID NO: 163461 - DNA, 1754 bp, Homo sapiens
  Payload ID: 12200
  Gene Symbol: PPT2
  Gene Name: palmitoyl-protein thioesterase 2
  ENST ID: ENST00000399856
  CDS Start-End: 118-1026
tccgtcattcccctgcgctctctttcctcacccttccccccgccaccgtgggttccagacttgggataagtaaacagcgggtggagcgaggcctacggacccaggccaggcgggagcatgctggggctctgggggcagcggctccccgcggcgtgggtcctgcttctgttgcctttcctgccgctgctgctgcttgcagcccccgcgccccaccgcgcgtcctacaagccggtcatcgtggtgcatgggctcttcgacagctcgtacagcttccgccacctgctggaatacatcaatgagacacaccccgggactgtggtgacagtgctcgatctcttcgatgggagagagagcttgcgacccctgtgggaacaggtgcaagggttccgagaggctgtggtccccatcatggcaaaggcccctcaaggggtgcatctcatctgctactcgcaggggggccttgtgtgccgggctctgctttctgtcatggatgatcacaacgtggattctttcatctccctctcctctccacagatgggacagtatggagacacggactacttgaagtggctgttccccacctccatgcggtctaacctctatcggatctgctatagcccctggggccaggaattctccatctgcaactactggcatgatccccaccacgatgacttgtacctcaatgccagcagcttcctggccctgatcaatggggaaagagaccatcccaatgccacagtatggcggaagaactttctgcgtgtgggccacctggtgctgattgggggccctgatgatggtgttattactccctggcagtccagcttctttggtttctatgatgcaaatgagaccgtcctggagatggaggagcaactggtttatctgcgggattcttttgggttgaagactctattggcccggggggccatagtgaggtgtccaatggccggtatctcccacacagcctggcactccaaccgtaccctttatgagacctgcattgaaccttggctctcctgaggatatattcaggggtccccaggaactcctcggtccagagaccaagtggtggccttggaaagcagatgtcaggctttggtgtgcctgtgaccacctcattgctcccatattatcccccatttttagtagagacggggttttagtagagacttggcctcccagaacccccttcctctgctcctccatgaatgacaattccaggcctcccctacctcatgtcctctcatttgggggattgctccgtgctgtccctttctctcaaggccgaagttgggaagtgagaaaccatgtttttaacttgtggctgcttttgctgctgctgctcctccgtatctggctgtatgggtggagaacccaccccctgcccaccacaggggtctccttccaggccactcaggacatttttagcttctctcctccccatgttcccttttttctctaaagtcccctgacatcagccctcccaactcctaagagggactacccatgagagtggggttctgaggctcccctatggggacagttccgttcttgaagtgtcagtgttggggaatatctgtggcctatgaggcccatctcaggtttggggatcccccagtccctatgatcagtgttggagtacccccctgggagagcctagtttctttgaggccccaggccctcttttaactacctttgaataggtgttatccctgtatttatggaaataaagttccatttcctcagtg

SEQ ID NO: 163462 - DNA, 1945 bp, Homo sapiens
  Payload ID: 12200
  Gene Symbol: PPT2
  Gene Name: palmitoyl-protein thioesterase 2
  ENST ID: ENST00000399859
  CDS Start-End: 309-1217
acggatttgcgcgaccccaagcagcccgcccttccccctcccatccgtcattcccctgcgctctctttcctcacccttccccccgccaccgtgggttccagacttgggataagtaaacagcgggtggagcgaggcctacggacccaggccaggtgggagtctgcactcttcaaggggcctgggctgctgctcacgggtattaaagaactccgcgttgttcatggctgaggcgatgcattaggaagatcctggacctagagaacaagtcccccgaacgctgagttggaggcgggacttcgggcgggagcatgctggggctctgggggcagcggctccccgcggcgtgggtcctgcttctgttgcctttcctgccgctgctgctgcttgcagcccccgcgccccaccgcgcgtcctacaagccggtcatcgtggtgcatgggctcttcgacagctcgtacagcttccgccacctgctggaatacatcaatgagacacaccccgggactgtggtgacagtgctcgatctcttcgatgggagagagagcttgcgacccctgtgggaacaggtgcaagggttccgagaggctgtggtccccatcatggcaaaggcccctcaaggggtgcatctcatctgctactcgcaggggggccttgtgtgccgggctctgctttctgtcatggatgatcacaacgtggattctttcatctccctctcctctccacagatgggacagtatggagacacggactacttgaagtggctgttccccacctccatgcggtctaacctctatcggatctgctatagcccctggggccaggaattctccatctgcaactactggcatgatccccaccacgatgacttgtacctcaatgccagcagcttcctggccctgatcaatggggaaagagaccatcccaatgccacagtatggcggaagaactttctgcgtgtgggccacctggtgctgattgggggccctgatgatggtgttattactccctggcagtccagcttctttggtttctatgatgcaaatgagaccgtcctggagatggaggagcaactggtttatctgcgggattcttttgggttgaagactctattggcccggggggccatagtgaggtgtccaatggccggtatctcccacacagcctggcactccaaccgtaccctttatgagacctgcattgaaccttggctctcctgaggatatattcaggggtccccaggaactcctcggtccagagaccaagtggtggccttggaaagcagatgtcaggctttggtgtgcctgtgaccacctcattgctcccatattatcccccatttttagtagagacggggttttagtagagacttggcctcccagaacccccttcctctgctcctccatgaatgacaattccaggcctcccctacctcatgtcctctcatttgggggattgctccgtgctgtccctttctctcaaggccgaagttgggaagtgagaaaccatgtttttaacttgtggctgcttttgctgctgctgctcctccgtatctggctgtatgggtggagaacccaccccctgcccaccacaggggtctccttccaggccactcaggacatttttagcttctctcctccccatgttcccttttttctctaaagtcccctgacatcagccctcccaactcctaagagggactacccatgagagtggggttctgaggctcccctatggggacagttccgttcttgaagtgtcagtgttggggaatatctgtggcctatgaggcccatctcaggtttggggatcccccagtccctatgatcagtgttggagtacccccctgggagagcctagtttctttgaggccccaggccctcttttaactacctttgaataggtgttatccctgtatttatggaaataaagttccatttcctcagtg

SEQ ID NO: 163463 - DNA, 2111 bp, Homo sapiens
  Payload ID: 12200
  Gene Symbol: PPT2
  Gene Name: palmitoyl-protein thioesterase 2
  ENST ID: ENST00000399860
  CDS Start-End: 475-1383
tcgaggactctctgcgtctctggagacaagggcactacacgcacttcagaatgaagagttcacctagggcgcaatggaatattccattgcccctcctgtcctgggtctgtgttgcggggaacgctcgcgcggttgccagagaaagccccggacgtgacggatttgcgcgaccccaagcagcccgcccttccccctcccatccgtcattcccctgcgctctctttcctcacccttccccccgccaccgtgggttccagacttgggataagtaaacagcgggtggagcgaggcctacggacccaggccaggtgggagtctgcactcttcaaggggcctgggctgctgctcacgggtattaaagaactccgcgttgttcatggctgaggcgatgcattaggaagatcctggacctagagaacaagtcccccgaacgctgagttggaggcgggacttcgggtgcgcgttggcgggagcatgctggggctctgggggcagcggctccccgcggcgtgggtcctgcttctgttgcctttcctgccgctgctgctgcttgcagcccccgcgccccaccgcgcgtcctacaagccggtcatcgtggtgcatgggctcttcgacagctcgtacagcttccgccacctgctggaatacatcaatgagacacaccccgggactgtggtgacagtgctcgatctcttcgatgggagagagagcttgcgacccctgtgggaacaggtgcaagggttccgagaggctgtggtccccatcatggcaaaggcccctcaaggggtgcatctcatctgctactcgcaggggggccttgtgtgccgggctctgctttctgtcatggatgatcacaacgtggattctttcatctccctctcctctccacagatgggacagtatggagacacggactacttgaagtggctgttccccacctccatgcggtctaacctctatcggatctgctatagcccctggggccaggaattctccatctgcaactactggcatgatccccaccacgatgacttgtacctcaatgccagcagcttcctggccctgatcaatggggaaagagaccatcccaatgccacagtatggcggaagaactttctgcgtgtgggccacctggtgctgattgggggccctgatgatggtgttattactccctggcagtccagcttctttggtttctatgatgcaaatgagaccgtcctggagatggaggagcaactggtttatctgcgggattcttttgggttgaagactctattggcccggggggccatagtgaggtgtccaatggccggtatctcccacacagcctggcactccaaccgtaccctttatgagacctgcattgaaccttggctctcctgaggatatattcaggggtccccaggaactcctcggtccagagaccaagtggtggccttggaaagcagatgtcaggctttggtgtgcctgtgaccacctcattgctcccatattatcccccatttttagtagagacggggttttagtagagacttggcctcccagaacccccttcctctgctcctccatgaatgacaattccaggcctcccctacctcatgtcctctcatttgggggattgctccgtgctgtccctttctctcaaggccgaagttgggaagtgagaaaccatgtttttaacttgtggctgcttttgctgctgctgctcctccgtatctggctgtatgggtggagaacccaccccctgcccaccacaggggtctccttccaggccactcaggacatttttagcttctctcctccccatgttcccttttttctctaaagtcccctgacatcagccctcccaactcctaagagggactacccatgagagtggggttctgaggctcccctatggggacagttccgttcttgaagtgtcagtgttggggaatatctgtggcctatgaggcccatctcaggtttggggatcccccagtccctatgatcagtgttggagtacccccctgggagagcctagtttctttgaggccccaggccctcttttaactacctttgaataggtgttatccctgtatttatggaaataaagttccatttcctcagtg

SEQ ID NO: 163464 - DNA, 730 bp, Homo sapiens
  Payload ID: 12200
  Gene Symbol: PPT2
  Gene Name: palmitoyl-protein thioesterase 2
  ENST ID: ENST00000426325
  CDS Start-End: 130-730
gctattttgtgacacggacctggtgtgggagcgagaggaggtggcttgattgccgggcgtctgttccgagggaggagggtgttgccatctccctcacatgcccttatcacccctttctcaggcgggagcatgctggggctctgggggcagcggctccccgcggcgtgggtcctgcttctgttgcctttcctgccgctgctgctgcttgcagcccccgcgccccaccgcgcgtcctacaagccggtcatcgtggtgcatgggctcttcgacagctcgtacagcttccgccacctgctggaatacatcaatgagacacaccccgggactgtggtgacagtgctcgatctcttcgatgggagagagagcttgcgacccctgtgggaacaggtgcaagggttccgagaggctgtggtccccatcatggcaaaggcccctcaaggggtgcatctcatctgctactcgcaggggggccttgtgtgccgggctctgctttctgtcatggatgatcacaacgtggattctttcatctccctctcctctccacagatgggacagtatggagacacggactacttgaagtggctgttccccacctccatgcggtctaacctctatcggatctgctatagcccctggggccaggaattctccatctgcaactactggcatgatccccaccacgatgacttgtacctcaatgccagcagcttcctggccctgatcaatgggg

SEQ ID NO: 163465 - DNA, 2111 bp, Homo sapiens; identical to SEQ ID NO: 163463
  Payload ID: 12200
  Gene Symbol: PPT2
  Gene Name: palmitoyl-protein thioesterase 2
  ENST ID: ENST00000457509
  CDS Start-End: 475-1383

SEQ ID NO: 163466 - DNA, 1049 bp, Homo sapiens
  Payload ID: 12200
  Gene Symbol: PPT2
  Gene Name: palmitoyl-protein thioesterase 2
  ENST ID: ENST00000429696
  CDS Start-End: 344-637
gttgccagagaaagccccggacgtgacggatttgcgcgaccccaagcagcccgcccttccccctcccatccgtcattcccctgcgctctctttcctcacccttccccccgccaccgtgggttccagacttgggataagtaaacagcgggtggagcgaggcctacggacccaggccaggtgggagtctgcactcttcaaggggcctgggctgctgctcacgggtattaaagaactccgcgttgttcatggctgaggcgatgcattaggaagatcctggacctagagaacaagtcccccgaacgctgagttggaggcgggacttcgggtgcgcgttggcgggagcatgctggggctctgggggcagcggctccccgcggcgtgggtcctgcttctgttgcctttcctgccgctgctgctgcttgcagcccccgcgccccaccgcgcgtcctacaagccggtcatcgtggtgcatgggctcttcgacagctcgtacagcttccgccacctgctggaatacatcaatgagggggccttgtgtgccgggctctgctttctgtcatggatgatcacaacgtggattctttcatctccctctcctctccacagatgggacagtatggagacacggactacttgaagtggctgttccccacctccatgcggtctaacctctatcggatctgctatagcccctggggccaggaattctccatctgcaactactggcatgatccccaccacgatgacttgtacctcaatgccagcagcttcctggccctgatcaatggggaaagagaccatcccaatgccacagtatggcggaagaactttctgcgtgtgggccacctggtgctgattgggggccctgatgatggtgttattactccctggcagtccagcttctttggtttctatgatgcaaatgagaccgtcctggagatggaggagcaactgcctgtagggtccagcgtcaaagcgaatcatggggtccagggctgagctgtgcactctcttaggcggattctccttcctcctgctactgataccag

SEQ ID NO: 163467 - DNA, 396 bp, Homo sapiens
  Payload ID: 12200
  Gene Symbol: PPT2
  Gene Name: palmitoyl-protein thioesterase 2
  ENST ID: ENST00000458738
  CDS Start-End: 118-396
cacggacctggtgtgggagcgagaggaggtggcttgattgccgggcgtctgttccgagggaggagggtgttgccatctccctcacatgcccttatcacccctttctcaggcgggagcatgctggggctctgggggcagcggctccccgcggcgtgggtcctgcttctgttgcctttcctgccgctgctgctgcttgcagcccccgcgccccaccgcgagtcctacaagccggtcatcgtggtgcatgggctcttcgacagctcgtacagcttccgccacctgctggaatacatcaatgagggggccttgtgtgccgggctctgctttctgtcatggatgatcacaacgtggattctttcatctccctctcctctccacagatgggacagtatggag

SEQ ID NO: 163468 - DNA, 1754 bp, Homo sapiens
  Payload ID: 12200
  Gene Symbol: PPT2
  Gene Name: palmitoyl-protein thioesterase 2
  ENST ID: ENST00000427556
  CDS Start-End: 118-1026
tccgtcattcccctgcgttctctttcctcacccttccccccgccaccgtgggttccagacttgggataagtaaacagcgggtggagcgaggcctacggacccaggccaggcgggagcatgctggggctctgggggcagcggctccccgcggcgtgggtcctgcttctgttgcctttcctgccgctgctgctgcttgcagcccccgcgccccaccgcgcgtcctacaagccggtcatcgtggtgcatgggctcttcgacagctcgtacagcttccgccacctgctggaatacatcaatgagacacaccccgggactgtggtgacagtgctcgatctcttcgatgggagagagagcttgcgacccctgtgggaacaggtgcaagggttccgagaggctgtggtccccatcatggcaaaggcccctcaaggggtgcatctcatctgctactcgcaggggggccttgtgtgccgggctctgctttctgtcatggatgatcacaacgtggattctttcatctccctctcctctccacagatgggacagtatggagacacggactacttgaagtggctgttccccacctccatgcggtctaacctctatcggatctgctatagcccctggggccaggaattctccatctgcaactactggcatgatccccaccacgatgacttgtacctcaatgccagcagcttcctggccctgatcaatggggaaagagaccatcccaatgccacagtatggcggaagaactttctgcgtgtgggccacctggtgctgattgggggccctgatgatggtgttattactccctggcagtccagcttctttggtttctatgatgcaaatgagaccgtcctggagatggaggagcaactggtttatctgcgggattcttttgggttgaagactctattggcccggggggccatagtgaggtgtccaatggccggtatctcccacacagcctggcactccaaccgtaccctttatgagacctgcattgaaccttggctctcctgaggatatattcaggggtccccaggaactcctcggtccagagaccaagtggtggccttggaaagcagatgtcaggctttggtgtgcctgtgaccacctcattgctcccatattatcccccatttttagtagagacggggttttagtagagacttggcctcccagaacccccttcctctgctcctccatgaatgacaattccaggcctcccctacctcatgtcctctcatttgggggattgctccgtgctgtccctttctctcaaggccgaagttgggaagtgagaaaccatgtttttaacttgtggctgcttttgctgctgctgctcctccgtatctggctgtatgggtggagaacccaccccctgcccaccacaggggtctccttccaggccactcaggacatttttagcttctctcctccccatgttcccttttttctctaaagtcccctgacatcagccctcccaactcctaagagggactacccatgagagtggggttctgaggctcccctatggggacagttccgttcttgaagtgtcagtgttggggaatatctgtggcctatgaggcccatctcaggtttggggatcccccagtccctatgatcagtgttggagtacccccctgggagagcctagtttctttgaggccccaggccctcttttaactacctttgaataggtgttatccctgtatttatggaaataaagttccatttcctcagtg

SEQ ID NO: 163469 - DNA, 730 bp, Homo sapiens; identical to SEQ ID NO: 163464
  Payload ID: 12200
  Gene Symbol: PPT2
  Gene Name: palmitoyl-protein thioesterase 2
  ENST ID: ENST00000443321
  CDS Start-End: 130-730

SEQ ID NO: 163470 - DNA, 827 bp, Homo sapiens
  Payload ID: 12200
  Gene Symbol: PPT2
  Gene Name: palmitoyl-protein thioesterase 2
  ENST ID: ENST00000425659
  CDS Start-End: 118-827
tccgtcattcccctgcgctctctttcctcacccttccccccgccaccgtgggttccagacttgggataagtaaacagcgggtggagcgaggcctacggacccaggccaggcgggagcatgctggggctctgggggcagcggctccccgcggcgtgggtcctgcttctgttgcctttcctgccgctgctgctgcttgcagcccccgcgccccaccgcgagtcctacaagccggtcatcgtggtgcatgggctcttcgacagctcgtacagcttccgccacctgctggaatacatcaatgagacacaccccgggactgtggtgacagtgctcgatctcttcgatgggagagagagcttgcgacccctgtgggaacaggtgcaagggttccgagaggctgtggtccccatcatggcaaaggcccctcaaggggtgcatctcatctgctactcgcaggggggccttgtgtgccgggctctgctttctgtcatggatgatcacaacgtggattctttcatctccctctcctctccacagatgggacagtatggagacacggactacttgaagtggctgttccccacctccatgcggtctaacctctatcggatctgctatagcccctggggccaggaattctccatctgcaactactggcatgatccccaccacgatgacttgtacctcaatgccagcagcttcctggccctgatcaatggggaaagagaccatcccaatgccacagtatggcggaagaactttctgcgtgtgggccacctggtgctgattgggggccctgatgatggtgttattactccctggcagtccag

SEQ ID NO: 163471 - DNA, 2111 bp, Homo sapiens; identical to SEQ ID NO: 163463
  Payload ID: 12200
  Gene Symbol: PPT2
  Gene Name: palmitoyl-protein thioesterase 2
  ENST ID: ENST00000440507
  CDS Start-End: 475-1383

SEQ ID NO: 163472 - DNA, 1018 bp, Homo sapiens
  Payload ID: 12200
  Gene Symbol: PPT2
  Gene Name: palmitoyl-protein thioesterase 2
  ENST ID: ENST00000424667
  CDS Start-End: 309-1018
acggatttgcgcgaccccaagcagcccgcccttccccctcccatccgtcattcccctgcgctctctttcctcacccttccccccgccaccgtgggttccagacttgggataagtaaacagcgggtggagcgaggcctacggacccaggccaggtgggagtctgcactcttcaaggggcctgggctgctgctcacgggtattaaagaactccgcgttgttcatggctgaggcgatgcattaggaagatcctggacctagagaacaagtcccccgaacgctgagttggaggcgggacttcgggcgggagcatgctggggctctgggggcagcggctccccgcggcgtgggtcctgcttctgttgcctttcctgccgctgctgctgcttgcagcccccgcgccccaccgcgagtcctacaagccggtcatcgtggtgcatgggctcttcgacagctcgtacagcttccgccacctgctggaatacatcaatgagacacaccccgggactgtggtgacagtgctcgatctcttcgatgggagagagagcttgcgacccctgtgggaacaggtgcaagggttccgagaggctgtggtccccatcatggcaaaggcccctcaaggggtgcatctcatctgctactcgcaggggggccttgtgtgccgggctctgctttctgtcatggatgatcacaacgtggattctttcatctccctctcctctccacagatgggacagtatggagacacggactacttgaagtggctgttccccacctccatgcggtctaacctctatcggatctgctatagcccctggggccaggaattctccatctgcaactactggcatgatccccaccacgatgacttgtacctcaatgccagcagcttcctggccctgatcaatggggaaagagaccatcccaatgccacagtatggcggaagaactttctgcgtgtgggccacctggtgctgattgggggccctgatgatggtgttattactccctggcagtccag

SEQ ID NO: 163473 - DNA, 722 bp, Homo sapiens
  Payload ID: 12200
  Gene Symbol: PPT2
  Gene Name: palmitoyl-protein thioesterase 2
  ENST ID: ENST00000437214
  CDS Start-End: 247-722
acccttccccccgccaccgtgggttccagacttgggataagtaaacagcgggtggagcgaggcctacggacccaggccaggtgggagtctgcactcttcaaggggcctgggctgctgctcacgggtattaaagaactccgcgttgttcatggctgaggcgatgcattaggaagatcctggacctagagaacaagtcccccgaacgctgagttggaggcgggacttcgggtgcgcgttggcgggagcatgctggggctctgggggcagcggctccccgcggcgtgggtcctgcttctgttgcctttcctgccgctgctgctgcttgcagcccccgcgccccaccgcgcgtcctacaagccggtcatcgtggtgcatgggctcttcgacagctcgtacagcttccgccacctgctggaatacatcaatgagatgggacagtatggagacacggactacttgaagtggctgttccccacctccatgcggtctaacctctatcggatctgctatagcccctggggccaggaattctccatctgcaactactggcatgatccccaccacgatgacttgtacctcaatgccagcagcttcctggccctgatcaatggggaaagagaccatcccaatgccacagtatggcggaagaactttctgcgtgtgggccacctggtgctgattgggggccctgatgatggtgttattactccctggcagtccag

SEQ ID NO: 163474 - DNA, 396 bp, Homo sapiens
  Payload ID: 12200
  Gene Symbol: PPT2
  Gene Name: palmitoyl-protein thioesterase 2
  ENST ID: ENST00000453393
  CDS Start-End: 118-396
cacggacctggtgtgggagcgagaggaggtggcttgattgccgggcgtctgttccgagggaggagggtgttgccatctccctcacatgcccttatcacccctttctcaggcgggagcatgctggggctctgggggcagcggctccccgcggcgtgggtcctgcttctgttgcctttcctgccgctgctgctgcttgcagcccccgcgccccaccgcgcgtcctacaagccggtcatcgtggtgcatgggctcttcgacagctcgtacagcttccgccacctgctggaatacatcaatgagggggccttgtgtgccgggctctgctttctgtcatggatgatcacaacgtggattctttcatctccctctcctctccacagatgggacagtatggag

SEQ ID NO: 163475 - DNA, 1874 bp, Homo sapiens
  Payload ID: 12200
  Gene Symbol: PPT2
  Gene Name: palmitoyl-protein thioesterase 2
  ENST ID: ENST00000438385
  CDS Start-End: 238-1146
tattccattgcccctcctgtcctgggtctgtgttgcggggaacgctcgcgcggttgccagagaaagccccggacgtgacggatttgcgcgaccccaagcagcccgcccttccccctcccatccgtcattcccctgcgctctctttcctcacccttccccccgccaccgtgggttccagacttgggataagtaaacagcgggtggagcgaggcctacggacccaggccaggcgggagcatgctggggctctgggggcagcggctccccgcggcgtgggtcctgcttctgttgcctttcctgccgctgctgctgcttgcagcccccgcgccccaccgcgcgtcctacaagccggtcatcgtggtgcatgggctcttcgacagctcgtacagcttccgccacctgctggaatacatcaatgagacacaccccgggactgtggtgacagtgctcgatctcttcgatgggagagagagcttgcgacccctgtgggaacaggtgcaagggttccgagaggctgtggtccccatcatggcaaaggcccctcaaggggtgcatctcatctgctactcgcaggggggccttgtgtgccgggctctgctttctgtcatggatgatcacaacgtggattctttcatctccctctcctctccacagatgggacagtatggagacacggactacttgaagtggctgttccccacctccatgcggtctaacctctatcggatctgctatagcccctggggccaggaattctccatctgcaactactggcatgatccccaccacgatgacttgtacctcaatgccagcagcttcctggccctgatcaatggggaaagagaccatcccaatgccacagtatggcggaagaactttctgcgtgtgggccacctggtgctgattgggggccctgatgatggtgttattactccctggcagtccagcttctttggtttctatgatgcaaatgagaccgtcctggagatggaggagcaactggtttatctgcgggattcttttgggttgaagactctattggcccggggggccatagtgaggtgtccaatggccggtatctcccacacagcctggcactccaaccgtaccctttatgagacctgcattgaaccttggctctcctgaggatatattcaggggtccccaggaactcctcggtccagagaccaagtggtggccttggaaagcagatgtcaggctttggtgtgcctgtgaccacctcattgctcccatattatcccccatttttagtagagacggggttttagtagagacttggcctcccagaacccccttcctctgctcctccatgaatgacaattccaggcctcccctacctcatgtcctctcatttgggggattgctccgtgctgtccctttctctcaaggccgaagttgggaagtgagaaaccatgtttttaacttgtggctgcttttgctgctgctgctcctccgtatctggctgtatgggtggagaacccaccccctgcccaccacaggggtctccttccaggccactcaggacatttttagcttctctcctccccatgttcccttttttctctaaagtcccctgacatcagccctcccaactcctaagagggactacccatgagagtggggttctgaggctcccctatggggacagttccgttcttgaagtgtcagtgttggggaatatctgtggcctatgaggcccatctcaggtttggggatcccccagtccctatgatcagtgttggagtacccccctgggagagcctagtttctttgaggccccaggccctcttttaactacctttgaataggtgttatccctgtatttatggaaataaagttccatttcctcagtg

SEQ ID NO: 163476 - DNA, 954 bp, Homo sapiens
  Payload ID: 12200
  Gene Symbol: PPT2
  Gene Name: palmitoyl-protein thioesterase 2
  ENST ID: ENST00000416892
  CDS Start-End: 414-954
gactggtcgaaattacgcgggcatgagtcagcgcatccctacgcgccctccgccccttgagggtgggtcgcttatagggaggggagtagagtagggcaggagaaactgggccaggctgcacttagctcaaggggcctcgaggactctctgcgtctctggagacaagggcactacacgcacttcagaatgaagagttacttgggataagtaaacagcgggtggagcgaggcctacggacccaggccaggtgggagtctgcactcttcaaggggcctgggctgctgctcacgggtattaaagaactccgcgttgttcatggctgaggcgatgcattaggaagatcctggacctagagaacaagtcccccgaacgctgagttggaggcgggacttcgggtgcgcgttggcgggagcatgctggggctctgggggcagcggctccccgcggcgtgggtcctgcttctgttgcctttcctgccgctgctgctgcttgcagcccccgcgccccaccgcgcgtcctacaagccggtcatcgtggtgcatgggctcttcgacagctcgtacagcttccgccacctgctggaatacatcaatgagacacaccccgggactgtggtgacagtgctcgatctcttcgatgggagagagagcttgcgacccctgtgggaacaggtgcaagggttccgagaggctgtggtccccatcatggcaaaggcccctcaaggggtgcatctcatctgctactcgcaggggggccttgtgtgccgggctctgctttctgtcatggatgatcacaacgtggattctttcatctccctctcctctccacagatgggacagtatggagacacggactacttgaagtggctgttccccacctccatgcggtctaacctctatcggatctgctatagcccctggggccaggaattctccatctgcaactactggcatg

SEQ ID NO: 163477 - DNA, 633 bp, Homo sapiens
  Payload ID: 12200
  Gene Symbol: PPT2
  Gene Name: palmitoyl-protein thioesterase 2
  ENST ID: ENST00000436118
  CDS Start-End: 143-436
aagttaaaagtaggctattttgtgacacggacctggtgtgggagcgagaggaggtggcttgattgccgggcgtctgttccgagggaggagggtgttgccatctccctcacatgcccttatcacccctttctcaggcgggagcatgctggggctctgcgggcagcggctccccgcggcgtgggtcctgcttctgttgcctttcctgccgctgctgctgcttgcagcccccgcgccccaccgcgcgtcctacaagccggtcatcgtggtgcatgggctcttcgacagctcgtacagcttccgccacctgctggaatacatcaatgagggggccttgtgtgccgggctctgctttctgtcatggatgatcacaacgtggattctttcatctccctctcctctccacagatgggacagtatggagacacggactacttgaagtggctgttccccacctccatgcggtctaacctctatcggatctgctatagcccctggggccaggaattctccatctgcaactactggcatgatccccaccacgatgacttgtacctcaatgccagcagcttcctggccctgatcaatggggaaagagaccatcccaatgccacagtatggcggaagaactttctg

SEQ ID NO: 163478 - DNA, 396 bp, Homo sapiens; identical to SEQ ID NO: 163467
  Payload ID: 12200
  Gene Symbol: PPT2
  Gene Name: palmitoyl-protein thioesterase 2
  ENST ID: ENST00000441396
  CDS Start-End: 118-396

SEQ ID NO: 163479 - DNA, 722 bp, Homo sapiens; identical to SEQ ID NO: 163473
  Payload ID: 12200
  Gene Symbol: PPT2
  Gene Name: palmitoyl-protein thioesterase 2
  ENST ID: ENST00000431338
  CDS Start-End: 247-722

SEQ ID NO: 163480 - DNA, 1184 bp, Homo sapiens
  Payload ID: 12200
  Gene Symbol: PPT2
  Gene Name: palmitoyl-protein thioesterase 2
  ENST ID: ENST00000429189
  CDS Start-End: 475-1184
tcgaggactctctgcgtctctggagacaagggcactacacgcacttcagaatgaagagttcacctagggcgcaatggaatattccattgcccctcctgtcctgggtctgtgttgcggggaacgctcgcgcggttgccagagaaagccccggacgtgacggatttgcgcgaccccaagcagcccgcccttccccctcccatccgtcattcccctgcgctctctttcctcacccttccccccgccaccgtgggttccagacttgggataagtaaacagcgggtggagcgaggcctacggacccaggccaggtgggagtctgcactcttcaaggggcctgggctgctgctcacgggtattaaagaactccgcgttgttcatggctgaggcgatgcattaggaagatcctggacctagagaacaagtcccccgaacgctgagttggaggcgggacttcgggtgcgcgttggcgggagcatgctggggctctgggggcagcggctccccgcggcgtgggtcctgcttctgttgcctttcctgccgctgctgctgcttgcagcccccgcgccccaccgcgagtcctacaagccggtcatcgtggtgcatgggctcttcgacagctcgtacagcttccgccacctgctggaatacatcaatgagacacaccccgggactgtggtgacagtgctcgatctcttcgatgggagagagagcttgcgacccctgtgggaacaggtgcaagggttccgagaggctgtggtccccatcatggcaaaggcccctcaaggggtgcatctcatctgctactcgcaggggggccttgtgtgccgggctctgctttctgtcatggatgatcacaacgtggattctttcatctccctctcctctccacagatgggacagtatggagacacggactacttgaagtggctgttccccacctccatgcggtctaacctctatcggatctgctatagcccctggggccaggaattctccatctgcaactactggcatgatccccaccacgatgacttgtacctcaatgccagcagcttcctggccctgatcaatggggaaagagaccatcccaatgccacagtatggcggaagaactttctgcgtgtgggccacctggtgctgattgggggccctgatgatggtgttattactccctggcagtccag

SEQ ID NO: 163481 - DNA, 722 bp, Homo sapiens; identical to SEQ ID NO: 163473
  Payload ID: 12200
  Gene Symbol: PPT2
  Gene Name: palmitoyl-protein thioesterase 2
  ENST ID: ENST00000433658
  CDS Start-End: 247-722

SEQ ID NO: 163482 - DNA, 1759 bp, Homo sapiens; identical to SEQ ID NO: 163456
  Payload ID: 12200
  Gene Symbol: PPT2
  Gene Name: palmitoyl-protein thioesterase 2
  Uniprot ID: Q9UMR5
  ENST ID: ENST00000414356
  CDS Start-End: 105-1031

SEQ ID NO: 163483 - DNA, 954 bp, Homo sapiens
  Payload ID: 12200
  Gene Symbol: PPT2
  Gene Name: palmitoyl-protein thioesterase 2
  ENST ID: ENST00000414204
  CDS Start-End: 414-954
gactggtcgaaattacgcgggcatgagtcagcgcatccctacgcgccctccgccccttgagggtgggtcgcttatagggaggggagtagagtagggcaggagaaactgggccaggctgcacttagctcaaggggcctcgaggactctctgcgtctctggagacaagggcactacacgcacttcagaatgaagagttacttgggataagtaaacagcgggtggagcgaggcctacggacccaggccaggtgggagtctgcactcttcaaggggcctgggctgctgctcacgggtattaaagaactccgcgttgttcatggctgaggcgatgcattaggaagatcctggacctagagaacaagtcccccgaacgctgagttggaggcgggacttcgggtgcgcgttggcgggagcatgctggggctctgcgggcagcggctccccgcggcgtgggtcctgcttctgttgcctttcctgccgctgctgctgcttgcagcccccgcgccccaccgcgcgtcctacaagccggtcatcgtggtgcatgggctcttcgacagctcgtacagcttccgccacctgctggaatacatcaatgagacacaccccgggactgtggtgacagtgctcgatctcttcgatgggagagagagcttgcgacccctgtgggaacaggtgcaagggttccgagaggctgtggtccccatcatggcaaaggcccctcaaggggtgcatctcatctgctactcgcaggggggccttgtgtgccgggctctgctttctgtcatggatgatcacaacgtggattctttcatctccctctcctctccacagatgggacagtatggagacacggactacttgaagtggctgttccccacctccatgcggtctaacctctatcggatctgctatagcccctggggccaggaattctccatctgcaactactggcatg

SEQ ID NO: 163484 - DNA, 954 bp, Homo sapiens; identical to SEQ ID NO: 163476
  Payload ID: 12200
  Gene Symbol: PPT2
  Gene Name: palmitoyl-protein thioesterase 2
  ENST ID: ENST00000431414
  CDS Start-End: 414-954

SEQ ID NO: 163485 - DNA, 722 bp, Homo sapiens
  Payload ID: 12200
  Gene Symbol: PPT2
  Gene Name: palmitoyl-protein thioesterase 2
  ENST ID: ENST00000416489
  CDS Start-End: 247-722
acccttccccccgccaccgtgggttccagacttgggataagtaaacagcgggtggagcgaggcctacggacccaggccaggtgggagtctgcactcttcaaggggcctgggctgctgctcacgggtattaaagaactccgcgttgttcatggctgaggcgatgcattaggaagatcctggacctagagaacaagtcccccgaacgctgagttggaggcgggacttcgggtgcgcgttggcgggagcatgctggggctctgggggcagcggctccccgcggcgtgggtcctgcttctgttgcctttcctgccgctgctgctgcttgcagcccccgcgccccaccgcgagtcctacaagccggtcatcgtggtgcatgggctcttcgacagctcgtacagcttccgccacctgctggaatacatcaatgagatgggacagtatggagacacggactacttgaagtggctgttccccacctccatgcggtctaacctctatcggatctgctatagcccctggggccaggaattctccatctgcaactactggcatgatccccaccacgatgacttgtacctcaatgccagcagcttcctggccctgatcaatggggaaagagaccatcccaatgccacagtatggcggaagaactttctgcgtgtgggccacctggtgctgattgggggccctgatgatggtgttattactccctggcagtccag

SEQ ID NO: 163486 - DNA, 1754 bp, Homo sapiens; identical to SEQ ID NO: 163461
  Payload ID: 12200
  Gene Symbol: PPT2
  Gene Name: palmitoyl-protein thioesterase 2
  ENST ID: ENST00000445462
  CDS Start-End: 118-1026

SEQ ID NO: 163487 - DNA, 954 bp, Homo sapiens
  Payload ID: 12200
  Gene Symbol: PPT2
  Gene Name: palmitoyl-protein thioesterase 2
  ENST ID: ENST00000458042
  CDS Start-End: 414-954
gactggtcgaaattacgcgggcatgagtcagcgcatccctacgcgccctccgccccttgagggtgggtcgcttatagggaggggagtagagtagggcaggagaaactgggccaggctgcacttagctcaaggggcctcgaggactctctgcgtctctggagacaagggcactacacgcacttcagaatgaagagttacttgggataagtaaacagcgggtggagcgaggcctacggacccaggccaggtgggagtctgcactcttcaaggggcctgggctgctgctcacgggtattaaagaactccgcgttgttcatggctgaggcgatgcattaggaagatcctggacctagagaacaagtcccccgaacgctgagttggaggcgggacttcgggtgcgcgttggcgggagcatgctggggctctgggggcagcggctccccgcggcgtgggtcctgcttctgttgcctttcctgccgctgctgctgcttgcagcccccgcgccccaccgcgagtcctacaagccggtcatcgtggtgcatgggctcttcgacagctcgtacagcttccgccacctgctggaatacatcaatgagacacaccccgggactgtggtgacagtgctcgatctcttcgatgggagagagagcttgcgacccctgtgggaacaggtgcaagggttccgagaggctgtggtccccatcatggcaaaggcccctcaaggggtgcatctcatctgctactcgcaggggggccttgtgtgccgggctctgctttctgtcatggatgatcacaacgtggattctttcatctccctctcctctccacagatgggacagtatggagacacggactacttgaagtggctgttccccacctccatgcggtctaacctctatcggatctgctatagcccctggggccaggaattctccatctgcaactactggcatg

SEQ ID NO: 163488 - DNA, 954 bp, Homo sapiens; identical to SEQ ID NO: 163476
  Payload ID: 12200
  Gene Symbol: PPT2
  Gene Name: palmitoyl-protein thioesterase 2
  ENST ID: ENST00000419970
  CDS Start-End: 414-954

SEQ ID NO: 163489 - DNA, 954 bp, Homo sapiens; identical to SEQ ID NO: 163487
  Payload ID: 12200
  Gene Symbol: PPT2
  Gene Name: palmitoyl-protein thioesterase 2
  ENST ID: ENST00000458119
  CDS Start-End: 414-954

SEQ ID NO: 163490 - DNA, 1945 bp, Homo sapiens; identical to SEQ ID NO: 163462
  Payload ID: 12200
  Gene Symbol: PPT2
  Gene Name: palmitoyl-protein thioesterase 2
  ENST ID: ENST00000440533
  CDS Start-End: 309-1217

SEQ ID NO: 163491 - DNA, 730 bp, Homo sapiens; identical to SEQ ID NO: 163464
  Payload ID: 12200
  Gene Symbol: PPT2
  Gene Name: palmitoyl-protein thioesterase 2
  ENST ID: ENST00000451460
  CDS Start-End: 130-730

SEQ ID NO: 163492 - DNA, 396 bp, Homo sapiens; identical to SEQ ID NO: 163474
  Payload ID: 12200
  Gene Symbol: PPT2
  Gene Name: palmitoyl-protein thioesterase 2
  ENST ID: ENST00000426390
  CDS Start-End: 118-396

SEQ ID NO: 163493 - DNA, 730 bp, Homo sapiens; identical to SEQ ID NO: 163464
  Payload ID: 12200
  Gene Symbol: PPT2
  Gene Name: palmitoyl-protein thioesterase 2
  ENST ID: ENST00000442463
  CDS Start-End: 130-730

SEQ ID NO: 163494 - DNA, 1759 bp, Homo sapiens; identical to SEQ ID NO: 163456
  Payload ID: 12200
  Gene Symbol: PPT2
  Gene Name: palmitoyl-protein thioesterase 2
  Uniprot ID: Q9UMR5
  ENST ID: ENST00000423347
  CDS Start-End: 105-1031

SEQ ID NO: 163495 - DNA, 1945 bp, Homo sapiens; identical to SEQ ID NO: 163462
  Payload ID: 12200
  Gene Symbol: PPT2
  Gene Name: palmitoyl-protein thioesterase 2
  ENST ID: ENST00000456497
  CDS Start-End: 309-1217

SEQ ID NO: 163496 - DNA, 2128 bp, Homo sapiens
  Payload ID: 12200
  Gene Symbol: PPT2
  Gene Name: palmitoyl-protein thioesterase 2
  ENST ID: ENST00000422988
  CDS Start-End: 492-1400
acttagctcaaggggcctcgaggactctctgcgtctctggagacaagggcactacacgcacttcagaatgaagagttcacctagggcgcaatggaatattccattgcccctcctgtcctgggtctgtgttgcggggaacgctcgcgcggttgccagagaaagccccggacgtgacggatttgcgcgaccccaagcagcccgcccttccccctcccatccgtcattcccctgcgctctctttcctcacccttccccccgccaccgtgggttccagacttgggataagtaaacagcgggtggagcgaggcctacggacccaggccaggtgggagtctgcactcttcaaggggcctgggctgctgctcacgggtattaaagaactccgcgttgttcatggctgaggcgatgcattaggaagatcctggacctagagaacaagtcccccgaacgctgagttggaggcgggacttcgggtgcgcgttggcgggagcatgctggggctctgggggcagcggctccccgcggcgtgggtcctgcttctgttgcctttcctgccgctgctgctgcttgcagcccccgcgccccaccgcgcgtcctacaagccggtcatcgtggtgcatgggctcttcgacagctcgtacagcttccgccacctgctggaatacatcaatgagacacaccccgggactgtggtgacagtgctcgatctcttcgatgggagagagagcttgcgacccctgtgggaacaggtgcaagggttccgagaggctgtggtccccatcatggcaaaggcccctcaaggggtgcatctcatctgctactcgcaggggggccttgtgtgccgggctctgctttctgtcatggatgatcacaacgtggattctttcatctccctctcctctccacagatgggacagtatggagacacggactacttgaagtggctgttccccacctccatgcggtctaacctctatcggatctgctatagcccctggggccaggaattctccatctgcaactactggcatgatccccaccacgatgacttgtacctcaatgccagcagcttcctggccctgatcaatggggaaagagaccatcccaatgccacagtatggcggaagaactttctgcgtgtgggccacctggtgctgattgggggccctgatgatggtgttattactccctggcagtccagcttctttggtttctatgatgcaaatgagaccgtcctggagatggaggagcaactggtttatctgcgggattcttttgggttgaagactctattggcccggggggccatagtgaggtgtccaatggccggtatctcccacacagcctggcactccaaccgtaccctttatgagacctgcattgaaccttggctctcctgaggatatattcaggggtccccaggaactcctcggtccagagaccaagtggtggccttggaaagcagatgtcaggctttggtgtgcctgtgaccacctcattgctcccatattatcccccatttttagtagagacggggttttagtagagacttggcctcccagaacccccttcctctgctcctccatgaatgacaattccaggcctcccctacctcatgtcctctcatttgggggattgctccgtgctgtccctttctctcaaggccgaagttgggaagtgagaaaccatgtttttaacttgtggctgcttttgctgctgctgctcctccgtatctggctgtatgggtggagaacccaccccctgcccaccacaggggtctccttccaggccactcaggacatttttagcttctctcctccccatgttcccttttttctctaaagtcccctgacatcagccctcccaactcctaagagggactacccatgagagtggggttctgaggctcccctatggggacagttccgttcttgaagtgtcagtgttggggaatatctgtggcctatgaggcccatctcaggtttggggatcccccagtccctatgatcagtgttggagtacccccctgggagagcctagtttctttgaggccccaggccctcttttaactacctttgaataggtgttatccctgtatttatggaaataaagttccatttcctcagtg

SEQ ID NO: 163497 - DNA, 730 bp, Homo sapiens
  Payload ID: 12200
  Gene Symbol: PPT2
  Gene Name: palmitoyl-protein thioesterase 2
  Uniprot ID: Q9UMR5
  ENST ID: ENST00000415972
  CDS Start-End: 130-730
gctattttgtgacacggacctggtgtgggagcgagaggaggtggcttgattgccgggcgtctgttccgagggaggagggtgttgccatctccctcacatgcccttatcacccctttctcaggcgggagcatgctggggctctgggggcagcggctccccgcggcgtgggtcctgcttctgttgcctttcctgccgctgctgctgcttgcagcccccgcgccccaccgcgagtcctacaagccggtcatcgtggtgcatgggctcttcgacagctcgtacagcttccgccacctgctggaatacatcaatgagacacaccccgggactgtggtgacagtgctcgatctcttcgatgggagagagagcttgcgacccctgtgggaacaggtgcaagggttccgagaggctgtggtccccatcatggcaaaggcccctcaaggggtgcatctcatctgctactcgcaggggggccttgtgtgccgggctctgctttctgtcatggatgatcacaacgtggattctttcatctccctctcctctccacagatgggacagtatggagacacggactacttgaagtggctgttccccacctccatgcggtctaacctctatcggatctgctatagcccctggggccaggaattctccatctgcaactactggcatgatccccaccacgatgacttgtacctcaatgccagcagcttcctggccctgatcaatgggg

SEQ ID NO: 163498 - DNA, 2111 bp, Homo sapiens
  Payload ID: 12200
  Gene Symbol: PPT2
  Gene Name: palmitoyl-protein thioesterase 2
  ENST ID: ENST00000452562
  CDS Start-End: 475-1383
tcgaggactctctgcgtctctggagacaagggcactacacgcacttcagaatgaagagttcacctagggcgcaatggaatattccattgcccctcctgtcctgggtctgtgttgcggggaacgctcgcgcggttgccagagaaagccccggacgtgacggatttgcgcgaccccaagcagcccgcccttccccctcccatccgtcattcccctgcgttctctttcctcacccttccccccgccaccgtgggttccagacttgggataagtaaacagcgggtggagcgaggcctacggacccaggccaggtgggagtctgcactcttcaaggggcctgggctgctgctcacgggtattaaagaactccgcgttgttcatggctgaggcgatgcattaggaagatcctggacctagagaacaagtcccccgaacgctgagttggaggcgggacttcgggtgcgcgttggcgggagcatgctggggctctgggggcagcggctccccgcggcgtgggtcctgcttctgttgcctttcctgccgctgctgctgcttgcagcccccgcgccccaccgcgcgtcctacaagccggtcatcgtggtgcatgggctcttcgacagctcgtacagcttccgccacctgctggaatacatcaatgagacacaccccgggactgtggtgacagtgctcgatctcttcgatgggagagagagcttgcgacccctgtgggaacaggtgcaagggttccgagaggctgtggtccccatcatggcaaaggcccctcaaggggtgcatctcatctgctactcgcaggggggccttgtgtgccgggctctgctttctgtcatggatgatcacaacgtggattctttcatctccctctcctctccacagatgggacagtatggagacacggactacttgaagtggctgttccccacctccatgcggtctaacctctatcggatctgctatagcccctggggccaggaattctccatctgcaactactggcatgatccccaccacgatgacttgtacctcaatgccagcagcttcctggccctgatcaatggggaaagagaccatcccaatgccacagtatggcggaagaactttctgcgtgtgggccacctggtgctgattgggggccctgatgatggtgttattactccctggcagtccagcttctttggtttctatgatgcaaatgagaccgtcctggagatggaggagcaactggtttatctgcgggattcttttgggttgaagactctattggcccggggggccatagtgaggtgtccaatggccggtatctcccacacagcctggcactccaaccgtaccctttatgagacctgcattgaaccttggctctcctgaggatatattcaggggtccccaggaactcctcggtccagagaccaagtggtggccttggaaagcagatgtcaggctttggtgtgcctgtgaccacctcattgctcccatattatcccccatttttagtagagacggggttttagtagagacttggcctcccagaacccccttcctctgctcctccatgaatgacaattccaggcctcccctacctcatgtcctctcatttgggggattgctccgtgctgtccctttctctcaaggccgaagttgggaagtgagaaaccatgtttttaacttgtggctgcttttgctgctgctgctcctccgtatctggctgtatgggtggagaacccaccccctgcccaccacaggggtctccttccaggccactcaggacatttttagcttctctcctccccatgttcccttttttctctaaagtcccctgacatcagccctcccaactcctaagagggactacccatgagagtggggttctgaggctcccctatggggacagttccgttcttgaagtgtcagtgttggggaatatctgtggcctatgaggcccatctcaggtttggggatcccccagtccctatgatcagtgttggagtacccccctgggagagcctagtttctttgaggccccaggccctcttttaactacctttgaataggtgttatccctgtatttatggaaataaagttccatttcctcagtg

SEQ ID NO: 163499 - DNA, 722 bp, Homo sapiens; identical to SEQ ID NO: 163473
  Payload ID: 12200
  Gene Symbol: PPT2
  Gene Name: palmitoyl-protein thioesterase 2
  ENST ID: ENST00000418283
  CDS Start-End: 247-722

SEQ ID NO: 163500 - DNA, 954 bp, Homo sapiens; identical to SEQ ID NO: 163476
  Payload ID: 12200
  Gene Symbol: PPT2
  Gene Name: palmitoyl-protein thioesterase 2
  ENST ID: ENST00000425475
  CDS Start-End: 414-954

SEQ ID NO: 163501 - DNA, 730 bp, Homo sapiens; identical to SEQ ID NO: 163464
  Payload ID: 12200
  Gene Symbol: PPT2
  Gene Name: palmitoyl-protein thioesterase 2
  ENST ID: ENST00000427642
  CDS Start-End: 130-730

SEQ ID NO: 163502 - DNA, 722 bp, Homo sapiens
  Payload ID: 12200
  Gene Symbol: PPT2
  Gene Name: palmitoyl-protein thioesterase 2
  ENST ID: ENST00000424499
  CDS Start-End: 247-722
acccttccccccgccaccgtgggttccagacttgggataagtaaacagcgggtggagcgaggcctacggacccaggccaggtgggagtctgcactcttcaaggggcctgggctgctgctcacgggtattaaagaactccgcgttgttcatggctgaggcgatgcattaggaagatcctggacctagagaacaagtcccccgaacgctgagttggaggcgggacttcgggtgcgcgttggcgggagcatgctggggctctgcgggcagcggctccccgcggcgtgggtcctgcttctgttgcctttcctgccgctgctgctgcttgcagcccccgcgccccaccgcgcgtcctacaagccggtcatcgtggtgcatgggctcttcgacagctcgtacagcttccgccacctgctggaatacatcaatgagatgggacagtatggagacacggactacttgaagtggctgttccccacctccatgcggtctaacctctatcggatctgctatagcccctggggccaggaattctccatctgcaactactggcatgatccccaccacgatgacttgtacctcaatgccagcagcttcctggccctgatcaatggggaaagagaccatcccaatgccacagtatggcggaagaactttctgcgtgtgggccacctggtgctgattgggggccctgatgatggtgttattactccctggcagtccag

SEQ ID NO: 163503 - DNA, 730 bp, Homo sapiens; identical to SEQ ID NO: 163497
  Payload ID: 12200
  Gene Symbol: PPT2
  Gene Name: palmitoyl-protein thioesterase 2
  Uniprot ID: Q9UMR5
  ENST ID: ENST00000433748
  CDS Start-End: 130-730

SEQ ID NO: 163504 - DNA, 722 bp, Homo sapiens; identical to SEQ ID NO: 163473
  Payload ID: 12200
  Gene Symbol: PPT2
  Gene Name: palmitoyl-protein thioesterase 2
  ENST ID: ENST00000443298
  CDS Start-End: 247-722

SEQ ID NO: 163505 - DNA, 1945 bp, Homo sapiens; identical to SEQ ID NO: 163462
  Payload ID: 12200
  Gene Symbol: PPT2
  Gene Name: palmitoyl-protein thioesterase 2
  ENST ID: ENST00000424353
  CDS Start-End: 309-1217

SEQ ID NO: 163506 - DNA, 1754 bp, Homo sapiens; identical to SEQ ID NO: 163461
  Payload ID: 12200
  Gene Symbol: PPT2
  Gene Name: palmitoyl-protein thioesterase 2
  ENST ID: ENST00000452304
  CDS Start-End: 118-1026

SEQ ID NO: 163507 - DNA, 954 bp, Homo sapiens; identical to SEQ ID NO: 163476
  Payload ID: 12200
  Gene Symbol: PPT2
  Gene Name: palmitoyl-protein thioesterase 2
  ENST ID: ENST00000447703
  CDS Start-End: 414-954

SEQ ID NO: 163508 - DNA, 1945 bp, Homo sapiens
  Payload ID: 12200
  Gene Symbol: PPT2
  Gene Name: palmitoyl-protein thioesterase 2
  ENST ID: ENST00000420778
  CDS Start-End: 309-1217
acggatttgcgcgaccccaagcagcccgcccttccccctcccatccgtcattcccctgcgttctctttcctcacccttccccccgccaccgtgggttccagacttgggataagtaaacagcgggtggagcgaggcctacggacccaggccaggtgggagtctgcactcttcaaggggcctgggctgctgctcacgggtattaaagaactccgcgttgttcatggctgaggcgatgcattaggaagatcctggacctagagaacaagtcccccgaacgctgagttggaggcgggacttcgggcgggagcatgctggggctctgggggcagcggctccccgcggcgtgggtcctgcttctgttgcctttcctgccgctgctgctgcttgcagcccccgcgccccaccgcgcgtcctacaagccggtcatcgtggtgcatgggctcttcgacagctcgtacagcttccgccacctgctggaatacatcaatgagacacaccccgggactgtggtgacagtgctcgatctcttcgatgggagagagagcttgcgacccctgtgggaacaggtgcaagggttccgagaggctgtggtccccatcatggcaaaggcccctcaaggggtgcatctcatctgctactcgcaggggggccttgtgtgccgggctctgctttctgtcatggatgatcacaacgtggattctttcatctccctctcctctccacagatgggacagtatggagacacggactacttgaagtggctgttccccacctccatgcggtctaacctctatcggatctgctatagcccctggggccaggaattctccatctgcaactactggcatgatccccaccacgatgacttgtacctcaatgccagcagcttcctggccctgatcaatggggaaagagaccatcccaatgccacagtatggcggaagaactttctgcgtgtgggccacctggtgctgattgggggccctgatgatggtgttattactccctggcagtccagcttctttggtttctatgatgcaaatgagaccgtcctggagatggaggagcaactggtttatctgcgggattcttttgggttgaagactctattggcccggggggccatagtgaggtgtccaatggccggtatctcccacacagcctggcactccaaccgtaccctttatgagacctgcattgaaccttggctctcctgaggatatattcaggggtccccaggaactcctcggtccagagaccaagtggtggccttggaaagcagatgtcaggctttggtgtgcctgtgaccacctcattgctcccatattatcccccatttttagtagagacggggttttagtagagacttggcctcccagaacccccttcctctgctcctccatgaatgacaattccaggcctcccctacctcatgtcctctcatttgggggattgctccgtgctgtccctttctctcaaggccgaagttgggaagtgagaaaccatgtttttaacttgtggctgcttttgctgctgctgctcctccgtatctggctgtatgggtggagaacccaccccctgcccaccacaggggtctccttccaggccactcaggacatttttagcttctctcctccccatgttcccttttttctctaaagtcccctgacatcagccctcccaactcctaagagggactacccatgagagtggggttctgaggctcccctatggggacagttccgttcttgaagtgtcagtgttggggaatatctgtggcctatgaggcccatctcaggtttggggatcccccagtccctatgatcagtgttggagtacccccctgggagagcctagtttctttgaggccccaggccctcttttaactacctttgaataggtgttatccctgtatttatggaaataaagttccatttcctcagtg

SEQ ID NO: 163509 - DNA, 722 bp, Homo sapiens; identical to SEQ ID NO: 163485
  Payload ID: 12200
  Gene Symbol: PPT2
  Gene Name: palmitoyl-protein thioesterase 2
  ENST ID: ENST00000446563
  CDS Start-End: 247-722

SEQ ID NO: 163510 - DNA, 396 bp, Homo sapiens; identical to SEQ ID NO: 163474
  Payload ID: 12200
  Gene Symbol: PPT2
  Gene Name: palmitoyl-protein thioesterase 2
  ENST ID: ENST00000413836
  CDS Start-End: 118-396

SEQ ID NO: 163511 - DNA, 396 bp, Homo sapiens; identical to SEQ ID NO: 163474
  Payload ID: 12200
  Gene Symbol: PPT2
  Gene Name: palmitoyl-protein thioesterase 2
  ENST ID: ENST00000424311
  CDS Start-End: 118-396

SEQ ID NO: 163512 - DNA, 832 bp, Homo sapiens
  Payload ID: 12200
  Gene Symbol: PPT2
  Gene Name: palmitoyl-protein thioesterase 2
  ENST ID: ENST00000427896
  CDS Start-End: 105-832
ggagtagagtagggcaggagaaactgggccaggctgcacttagctcaaggggcctcgaggactctctgcgtctctggagacaagggcactacacgcacttcagaatgaagagttgcgggagcatgctggggctctgggggcagcggctccccgcggcgtgggtcctgcttctgttgcctttcctgccgctgctgctgcttgcagcccccgcgccccaccgcgagtcctacaagccggtcatcgtggtgcatgggctcttcgacagctcgtacagcttccgccacctgctggaatacatcaatgagacacaccccgggactgtggtgacagtgctcgatctcttcgatgggagagagagcttgcgacccctgtgggaacaggtgcaagggttccgagaggctgtggtccccatcatggcaaaggcccctcaaggggtgcatctcatctgctactcgcaggggggccttgtgtgccgggctctgctttctgtcatggatgatcacaacgtggattctttcatctccctctcctctccacagatgggacagtatggagacacggactacttgaagtggctgttccccacctccatgcggtctaacctctatcggatctgctatagcccctggggccaggaattctccatctgcaactactggcatgatccccaccacgatgacttgtacctcaatgccagcagcttcctggccctgatcaatggggaaagagaccatcccaatgccacagtatggcggaagaactttctgcgtgtgggccacctggtgctgattgggggccctgatgatggtgttattactccctggcagtccag

SEQ ID NO: 163513 - DNA, 1759 bp, Homo sapiens; identical to SEQ ID NO: 163456
  Payload ID: 12200
  Gene Symbol: PPT2
  Gene Name: palmitoyl-protein thioesterase 2
  Uniprot ID: Q9UMR5
  ENST ID: ENST00000412651
  CDS Start-End: 105-1031

SEQ ID NO: 163514 - DNA, 1010 bp, Homo sapiens; identical to SEQ ID NO: 124907
  Payload ID: 12200
  Gene Symbol: PPT2
  Gene Name: palmitoyl-protein thioesterase 2
  ENST ID: ENST00000483803
  CDS Start-End: 1-383

SEQ ID NO: 163515 - DNA, 4181 bp, Homo sapiens
  Payload ID: 12200
  Gene Symbol: PPT2
  Gene Name: palmitoyl-protein thioesterase 2
  Uniprot ID: Q9UMR5
  ENST ID: ENST00000483565
  CDS Start-End: 192-1097
agcgaggcctacggacccaggccaggtgggagtctgcactcttcaaggggcctgggctgctgctcacgggtattaaagaactccgcgttgttcatggctgaggcgatgcattaggaagatcctggacctagagaacaagtcccccgaacgctgagttggaggcgggacttcgggtgcgcgttggcgggagcatgctggggctctgggggcagcggctccccgcggcgtgggtcctgcttctgttgcctttcctgccgctgctgctgcttgcagcccccgcgccccaccgcgcgtcctacaagccggtcatcgtggtgcatgggctcttcgacagctcgtacagcttccgccacctgctggaatacatcaatgagacacaccccgggactgtggtgacagtgctcgatctcttcgatgggagagagagcttgcgacccctgtgggaacaggtgcaagggttccgagaggctgtggtccccatcatggcaaaggcccctcaaggggtgcatctcatctgctactcgcaggggggccttgtgtgccgggctctgctttctgtcatggatgatcacaacgtggattctttcatctccctctcctctccacagatgggacagtatggagacacggactacttgaagtggctgttccccacctccatgcggtctaacctctatcggatctgctatagcccctggggccaggaattctccatctgcaactactggcatgatccccaccacgatgacttgtacctcaatgccagcagcttcctggccctgatcaatggggaaagagaccatcccaatgccacagtatggcggaagaactttctgcgtgtgggccacctggtgctgattgggggccctgatgatggtgttattactccctggcagtccagcttctttggtttctatgatgcaaatgagaccgtcctggagatggaggagcaactgcctgccaggcccacccaccagtctgagctgcttctgctgaggctggtctgcttgaagcctcccaggagaaagaagccagcctgtagggtccagcgtcaaagcgaatcatggggtccagggctgagctgtgcactctcttaggcggattctccttcctcctgctactgataccagtcagggagtctgctccaagcagacactggtggtcccgctccactacaacgagtcctacagccaaccagtgtacaagccctacctgaccttgtgcgctgggaggcgcatctgcagcacttacaggaccatgtaccgcgttatgtggcgggaggtgaggcgggaggttcagcagacccatgcagtgtgctgccagggctggaagaagcggcacccgggggcgctcacctgtgaagccatctgcgccaagccttgcctgaacggaggcgtctgcgttaggcctgaccagtgcgagtgcgcccccggctggggagggaagcactgtcatgtgggaccagcatcaccctctgctcgcaccattgttttaatacggcaggcagcttcacctgcggctgcccccatgacctagtgctaggcgtggacgggcgcacctgcatggaggggtccccagagcccccaaccagtgccagcatactcagcgtggccgttcgggaggcagaaaaagatgagcgcgctctgaagcaggagattcacgagctgcgagggcgcctggagcggctggagcagtgggccggtcaggctggggcctgggtcagagcggtgctgcccgtgccgcctgaagagctgcagccagaacaggtggctgagctgtggggccggggtgaccggatcgaatctctcagcgaccaggtgctgctgctggaggagaggctaggtgcctgctcctgtgaggacaacagcctgggcctcggcgtcaatcatcgataagaagcctctacagcacccctgccccctaatttatacagaaaccggacccactaatcctctgggattggccgactgtgagctgcagataaggctatcagccaccaaagagcaatgaacaatggaaacttcagagagctgaagaaagggggaggcctgtgttcttggcctgcccctgagtcttctggctgggggcaggttgcctgggcaagaactgcttcttcaattccttaacaaatgcaaccaccaacacccagatctctctctctctttattttcagtttttttgctgttatccagataattaataaaaaccaaccacgcaaaactgggtcccaccctctccttttgctcccagcctacctccccagttgtgggaacaggtctggagtgagaggcagggagtggctaatgccaccaggaagaaatgaaaactggctcagagagggggaagcctcaacagaaaaagaaataaattaaaagccctcctatcccctccagccagggttcgttcctttccccaactccccagggggcagaagtgagtgcagcacctgatgtctgcttcttccccttgtgtctggcttcttcagatagtcaccaccaccccggccatcagtggagatttcccggaaaacagtgagcatggagtgccggactctgtcagccagagctgggacgtcatctggtgtcagcccttccgtgggcactgggggcagcacccgcacctgacattgtcctggggcaaggggagcaccatcatggcctgtccacccaggtctttgcccacagggatgtcctcccagcctctccggacacaccctaccccagaactgctcaaagccctcacccgaggtgaagcgacgctccttcttgcagtagaagtcttggatgactcacgtcctgggtgagcagggtctgggcgacctcagacatgacactgatggcatcccccgtgcgcttccggtcgatgaagatgactcctgccagccagcaggccagcccggcagagccagcccacagtagctcgcgcttggcaatgggcacacagcggcctggcagtacctccatcatcccttgggcagggtgggagtgggtgaggatcggggtggaggcagagtgtcacagaaggcaacccacctcacccagctcatcaccctctggtagggactggaggtgaaggaggagactaggcagggaggggggccccaagtgaaggaaagggtgaccaaaagtatatgtaccctgcttatgagggcagttctacccagggaatgaaggcctgagtgggaggcaagggggcaatgtcccagaggaaggggaattgaggatctctaggagaagatattctagggaaggtttcaggaggggaggcatggctgggggaggtgtgccctgtggtggggtctcaccaagcagatcgagagagctctggtggttggagacaacaacatagggctgcgagggagggaagtggtgagcccctcgcacctccactcggatcccgtacaggtatttgatgtggagcagcattagacgcaagatcctgtggggtcatggcaaggggtcccagtgggatccattgatgtccatctgcatgcctcagctccccccaccttactgtctttctgaccacctttgcagtcctctccccattccctgtctctggtctctctcagtcttttctacacacaccatgcccccttcccccaatccactactcactttgtacccttaggttccctcattgcccaagaccccttgcccctcacttcatgttctcgacgttgcgtcctcgcacggcacacacagggatggcgagcacagccaggaagaggatccagccattgtagaaggccatcttgaagaagtacttggcactggggctgcagaaccacagggtgggcagcaggaagagcagcagcaggaagagcagcagcagcagcatccatgcccctggccacaaatccattctggccacctgcaggggatggggcaagggacaatcagcctggtttctggaggagagtggggctccggatatattcagacaagagacacaagacacagacatctacaattcacagatacctgataataaatgacaacaagaataatagctaacacttgtagctggtaagggtcttataatggtctatacttgtgctgtccgagaaagtagccaccacctacatgtggctacttgaaatgcagctagtctgaactgagatgtgctggaaatgtaaaatacacatcagatttcaaagactgaataaaaaacaaaatgtg

SEQ ID NO: 163516 - DNA, 4178 bp, Homo sapiens
  Payload ID: 12200
  Gene Symbol: PPT2
  Gene Name: palmitoyl-protein thioesterase 2
  Uniprot ID: Q9UMR5
  ENST ID: ENST00000476214
  CDS Start-End: 192-1097
agcgaggcctacggacccaggccaggtgggagtctgcactcttcaaggggcctgggctgctgctcacgggtattaaagaactccgcgttgttcatggctgaggcgatgcattaggaagatcctggacctagagaacaagtcccccgaacgctgagttggaggcgggacttcgggtgcgcgttggcgggagcatgctggggctctgggggcagcggctccccgcggcgtgggtcctgcttctgttgcctttcctgccgctgctgctgcttgcagcccccgcgccccaccgcgcgtcctacaagccggtcatcgtggtgcatgggctcttcgacagctcgtacagcttccgccacctgctggaatacatcaatgagacacaccccgggactgtggtgacagtgctcgatctcttcgatgggagagagagcttgcgacccctgtgggaacaggtgcaagggttccgagaggctgtggtccccatcatggcaaaggcccctcaaggggtgcatctcatctgctactcgcaggggggccttgtgtgccgggctctgctttctgtcatggatgatcacaacgtggattctttcatctccctctcctctccacagatgggacagtatggagacacggactacttgaagtggctgttccccacctccatgcggtctaacctctatcggatctgctatagcccctggggccaggaattctccatctgcaactactggcatgatccccaccacgatgacttgtacctcaatgccagcagcttcctggccctgatcaatggggaaagagaccatcccaatgccacagtatggcggaagaactttctgcgtgtgggccacctggtgctgattgggggccctgatgatggtgttattactccctggcagtccagcttctttggtttctatgatgcaaatgagaccgtcctggagatggaggagcaactgcctgccaggcccacccaccagtctgagctgcttctgctgaggctggtctgcttgaagcctcccaggagaaagaagccagcctgtagggtccagcgtcaaagcgaatcatggggtccagggctgagctgtgcactctcttaggcggattctccttcctcctgctactgataccagtcagggagtctgctccaagcagacactggtggtcccgctccactacaacgagtcctacagccaaccagtgtacaagccctacctgaccttgtgcgctgggaggcgcatctgcagcacttacaggaccatgtaccgcgttatgtggcgggaggtgaggcgggaggttcagcagacccatgcagtgtgctgccagggctggaagaagcggcacccgggggcgctcacctgtgaagccatctgcgccaagccttgcctgaacggaggcgtctgcgttaggcctgaccagtgcgagtgcgcccccggctggggagggaagcactgtcatgtgggaccagcatcaccctctgctcgcaccattgttttaatacggcaggcagcttcacctgcggctgcccccatgacctagtgctaggcgtggacgggcgcacctgcatggaggggtccccagagcccccaaccagtgccagcatactcagcgtggccgttcgggaggcggaaaaagatgagcgcgctctgaagcaggagattcacgagctgcgagggcgcctggagcggctggagcagtgggccggtcaggctggggcctgggtcagagcggtgctgcccgtgccgcctgaagagctgcagccagaacaggtggctgagctgtggggccggggtgaccggatcgaatctctcagcgaccaggtgctgctgctggaggagaggctaggtgcctgctcctgtgaggacaacagcctgggcctcggcgtcaatcatcgataagaagcctctacagcacccctgccccctaatttatacagaaaccggacccactaatcctctgggattggccgactgtgagctgcagataaggctatcagccaccaaagagcaatgaacaatggaaacttcagagagctgaagaaagggggaggcctgtgttcttggcctgcccctgagtcttctggctgggggcaggttgcctgggcaagaactgcttcaattccttaacaaatgcaaccaccaacacccagatctctctctctctttattttcagtttttttgctgttatccagataattaataaaaaccaaccacgcaaaactgggtcccaccctctccttttgctcccagcctacctccccagttgtgggaacaggtctggagtgagaggcagggagtggctaatgccaccaggaagaaatgaaaactggctcagagagggggaagcctcaacagaaaaagaaataaattaaaagccctcctatcccctccagccagggttcgttcctttccccaactccccagggggcagaagtgagtgcagcacctgatgtctgcttcttccccttgtgtctggcttcttcagatagtcaccaccaccccggccatcagtggagatttcccggaaaacagtgagcatggagtgccggactctgtcagccagagctgggacgtcatctggtgtcagcccttccgtgggcactgggggcagcacccgcacctgacattgtcctggggcaaggggagcaccatcatggcctgtccacccaggtctttgcccacagggatgtcctcccagcctctccggacacaccctaccccagaactgctcaaagccctcacccgaggtgaagcgacgctccttcttgcagtagaagtcttggatgactcacgtcctgggtgagcagggtctgggcgacctcagacatgacactgatggcatcccccgtgcgcttccggtcgatgaagatgactcctgccagccagcaggccagcccggcagagccagcccacagtagctcgcgcttggcaatgggcacacagcggcctggcagtacctccatcatcccttgggcagggtgggagtgggtgaggatcggggtggaggcagagtgtcacagaaggcaacccacctcacccagctcatcaccctctggtagggactggaggtgaaggaggagactaggcagggaggggggccccaagtgaaggaaagggtgaccaaaagtatatgtaccctgcttatgagggcagttctacccagggaatgaaggcctgagtgggaggcaagggggcaatgtcccagaggaaggggaattgaggatctctaggagaagatattctagggaaggtttcaggaggggaggcatggctgggggaggtgtgccctgtggtggggtctcaccaagcagatcgagagagctctggtggttggagacaacaacatagggctgcgagggagggaagtggtgagcccctcgcacctccactcggatcccgtacaggtatttgatgtggagcagcattagacgcaagatcctgtggggtcatggcaaggggtcccagtgggatccattgatgtccatctgcatgcctcagctccccccaccttactgtctttctgaccacctttgcagtcctctccccattccctgtctctggtctctctcagtcttttctacacacaccatgcccccttcccccaatccactactcactttgtacccttaggttccctcattgcccaagaccccttgcccctcacttcatgttctcgacgttgcgtcctcgcacggcacacacagggatggcgagcacagccaggaagaggatccagccattgtagaaggccatcttgaagaagtacttggcactggggctgcagaaccacagggtgggcagcaggaagagcagcagcaggaagagcagcagcagcagcatccatgcccctggccacaaatccattctggccacctgcaggggatggggcaagggacaatcagcctggtttctggaggagagtggggctccggatatattcagacaagagacacaagacacagacatctacaattcacagatacctgataataaatgacaacaagaataatagctaacacttgtagctggtaagggtcttataatggtctatacttgtgctgtccgagaaagtagccaccacctacatgtggctacttgaaatgcagctagtctgaactgagatgtgctggaaatgtaaaatacacatcagatttcaaagactgaataaaaaacaaaatgtg

SEQ ID NO: 163517 - DNA, 4181 bp, Homo sapiens
  Payload ID: 12200
  Gene Symbol: PPT2
  Gene Name: palmitoyl-protein thioesterase 2
  Uniprot ID: Q9UMR5
  ENST ID: ENST00000480383
  CDS Start-End: 192-1097
agcgaggcctacggacccaggccaggtgggagtctgcactcttcaaggggcctgggctgctgctcacgggtattaaagaactccgcgttgttcatggctgaggcgatgcattaggaagatcctggacctagagaacaagtcccccgaacgctgagttggaggcgggacttcgggtgcgcgttggcgggagcatgctggggctctgggggcagcggctccccgcggcgtgggtcctgcttctgttgcctttcctgccgctgctgctgcttgcagcccccgcgccccaccgcgcgtcctacaagccggtcatcgtggtgcatgggctcttcgacagctcgtacagcttccgccacctgctggaatacatcaatgagacacaccccgggactgtggtgacagtgctcgatctcttcgatgggagagagagcttgcgacccctgtgggaacaggtgcaagggttccgagaggctgtggtccccatcatggcaaaggcccctcaaggggtgcatctcatctgctactcgcaggggggccttgtgtgccgggctctgctttctgtcatggatgatcacaacgtggattctttcatctccctctcctctccacagatgggacagtatggagacacggactacttgaagtggctgttccccacctccatgcggtctaacctctatcggatctgctatagcccctggggccaggaattctccatctgcaactactggcatgatccccaccacgatgacttgtacctcaatgccagcagcttcctggccctgatcaatggggaaagagaccatcccaatgccacagtatggcggaagaactttctgcgtgtgggccacctggtgctgattgggggccctgatgatggtgttattactccctggcagtccagcttctttggtttctatgatgcaaatgagaccgtcctggagatggaggagcaactgcctgccaggcccacccaccagtctgagctgcttctgctgaggctggtctgcttgaagcctcccaggagaaagaagccagcctgtagggtccagcgtcaaagcgaatcatggggtccagggctgagctgtgcactctcttaggcggattctccttcctcctgctactgataccagtcagggagtctgctccaagcagacactggtggtcccgctccactacaacgagtcctacagccaaccagtgtacaagccctacctgaccttgtgcgctgggaggcgcatctgcagcacttacaggaccatgtaccgcgttatgtggcgggaggtgaggcgggaggttcagcagacccatgcagtgtgctgccagggctggaagaagcggcacccgggggcgctcacctgtgaagccatctgcgccaagccttgcctgaacggaggcgtctgcgttaggcctgaccagtgcgagtgcgcccccggctggggagggaagcactgtcatgtgggaccagcatcaccctctgctcgcaccattgttttaatacggcaggcagcttcacctgcggctgcccccatgacctagtgctaggcgtggacgggcgcacctgcatggaggggtccccagagcccccaaccagtgccagcatactcagcgtggccgttcgggaggcggaaaaagatgagcgcgctctgaagcaggagattcacgagctgcgagggcgcctggagcggctggagcagtgggccggtcaggctggggcctgggtcagagcggtgctgcccgtgccgcctgaagagctgcagccagaacaggtggctgagctgtggggccggggtgaccggatcgaatctctcagcgaccaggtgctgctgctggaggagaggctaggtgcctgctcctgtgaggacaacagcctgggcctcggcgtcaatcatcgataagaagcctctacagcacccctgccccctaatttatacagaaaccggacccactaatcctctgggattggccgactgtgagctgcagataaggctatcagccaccaaagagcaatgaacaatggaaacttcagagagctgaagaaagggggaggcctgtgttcttggcctgcccctgagtcttctggctgggggcaggttgcctgggcaagaactgcttcttcaattccttaacaaatgcaaccaccaacacccagatctctctctctctttattttcagtttttttgctgttatccagataattaataaaaaccaaccacgcaaaactgggtcccaccctctccttttgctcccagcctacctccccagttgtgggaacaggtctggagtgagaggcagggagtggctaatgccaccaggaagaaatgaaaactggctcagagagggggaagcctcaacagaaaaagaaataaattaaaagccctcctatcccctccagccagggttcgttcctttccccaactccccagggggcagaagtgagtgcagcacctgatgtctgcttcttccccttgtgtctggcttcttcagatagtcaccaccaccccggccatcagtggagatttcccggaaaacagtgagcatggagtgccggactctgtcagccagagctgggacgtcatctggtgtcagcccttccgtgggcactgggggcagcacccgcacctgacattgtcctggggcaaggggagcaccatcatggcctgtccacccaggtctttgcccacagggatgtcctcccagcctctccggacacaccctaccccagaactgctcaaagccctcacccgaggtgaagcgacgctccttcttgcagtagaagtcttggatgactcacgtcctgggtgagcagggtctgggcgacctcagacatgacactgatggcatcccccgtgcgcttccggtcgatgaagatgactcctgccagccagcaggccagcccggcagagccagcccacagtagctcgcgcttggcaatgggcacacagcggcctggcagtacctccatcatcccttgggcagggtgggagtgggtgaggatcggggtggaggcagagtgtcacagaaggcaacccacctcacccagctcatcaccctctggtagggactggaggtgaaggaggagactaggcagggaggggggccccaagtgaaggaaagggtgaccaaaagtatatgtaccctgcttatgagggcagttctacccagggaatgaaggcctgagtgggaggcaagggggcaatgtcccagaggaaggggaattgaggatctctaggagaagatattctagggaaggtttcaggaggggaggcatggctgggggaggtgtgccctgtggtggggtctcaccaagcagatcgagagagctctggtggttggagacaacaacatagggctgcgagggagggaagtggtgagcccctcgcacctccactcggatcccgtacaggtatttgatgtggagcagcattagacgcaagatcctgtggggtcatggcaaggggtcccagtgggatccattgatgtccatctgcatgcctcagctccccccaccttactgtctttctgaccacctttgcagtcctctccccattccctgtctctggtctctctcagtcttttctacacacaccatgcccccttcccccaatccactactcactttgtacccttaggttccctcattgcccaagaccccttgcccctcacttcatgttctcgacgttgcgtcctcgcacggcacacacagggatggcgagcacagccaggaagaggatccagccattgtagaaggccatcttgaagaagtacttggcactggggctgcagaaccacagggtgggcagcaggaagagcagcagcaggaagagcagcagcagcagcatccatgcccctggccacaaatccattctggccacctgcaggggatggggcaagggacaatcagcctggtttctggaggagagtggggctccggatatattcagacaagagacacaagacacagacatctacaattcacagatacctgataataaatgacaacaagaataatagctaacacttgtagctggtaagggtcttataatggtctatacttgtgctgtccgagaaagtagccaccacctacatgtggctacttgaaatgcagctagtctgaactgagatgtgctggaaatgtaaaatacacatcagatttcaaagactgaataaaaaacaaaatgtg

SEQ ID NO: 163518 - DNA, 1010 bp, Homo sapiens; identical to SEQ ID NO: 124907
  Payload ID: 12200
  Gene Symbol: PPT2
  Gene Name: palmitoyl-protein thioesterase 2
  ENST ID: ENST00000492976
  CDS Start-End: 1-383

SEQ ID NO: 163519 - DNA, 2878 bp, Homo sapiens
  Payload ID: 12200
  Gene Symbol: PPT2
  Gene Name: palmitoyl-protein thioesterase 2
  Uniprot ID: Q9UMR5
  ENST ID: ENST00000496937
  CDS Start-End: 569-1474
ggaagtggggagaatcaaggcggggaaatcggacttttgggtcgctgggggcaacgaagcctggagaggccttctttccattcccagaatatgtttgctgctttttcctctccccactggcctaaatggatcgctccgcctgtttcctccccagcacctagggcgcaatggaatattccattgcccctcctgtcctgggtctgtgttgcggggaacgctcgcgcggttgccagagaaagccccggacgtgacggatttgcgcgaccccaagcagcccgcccttccccctcccatccgtcattcccctgcgctctctttcctcacccttccccccgccaccgtgggttccagacttgggataagtaaacagcgggtggagcgaggcctacggacccaggccaggtgggagtctgcactcttcaaggggcctgggctgctgctcacgggtattaaagaactccgcgttgttcatggctgaggcgatgcattaggaagatcctggacctagagaacaagtcccccgaacgctgagttggaggcgggacttcgggtgcgcgttggcgggagcatgctggggctctgggggcagcggctccccgcggcgtgggtcctgcttctgttgcctttcctgccgctgctgctgcttgcagcccccgcgccccaccgcgcgtcctacaagccggtcatcgtggtgcatgggctcttcgacagctcgtacagcttccgccacctgctggaatacatcaatgagacacaccccgggactgtggtgacagtgctcgatctcttcgatgggagagagagcttgcgacccctgtgggaacaggtgcaagggttccgagaggctgtggtccccatcatggcaaaggcccctcaaggggtgcatctcatctgctactcgcaggggggccttgtgtgccgggctctgctttctgtcatggatgatcacaacgtggattctttcatctccctctcctctccacagatgggacagtatggagacacggactacttgaagtggctgttccccacctccatgcggtctaacctctatcggatctgctatagcccctggggccaggaattctccatctgcaactactggcatgatccccaccacgatgacttgtacctcaatgccagcagcttcctggccctgatcaatggggaaagagaccatcccaatgccacagtatggcggaagaactttctgcgtgtgggccacctggtgctgattgggggccctgatgatggtgttattactccctggcagtccagcttctttggtttctatgatgcaaatgagaccgtcctggagatggaggagcaactgcctgccaggcccacccaccagtctgagctgcttctgctgaggctggtctgcttgaagcctcccaggagaaagaagccagcctgtagggtccagcgtcaaagcgaatcatggggtccagggctgagctgtgcactctcttaggcggattctccttcctcctgctactgataccaggcgagggggccaagggtggatccctcagagagaggtgacaacagagggggtagggcccggggtgagctcttctcaggagccttctgctgggggtggggcttcacaggaggcaaaacataactgtaagtttagaatgggggtgagaggctgtcatctggagggagagcggggggcctcagtagcctcttgagggaagtgggactcctggctccccagggcctggcctactcaatctctcccacctcatcctctggcatggacgcagtcagggagtctgctccaagcagacactggtggtcccgctccactacaacgagtcctacagccaaccagtgtacaagccctacctgaccttgtgcgctgggaggcgcatctgcagcacttacaggaccatgtaccgcgttatgtggcgggaggtgaggcgggaggttcagcagacccatgcagtgtgctgccagggctggaagaagcggcacccgggggcgctcacctgtgaagccatctgcgccaagccttgcctgaacggaggcgtctgcgttaggcctgaccagtgcgagtgcgcccccggctggggagggaagcactgtcatgtggacgtggatgaatgtaggaccagcatcaccctctgctcgcaccattgttttaatacggcaggcagcttcacctgcggctgcccccatgacctagtgctaggcgtggacgggcgcacctgcatggaggggtccccagagcccccaaccagtgccagcatactcagcgtggccgttcgggaggcagaaaaagatgagcgcgctctgaagcaggagattcacgagctgcgagggcgcctggagcggctggagcagtgggccggtcaggctggggcctgggtcagagcggtgctgcccgtgccgcctgaagagctgcagccagaacaggtggctgagctgtggggccggggtgaccggatcgaatctctcagcgaccaggtgctgctgctggaggagaggctaggtgcctgctcctgtgaggacaacagcctgggcctcggcgtcaatcatcgataagaagcctctacagcacccctgccccctaatttatacagaaaccggacccactaatcctctgggattggccgactgtgagctgcagataaggctatcagccaccaaagagcaatgaacaatggaaacttcagagagctgaagaaagggggaggcctgtgttcttggcctgcccctgagtcttctggctgggggcaggttgcctgggcaagaactgcttcttcaattccttaacaaatgcaaccaccaacacccagatctctctctctctttattttcagtttttttgctgttatccagataattaataaaaaccaaccacgcaaaa

SEQ ID NO: 163520 - DNA, 2878 bp, Homo sapiens
  Payload ID: 12200
  Gene Symbol: PPT2
  Gene Name: palmitoyl-protein thioesterase 2
  Uniprot ID: Q9UMR5
  ENST ID: ENST00000527704
  CDS Start-End: 569-1474
ggaagtggggagaatcaaggcggggaaatcggacttttgggtcgctgggggcaacgaagcctggagaggccttctttccattcccagaatatgtttgctgctttttcctctccccactggcctaaatggatcgctccgcctgtttcctccccagcacctagggcgcaatggaatattccattgcccctcctgtcctgggtctgtgttgcggggaacgctcgcgcggttgccagagaaagccccggacgtgacggatttgcgcgaccccaagcagcccgcccttccccctcccatccgtcattcccctgcgctctctttcctcacccttccccccgccaccgtgggttccagacttgggataagtaaacagcgggtggagcgaggcctacggacccaggccaggtgggagtctgcactcttcaaggggcctgggctgctgctcacgggtattaaagaactccgcgttgttcatggctgaggcgatgcattaggaagatcctggacctagagaacaagtcccccgaacgctgagttggaggcgggacttcgggtgcgcgttggcgggagcatgctggggctctgggggcagcggctccccgcggcgtgggtcctgcttctgttgcctttcctgccgctgctgctgcttgcagcccccgcgccccaccgcgcgtcctacaagccggtcatcgtggtgcatgggctcttcgacagctcgtacagcttccgccacctgctggaatacatcaatgagacacaccccgggactgtggtgacagtgctcgatctcttcgatgggagagagagcttgcgacccctgtgggaacaggtgcaagggttccgagaggctgtggtccccatcatggcaaaggcccctcaaggggtgcatctcatctgctactcgcaggggggccttgtgtgccgggctctgctttctgtcatggatgatcacaacgtggattctttcatctccctctcctctccacagatgggacagtatggagacacggactacttgaagtggctgttccccacctccatgcggtctaacctctatcggatctgctatagcccctggggccaggaattctccatctgcaactactggcatgatccccaccacgatgacttgtacctcaatgccagcagcttcctggccctgatcaatggggaaagagaccatcccaatgccacagtatggcggaagaactttctgcgtgtgggccacctggtgctgattgggggccctgatgatggtgttattactccctggcagtccagcttctttggtttctatgatgcaaatgagaccgtcctggagatggaggagcaactgcctgccaggcccacccaccagtctgagctgcttctgctgaggctggtctgcttgaagcctcccaggagaaagaagccagcctgtagggtccagcgtcaaagcgaatcatggggtccagggctgagctgtgcactctcttaggcggattctccttcctcctgctactgataccaggcgagggggccaagggtggatccctcagagagaggtgacaacagagggggtagggcccggggtgagctcttctcaggagccttctgctgggggtggggcttcacaggaggcaaaacataactgtaagtttagaatgggggtgagaggctgtcatctggagggagagcggggggcctcagtagcctcttgagggaagtgggactcctggctccccagggcctggcctactcaatctctcccacctcatcctctggcatggacgcagtcagggagtctgctccaagcagacactggtggtcccgctccactacaacgagtcctacagccaaccagtgtacaagccctacctgaccttgtgcgctgggaggcgcatctgcagcacttacaggaccatgtaccgcgttatgtggcgggaggtgaggcgggaggttcagcagacccatgcagtgtgctgccagggctggaagaagcggcacccgggggcgctcacctgtgaagccatctgcgccaagccttgcctgaacggaggcgtctgcgttaggcctgaccagtgcgagtgcgcccccggctggggagggaagcactgtcatgtggacgtggatgaatgtaggaccagcatcaccctctgctcgcaccattgttttaatacggcaggcagcttcacctgcggctgcccccatgacctagtgctaggcgtggacgggcgcacctgcatggaggggtccccagagcccccaaccagtgccagcatactcagcgtggccgttcgggaggcggaaaaagatgagcgcgctctgaagcaggagattcacgagctgcgagggcgcctggagcggctggagcagtgggccggtcaggctggggcctgggtcagagcggtgctgcccgtgccgcctgaagagctgcagccagaacaggtggctgagctgtggggccggggtgaccggatcgaatctctcagcgaccaggtgctgctgctggaggagaggctaggtgcctgctcctgtgaggacaacagcctgggcctcggcgtcaatcatcgataagaagcctctacagcacccctgccccctaatttatacagaaaccggacccactaatcctctgggattggccgactgtgagctgcagataaggctatcagccaccaaagagcaatgaacaatggaaacttcagagagctgaagaaagggggaggcctgtgttcttggcctgcccctgagtcttctggctgggggcaggttgcctgggcaagaactgcttcttcaattccttaacaaatgcaaccaccaacacccagatctctctctctctttattttcagtttttttgctgttatccagataattaataaaaaccaaccacgcaaaa

SEQ ID NO: 163521 - DNA, 901 bp, Homo sapiens
  Payload ID: 12200
  Gene Symbol: PPT2
  Gene Name: palmitoyl-protein thioesterase 2
  ENST ID: ENST00000478621
  CDS Start-End: 192-901
agcgaggcctacggacccaggccaggtgggagtctgcactcttcaaggggcctgggctgctgctcacgggtattaaagaactccgcgttgttcatggctgaggcgatgcattaggaagatcctggacctagagaacaagtcccccgaacgctgagttggaggcgggacttcgggtgcgcgttggcgggagcatgctggggctctgggggcagcggctccccgcggcgtgggtcctgcttctgttgcctttcctgccgctgctgctgcttgcagcccccgcgccccaccgcgagtcctacaagccggtcatcgtggtgcatgggctcttcgacagctcgtacagcttccgccacctgctggaatacatcaatgagacacaccccgggactgtggtgacagtgctcgatctcttcgatgggagagagagcttgcgacccctgtgggaacaggtgcaagggttccgagaggctgtggtccccatcatggcaaaggcccctcaaggggtgcatctcatctgctactcgcaggggggccttgtgtgccgggctctgctttctgtcatggatgatcacaacgtggattctttcatctccctctcctctccacagatgggacagtatggagacacggactacttgaagtggctgttccccacctccatgcggtctaacctctatcggatctgctatagcccctggggccaggaattctccatctgcaactactggcatgatccccaccacgatgacttgtacctcaatgccagcagcttcctggccctgatcaatggggaaagagaccatcccaatgccacagtatggcggaagaactttctgcgtgtgggccacctggtgctgattgggggccctgatgatggtgttattactccctggcagtccag

SEQ ID NO: 163522 - DNA, 584 bp, Homo sapiens
  Payload ID: 12200
  Gene Symbol: PPT2
  Gene Name: palmitoyl-protein thioesterase 2
  ENST ID: ENST00000488435
  CDS Start-End: 104-397
gaaactgggccaggctgcacttagctcaaggggcctcgaggactctctgcgtctctggagacaagggcactacacgcacttcagaatgaagagttgcgggagcatgctggggctctgggggcagcggctccccgcggcgtgggtcctgcttctgttgcctttcctgccgctgctgctgcttgcagcccccgcgccccaccgcgcgtcctacaagccggtcatcgtggtgcatgggctcttcgacagctcgtacagcttccgccacctgctggaatacatcaatgagggggccttgtgtgccgggctctgctttctgtcatggatgatcacaacgtggattctttcatctccctctcctctccacagatgggacagtatggagacacggactacttgaagtggctgttccccacctccatgcggtctaacctctatcggatctgctatagcccctggggccaggaattctccatctgcaactactggcatgatccccaccacgatgacttgtacctcaatgccagcagcttcctggccctgatcaatggggaaagagaccatcccaatgccacagtatggcggaa

SEQ ID NO: 163523 - DNA, 2875 bp, Homo sapiens
  Payload ID: 12200
  Gene Symbol: PPT2
  Gene Name: palmitoyl-protein thioesterase 2
  Uniprot ID: Q9UMR5
  ENST ID: ENST00000490624
  CDS Start-End: 569-1474
ggaagtggggagaatcaaggcggggaaatcggactttcgggtcgctgggggcaacgaagcctggagaggccttctttccattcccagaatatgtttgctgctttttcctctccccactggcctaaatggatcgctccgcctgtttcctccccagcacctagggcgcaatggaatattccattgcccctcctgtcctgggtctgtgttgcggggaacgctcgcgcggttgccagagaaagccccggacgtgacggatttgcgcgaccccaagcagcccgcccttccccctcccatccgtcattcccctgcgttctctttcctcacccttccccccgccaccgtgggttccagacttgggataagtaaacagcgggtggagcgaggcctacggacccaggccaggtgggagtctgcactcttcaaggggcctgggctgctgctcacgggtattaaagaactccgcgttgttcatggctgaggcgatgcattaggaagatcctggacctagagaacaagtcccccgaacgctgagttggaggcgggacttcgggtgcgcgttggcgggagcatgctggggctctgggggcagcggctccccgcggcgtgggtcctgcttctgttgcctttcctgccgctgctgctgcttgcagcccccgcgccccaccgcgcgtcctacaagccggtcatcgtggtgcatgggctcttcgacagctcgtacagcttccgccacctgctggaatacatcaatgagacacaccccgggactgtggtgacagtgctcgatctcttcgatgggagagagagcttgcgacccctgtgggaacaggtgcaagggttccgagaggctgtggtccccatcatggcaaaggcccctcaaggggtgcatctcatctgctactcgcaggggggccttgtgtgccgggctctgctttctgtcatggatgatcacaacgtggattctttcatctccctctcctctccacagatgggacagtatggagacacggactacttgaagtggctgttccccacctccatgcggtctaacctctatcggatctgctatagcccctggggccaggaattctccatctgcaactactggcatgatccccaccacgatgacttgtacctcaatgccagcagcttcctggccctgatcaatggggaaagagaccatcccaatgccacagtatggcggaagaactttctgcgtgtgggccacctggtgctgattgggggccctgatgatggtgttattactccctggcagtccagcttctttggtttctatgatgcaaatgagaccgtcctggagatggaggagcaactgcctgccaggcccacccaccagtctgagctgcttctgctgaggctggtctgcttgaagcctcccaggagaaagaagccagcctgtagggtccagcgtcaaagcgaatcatggggtccagggctgagctgtgcactctcttaggcggattctccttcctcctgctactgataccaggcgagggggccaagggtggatccctcagagagaggtgacaacagagggggtagggcccggggtgagctcttctcaggagccttctgctgggggtggggcttcacaggaggcaaaacataactgtaagtttagaatgggggtgagaggctgtcatctggagggagagcggggggcctcagtagcctcttgagggaagtgggactcctggctccccagggcctggcctactcaatctctcccacctcatcctctggcatggacgcagtcagggagtctgctccaagcagacactggtggtcccgctccactacaacgagtcctacagccaaccagtgtacaagccctacctgaccttgtgcgctgggaggcgcatctgcagcacttacaggaccatgtaccgcgttatgtggcgggaggtgaggcgggaggttcagcagacccatgcagtgtgctgccagggctggaagaagcggcacccgggggcgctcacctgtgaagccatctgcgccaagccttgcctgaacggaggcgtctgcgttaggcctgaccagtgcgagtgcgcccccggctggggagggaagcactgtcatgtggacgtggatgaatgtaggaccagcatcaccctctgctcgcaccattgttttaatacggcaggcagcttcacctgcggctgcccccatgacctagtgctaggcgtggacgggcgcacctgcatggaggggtccccagagcccccaaccagtgccagcatactcagcgtggccgttcgggaggcggaaaaagatgagcgcgctctgaagcaggagattcacgagctgcgagggcgcctggagcggctggagcagtgggccggtcaggctggggcctgggtcagagcggtgctgcccgtgccgcctgaagagctgcagccagaacaggtggctgagctgtggggccggggtgaccggatcgaatctctcagcgaccaggtgctgctgctggaggagaggctaggtgcctgctcctgtgaggacaacagcctgggcctcggcgtcaatcatcgataagaagcctctacagcacccctgccccctaatttatacagaaaccggacccactaatcctctgggattggccgactgtgagctgcagataaggctatcagccaccaaagagcaatgaacaatggaaacttcagagagctgaagaaagggggaggcctgtgttcttggcctgcccctgagtcttctggctgggggcaggttgcctgggcaagaactgcttcaattccttaacaaatgcaaccaccaacacccagatctctctctctctttattttcagtttttttgctgttatccagataattaataaaaaccaaccacgcaaaa

SEQ ID NO: 163524 - DNA, 2382 bp, Homo sapiens
  Payload ID: 12200
  Gene Symbol: PPT2
  Gene Name: palmitoyl-protein thioesterase 2
  ENST ID: ENST00000525601
  CDS Start-End: 746-1654
tttttttttttttttaaacaaaaacacagccagataatcattattcttcccttacgtccccccagcccccacctggggcagtcgctctcccggctgcgtcccttttcgtccatgtcctagcagagactacagagcagtacagaggctctcgctgaaaccagtcccaggctccacagagtcagatcacggcttcacaccagtcgttctggtcacttaggcgttcgcgtgagcgctcaaccccttaccgccacctcatcgtcactctacaccattctgagcgcaaaaatgttttgattgagacaaatttagaccaagcaatgaccttgtaaacagagagaggggctcagacatgctgagaaatccttatctctagagaaacgtctttaaatgctaagtaaaagccctagcaagtaaaagccctgaggcactagggtgtcggttaggggtcacaggcggagaggtggggcgcctgggggtttcggtagggagccacccacagataactcagacagccagattctgggggtcgttcaggttgaaagactggtcgaaattacgcgggcatgagtcagcgcatccctacgcgccctccgccccttgagggtgggtcgcttatagggaggggagtagagtagggcaggagaaactgggccaggctgcacttagctcaaggggcctcgaggactctctgcgtctctggagacaagggcactacacgcacttcagaatgaagagttgcgggagcatgctggggctctgggggcagcggctccccgcggcgtgggtcctgcttctgttgcctttcctgccgctgctgctgcttgcagcccccgcgccccaccgcgcgtcctacaagccggtcatcgtggtgcatgggctcttcgacagctcgtacagcttccgccacctgctggaatacatcaatgagacacaccccgggactgtggtgacagtgctcgatctcttcgatgggagagagagcttgcgacccctgtgggaacaggtgcaagggttccgagaggctgtggtccccatcatggcaaaggcccctcaaggggtgcatctcatctgctactcgcaggggggccttgtgtgccgggctctgctttctgtcatggatgatcacaacgtggattctttcatctccctctcctctccacagatgggacagtatggagacacggactacttgaagtggctgttccccacctccatgcggtctaacctctatcggatctgctatagcccctggggccaggaattctccatctgcaactactggcatgatccccaccacgatgacttgtacctcaatgccagcagcttcctggccctgatcaatggggaaagagaccatcccaatgccacagtatggcggaagaactttctgcgtgtgggccacctggtgctgattgggggccctgatgatggtgttattactccctggcagtccagcttctttggtttctatgatgcaaatgagaccgtcctggagatggaggagcaactggtttatctgcgggattcttttgggttgaagactctattggcccggggggccatagtgaggtgtccaatggccggtatctcccacacagcctggcactccaaccgtaccctttatgagacctgcattgaaccttggctctcctgaggatatattcaggggtccccaggaactcctcggtccagagaccaagtggtggccttggaaagcagatgtcaggctttggtgtgcctgtgaccacctcattgctcccatattatcccccatttttagtagagacggggttttagtagagacttggcctcccagaacccccttcctctgctcctccatgaatgacaattccaggcctcccctacctcatgtcctctcatttgggggattgctccgtgctgtccctttctctcaaggccgaagttgggaagtgagaaaccatgtttttaacttgtggctgcttttgctgctgctgctcctccgtatctggctgtatgggtggagaacccaccccctgcccaccacaggggtctccttccaggccactcaggacatttttagcttctctcctccccatgttcccttttttctctaaagtcccctgacatcagccctcccaactcctaagagggactacccatgagagtggggttctgaggctcccctatggggacagttccgttcttgaagtgtcagtgttggggaatatctgtggcctatgaggcccatctcaggtttggggatcccccagtccctatgatcagtgttggagtacccccctgggagagcctagtttctttgaggccccaggccctcttttaactacctttgaataggtgttatccctgtatttatggaaataaagttccatttcctcagtg

SEQ ID NO: 163525 - DNA, 2878 bp, Homo sapiens; identical to SEQ ID NO: 163520
  Payload ID: 12200
  Gene Symbol: PPT2
  Gene Name: palmitoyl-protein thioesterase 2
  Uniprot ID: Q9UMR5
  ENST ID: ENST00000488579
  CDS Start-End: 569-1474

SEQ ID NO: 163526 - DNA, 1010 bp, Homo sapiens; identical to SEQ ID NO: 124907
  Payload ID: 12200
  Gene Symbol: PPT2
  Gene Name: palmitoyl-protein thioesterase 2
  ENST ID: ENST00000497702
  CDS Start-End: 1-383

SEQ ID NO: 163527 - DNA, 163 bp, Homo sapiens
  Payload ID: 12200
  Gene Symbol: PPT2
  Gene Name: palmitoyl-protein thioesterase 2
  ENST ID: ENST00000469283
  CDS Start-End: 1-163
accacgatgacttgtacctcaatgccagcagcttcctggccctgatcaatggggaaagagaccatcccaatgccacagtatggcggaagaactttctgcgtgtgggccacctggtgctgattgggggccctgatgatggtgttattactccctggcagtccag

SEQ ID NO: 163528 - DNA, 1278 bp, Homo sapiens
  Payload ID: 12200
  Gene Symbol: PPT2
  Gene Name: palmitoyl-protein thioesterase 2
  ENST ID: ENST00000467040
  CDS Start-End: 569-1278
ggaagtggggagaatcaaggcggggaaatcggacttttgggtcgctgggggcaacgaagcctggagaggccttctttccattcccagaatatgtttgctgctttttcctctccccactggcctaaatggatcgctccgcctgtttcctccccagcacctagggcgcaatggaatattccattgcccctcctgtcctgggtctgtgttgcggggaacgctcgcgcggttgccagagaaagccccggacgtgacggatttgcgcgaccccaagcagcccgcccttccccctcccatccgtcattcccctgcgctctctttcctcacccttccccccgccaccgtgggttccagacttgggataagtaaacagcgggtggagcgaggcctacggacccaggccaggtgggagtctgcactcttcaaggggcctgggctgctgctcacgggtattaaagaactccgcgttgttcatggctgaggcgatgcattaggaagatcctggacctagagaacaagtcccccgaacgctgagttggaggcgggacttcgggtgcgcgttggcgggagcatgctggggctctgggggcagcggctccccgcggcgtgggtcctgcttctgttgcctttcctgccgctgctgctgcttgcagcccccgcgccccaccgcgagtcctacaagccggtcatcgtggtgcatgggctcttcgacagctcgtacagcttccgccacctgctggaatacatcaatgagacacaccccgggactgtggtgacagtgctcgatctcttcgatgggagagagagcttgcgacccctgtgggaacaggtgcaagggttccgagaggctgtggtccccatcatggcaaaggcccctcaaggggtgcatctcatctgctactcgcaggggggccttgtgtgccgggctctgctttctgtcatggatgatcacaacgtggattctttcatctccctctcctctccacagatgggacagtatggagacacggactacttgaagtggctgttccccacctccatgcggtctaacctctatcggatctgctatagcccctggggccaggaattctccatctgcaactactggcatgatccccaccacgatgacttgtacctcaatgccagcagcttcctggccctgatcaatggggaaagagaccatcccaatgccacagtatggcggaagaactttctgcgtgtgggccacctggtgctgattgggggccctgatgatggtgttattactccctggcagtccag

SEQ ID NO: 163529 - DNA, 1010 bp, Homo sapiens; identical to SEQ ID NO: 124907
  Payload ID: 12200
  Gene Symbol: PPT2
  Gene Name: palmitoyl-protein thioesterase 2
  ENST ID: ENST00000493225
  CDS Start-End: 1-383

SEQ ID NO: 163530 - DNA, 790 bp, Homo sapiens
  Payload ID: 12200
  Gene Symbol: PPT2
  Gene Name: palmitoyl-protein thioesterase 2
  ENST ID: ENST00000485053
  CDS Start-End: 217-615
cttgggataagtaaacagcgggtggagcgaggcctacggacccaggccaggtgggagtctgcactcttcaaggggcctgggctgctgctcacgggtattaaagaactccgcgttgttcatggctgaggcgatgcattaggaagatcctggacctagagaacaagtcccccgaacgctgagttggaggcgggacttcgggtgcgcgttggcgggagcatgctggggctctgggggcagcggctccccgcggcgtgggtcctgcttctgttgcctttcctgccgctgctgctgcttgcagcccccgcgccccaccgcgcgtcctacaagccggtcatcgtggtgcatgggctcttcgacagctcgtacagcttccgccacctgctggaatacatcaatgagacacaccccgggactgtggtgacagtgctcgatctcttcgatgggagagagagcttgcgacccctgtgggaacaggtgcaagggttccgagaggctgtggtccccatcatggcaaaggcccctcaaggggtgcatctcatctgctactcgcaggatgggacagtatggagacacggactacttgaagtggctgttccccacctccatgcggtctaacctctatcggatctgctatagcccctggggccaggaattctccatctgcaactactggcatgatccccaccacgatgacttgtacctcaatgccagcagcttcctggccctgatcaatggggaaagagaccatcccaatgccacagcttctttggtttctatgatgcaaatgaga

SEQ ID NO: 163531 - DNA, 4181 bp, Homo sapiens; identical to SEQ ID NO: 163517
  Payload ID: 12200
  Gene Symbol: PPT2
  Gene Name: palmitoyl-protein thioesterase 2
  Uniprot ID: Q9UMR5
  ENST ID: ENST00000493809
  CDS Start-End: 192-1097

SEQ ID NO: 163532 - DNA, 2053 bp, Homo sapiens
  Payload ID: 12200
  Gene Symbol: PPT2
  Gene Name: palmitoyl-protein thioesterase 2
  ENST ID: ENST00000550796
  CDS Start-End: 415-1323
cacctagggcgcaatggaatattccattgcccctcctgtcctgggtctgtgttgcggggaacgctcgcgcggttgccagagaaagccccggacgtgacggatttgcgcgaccccaagcagcccgcccttccccctcccatccgtcattcccctgcgctctctttcctcacccttccccccgccaccgtgggttccagacttgggataagtaaacagcgggtggagcgaggcctacggacccaggccaggtgggagtctgcactcttcaaggggcctgggctgctgctcacgggtattaaagaactccgcgttgttcatggctgaggcgatgcattaggaagatcctggacctagagaacaagtcccccgaacgctgagttggaggcgggacttcgggtgcgcgttggcgggagcatgctggggctctgggggcagcggctccccgcggcgtgggtcctgcttctgttgcctttcctgccgctgctgctgcttgcagcccccgcgccccaccgcgcgtcctacaagccggtcatcgtggtgcatgggctcttcgacagctcgtacagcttccgccacctgctggaatacatcaatgagacacaccccgggactgtggtgacagtgctcgatctcttcgatgggagagagagcttgcgacccctgtgggaacaggtgcaagggttccgagaggctgtggtccccatcatggcaaaggcccctcaaggggtgcatctcatctgctactcgcaggggggccttgtgtgccgggctctgctttctgtcatggatgatcacaacgtggattctttcatctccctctcctctccacagatgggacagtatggagacacggactacttgaagtggctgttccccacctccatgcggtctaacctctatcggatctgctatagcccctggggccaggaattctccatctgcaactactggcatgatccccaccacgatgacttgtacctcaatgccagcagcttcctggccctgatcaatggggaaagagaccatcccaatgccacagtatggcggaagaactttctgcgtgtgggccacctggtgctgattgggggccctgatgatggtgttattactccctggcagtccagcttctttggtttctatgatgcaaatgagaccgtcctggagatggaggagcaactggtttatctgcgggattcttttgggttgaagactctattggcccggggggccatagtgaggtgtccaatggccggtatctcccacacagcctggcactccaaccgtaccctttatgagacctgcattgaaccttggctctcctgaggatatattcaggggtccccaggaactcctcggtccagagaccaagtggtggccttggaaagcagatgtcaggctttggtgtgcctgtgaccacctcattgctcccatattatcccccatttttagtagagacggggttttagtagagacttggcctcccagaacccccttcctctgctcctccatgaatgacaattccaggcctcccctacctcatgtcctctcatttgggggattgctccgtgctgtccctttctctcaaggccgaagttgggaagtgagaaaccatgtttttaacttgtggctgcttttgctgctgctgctcctccgtatctggctgtatgggtggagaacccaccccctgcccaccacaggggtctccttccaggccactcaggacatttttagcttctctcctccccatgttcccttttttctctaaagtcccctgacatcagccctcccaactcctaagagggactacccatgagagtggggttctgaggctcccctatggggacagttccgttcttgaagtgtcagtgttggggaatatctgtggcctatgaggcccatctcaggtttggggatcccccagtccctatgatcagtgttggagtacccccctgggagagcctagtttctttgaggccccaggccctcttttaactacctttgaataggtgttatccctgtatttatggaaataaagttccatttcctcagtgtg

SEQ ID NO: 163533 - DNA, 2053 bp, Homo sapiens
  Payload ID: 12200
  Gene Symbol: PPT2
  Gene Name: palmitoyl-protein thioesterase 2
  ENST ID: ENST00000552922
  CDS Start-End: 415-1323
cacctagggcgcaatggaatattccattgcccctcctgtcctgggtctgtgttgcggggaacgctcgcgcggttgccagagaaagccccggacgtgacggatttgcgcgaccccaagcagcccgcccttccccctcccatccgtcattcccctgcgttctctttcctcacccttccccccgccaccgtgggttccagacttgggataagtaaacagcgggtggagcgaggcctacggacccaggccaggtgggagtctgcactcttcaaggggcctgggctgctgctcacgggtattaaagaactccgcgttgttcatggctgaggcgatgcattaggaagatcctggacctagagaacaagtcccccgaacgctgagttggaggcgggacttcgggtgcgcgttggcgggagcatgctggggctctgggggcagcggctccccgcggcgtgggtcctgcttctgttgcctttcctgccgctgctgctgcttgcagcccccgcgccccaccgcgcgtcctacaagccggtcatcgtggtgcatgggctcttcgacagctcgtacagcttccgccacctgctggaatacatcaatgagacacaccccgggactgtggtgacagtgctcgatctcttcgatgggagagagagcttgcgacccctgtgggaacaggtgcaagggttccgagaggctgtggtccccatcatggcaaaggcccctcaaggggtgcatctcatctgctactcgcaggggggccttgtgtgccgggctctgctttctgtcatggatgatcacaacgtggattctttcatctccctctcctctccacagatgggacagtatggagacacggactacttgaagtggctgttccccacctccatgcggtctaacctctatcggatctgctatagcccctggggccaggaattctccatctgcaactactggcatgatccccaccacgatgacttgtacctcaatgccagcagcttcctggccctgatcaatggggaaagagaccatcccaatgccacagtatggcggaagaactttctgcgtgtgggccacctggtgctgattgggggccctgatgatggtgttattactccctggcagtccagcttctttggtttctatgatgcaaatgagaccgtcctggagatggaggagcaactggtttatctgcgggattcttttgggttgaagactctattggcccggggggccatagtgaggtgtccaatggccggtatctcccacacagcctggcactccaaccgtaccctttatgagacctgcattgaaccttggctctcctgaggatatattcaggggtccccaggaactcctcggtccagagaccaagtggtggccttggaaagcagatgtcaggctttggtgtgcctgtgaccacctcattgctcccatattatcccccatttttagtagagacggggttttagtagagacttggcctcccagaacccccttcctctgctcctccatgaatgacaattccaggcctcccctacctcatgtcctctcatttgggggattgctccgtgctgtccctttctctcaaggccgaagttgggaagtgagaaaccatgtttttaacttgtggctgcttttgctgctgctgctcctccgtatctggctgtatgggtggagaacccaccccctgcccaccacaggggtctccttccaggccactcaggacatttttagcttctctcctccccatgttcccttttttctctaaagtcccctgacatcagccctcccaactcctaagagggactacccatgagagtggggttctgaggctcccctatggggacagttccgttcttgaagtgtcagtgttggggaatatctgtggcctatgaggcccatctcaggtttggggatcccccagtccctatgatcagtgttggagtacccccctgggagagcctagtttctttgaggccccaggccctcttttaactacctttgaataggtgttatccctgtatttatggaaataaagttccatttcctcagtgtg

SEQ ID NO: 163534 - DNA, 2053 bp, Homo sapiens; identical to SEQ ID NO: 163532
  Payload ID: 12200
  Gene Symbol: PPT2
  Gene Name: palmitoyl-protein thioesterase 2
  ENST ID: ENST00000551222
  CDS Start-End: 415-1323

SEQ ID NO: 163535 - DNA, 2053 bp, Homo sapiens; identical to SEQ ID NO: 163532
  Payload ID: 12200
  Gene Symbol: PPT2
  Gene Name: palmitoyl-protein thioesterase 2
  ENST ID: ENST00000546871
  CDS Start-End: 415-1323

SEQ ID NO: 163536 - DNA, 2053 bp, Homo sapiens; identical to SEQ ID NO: 163532
  Payload ID: 12200
  Gene Symbol: PPT2
  Gene Name: palmitoyl-protein thioesterase 2
  ENST ID: ENST00000547309
  CDS Start-End: 415-1323

SEQ ID NO: 163537 - DNA, 2053 bp, Homo sapiens
  Payload ID: 12200
  Gene Symbol: PPT2
  Gene Name: palmitoyl-protein thioesterase 2
  ENST ID: ENST00000547646
  CDS Start-End: 415-1323
cacctagggcgcaatggaatattccattgcccctcctgtcctgggtctgtgttgcggggaacgctcgcgcggttgccagagaaagccccggacgtgacggatttgcgcgaccccaagcagcccgcccttccccctcccatccgtcattcccctgcgctctctttcctcacccttccccccgccaccgtgggttccagacttgggataagtaaacagcgggtggagcgaggcctacggacccaggccaggtgggagtctgcactcttcaaggggcctgggctgctgctcacgggtattaaagaactccgcgttgttcatggctgaggcgatgcattaggaagatcctggacctagagaacaagtcccccgaacgctgagttggaggcgggacttcgggtgcgcgttggcgggagcatgctggggctctgggggcagcggctccccgcggcgtgggtcctgcttctgttgcctttcctgccgctgctgctgcttgcagcccccgcgccccaccgcgagtcctacaagccggtcatcgtggtgcatgggctcttcgacagctcgtacagcttccgccacctgctggaatacatcaatgagacacaccccgggactgtggtgacagtgctcgatctcttcgatgggagagagagcttgcgacccctgtgggaacaggtgcaagggttccgagaggctgtggtccccatcatggcaaaggcccctcaaggggtgcatctcatctgctactcgcaggggggccttgtgtgccgggctctgctttctgtcatggatgatcacaacgtggattctttcatctccctctcctctccacagatgggacagtatggagacacggactacttgaagtggctgttccccacctccatgcggtctaacctctatcggatctgctatagcccctggggccaggaattctccatctgcaactactggcatgatccccaccacgatgacttgtacctcaatgccagcagcttcctggccctgatcaatggggaaagagaccatcccaatgccacagtatggcggaagaactttctgcgtgtgggccacctggtgctgattgggggccctgatgatggtgttattactccctggcagtccagcttctttggtttctatgatgcaaatgagaccgtcctggagatggaggagcaactggtttatctgcgggattcttttgggttgaagactctattggcccggggggccatagtgaggtgtccaatggccggtatctcccacacagcctggcactccaaccgtaccctttatgagacctgcattgaaccttggctctcctgaggatatattcaggggtccccaggaactcctcggtccagagaccaagtggtggccttggaaagcagatgtcaggctttggtgtgcctgtgaccacctcattgctcccatattatcccccatttttagtagagacggggttttagtagagacttggcctcccagaacccccttcctctgctcctccatgaatgacaattccaggcctcccctacctcatgtcctctcatttgggggattgctccgtgctgtccctttctctcaaggccgaagttgggaagtgagaaaccatgtttttaacttgtggctgcttttgctgctgctgctcctccgtatctggctgtatgggtggagaacccaccccctgcccaccacaggggtctccttccaggccactcaggacatttttagcttctctcctccccatgttcccttttttctctaaagtcccctgacatcagccctcccaactcctaagagggactacccatgagagtggggttctgaggctcccctatggggacagttccgttcttgaagtgtcagtgttggggaatatctgtggcctatgaggcccatctcaggtttggggatcccccagtccctatgatcagtgttggagtacccccctgggagagcctagtttctttgaggccccaggccctcttttaactacctttgaataggtgttatccctgtatttatggaaataaagttccatttcctcagtgtg

SEQ ID NO: 163538 - DNA, 238 bp, Homo sapiens
  Payload ID: 12200
  Gene Symbol: PPT2
  Gene Name: palmitoyl-protein thioesterase 2
  ENST ID: ENST00000475020
  CDS Start-End: 121-238
cccttcccacagacacaccccgggactgtggtgacagtgctcgatctcttcgatgggagagagagcttgcgacccctgtgggaacaggtgcaagggttccgagaggctgtggtccccatcatggcaaaggcccctcaaggggtgcatctcatctgctactcgcaggggggccttgtgtgccgggctctgctttctgtcatggatgatcacaacgtggattctttcatctccctctcct

SEQ ID NO: 163539 - DNA, 790 bp, Homo sapiens; identical to SEQ ID NO: 163530
  Payload ID: 12200
  Gene Symbol: PPT2
  Gene Name: palmitoyl-protein thioesterase 2
  ENST ID: ENST00000469411
  CDS Start-End: 217-615

SEQ ID NO: 163540 - DNA, 584 bp, Homo sapiens; identical to SEQ ID NO: 163522
  Payload ID: 12200
  Gene Symbol: PPT2
  Gene Name: palmitoyl-protein thioesterase 2
  ENST ID: ENST00000494953
  CDS Start-End: 104-397

SEQ ID NO: 163541 - DNA, 3101 bp, Homo sapiens
  Payload ID: 12201
  Gene Symbol: ZDHHC3
  Gene Name: Palmitoyltransferase ZDHHC3
  ENST ID: ENST00000630389
  CDS Start-End: 275-1258
gcgtcatcaacctgcgcggcggccgctcctgcagccgcggccgccgccactgccgggagagctcgatgggcttctcctgcgcgccgcccggtgtctggccgagtccagagagccgcggcgcctcgttccgaggagccatcgccgaagcccgaggccgggtcccgggttggggactgcaggggaaggcagcggcggcggcggcgggagccccaccggggtctgggactggggaactgcctccggcttcacgatgccagtatggacagaatagcttatgatgcttatccccacccaccacttccgaaacattgagcggaaaccagaatacctccagccagagaagtgtgtcccacccccctaccctggtcctgtgggaaccatgtggtttatccgtgacggctgtggcatcgcctgtgccatcgttacctggtttctggtcctctatgcggagttcgtggtcctctttgtcatgctgattccatctcgagactacgtgtatagcatcatcaacggaattgtgttcaacctgctggccttcttggccctggcctcccactgccgggccatgctgacggaccccggggcagtgcccaaaggaaatgccactaaagaattcatcgagagtttacagttgaagcctgggcaggtggtgtacaagtgccccaaatgctgcagcatcaagcccgaccgagcccaccactgcagtgtttgtaagcggtgcattcggaagatggaccaccactgtccctgggtcaacaactgtgtaggcgagaacaaccagaagtacttcgtcctgtttacaatgtacatagctctcatttccttgcacgccctcatcatggtgggattccacttcctgcattgctttgaagaagattggacaacctatggactgaacagggaagaaatggcagagactggaatctctcttcatgaaaaaatgcagccccttaacttcagttcgacagagtgcagctccttctctccacccaccacagtgattctccttatcctgctgtgctttgagggcctgctcttcctcattttcacatcagtgatgtttgggacccaggtgcactccatctgcacagatgagacgggaatagaacaattgaaaaaggaagagagaagatgggctaaaaaaacaaaatggatgaacatgaaagccgtttttggccaccccttctctctaggctgggccagcccctttgccacgccagaccaagggaaggcagacccgtaccagtatgtggtctgaaggaccccgaccggcatggccactcagacacaagtccacaccacagcactaccgtcccatccgttctcatgaatgtttaaatcgaaaaagcaaaacaactactcttaaaactttttttatgtctcaagtaaaatggctgagcattgcagagaaaaaaaaaagtccccacattttattttttaaaaaccatcctttcgatttcttttggtgaccgaagctgctctcttttccttttaaaatcacttctctggcctctggtttctctctgctgtctgtctggcatgactaatgtagagggcgctgtctcgcgctgtgcccattctactaactgagtgagacatgacgctgtgcgtggatggaatagtctggacacctggtgggggatgcatgggaaagccaggagggccctgacctcccactgcccaggaggcagtggcgggctccccgatgggacataaaacctcaccgaagatggatgcttaccccttgaggcctgagaagggcaggatcagaagggaccttggcacagcgacctcatcccccaagtggacacggtttgcctgctaactcgcaaagcaattgcctgccttgtactttatgggcttggggtgtgtagaatgattttgcgggggagtggggagaaagatgaaagaggtcttatttgtattctgaatcagcaattatattccctgtgattatttggaagagtgtgtaggaaagacgtttttccagttcaaaatgccttatacaatcaagaggaaaaaaaattacacaatttcaggcaagctacgttttcctttgtttcatctgcttcctctctcaccaccccatctccctctcttccccagcaagatgtcaattaagcagtgtgaattctgactgcaataggcaccagtgcccaacacatacagccccaccatcatccccttctcattttataaacctcaaagtggattcactttctgatagttaacccccataaatgtgcacgtacctgtgtcttatctatattttaacctgggagactgttgtcctggcatggagatgaccatgatgctggggttacctcacagtccccaccctttcaaagttgacatatggccatcccattggccagaatccacagacacacctaagcctgtggcactgggacagaatagattttccatttgagaggcacttcctgtgtcagtcttgtttgaaggaggtggtgatggtggatagaggtgaaggaggtagggagtgccctccaagtgcaaaaataacaaatatgattattgaccatcggggaattctcacacattgatttgttttttaagcaattgccagaaacccccttttttagcttttgcttggggtgggggtaggagttaaggtttattcaatcctgtcctgggtagggcgaaagttaatctagccatgtgatttttcagaaaagtaagtggaacatgctgccacttttcaattctgtcagtgcttccacatggaaacaaaatgcaataaaatttttccaaaacctgttctgatttagctctctcttgaggtgttacccttagtgggaggccgactatccacaatctacttgagttttctctggttgggtgtttgtttcattgctctgtctcttgaatgaggatactttattttttttgttttaaaatgcatttatggtccctctcttgaaccagcttgccccaccaggcctctttcctttgctttctgcagcctgaatcaattcctttgtgctgatgggctctcctaagagctttcctgagtcagttaactttacctcgtgtctacggtgctattcatgcgatacgggcgaggctgagatgctaagatt

SEQ ID NO: 163542 - DNA, 407 bp, Homo sapiens
  Payload ID: 12201
  Gene Symbol: ZDHHC3
  Gene Name: Palmitoyltransferase ZDHHC3
  ENST ID: ENST00000628490
  CDS Start-End: 1-182
cagtgatgtttgggacccaggtgcactccatctgcacagatgagacggctgcagatgatcacccaggaagagaatgcagaatgcccaaagcaaaccatctcagctggtcactgcttctgtgccaagaagggaggcctggcgaggggccagtcaggaagcagcatggcatcacatgctcatgacccacatgaaggtccctttagacttgtgtcaacaagatccattttctgaaacaactatttttgttctgattataaaagtaacattggctcattggtaaaacttggattgtgtgagaagtctacagaaataaatacaaatcctctagaattccatccccaaaagtaaccactcagacaaatgttctaatgtcatgtaaaaccatattaaaccatcttttctagctg

SEQ ID NO: 163543 - DNA, 472 bp, Homo sapiens
  Payload ID: 12201
  Gene Symbol: ZDHHC3
  Gene Name: Palmitoyltransferase ZDHHC3
  ENST ID: ENST00000630967
  CDS Start-End: 188-472
cccagcccaaccctgatacctttcatctttcctacagggggcagtgcccaaaggaaatgccactaaagaattcatcgagagtttacagttgaagcctgggcaggtggtgtacaagtgccccaaatgctgcagcatcaagcccgaccgagcccaccactgcagtgtttgtaagcggtgcattcggaagatggaccaccactgtccctgggtcaacaactgtgtaggcgagaacaaccagaagtacttcgtcctgtttacaatgtacatagctctcatttccttgcacgccctcatcatggtgggattccacttcctgcattgctttgaagaagattggacaaagtgcagctccttctctccacccaccacagtgattctccttatcctgctgtgctttgagggcctgctcttcctcattttcacatcagtgatgtttgggacccaggtgcactccatctgcacagatgagacg

SEQ ID NO: 163544 - DNA, 1336 bp, Homo sapiens
  Payload ID: 12201
  Gene Symbol: ZDHHC3
  Gene Name: Palmitoyltransferase ZDHHC3
  ENST ID: ENST00000629974
  CDS Start-End: 259-1260
cggcggccgctcctgcagccgcggccgccgccactgccgggagagctcgatgggcttctcctgcgcgccgcccggtgtctggccgagtccagagagccgcggcgcctcgttccgaggagccatcgccgaagcccgaggccgggtcccgggttggggactgcaggggaaggcagcggcggcggcggcgggagccccaccggggtctgggactggggaactgcctccggcttcacgatgccagtatggacagaatagcttatgatgcttatccccacccaccacttccgaaacattgagcggaaaccagaatacctccagccagagaagtgtgtcccacccccctaccctggtcctgtgggaaccatgtggtttatccgtgacggctgtggcatcgcctgtgccatcgttacctggtttctggtcctctatgcggagttcgtggtcctctttgtcatgctgattccatctcgagactacgtgtatagcatcatcaacggaattgtgttcaacctgctggccttcttggccctggcctcccactgccgggccatgctgacggaccccgtgagaacctgcacggaaatggccttcactttgcttgggcgaggtgcatcttttcctgaaaagctggacaagcctgtttcaggccgcagcaagtgcctcttgggggcagtgcccaaaggaaatgccactaaagaattcatcgagagtttacagttgaagcctgggcaggtggtgtacaagtgccccaaatgctgcagcatcaagcccgaccgagcccaccactgcagtgtttgtaagcggtgcattcggaagatggaccaccactgtccctgggtcaacaactgtgtaggcgagaacaaccagaagtacttcgtcctgtttacaatgtacatagctctcatttccttgcacgccctcatcatggtgggattccacttcctgcattgctttgaagaagattggacaaagtgcagctccttctctccacccaccacagtgattctccttatcctgctgtgctttgagggcctgctcttcctcattttcacatcagtgatgtttgggacccaggtgcactccatctgcacagatgagacgggaatagaacaattgaaaaaggaagagagaagatgggctaaaaaaacaaaatggatgaacatgaaagccgtttttggccaccccttctctctaggctgggccagcccctttgccacgccagaccaagggaaggcagacccgtaccagtatgtggtctgaaggaccccgaccggcatggccactcagacacaagtccacaccacagcactaccgtcccatccgttctcatgaatgt

SEQ ID NO: 163545 - DNA, 540 bp, Homo sapiens
  Payload ID: 12201
  Gene Symbol: ZDHHC3
  Gene Name: Palmitoyltransferase ZDHHC3
  ENST ID: ENST00000628075
  CDS Start-End: 1-335
tgcttatccccacccaccacttccgaaacattgagcggaaaccagaatacctccagccagagaagtgtgtcccacccccctaccctggtcctgtgggaaccatgtggtttatccgtgacggctgtggcatcgcctgtgccatcgttacctggtttctggtcctctatgcggagttcgtggtcctctttgtcatgctgattccatctcgagactacgtgtatagcatcatcaacggaattgtgttcaacctgctggccttcttggccctggcctcccactgccgggccatgctgacggaccccgtgaggggcagtgcccaaaggaaatgccactaaagaattcatcgagagtttacagttgaagcctgggcaggtggtgtacaagtgccccaaatgctgcagcatcaagcccgaccgagcccaccactgcagtgtttgtaagcggtgcattcggaagatggaccaccactgtccctgggtcaacaactgtgtaggcgagaacaaccagaagtacttcgtcctgtttacaatgtacatagct

SEQ ID NO: 163546 - DNA, 3226 bp, Homo sapiens
  Payload ID: 12201
  Gene Symbol: ZDHHC3
  Gene Name: Palmitoyltransferase ZDHHC3
  ENST ID: ENST00000627481
  CDS Start-End: 1-588
atcaagcccgaccgagcccaccactgcagtgtttgtaagcggtgcattcggaagatggaccaccactgtccctgggtcaacaactgtgtaggcgagaacaaccagaagtacttcgtcctgtttacaatgtacatagctctcatttccttgcacgccctcatcatggtgggattccacttcctgcattgctttgaagaagattggacaaagtgcagctccttctctccacccaccacagtgattctccttatcctgctgtgctttgagggcctgctcttcctcattttcacatcagtgatgtttgggacccaggtgcactccatctgcacagatgagacgggcatcgagcgcctcaaacgaaagaaccagcccagggagcacatggggagctggcagtcagtaaaggagacctttggtggggacttctccctgaactggttcaaccccttctccagaccgtgtcagccagagatccccagtgacaaagacatggtgcggcaggtgacatcgctgtcagacaccgaaacaatggaggatccatcagaggagacaaaggacgaggactctgtggaggtgacagatgaatagatgctgctgtggggagagaagcaaacactaaaaagtgctgtcaaccttcatcctggggttttggctaaaggggcttatgggcatggtgcgctcccagcacccccagtgcttcccttagccactcgcttggccttgccatttcccctccttcttctctccatgttgggccaggtctgggggtcgggagtaggctggggacatcagaggaggatgggggctttctcagagttcatctaagaagagtctgcactgagacggctcatcaagaaccgttctccaagactgggtggctttcacattctccgcccagcaaagggagcttttgaacagggcatcccaggggcagaaaagagcttgcctttggctttccccaggatttctgtcttctcttgggaaggctgggcccctggctcctggctttgagaagtaaggttgtgacagaaggaccgggcagggcttgccttggggacctgggttgggacactgacatcaggggagactagcctggaaagactgcagagctgccagctactccctggaaagggcttccccatgctgcctgccgaaattaggaggtagaggtggctgccacatctacctgcaagggccaggcatggttcaaagaggaccctgcattaagctctacacacacatgtgcaggacatgtccagcatggacagagccagagttaagacagtagcaccgaaaatgagcccccattccacagacactggagtcttcactgagcgagacagctgggagctgtcctgcctgtggctacatatctagccattcacagatgtggatatgggaaggacctctttggagctactggggactccctaaccactcgcatgagaacttaattgaatgttacctcttggagggagtctaataacacatgtaggtagaactgaccataaaccctgcctgtgtgtttgaaaaggccagttctcccaaattggtgcccatcttgtctctgaaaagatgggtgatggccagggtctgctgattgatgaatcagatgaatcaggaagatagacaaacacacacacacacacacacaccccaccaggatgagtctgccctctattcaccccatttgaagcctgtggtgtctgtgaccactgctgaaggtctgagcagcgttctggtgctcctaaaccccattccagtggttgctgaagcagcatcttctgcacaaagcccaacagaagggttcttatccccgtttggtataagaagtggattcaccacccactccctccacgtgcctttgttcctctctttggcccatttccccagcgtctactggcgtcaggattggcaggagcacaggcactcagcagagcatgcccctgcaagacctcagtgttagggccccccttccagctccaggcaaaagggcatgagtcctggccccaaggggcctgtggctgcagttcagaggagaagaaggtcagtgtttggaggtgcagcctcaggatgctgagaaaggaaactggcgaccgtgagaaagaaaagagccaagcagcatcctggttcttggacagcatctttggacactctgtgaagggcaacgatcctgccagagaccgtctctctacaactgatgacccactagggcctggggttaattgctcaaagggcccagtgttcacaaagccacctctgccctaacccttgccagagctctccaactatgacccacgagaggggtgatggtgggattctaacatcaacagagcaaccagaaagacattgggcctcccacactcaggctgcaggcccactttcttggtccttatcagctttaatatttattaatgacgacataggagcccgagtcagctgtaaaggccattaacttgcaatctggacaggaagttgacgctcaccactttgggtaagagctgctctgactgtagggccccctatttgttgtcctaacccagaagcagctctgggctgccaggatggtggatggaataccagagagttcacactagggaggaagcaatgcctgccccctggagtctcctagggggcagcagttagaataagggaagaggatttgctggtcactgtttgctgacatgggtttccatggtgagttcaggcctgaggacagcagtgtctgcaaaaccacatggcccttgagaaatgtccttgcacattgggcttcaaactcctcttctagggaatccatcttggcctgaaagcagaggtacaacaccagccccaaaggcaattctgttttcagattggttgctctggaaaggaaggctggggtgagggggcattttacttgcacagaggctgaccctgcctcccctcttcactgaccccatctccaaggtagacctcagccatgtcagtccctgttctgggaggtgctgggctgggccacagccagggttatgtaggtaattaacctgtccaaccctgagcctcgcctccccacaccagcaacacagtggtctctctgtggtgaccattcacagcataacattctgcttagcctcagactgaaagcattgcaactgatgtcaaaaccagatgagatcttacagggagagagattgggtgcaatttgcctctttctttgaataaaaagctctttgctcaccctcagtga

SEQ ID NO: 163547 - DNA, 2687 bp, Homo sapiens
  Payload ID: 12201
  Gene Symbol: ZDHHC3
  Gene Name: Palmitoyltransferase ZDHHC3
  ENST ID: ENST00000628351
  CDS Start-End: 270-1169
atcaacctgcgcggcggccgctcctgcagccgcggccgccgccactgccgggagagctcgatgggcttctcctgcgcgccgcccggtgtctggccgagtccagagagccgcggcgcctcgttccgaggagccatcgccgaagcccgaggccgggtcccgggttggggactgcaggggaaggcagcggcggcggcggcgggagccccaccggggtctgggactggggaactgcctccggcttcacgatgccagtatggacagaatagcttatgatgcttatccccacccaccacttccgaaacattgagcggaaaccagaatacctccagccagagaagtgtgtcccacccccctaccctggtcctgtgggaaccatgtggtttatccgtgacggctgtggcatcgcctgtgccatcgttacctggtttctggtcctctatgcggagttcgtggtcctctttgtcatgctgattccatctcgagactacgtgtatagcatcatcaacggaattgtgttcaacctgctggccttcttggccctggcctcccactgccgggccatgctgacggaccccggggcagtgcccaaaggaaatgccactaaagaattcatcgagagtttacagttgaagcctgggcaggtggtgtacaagtgccccaaatgctgcagcatcaagcccgaccgagcccaccactgcagtgtttgtaagcggtgcattcggaagatggaccaccactgtccctgggtcaacaactgtgtaggcgagaacaaccagaagtacttcgtcctgtttacaatgtacatagctctcatttccttgcacgccctcatcatggtgggattccacttcctgcattgctttgaagaagattggacaaagtgcagctccttctctccacccaccacagtgattctccttatcctgctgtgctttgagggcctgctcttcctcattttcacatcagtgatgtttgggacccaggtgcactccatctgcacagatgagacgggaatagaacaattgaaaaaggaagagagaagatgggctaaaaaaacaaaatggatgaacatgaaagccgtttttggccaccccttctctctaggctgggccagcccctttgccacgccagaccaagggaaggcagacccgtaccagtatgtggtctgaaggaccccgaccggcatggccactcagacacaagtccacaccacagcactaccgtcccatccgttctcatgaatgtttaaatcgaaaaagcaaaacaactactcttaaaactttttttatgtctcaagtaaaatggctgagcattgcagagaaaaaaaaaagtccccacattttattttttaaaaaccatcctttcgatttcttttggtgaccgaagctgctctcttttccttttaaaatcacttctctggcctctggtttctctctgctgtctgtctggcatgactaatgtagagggcgctgtctcgcgctgtgcccattctactaactgagtgagacatgacgctgtgcgtggatggaatagtctggacacctggtgggggatgcatgggaaagccaggagggccctgacctcccactgcccaggaggcagtggcgggctccccgatgggacataaaacctcaccgaagatggatgcttaccccttgaggcctgagaagggcaggatcagaagggaccttggcacagcgacctcatcccccaagtggacacggtttgcctgctaactcgcaaagcaattgcctgccttgtactttatgggcttggggtgtgtagaatgattttgcgggggagtggggagaaagatgaaagaggtcttatttgtattctgaatcagcaattatattccctgtgattatttggaagagtgtgtaggaaagacgtttttccagttcaaaatgccttatacaatcaagaggaaaaaaaattacacaatttcaggcaagctacgttttcctttgtttcatctgcttcctctctcaccaccccatctccctctcttccccagcaagatgtcaattaagcagtgtgaattctgactgcaataggcaccagtgcccaacacatacagccccaccatcatccccttctcattttataaacctcaaagtggattcactttctgatagttaacccccataaatgtgcacgtacctgtgtcttatctatattttaacctgggagactgttgtcctggcatggagatgaccatgatgctggggttacctcacagtccccaccctttcaaagttgacatatggccatcccattggccagaatccacagacacacctaagcctgtggcactgggacagaatagattttccatttgagaggcacttcctgtgtcagtcttgtttgaaggaggtggtgatggtggatagaggtgaaggaggtagggagtgccctccaagtgcaaaaataacaaatatgattattgaccatcggggaattctcacacattgatttgttttttaagcaattgccagaaacccccttttttagcttttgcttggggtgggggtaggagttaaggtttattcaatcctgtcctgggtagggcgaaagttaatctagccatgtgatttttcagaaaagtaagtggaacatgctgccacttttcaattctgtcagtgcttccacatggaaacaaaatgcaataaaatttttccaaaacc

SEQ ID NO: 163548 - DNA, 537 bp, Homo sapiens
  Payload ID: 12201
  Gene Symbol: ZDHHC3
  Gene Name: Palmitoyltransferase ZDHHC3
  ENST ID: ENST00000631250
  CDS Start-End: 404-537
agcgcgtcatcaacctgcgcggcggccgctcctgcagccgcggccgccgccactgccgggagagctcgatgggcttctcctgcgcgccgcccggtgtctggccgagtccagagagccgcggcgcctcgttccgaggagccatcgccgaagcccgaggccgggtcccgggttggggactgcaggggaaggcagcggcggcggcggcgggagccccaccggggtctgggactggggaactgcctccggcttcacgggggcagtgcccaaaggaaatgccactaaagaattcatcgagagtttacagttgaagcctgggcaggtggtgtacaagtgccccaaatgctgcagcatcaagcccgaccgagcccaccactgcagtgtttgtaagcggtgcattcggaagatggaccaccactgtccctgggtcaacaactgtgtaggcgagaacaaccagaagtacttcgtcctgtttacaatgtacatagctctcatttccttgcacgccctcatcatggtgggattccacttcctgcattg

SEQ ID NO: 163549 - DNA, 4537 bp, Homo sapiens
  Payload ID: 12202
  Gene Symbol: PAN2
  Gene Name: PAN2 poly(A) specific ribonuclease subunit
  Uniprot ID: Q504Q3
  ENST ID: ENST00000257931
  CDS Start-End: 260-3865
cttggcgccgtagtggttaggttgagccctaggcgtgggggagaactggggaaactggaatttcccgcggagctgacagcgcttgcgctccccctactcgttctaattccacgcgctccaaaatatccgccatggagaaatcttggccaggatgtccattctaggcccatcggtgctgtcttgctgaaggttgggtcaggcatctaaagggactgtggtaagggagggtgtgacacaggtgtaagctgccatcgtcatcatgaactttgagggtctggaccctggactggcagaatatgccccagccatgcattctgccctggaccctgtcttggatgcccacctgaacccaagtctgctacagaatgtggagctggacccagagggagtggccttggaggctcttcccgtccaggaatcagtgcacataatggaaggtgtctactctgaattgcacagcgtggtggctgaagtgggtgtacctgtttccgtctcccactttgacttgcacgaggagatgctgtgggtggggagccacgggggccatgccacttcattttttggcccagccttggagcgctactcatcctttcaagtcaatggcagtgatgatattcggcagatccagagcctggagaatggtatcctttttctcaccaagaacaacctcaagtatatggcccgtgggggcctcattatatttgattacctgctggatgagaatgaggatatgcacagtctcctactgactgacagcagcactctactcgttggtgggctgcagaatcacataatagagattgatcttaacactgtccaggagactcagaagtatgcagtagagacgcctggagtcaccatcatgagacagacaaatcgcttcttcttctgcggccacacgtctggcaaggtttccctgagagacctccgtacttttaaggtggaacatgagtttgatgccttctcaggaagtctgtcagactttgatgtgcatggcaacctgctagctgcctgtggcttctccagccgcctcactggcctggcctgcgaccgtttcctcaaggtgtatgatttgcgcatgatgcgtgccatcacaccacttcaagtacatgtggatcctgccttcttgcgcttcattcctacatatacttctcgtcttgctatcatctctcagtcagggcagtgccaattctgtgaacccacaggcctggccaacccagccgatatctttcatgtgaatcctgtggggcctctgctaatgacatttgatgtgtcagccagcaagcaggctctggcctttggggattctgagggctgtgtgcacctctggactgattccccggagccttccttcaacccctactcccgtgagactgagtttgctttgccgtgtctcgtggactcactgcctcctctggactggagccaggacctgctgcctctttccctcatccctgtcccactcaccactgacacacttctctctgattggcctgctgccaactctgctccagctcccaggcgagcaccacccgtggatgcagagattctgcgcaccatgaagaaggtgggcttcattggctatgcgcccaatccccgcaccaggctgcgcaatcagataccctacagactcaaggagtcagacagtgaatttgacagcttcagccaggtcactgagtcaccagtaggacgagaagaggaaccacatctccacatggtttctaagaaataccgcaaggtgaccatcaaatattccaagctagggctggaggactttgacttcaaacactacaataagaccttgtttgctggattagagccccacattcccaacgcctactgtaactgcatgatccaggtgctctatttcctggagcctgtacgctgtctaattcaaaaccacctttgccagaaggagttctgtctggcatgtgagctgggcttcctgtttcacatgttggacctctctcgtggtgacccttgccagggcaataattttcttcgggcattccgtactattcctgaggcctcagccctcggtctaatcctggctgactcagatgaggcctcaggcaagggcaatctggccaggctcattcagaggtggaatcgcttcattctcactcaactgcatcaagatatgcaggagctggaaataccacaggcttatcgaggtgctggaggcagcttttgctcatcgggggactctgttattgggcagctcttcagctgtgagatggagaactgcagcctctgccgctgtggcagtgagaccgtgcgagcctcatccactctgcttttcacactctcctaccctgatggtagcaaaagtgataaaactgggaagaactatgactttgctcaggtgctgaagcgaagcatctgcctggaccagaatacacaggcctggtgtgacacctgtgaaaagtaccagcccacgattcagacccgcaacatccgccatctgccagatattcttgtcatcaattgtgaggtgaacagctcaaaagaggctgatttctggagaatgcaggctgaggttgccttcaagatggcagtaaagaaacacggtggggaaatctccaagaacaaggaatttgctttggctgattggaaggaactagggagtccagagggtgtgctggtgtgtccctccattgaggagttgaagaacgtctggcttcctttctccattcgcatgaagatgaccaaaaacaaagggctggatgtttgcaattggactgatggggatgagatgcagtggggcccagccagggcagaggaggagcatggtgtctatgtgtatgacctgatggctactgtggtacacatcctggactcacgcacagggggcagcctggtggctcacatcaaagttggagagacctaccaccagcgcaaggagggcgttactcaccagcagtggtatctgttcaatgactttcttattgaacctattgataagcatgaagctgtgcagtttgacatgaattggaaagtacctgcaatcctttattatgtcaaacggaatctcaattccagatacaacctgaacatcaagaaccctattgaggcaagtgtcttgctggctgaagcctcgctggcacggaagcagcggaaaacacatactacctttattccactgatgctgaatgagatgccacagattggggacctggtgggtctggatgctgagtttgtcacccttaatgaggaggaagcagagttacgcagtgatggtaccaagtctaccattaaaccaagccagatgtcagtagccaggattacctgtgttcggggccagggacccaatgagggtatccccttcattgatgactacatctctacccaggagcaggtggtggattacttgactcaatactcgggtataaagcctggtgacctcgatgccaaaatttcctccaagcacctaacaactctcaagtctacctacttaaagcttcgttttctcattgacattggagtcaagtttgtgggtcatggcctgcagaaggacttccgggtcatcaacctgatggtgcccaaggaccaagtccttgacactgtctacctgttccatatgccccgaaaacgaatgatttccctgcgattccttgcttggtactttctggacctgaagattcaaggggaaacccatgacagtattgaggatgcccgcacagcccttcagctgtaccgaaagtatctggagctaagcaaaaatggcactgagcctgagtctttccacaaggtgctcaagggtctttatgagaagggcagaaagatggactggaaggtgcctgagcctgagggccaaacaagtcccaagaatgcagctgtcttctcctcagtgctggcgctctgactacccttcccaaagaaccacggccctctccctttactgttctatagccccagaactgggagatggcttcctaagttggctataccttgtccacttccagtactggacgtgctcagggtctagggtcacagatggtgctattaattgaactggaacacagcagaattgttgcaaaggttctaggagccagattcattccttcttcattctttgcaaaacagtggtacagacatggagtctagaattgacccagatggaaagtaattggtattcttaatatcctgggtgactaatatccaggcagagaagctcctggaaccataactgtaagttcctagctggctagggattgaagtcctggacagtgacagaggataccacagtagttcaagacttagcacaagtcaccaactgcttcagggatacctggaggggccagcaagtagagtgttggtggcccaagcaaaccagtgttgccaataccattgccaaaagggcctttggatcctggacaaagcttggctgccggcttcatttattcctgctgatggctgagaagcatctgtcttccatcccacttgcctgtcccaagttttgttccattttttaaaaatttgttgtaaactgcatgttttataaaataaaaataaaatatcgtttgttatttatctc

SEQ ID NO: 163550 - DNA, 4576 bp, Homo sapiens
  Payload ID: 12202
  Gene Symbol: PAN2
  Gene Name: PAN2 poly(A) specific ribonuclease subunit
  Uniprot ID: Q504Q3
  ENST ID: ENST00000440411
  CDS Start-End: 307-3903
atgccccgagcccttcttgattggaagaagcgcctcggaccccggtccttggcgccgtagtggttaggttgagccctaggcgtgggggagaactggggaaactggaatttcccgcggagctgacagcgcttgcgctccccctactcgttctaattccacgcgctccaaaatatccgccatggagaaatcttggccaggatgtccattctaggcccatcggtgctgtcttgctgaaggttgggtcaggcatctaaagggactgtggtaagggagggtgtgacacaggtgtaagctgccatcgtcatcatgaactttgagggtctggaccctggactggcagaatatgccccagccatgcattctgccctggaccctgtcttggatgcccacctgaacccaagtctgctacagaatgtggagctggacccagagggagtggccttggaggctcttcccgtccaggaatcagtgcacataatggaaggtgtctactctgaattgcacagcgtggtggctgaagtgggtgtacctgtttccgtctcccactttgacttgcacgaggagatgctgtgggtggggagccacgggggccatgccacttcattttttggcccagccttggagcgctactcatcctttcaagtcaatggcagtgatgatattcggcagatccagagcctggagaatggtatcctttttctcaccaagaacaacctcaagtatatggcccgtgggggcctcattatatttgattacctgctggatgagaatgaggatatgcacagtctcctactgactgacagcagcactctactcgttggtgggctgcagaatcacataatagagattgatcttaacactgtccaggagactcagaagtatgcagtagagacgcctggagtcaccatcatgagacagacaaatcgcttcttcttctgcggccacacgtctggcaaggtttccctgagagacctccgtacttttaaggtggaacatgagtttgatgccttctcaggaagtctgtcagactttgatgtgcatggcaacctgctagctgcctgtggcttctccagccgcctcactggcctggcctgcgaccgtttcctcaaggtgtatgatttgcgcatgatgcgtgccatcacaccacttcaagtacatgtggatcctgccttcttgcgcttcattcctacatatacttctcgtcttgctatcatctctcagtcagggcagtgccaattctgtgaacccacaggcctggccaacccagccgatatctttcatgtgaatcctgtggggcctctgctaatgacatttgatgtgtcagccagcaagcaggctctggcctttggggattctgagggctgtgtgcacctctggactgattccccggagccttccttcaacccctactcccgtgagactgagtttgctttgccgtgtctcgtggactcactgcctcctctggactggagccaggacctgctgcctctttccctcatccctgtcccactcaccactgacacacttctctctgattggcctgctgccaactctgctccagctcccaggcgagcaccacccgtggatgcagagattctgcgcaccatgaagaaggtgggcttcattggctatgcgcccaatccccgcaccaggctgcgcaatcagataccctacagactcaaggagtcagacagtgaatttgacagcttcagccaggtcactgagtcaccagtaggacgagaagaggaaccacatctccacatggtttctaagaaataccgcaaggtgaccatcaaatattccaagctagggctggaggactttgacttcaaacactacaataagaccttgtttgctggattagagccccacattcccaacgcctactgtaactgcatgatccaggtgctctatttcctggagcctgtacgctgtctaattcaaaaccacctttgccagaaggagttctgtctggcatgtgagctgggcttcctgtttcacatgttggacctctctcgtggtgacccttgccagggcaataattttcttcgggcattccgtactattcctgaggcctcagccctcggtctaatcctggctgactcagatgaggcctcaggcaagggcaatctggccaggctcattcagaggtggaatcgcttcattctcactcaactgcatcaagatatgcaggagctggaaataccacaggcttatcgaggtgctggaggcagcagcttttgctcatcgggggactctgttattgggcagctcttcagctgtgagatggagaactgcagcctctgccgctgtggcagtgagaccgtgcgagcctcatccactctgcttttcacactctcctaccctgatgataaaactgggaagaactatgactttgctcaggtgctgaagcgaagcatctgcctggaccagaatacacaggcctggtgtgacacctgtgaaaagtaccagcccacgattcagacccgcaacatccgccatctgccagatattcttgtcatcaattgtgaggtgaacagctcaaaagaggctgatttctggagaatgcaggctgaggttgccttcaagatggcagtaaagaaacacggtggggaaatctccaagaacaaggaatttgctttggctgattggaaggaactagggagtccagagggtgtgctggtgtgtccctccattgaggagttgaagaacgtctggcttcctttctccattcgcatgaagatgaccaaaaacaaagggctggatgtttgcaattggactgatggggatgagatgcagtggggcccagccagggcagaggaggagcatggtgtctatgtgtatgacctgatggctactgtggtacacatcctggactcacgcacagggggcagcctggtggctcacatcaaagttggagagacctaccaccagcgcaaggagggcgttactcaccagcagtggtatctgttcaatgactttcttattgaacctattgataagcatgaagctgtgcagtttgacatgaattggaaagtacctgcaatcctttattatgtcaaacggaatctcaattccagatacaacctgaacatcaagaaccctattgaggcaagtgtcttgctggctgaagcctcgctggcacggaagcagcggaaaacacatactacctttattccactgatgctgaatgagatgccacagattggggacctggtgggtctggatgctgagtttgtcacccttaatgaggaggaagcagagttacgcagtgatggtaccaagtctaccattaaaccaagccagatgtcagtagccaggattacctgtgttcggggccagggacccaatgagggtatccccttcattgatgactacatctctacccaggagcaggtggtggattacttgactcaatactcgggtataaagcctggtgacctcgatgccaaaatttcctccaagcacctaacaactctcaagtctacctacttaaagcttcgttttctcattgacattggagtcaagtttgtgggtcatggcctgcagaaggacttccgggtcatcaacctgatggtgcccaaggaccaagtccttgacactgtctacctgttccatatgccccgaaaacgaatgatttccctgcgattccttgcttggtactttctggacctgaagattcaaggggaaacccatgacagtattgaggatgcccgcacagcccttcagctgtaccgaaagtatctggagctaagcaaaaatggcactgagcctgagtctttccacaaggtgctcaagggtctttatgagaagggcagaaagatggactggaaggtgcctgagcctgagggccaaacaagtcccaagaatgcagctgtcttctcctcagtgctggcgctctgactacccttcccaaagaaccacggccctctccctttactgttctatagccccagaactgggagatggcttcctaagttggctataccttgtccacttccagtactggacgtgctcagggtctagggtcacagatggtgctattaattgaactggaacacagcagaattgttgcaaaggttctaggagccagattcattccttcttcattctttgcaaaacagtggtacagacatggagtctagaattgacccagatggaaagtaattggtattcttaatatcctgggtgactaatatccaggcagagaagctcctggaaccataactgtaagttcctagctggctagggattgaagtcctggacagtgacagaggataccacagtagttcaagacttagcacaagtcaccaactgcttcagggatacctggaggggccagcaagtagagtgttggtggcccaagcaaaccagtgttgccaataccattgccaaaagggcctttggatcctggacaaagcttggctgccggcttcatttattcctgctgatggctgagaagcatctgtcttccatcccacttgcctgtcccaagttttgttccattttttaaaaatttgttgtaaactgcatgttttataaaataaaaataaaatatcgtttgttatttatctca

SEQ ID NO: 163551 - DNA, 5372 bp, Homo sapiens
  Payload ID: 12202
  Gene Symbol: PAN2
  Gene Name: PAN2 poly(A) specific ribonuclease subunit
  Uniprot ID: Q504Q3
  ENST ID: ENST00000425394
  CDS Start-End: 378-3986
agagaattctgggtaactagccgtttccgtcaccttcccctgcccccgccccaattgtgggtaactggccattattgttttcctctagagaatcctgggtagctattggagaggattctaggaaactgacttctcgttctccccaccgtccaatccacccgttttcacccccaattctgggagaaagcaccttaaatccctctacctaactccaacccccgcaattctcgctcccttcacctgatgattcagggctgaacaaggccaggatgtccattctaggcccatcggtgctgtcttgctgaaggttgggtcaggcatctaaagggactgtggtaagggagggtgtgacacaggtgtaagctgccatcgtcatcatgaactttgagggtctggaccctggactggcagaatatgccccagccatgcattctgccctggaccctgtcttggatgcccacctgaacccaagtctgctacagaatgtggagctggacccagagggagtggccttggaggctcttcccgtccaggaatcagtgcacataatggaaggtgtctactctgaattgcacagcgtggtggctgaagtgggtgtacctgtttccgtctcccactttgacttgcacgaggagatgctgtgggtggggagccacgggggccatgccacttcattttttggcccagccttggagcgctactcatcctttcaagtcaatggcagtgatgatattcggcagatccagagcctggagaatggtatcctttttctcaccaagaacaacctcaagtatatggcccgtgggggcctcattatatttgattacctgctggatgagaatgaggatatgcacagtctcctactgactgacagcagcactctactcgttggtgggctgcagaatcacataatagagattgatcttaacactgtccaggagactcagaagtatgcagtagagacgcctggagtcaccatcatgagacagacaaatcgcttcttcttctgcggccacacgtctggcaaggtttccctgagagacctccgtacttttaaggtggaacatgagtttgatgccttctcaggaagtctgtcagactttgatgtgcatggcaacctgctagctgcctgtggcttctccagccgcctcactggcctggcctgcgaccgtttcctcaaggtgtatgatttgcgcatgatgcgtgccatcacaccacttcaagtacatgtggatcctgccttcttgcgcttcattcctacatatacttctcgtcttgctatcatctctcagtcagggcagtgccaattctgtgaacccacaggcctggccaacccagccgatatctttcatgtgaatcctgtggggcctctgctaatgacatttgatgtgtcagccagcaagcaggctctggcctttggggattctgagggctgtgtgcacctctggactgattccccggagccttccttcaacccctactcccgtgagactgagtttgctttgccgtgtctcgtggactcactgcctcctctggactggagccaggacctgctgcctctttccctcatccctgtcccactcaccactgacacacttctctctgattggcctgctgccaactctgctccagctcccaggcgagcaccacccgtggatgcagagattctgcgcaccatgaagaaggtgggcttcattggctatgcgcccaatccccgcaccaggctgcgcaatcagataccctacagactcaaggagtcagacagtgaatttgacagcttcagccaggtcactgagtcaccagtaggacgagaagaggaaccacatctccacatggtttctaagaaataccgcaaggtgaccatcaaatattccaagctagggctggaggactttgacttcaaacactacaataagaccttgtttgctggattagagccccacattcccaacgcctactgtaactgcatgatccaggtgctctatttcctggagcctgtacgctgtctaattcaaaaccacctttgccagaaggagttctgtctggcatgtgagctgggcttcctgtttcacatgttggacctctctcgtggtgacccttgccagggcaataattttcttcgggcattccgtactattcctgaggcctcagccctcggtctaatcctggctgactcagatgaggcctcaggcaagggcaatctggccaggctcattcagaggtggaatcgcttcattctcactcaactgcatcaagatatgcaggagctggaaataccacaggcttatcgaggtgctggaggcagcagcttttgctcatcgggggactctgttattgggcagctcttcagctgtgagatggagaactgcagcctctgccgctgtggcagtgagaccgtgcgagcctcatccactctgcttttcacactctcctaccctgatggtagcaaaagtgataaaactgggaagaactatgactttgctcaggtgctgaagcgaagcatctgcctggaccagaatacacaggcctggtgtgacacctgtgaaaagtaccagcccacgattcagacccgcaacatccgccatctgccagatattcttgtcatcaattgtgaggtgaacagctcaaaagaggctgatttctggagaatgcaggctgaggttgccttcaagatggcagtaaagaaacacggtggggaaatctccaagaacaaggaatttgctttggctgattggaaggaactagggagtccagagggtgtgctggtgtgtccctccattgaggagttgaagaacgtctggcttcctttctccattcgcatgaagatgaccaaaaacaaagggctggatgtttgcaattggactgatggggatgagatgcagtggggcccagccagggcagaggaggagcatggtgtctatgtgtatgacctgatggctactgtggtacacatcctggactcacgcacagggggcagcctggtggctcacatcaaagttggagagacctaccaccagcgcaaggagggcgttactcaccagcagtggtatctgttcaatgactttcttattgaacctattgataagcatgaagctgtgcagtttgacatgaattggaaagtacctgcaatcctttattatgtcaaacggaatctcaattccagatacaacctgaacatcaagaaccctattgaggcaagtgtcttgctggctgaagcctcgctggcacggaagcagcggaaaacacatactacctttattccactgatgctgaatgagatgccacagattggggacctggtgggtctggatgctgagtttgtcacccttaatgaggaggaagcagagttacgcagtgatggtaccaagtctaccattaaaccaagccagatgtcagtagccaggattacctgtgttcggggccagggacccaatgagggtatccccttcattgatgactacatctctacccaggagcaggtggtggattacttgactcaatactcgggtataaagcctggtgacctcgatgccaaaatttcctccaagcacctaacaactctcaagtctacctacttaaagcttcgttttctcattgacattggagtcaagtttgtgggtcatggcctgcagaaggacttccgggtcatcaacctgatggtgcccaaggaccaagtccttgacactgtctacctgttccatatgccccgaaaacgaatgatttccctgcgattccttgcttggtactttctggacctgaagattcaaggggaaacccatgacagtattgaggatgcccgcacagcccttcagctgtaccgaaagtatctggagctaagcaaaaatggcactgagcctgagtctttccacaaggtgctcaagggtctttatgagaagggcagaaagatggactggaaggtgcctgagcctgagggccaaacaagtcccaagaatgcagctgtcttctcctcagtgctggcgctctgactacccttcccaaagaaccacggccctctccctttactgttctatagccccagaactgggagatggcttcctaagttggctataccttgtccacttccagtactggacgtgctcagggtctagggtcacagatggtgctattaattgaactggaacacagcagaattgttgcaaaggttctaggagccagattcattccttcttcattctttgcaaaacagtggtacagacatggagtctagaattgacccagatggaaagtaattggtattcttaatatcctgggtgactaatatccaggcagagaagctcctggaaccataactgtaagttcctagctggctagggattgaagtcctggacagtgacagaggataccacagtagttcaagacttagcacaagtcaccaactgcttcagggatacctggaggggccagcaagtagagtgttggtggcccaagcaaaccagtgttgccaataccattgccaaaagggcctttggatcctggacaaagcttggctgccggcttcatttattcctgctgatggctgagaagcatctgtcttccatcccacttgcctgtcccaagttttgttccattttttaaaaatttgttgtaaactgcatgttttataaaataaaaataaaatatcgtttgttatttatctcattagagaactgctagtgtgggttctctggcttcagtcttcctctccttcctttgaaggtaaaggtccggaatccaaagttatggatatgaaagggtataattaggccgggcgcggtggctcacttctgtaatcctagcactttgggaggcagaggtgggtggaacacgaggtcaggagttaaagaccagcctgaccaagatggtgaaaccccgtctctactaaaaatacaaaaattagctgggagtggtggatggcgactgtaaccctagctgaggcagaaaattgcttcaacccgggaggcggaggttgcagtgagccgagatcacgccactgtatgccagcctgggcgatagggcgagactccgtctcaaaaaaaggggaaaaaggtataatttatgccttttctgggcaatgctgggtctttgctatagctgcccagtaccctaagtcagactgaagatgtacagtatggtttccgttaattgtgtaagccgacaaactacaggtcccaggatagcttgagacttgtagttgctcacaaagatgggtccggtgctgcggtgcttcctgggagatgtagtttcctgtgtattgaaacctggactgctcgctggccggcagcgcaccgttttgaaggtcctagcccacctgggctggctcacgcgcacgactagccgctcccatacagcacgcccggactctgtcgtcgctt

SEQ ID NO: 163552 - DNA, 585 bp, Homo sapiens
  Payload ID: 12202
  Gene Symbol: PAN2
  Gene Name: PAN2 poly(A) specific ribonuclease subunit
  ENST ID: ENST00000547572
  CDS Start-End: 251-585
aggcgtgggggagaactggggaaactggaatttcccgcggagctgacagcgcttgcgctccccctactcgttctaattccacgcgctccaaaatatccgccatggagaaatcttgggccatgccacttcattttttggcccagccttggagcgctactcatcctttcaagtcaatggcagtgatgatattcggcagatccagagcctggagaatggtatcctttttctcaccaagaacaacctcaagtatatggcccgtgggggcctcattatatttgattacctgctggatgagaatgaggatatgcacagtctcctactgactgacagcagcactctactcgttggtgggctgcagaatcacataatagagattgatcttaacactgtccaggagactcagaagtatgcagtagagacgcctggagtcaccatcatgagacagacaaatcgcttcttcttctgcggccacacgtctggcaaggtttccctgagagacctccgtacttttaaggtggaacatgagtttgatgccttctcaggaagtctgtcagactttgatgtgcatggcaacctgctagctgc

SEQ ID NO: 163553 - DNA, 4641 bp, Homo sapiens
  Payload ID: 12202
  Gene Symbol: PAN2
  Gene Name: PAN2 poly(A) specific ribonuclease subunit
  Uniprot ID: Q504Q3
  ENST ID: ENST00000548043
  CDS Start-End: 371-3979
ttctgggtaactagccgtttccgtcaccttcccctgcccccgccccaattgtgggtaactggccattattgttttcctctagagaatcctgggtagctattggagaggattctaggaaactgacttctcgttctccccaccgtccaatccacccgttttcacccccaattctgggagaaagcaccttaaatccctctacctaactccaacccccgcaattctcgctcccttcacctgatgattcagggctgaacaaggcaagatgtccattctaggcccatcggtgctgtcttgctgaaggttgggtcaggcatctaaagggactgtggtaagggagggtgtgacacaggtgtaagctgccatcgtcatcatgaactttgagggtctggaccctggactggcagaatatgccccagccatgcattctgccctggaccctgtcttggatgcccacctgaacccaagtctgctacagaatgtggagctggacccagagggagtggccttggaggctcttcccgtccaggaatcagtgcacataatggaaggtgtctactctgaattgcacagcgtggtggctgaagtgggtgtacctgtttccgtctcccactttgacttgcacgaggagatgctgtgggtggggagccacgggggccatgccacttcattttttggcccagccttggagcgctactcatcctttcaagtcaatggcagtgatgatattcggcagatccagagcctggagaatggtatcctttttctcaccaagaacaacctcaagtatatggcccgtgggggcctcattatatttgattacctgctggatgagaatgaggatatgcacagtctcctactgactgacagcagcactctactcgttggtgggctgcagaatcacataatagagattgatcttaacactgtccaggagactcagaagtatgcagtagagacgcctggagtcaccatcatgagacagacaaatcgcttcttcttctgcggccacacgtctggcaaggtttccctgagagacctccgtacttttaaggtggaacatgagtttgatgccttctcaggaagtctgtcagactttgatgtgcatggcaacctgctagctgcctgtggcttctccagccgcctcactggcctggcctgcgaccgtttcctcaaggtgtatgatttgcgcatgatgcgtgccatcacaccacttcaagtacatgtggatcctgccttcttgcgcttcattcctacatatacttctcgtcttgctatcatctctcagtcagggcagtgccaattctgtgaacccacaggcctggccaacccagccgatatctttcatgtgaatcctgtggggcctctgctaatgacatttgatgtgtcagccagcaagcaggctctggcctttggggattctgagggctgtgtgcacctctggactgattccccggagccttccttcaacccctactcccgtgagactgagtttgctttgccgtgtctcgtggactcactgcctcctctggactggagccaggacctgctgcctctttccctcatccctgtcccactcaccactgacacacttctctctgattggcctgctgccaactctgctccagctcccaggcgagcaccacccgtggatgcagagattctgcgcaccatgaagaaggtgggcttcattggctatgcgcccaatccccgcaccaggctgcgcaatcagataccctacagactcaaggagtcagacagtgaatttgacagcttcagccaggtcactgagtcaccagtaggacgagaagaggaaccacatctccacatggtttctaagaaataccgcaaggtgaccatcaaatattccaagctagggctggaggactttgacttcaaacactacaataagaccttgtttgctggattagagccccacattcccaacgcctactgtaactgcatgatccaggtgctctatttcctggagcctgtacgctgtctaattcaaaaccacctttgccagaaggagttctgtctggcatgtgagctgggcttcctgtttcacatgttggacctctctcgtggtgacccttgccagggcaataattttcttcgggcattccgtactattcctgaggcctcagccctcggtctaatcctggctgactcagatgaggcctcaggcaagggcaatctggccaggctcattcagaggtggaatcgcttcattctcactcaactgcatcaagatatgcaggagctggaaataccacaggcttatcgaggtgctggaggcagcagcttttgctcatcgggggactctgttattgggcagctcttcagctgtgagatggagaactgcagcctctgccgctgtggcagtgagaccgtgcgagcctcatccactctgcttttcacactctcctaccctgatggtagcaaaagtgataaaactgggaagaactatgactttgctcaggtgctgaagcgaagcatctgcctggaccagaatacacaggcctggtgtgacacctgtgaaaagtaccagcccacgattcagacccgcaacatccgccatctgccagatattcttgtcatcaattgtgaggtgaacagctcaaaagaggctgatttctggagaatgcaggctgaggttgccttcaagatggcagtaaagaaacacggtggggaaatctccaagaacaaggaatttgctttggctgattggaaggaactagggagtccagagggtgtgctggtgtgtccctccattgaggagttgaagaacgtctggcttcctttctccattcgcatgaagatgaccaaaaacaaagggctggatgtttgcaattggactgatggggatgagatgcagtggggcccagccagggcagaggaggagcatggtgtctatgtgtatgacctgatggctactgtggtacacatcctggactcacgcacagggggcagcctggtggctcacatcaaagttggagagacctaccaccagcgcaaggagggcgttactcaccagcagtggtatctgttcaatgactttcttattgaacctattgataagcatgaagctgtgcagtttgacatgaattggaaagtacctgcaatcctttattatgtcaaacggaatctcaattccagatacaacctgaacatcaagaaccctattgaggcaagtgtcttgctggctgaagcctcgctggcacggaagcagcggaaaacacatactacctttattccactgatgctgaatgagatgccacagattggggacctggtgggtctggatgctgagtttgtcacccttaatgaggaggaagcagagttacgcagtgatggtaccaagtctaccattaaaccaagccagatgtcagtagccaggattacctgtgttcggggccagggacccaatgagggtatccccttcattgatgactacatctctacccaggagcaggtggtggattacttgactcaatactcgggtataaagcctggtgacctcgatgccaaaatttcctccaagcacctaacaactctcaagtctacctacttaaagcttcgttttctcattgacattggagtcaagtttgtgggtcatggcctgcagaaggacttccgggtcatcaacctgatggtgcccaaggaccaagtccttgacactgtctacctgttccatatgccccgaaaacgaatgatttccctgcgattccttgcttggtactttctggacctgaagattcaaggggaaacccatgacagtattgaggatgcccgcacagcccttcagctgtaccgaaagtatctggagctaagcaaaaatggcactgagcctgagtctttccacaaggtgctcaagggtctttatgagaagggcagaaagatggactggaaggtgcctgagcctgagggccaaacaagtcccaagaatgcagctgtcttctcctcagtgctggcgctctgactacccttcccaaagaaccacggccctctccctttactgttctatagccccagaactgggagatggcttcctaagttggctataccttgtccacttccagtactggacgtgctcagggtctagggtcacagatggtgctattaattgaactggaacacagcagaattgttgcaaaggttctaggagccagattcattccttcttcattctttgcaaaacagtggtacagacatggagtctagaattgacccagatggaaagtaattggtattcttaatatcctgggtgactaatatccaggcagagaagctcctggaaccataactgtaagttcctagctggctagggattgaagtcctggacagtgacagaggataccacagtagttcaagacttagcacaagtcaccaactgcttcagggatacctggaggggccagcaagtagagtgttggtggcccaagcaaaccagtgttgccaataccattgccaaaagggcctttggatcctggacaaagcttggctgccggcttcatttattcctgctgatggctgagaagcatctgtcttccatcccacttgcctgtcccaagttttgttccattttttaaaaatttgttgtaaactgcatgttttataaaataaaaataaaatatcgtttgt

SEQ ID NO: 163554 - DNA, 5301 bp, Homo sapiens
  Payload ID: 12202
  Gene Symbol: PAN2
  Gene Name: PAN2 poly(A) specific ribonuclease subunit
  Uniprot ID: Q504Q3
  ENST ID: ENST00000610546
  CDS Start-End: 307-3915
atgccccgagcccttcttgattggaagaagcgcctcggaccccggtccttggcgccgtagtggttaggttgagccctaggcgtgggggagaactggggaaactggaatttcccgcggagctgacagcgcttgcgctccccctactcgttctaattccacgcgctccaaaatatccgccatggagaaatcttggccaggatgtccattctaggcccatcggtgctgtcttgctgaaggttgggtcaggcatctaaagggactgtggtaagggagggtgtgacacaggtgtaagctgccatcgtcatcatgaactttgagggtctggaccctggactggcagaatatgccccagccatgcattctgccctggaccctgtcttggatgcccacctgaacccaagtctgctacagaatgtggagctggacccagagggagtggccttggaggctcttcccgtccaggaatcagtgcacataatggaaggtgtctactctgaattgcacagcgtggtggctgaagtgggtgtacctgtttccgtctcccactttgacttgcacgaggagatgctgtgggtggggagccacgggggccatgccacttcattttttggcccagccttggagcgctactcatcctttcaagtcaatggcagtgatgatattcggcagatccagagcctggagaatggtatcctttttctcaccaagaacaacctcaagtatatggcccgtgggggcctcattatatttgattacctgctggatgagaatgaggatatgcacagtctcctactgactgacagcagcactctactcgttggtgggctgcagaatcacataatagagattgatcttaacactgtccaggagactcagaagtatgcagtagagacgcctggagtcaccatcatgagacagacaaatcgcttcttcttctgcggccacacgtctggcaaggtttccctgagagacctccgtacttttaaggtggaacatgagtttgatgccttctcaggaagtctgtcagactttgatgtgcatggcaacctgctagctgcctgtggcttctccagccgcctcactggcctggcctgcgaccgtttcctcaaggtgtatgatttgcgcatgatgcgtgccatcacaccacttcaagtacatgtggatcctgccttcttgcgcttcattcctacatatacttctcgtcttgctatcatctctcagtcagggcagtgccaattctgtgaacccacaggcctggccaacccagccgatatctttcatgtgaatcctgtggggcctctgctaatgacatttgatgtgtcagccagcaagcaggctctggcctttggggattctgagggctgtgtgcacctctggactgattccccggagccttccttcaacccctactcccgtgagactgagtttgctttgccgtgtctcgtggactcactgcctcctctggactggagccaggacctgctgcctctttccctcatccctgtcccactcaccactgacacacttctctctgattggcctgctgccaactctgctccagctcccaggcgagcaccacccgtggatgcagagattctgcgcaccatgaagaaggtgggcttcattggctatgcgcccaatccccgcaccaggctgcgcaatcagataccctacagactcaaggagtcagacagtgaatttgacagcttcagccaggtcactgagtcaccagtaggacgagaagaggaaccacatctccacatggtttctaagaaataccgcaaggtgaccatcaaatattccaagctagggctggaggactttgacttcaaacactacaataagaccttgtttgctggattagagccccacattcccaacgcctactgtaactgcatgatccaggtgctctatttcctggagcctgtacgctgtctaattcaaaaccacctttgccagaaggagttctgtctggcatgtgagctgggcttcctgtttcacatgttggacctctctcgtggtgacccttgccagggcaataattttcttcgggcattccgtactattcctgaggcctcagccctcggtctaatcctggctgactcagatgaggcctcaggcaagggcaatctggccaggctcattcagaggtggaatcgcttcattctcactcaactgcatcaagatatgcaggagctggaaataccacaggcttatcgaggtgctggaggcagcagcttttgctcatcgggggactctgttattgggcagctcttcagctgtgagatggagaactgcagcctctgccgctgtggcagtgagaccgtgcgagcctcatccactctgcttttcacactctcctaccctgatggtagcaaaagtgataaaactgggaagaactatgactttgctcaggtgctgaagcgaagcatctgcctggaccagaatacacaggcctggtgtgacacctgtgaaaagtaccagcccacgattcagacccgcaacatccgccatctgccagatattcttgtcatcaattgtgaggtgaacagctcaaaagaggctgatttctggagaatgcaggctgaggttgccttcaagatggcagtaaagaaacacggtggggaaatctccaagaacaaggaatttgctttggctgattggaaggaactagggagtccagagggtgtgctggtgtgtccctccattgaggagttgaagaacgtctggcttcctttctccattcgcatgaagatgaccaaaaacaaagggctggatgtttgcaattggactgatggggatgagatgcagtggggcccagccagggcagaggaggagcatggtgtctatgtgtatgacctgatggctactgtggtacacatcctggactcacgcacagggggcagcctggtggctcacatcaaagttggagagacctaccaccagcgcaaggagggcgttactcaccagcagtggtatctgttcaatgactttcttattgaacctattgataagcatgaagctgtgcagtttgacatgaattggaaagtacctgcaatcctttattatgtcaaacggaatctcaattccagatacaacctgaacatcaagaaccctattgaggcaagtgtcttgctggctgaagcctcgctggcacggaagcagcggaaaacacatactacctttattccactgatgctgaatgagatgccacagattggggacctggtgggtctggatgctgagtttgtcacccttaatgaggaggaagcagagttacgcagtgatggtaccaagtctaccattaaaccaagccagatgtcagtagccaggattacctgtgttcggggccagggacccaatgagggtatccccttcattgatgactacatctctacccaggagcaggtggtggattacttgactcaatactcgggtataaagcctggtgacctcgatgccaaaatttcctccaagcacctaacaactctcaagtctacctacttaaagcttcgttttctcattgacattggagtcaagtttgtgggtcatggcctgcagaaggacttccgggtcatcaacctgatggtgcccaaggaccaagtccttgacactgtctacctgttccatatgccccgaaaacgaatgatttccctgcgattccttgcttggtactttctggacctgaagattcaaggggaaacccatgacagtattgaggatgcccgcacagcccttcagctgtaccgaaagtatctggagctaagcaaaaatggcactgagcctgagtctttccacaaggtgctcaagggtctttatgagaagggcagaaagatggactggaaggtgcctgagcctgagggccaaacaagtcccaagaatgcagctgtcttctcctcagtgctggcgctctgactacccttcccaaagaaccacggccctctccctttactgttctatagccccagaactgggagatggcttcctaagttggctataccttgtccacttccagtactggacgtgctcagggtctagggtcacagatggtgctattaattgaactggaacacagcagaattgttgcaaaggttctaggagccagattcattccttcttcattctttgcaaaacagtggtacagacatggagtctagaattgacccagatggaaagtaattggtattcttaatatcctgggtgactaatatccaggcagagaagctcctggaaccataactgtaagttcctagctggctagggattgaagtcctggacagtgacagaggataccacagtagttcaagacttagcacaagtcaccaactgcttcagggatacctggaggggccagcaagtagagtgttggtggcccaagcaaaccagtgttgccaataccattgccaaaagggcctttggatcctggacaaagcttggctgccggcttcatttattcctgctgatggctgagaagcatctgtcttccatcccacttgcctgtcccaagttttgttccattttttaaaaatttgttgtaaactgcatgttttataaaataaaaataaaatatcgtttgttatttatctcattagagaactgctagtgtgggttctctggcttcagtcttcctctccttcctttgaaggtaaaggtccggaatccaaagttatggatatgaaagggtataattaggccgggcgcggtggctcacttctgtaatcctagcactttgggaggcagaggtgggtggaacacgaggtcaggagttaaagaccagcctgaccaagatggtgaaaccccgtctctactaaaaatacaaaaattagctgggagtggtggatggcgactgtaaccctagctgaggcagaaaattgcttcaacccgggaggcggaggttgcagtgagccgagatcacgccactgtatgccagcctgggcgatagggcgagactccgtctcaaaaaaaggggaaaaaggtataatttatgccttttctgggcaatgctgggtctttgctatagctgcccagtaccctaagtcagactgaagatgtacagtatggtttccgttaattgtgtaagccgacaaactacaggtcccaggatagcttgagacttgtagttgctcacaaagatgggtccggtgctgcggtgcttcctgggagatgtagtttcctgtgtattgaaacctggactgctcgctggccggcagcgcaccgttttgaaggtcctagcccacctgggctggctcacgcgcacgactagccgctcccatacagcacgcccggactctgtcgtcgctt

SEQ ID NO: 163555 - DNA, 2833 bp, Homo sapiens
  Payload ID: 12203
  Gene Symbol: PAN3
  Gene Name: PAN3 poly(A) specific ribonuclease subunit
  Uniprot ID: Q58A45
  ENST ID: ENST00000380958
  CDS Start-End: 153-2816
ctccccgggcggctccggctcccgcagcgggacagacccacccgcccaggcttttatccggcaccggcagcgtcttcctttcctcccccgtctatggtggtggcggcggcggctcctcgggcggcggcggaagacgaggctgcggcgttgccatgaacagtggcggcggcctcccgcccccctcggccgccgcctccccttcctcctcctcgctggcggcggcggtggcggtggtggccccgccgggggtcgggggtgtccccggcggggcggcggtaggagtgaagctgaagtactgccgctactacgctaaggataagacttgcttctacggggaggagtgtcagttcctgcatgaggaccctgccgccggggctgccccgggcctcggcctccatagcaacagcgtccccctggctctggctggtgcacccgtggccggctttccgccgggagccgtcgcgggcgggggagctgggccgccccccgggcccaagaagccggacctgggggacccggggaccggagccgcagccggcggaggaggcagtagcgggggactcgatggaccgcggctggcaattccaggaatggatggaggtgctttaactgatacaagtctcacagattcctattttagcaccagctttattggagtcaatggatttggaagccctgtagaaacaaaatatcccctgatgcagagaatgactaatagtagcagctccccaagccttctaaatgacagtgccaagccatattcagcccatgatcctctaacatcacctgcttcatccttgtttaatgactttggtgccctcaacatctctcagagacgaaagccaaggaagtatcgcctggggatgctggaggagaggctagttccgatgggatcaaaggcacgaaaagcaaagaaccctattggctgccttgctgacaggtgtaaatcaggagtacccatcaatatggtttggtggaacagagtcacagaaaacaatttacagacaccaaatcctactgcaagcgagtttattcctaaaggaggatcaacctccaggctgagtaacgtgtcccagtcaaatatgtctgccttctctcaagttttctctcacccatccatgggaagccctgctactgctggattagcgccaggaatgtcgttgtctgctgggtcttcccctcttcattcccccaagattactccacatacttctcctgctcccagaagaagaagtcacactccaaatccagcaagttacatggtgccttctagtgcctctacatctgttaataatcctgtttctcagactccgtcttctggtcaggtgatccaaaaggaaactgttggtgggacgacttacttctatacagacacaactccagcacctttgactggaatggtgtttccaaactatcatatttatcctccaactgcacctcacgttgcttatatgcaaccgaaagcaaacgcaccttccttcttcatggctgatgaactccgacaggagctgatcaacagacatttaataacaatggctcaaattgatcaagcagatatgccagcagttcctacagaggttgacagctaccatagcctattccctctagaaccactgccacctcccaaccggatacagaaatcaagtaattttggatatattacatcttgctacaaagctgtaaacagcaaagatgatctgccatattgccttcggaggatacatggttttcgtcttgttaacacaaagtgcatggtgttggtcgacatgtggaagaaaattcaacactcaaatatcgtaactttgcgtgaagtatttaccactaaagcatttgctgagccctctcttgtgtttgcatatgatttccatgctggaggagaaactatgatgagcagacactttaatgaccctaatgctgatgcctacttcaccaagagaaagtggggtcagcacgagggaccattgcccaggcagcatgctggattattgccagaatctcttatttgggcatatattgtccaactaagttctgcattgcgtaccattcatacagcaggtttggcatgtcgagttatggatccaacaaagattctgataactggcaaaacaaggttgcgagtaaattgtgttggagtttttgatgttttaacatttgataacagtcaaaataataatccattggcattaatggcccagtaccagcaagcagatctgatatcattaggaaaagttgtgttggctttggcttgcaactctttggcaggaattcagcgagagaatttacagaaagccatggaactggtgacaatcaactattcctctgacctgaagaatctgattttgtatttgttgactgaccaaaacaggatgcgaagtgtaaatgacatcatgcccatgattggtgctcgattttatactcaattggatgctgctcaaatgagaaatgatgtcatagaggaagaccttgcaaaggaggttcaaaatggaagactgtttaggctcctagcaaaattgggaacaatcaatgagaggccggagtttcagaaggatcccacttggtcagagactggagaccgttatctgttgaaactctttagggatcatctttttcatcaggtgacagaagcaggtgctccctggattgacctcagtcatataatttcttgtcttaacaagctagatgctggtgtgccagaaaaaataagcctgatttccagagatgagaagagtgtacttgtggtgacctacagtgacttaaagcgctgctttgaaaatacttttcaagaactgattgcagctgcaaatggtcagttgtagtatttgctaaaaaagca

SEQ ID NO: 163556 - DNA, 4940 bp, Homo sapiens
  Payload ID: 12203
  Gene Symbol: PAN3
  Gene Name: PAN3 poly(A) specific ribonuclease subunit
  ENST ID: ENST00000399613
  CDS Start-End: 64-2127
gccgcagccggcggaggaggcagtagcgggggactcgatggaccgcggctggcaattccaggaatggatggaggtgctttaactgatacaagtctcacagattcctattttagcaccagctttattggagtcaatggatttggaagccctgtagaaacaaaatatcccctgatgcagagaatgactaatagtagcagctccccaagccttctaaatgacagtgccaagccatattcagcccatgatcctctaacatcacctgcttcatccttgtttaatgactttggtgccctcaacatctctcagagacgaaagacaccaaatcctactgcaagcgagtttattcctaaaggaggatcaacctccaggctgagtaacgtgtcccagtcaaatatgtctgccttctctcaagttttctctcacccatccatgggaagccctgctactgctggattagcgccaggaatgtcgttgtctgctgggtcttcccctcttcattcccccaagattactccacatacttctcctgctcccagaagaagaagtcacactccaaatccagcaagttacatggtgccttctagtgcctctacatctgttaataatcctgtttctcagactccgtcttctggtcaggtgatccaaaaggaaactgttggtgggacgacttacttctatacagacacaactccagcacctttgactggaatggtgtttccaaactatcatatttatcctccaactgcacctcacgttgcttatatgcaaccgaaagcaaacgcaccttccttcttcatggctgatgaactccgacaggagctgatcaacagacatttaataacaatggctcaaattgatcaagcagatatgccagcagttcctacagaggttgacagctaccatagcctattccctctagaaccactgccacctcccaaccggatacagaaatcaagtaattttggatatattacatcttgctacaaagctgtaaacagcaaagatgatctgccatattgccttcggaggatacatggttttcgtcttgttaacacaaagtgcatggtgttggtcgacatgtggaagaaaattcaacactcaaatatcgtaactttgcgtgaagtatttaccactaaagcatttgctgagccctctcttgtgtttgcatatgatttccatgctggaggagaaactatgatgagcagacactttaatgaccctaatgctgatgcctacttcaccaagagaaagtggggtcagcacgagggaccattgcccaggcagcatgctggattattgccagaatctcttatttgggcatatattgtccaactaagttctgcattgcgtaccattcatacagcaggtttggcatgtcgagttatggatccaacaaagattctgataactggcaaaacaaggttgcgagtaaattgtgttggagtttttgatgttttaacatttgataacagtcaaaataataatccattggcattaatggcccagtaccagcaagcagatctgatatcattaggaaaagttgtgttggctttggcttgcaactctttggcaggaattcagcgagagaatttacagaaagccatggaactggtgacaatcaactattcctctgacctgaagaatctgattttgtatttgttgactgaccaaaacaggatgcgaagtgtaaatgacatcatgcccatgattggtgctcgattttatactcaattggatgctgctcaaatgagaaatgatgtcatagaggaagaccttgcaaaggaggttcaaaatggaagactgtttaggctcctagcaaaattgggaacaatcaatgagaggccggagtttcagaaggatcccacttggtcagagactggagaccgttatctgttgaaactctttagggatcatctttttcatcaggtgacagaagcaggtgctccctggattgacctcagtcatataatttcttgtcttaacaagctagatgctggtgtgccagaaaaaataagcctgatttccagagatgagaagagtgtacttgtggtgacctacagtgacttaaagcgctgctttgaaaatacttttcaagaactgattgcagctgcaaatggtcagttgtagtatttgctaaaaaagcacgcaggacatggctaaagaccttaaccaatagcaaattgcactacagctgaacttttcatcatctcattcacatttgggaaacgaacaggagatgagcaaagctgcttgcacttcagtcaggtacactgttacttgaaaggaagaatgtttcacttacccaagagctatggctgccattggaggctgttatctgtgaagaatttattttagatttaggagcaccatcaggtgaatgatgttcctgcttttgttttttccacttgtatatgcactaattttaattttttaaagactttttctgatctttgaacttttgccacattgtatacttataatgggaaactttgcaaggacatttttgggaagcaatgctgggcagcgtttttgccattgagggttgcagaatttgctctttttgggatgggttgccctgaataacattacggaccaggtaaataatttcatagaagttcagtatagtacgtaattcttgtaagagtatcgtatgcaagctctctgtatgccacccactgttagttcaaattgagatttttgttttgttttgttcttaagaacataccaagaaaataccagtgaattgttggatatgaattccctgttagttgatttaaatcctttctgaataaagatcagataaacagtaactgaaggagcatgtatagctctttccttcaaattcaactagagcctttttaaaaagacatttgcctgctagtcagatacatttacatttatgcaaattttttaaataggagaaaattaagaaattgtgttaaaggcctaaagttcaggagtgtattactttaggttctttccagtttgctggtttttttttttttttttttttttttttttgggcgggggggaggtttatgaagttttgctctttgaaccacagctttattatggtcctttacactggagacagacacagagacactgttcagaagatgaactaaactcagcagtggtctggtatcaagagctttctgatgttttacagcctgaatttggagggataacgatctgctgtgcctttgcagtcactgcttagcccaaagtaatagtacttttgataataactcactctgtgcgatattcctgaataagtccatctcaaaagtttgggattttcctcctcttaactttcttaatatttggacatgcagttgtcgccaaacttgggtattcatggaatttctagtaaatgaaatacctatactttgatactgaagactgccaaatacataggaattttctttcttaaaaaacagtaatgaagactatatctcctttcccagcactgaatgttttactagcactgggtgctcaccatgcaactgaagaaaatgtggaaactcaaaaggtcaggacagacttccaagcacttgcaactgatgttactgtcttcaattttaataattacacatatttgtatatttcagagaagtttttaatatttctctgtccactttttataagctttaaaatgattttctctgccttgagatttgcatcaagaaaaagcacctctcttcacctgaaagctttgaagactagagacacgctttacacgttttaacaagtatattgagtccacgtttggtagcatcagttgttgagttaaaaagaaaattattgcatttgatctggatggattttaaaagaatataatgttcaatattaaaaggataattcacatttgccaccataatgttcttttttatgtaaaaagaagaacttggagacattaacatgaaaaagtcttttatcattagctcatgtatttgaggaagagcagctgtctttttatatgttttttgacaaatcatattgtattcttttgtacaaaaaagaactacttgtattctagaagaaatatgaaatgcttaatttataagcgggctggagattttttccaatattgttttctttgaaaatgaaaggggatcatctattttagttttggggtctgggaactttttgaaaatttaatttgtggaccaatgttttgtgaaagctaaagagggcaggggttaaaatagggcttgaatttctcattctgtatagaccagcaaacttccctgtgcaaggcaagtttacatcacaaatccaagaatgtttgcatcctaaatgctagtttgcttcagcccctagttaacctcaggacttggtttgcatataaaaggtagacagctgatatgttttcatgaataaatattgtcagccagaaaaggttggtgtcaggtaatgcatatttttttaagctttgttttatatttatttttcatttagtttttattgggaatggttttcaaagaactctcagttctgcctaggtgtttttgggggagccctgttttccatagtgtaattccatttaagaggttgtctaaaagtctttttaattaatagaaagattttaatatccaagagtagtcaaattaaggatataaactttccacaccttcctgtcgtgacagataaaagcacagaaaggacaacccttgaaatcatgtaacgttggtcatttcaatattttgtacctgttttaaattctgttagtgtatttacttcattgtaaatatttttgagggtacctttgtattttgcttttgaccttggttctgtgatttggatgtcaacaacttccctaaaaagcaccagtgtgttaggttctaatgtcatgacccaatttgtgttattcatctttaatcctgttttcagtctctatgtgtacagcagtatttttaataaagaattacagagataaa

SEQ ID NO: 163557 - DNA, 1537 bp, Homo sapiens
  Payload ID: 12204
  Gene Symbol: PTF1A
  Gene Name: pancreas specific transcription factor, 1a
  Uniprot ID: Q7RTS3
  ENST ID: ENST00000376504
  CDS Start-End: 205-1191
cagccctccccagcgcagcgcgagcgcgggccagagcgcagcggccgcgggcactccagggaggcccgggggcgggcagcccggcggccgcctagctgcccccagccagggccccgggagggaggggctcggacgggccttagaaactcaccaagaactaacacgcgcagcccggcagtcccgctgcccactgcggcggcgagcatggacgcggtgttgctggagcacttccccgggggcctagacgcctttccttcttcgtacttcgacgaggacgacttcttcaccgaccagtcttcacgggaccccctggaggacggcgatgagctgctggcggacgagcaggccgaggtggagttccttagccaccagctccacgagtactgctaccgcgacggggcgtgcctgctgctgcagcccgcgcccccggccgccccgctagcgctcgccccgccgtcctcggggggcctcggtgagccagacgacggcggcggcggcggctactgctgcgagacgggggcgcccccaggcggcttcccctactcgcccggctcgccgccctcgtgcctggcctacccgtgcgccggggcggcagtactgtctcccggggcgcggctgcgcggcctgagcggagcggcggctgcggcggcgcggcgccggcggcgggtgcgctccgaggcggagctgcagcagctgcggcaggcggccaacgtgcgcgagcggcggcgcatgcagtccatcaacgacgccttcgaggggctgcgctcgcacatccccacgctgccctacgagaagcgcctctccaaggtggacacgctgcgcctggccatcggctacatcaacttcctcagcgagctcgtgcaggccgacctgcccttgcgcggcggtggcgcgggcggctgcggggggccgggcggcggcgggcgcctgggcggggacagcccgggcagccaggcccagaaggtcatcatctgccatcggggcacccggtccccctcccccagcgaccctgattatggcctccctcccctagcaggacactctctctcatggactgatgaaaaacaactcaaggaacaaaatattatccgaacagccaaagtctggaccccagaggaccccagaaaactcaacagcaaatcttccttcaacaacatagaaaacgaaccaccatttgagtttgtgtcctgagaagtcccagactcggctgaagatctgattatgtctctgtgcatattgtacatgtaaatatctataatgtaaatgtaatttaagaatcaaatttttcgaatggcaatcaactgtttattatttatctatttattatcctgttgagttgatgaaatagatgatttctttttaaatatataatttatataacttatcctgattttctgaaaatatgcaatagcctatgattttcctgaactctgtgttgttgggagaactctggccagaaaacgtcctgcttatttattgccagatatggtttatttctaagcgttgtcaataaatgctatttacaccttttcctgaa

SEQ ID NO: 163558 - DNA, 2501 bp, Homo sapiens
  Payload ID: 12205
  Gene Symbol: PDX1
  Gene Name: pancreatic and duodenal homeobox 1
  Uniprot ID: P52945
  ENST ID: ENST00000381033
  CDS Start-End: 120-971
aaagcgagcaggggtggcgccgggagtgggaacgccacacagtgccaaatccccggctccagctcccgactcccggctcccggctcccggctcccggtgcccaatcccgggccgcagccatgaacggcgaggagcagtactacgcggccacgcagctttacaaggacccatgcgcgttccagcgaggcccggcgccggagttcagcgccagcccccctgcgtgcctgtacatgggccgccagcccccgccgccgccgccgcacccgttccctggcgccctgggcgcgctggagcagggcagccccccggacatctccccgtacgaggtgccccccctcgccgacgaccccgcggtggcgcaccttcaccaccacctcccggctcagctcgcgctcccccacccgcccgccgggcccttcccggagggagccgagccgggcgtcctggaggagcccaaccgcgtccagctgcctttcccatggatgaagtctaccaaagctcacgcgtggaaaggccagtgggcaggcggcgcctacgctgcggagccggaggagaacaagcggacgcgcacggcctacacgcgcgcacagctgctagagctggagaaggagttcctattcaacaagtacatctcacggccgcgccgggtggagctggctgtcatgttgaacttgaccgagagacacatcaagatctggttccaaaaccgccgcatgaagtggaaaaaggaggaggacaagaagcgcggcggcgggacagctgtcgggggtggcggggtcgcggagcctgagcaggactgcgccgtgacctccggcgaggagcttctggcgctgccgccgccgccgccccccggaggtgctgtgccgcccgctgcccccgttgccgcccgagagggccgcctgccgcctggccttagcgcgtcgccacagccctccagcgtcgcgcctcggcggccgcaggaaccacgatgagaggcaggagctgctcctggctgaggggcttcaaccactcgccgaggaggagcagagggcctaggaggaccccgggcgtggaccacccgccctggcagttgaatggggcggcaattgcggggcccaccttagaccgaaggggaaaacccgctctctcaggcgcatgtgccagttggggccccgcgggtagatgccggcaggccttccggaagaaaaagagccattggtttttgtagtattggggccctcttttagtgatactggattggcgttgtttgtggctgttgcgcacatccctgccctcctacagcactccaccttgggacctgtttagagaagccggctcttcaaagacaatggaaactgtaccatacacattggaaggctccctaacacacacagcggggaagctgggccgagtaccttaatctgccataaagccattcttactcgggcgacccctttaagtttagaaataattgaaaggaaatgtttgagttttcaaagatcccgtgaaattgatgccagtggaatacagtgagtcctcctcttcctcctcctcctcttccccctccccttcctcctcctcctcttcttttccctcctcttcctcttcctcctgctctcctttcctccccctcctcttttccctcctcttcctcttcctcctgctctcctttcctccccctcctctttctcctcctcctcctcttcttccccctcctctccctcctcctcttcttccccctcctctccctcctcctcttcttctccctcctcttcctcttcctcctcttccacgtgctctcctttcctccccctcctcttgctccccttcttccccgtcctcttcctcctcctcctcttcttctccctcctcttcctcctcctctttcttcctgacctctttctttctcctcctcctccttctacctccccttctcatccctcctcttcctcttctctagctgcacacttcactactgcacatcttataacttgcacccctttcttctgaggaagagaacatcttgcaaggcagggcgagcagcggcagggctggcttaggagcagtgcaagagtccctgtgctccagttccacactgctggcagggaaggcaaggggggacgggcctggatctgggggtgagggagaaagatggacccctgggtgaccactaaaccaaagatattcggaactttctatttaggatgtggacgtaattcctgttccgaggtagaggctgtgctgaagacaagcacagtggcctggtgcgccttggaaaccaacaactattcacgagccagtatgaccttcacatctttagaaattatgaaaacgtatgtgattggagggtttggaaaaccagttatcttatttaacattttaaaaattacctaacagttatttacaaacaggtctgtgcatcccaggtctgtcttcttttcaaggtctgggccttgtgctcgggttatgtttgtgggaaatgcttaataaatactgataatatgggaagagatgaaaactga

SEQ ID NO: 163559 - DNA, 1483 bp, Homo sapiens
  Payload ID: 12206
  Gene Symbol: PNLIP
  Gene Name: pancreatic lipase
  Uniprot ID: P16233
  ENST ID: ENST00000369221
  CDS Start-End: 29-1426
gcgtgtggaacctgacggaactgccacgatgctgccactttggactctttcactgctgctgggagcagtagcaggaaaagaagtttgctacgaaagactcggctgcttcagtgatgactccccatggtcaggaattacggaaagacccctccatatattgccttggtctccaaaagatgtcaacacccgcttcctcctatatactaatgagaacccaaacaactttcaagaagttgccgcagattcatcaagcatcagtggctccaatttcaaaacaaatagaaaaactcgctttattattcatggattcatagacaagggagaagaaaactggctggccaatgtgtgcaagaatctgttcaaggtggaaagtgtgaactgtatctgtgtggactggaaaggtggctcccgaactggatacacacaagcctcgcagaacatcaggatcgtgggagcagaagtggcatattttgttgaatttcttcagtcggcgttcggttactcaccttccaatgtgcatgtcattggccacagcctgggtgcccacgctgctggggaggctggaaggagaaccaatgggaccattggacgcatcacagggttggacccagcagaaccttgctttcagggcacacctgaattagtccgattggaccccagcgatgccaaatttgtggatgtaattcacacggatggtgcccccatagtccccaatttggggtttggaatgagccaagtcgtgggccacctagatttctttccaaatggaggagtggaaatgcctggatgtaaaaagaacattctctctcagattgtggacatagacggaatctgggaagggactcgagactttgcggcctgtaatcacttaagaagctacaaatattacactgatagcatcgtcaaccctgatggctttgctggattcccctgtgcctcttacaacgtcttcactgcaaacaagtgtttcccttgtccaagtggaggctgcccacagatgggtcactatgctgatagatatcctgggaaaacaaatgatgtgggccagaaattttatctagacactggtgatgccagtaattttgcacgttggaggtataaggtatctgtcacactgtctggaaaaaaggttacaggacacatactagtttctttgttcggaaataaaggaaactctaagcagtatgaaattttcaagggcactctcaaaccagatagtactcattccaatgaatttgactcagatgtggatgttggggacttgcagatggttaaatttatttggtataacaatgtgatcaacccaactttacctagagtgggagcatccaagattatagtggagacaaatgttggaaaacagttcaacttctgtagtccagaaaccgtcagggaggaagttctgctcaccctcacaccgtgttaggagactactgttatttgaccaatgaattgacttctaataaaatctagtggtgatgca

SEQ ID NO: 163560 - DNA, 1497 bp, Homo sapiens
  Payload ID: 12207
  Gene Symbol: PNLIPRP1
  Gene Name: pancreatic lipase-related protein 1
  Uniprot ID: P54315
  ENST ID: ENST00000358834
  CDS Start-End: 35-1438
ccggtgggagggaacatctggaacattagacaggatgctgatcttctggacaatcacacttttcctgctgggagcagccaaaggaaaagaagtttgctatgaggacctcgggtgcttttctgacactgagccctggggcgggacagcaatcaggcccctgaaaattctcccctggagccctgagaagatcggcacccgcttcctgctgtacaccaatgaaaacccaaacaactttcaaattctcctcctctctgatccatcaacaattgaggcatcaaattttcaaatggacagaaagacccggttcatcatccatggcttcatagacaaaggagatgagagctgggtgacagacatgtgcaagaaactgttcgaggtggaggaggtgaactgcatctgcgtggactggaagaagggctcccaagccacctacacacaggctgccaacaacgtgcgagtggtgggcgcccaggtggcccagatgctcgacatcctcttgacagagtatagctaccccccttccaaagttcacctcattggccacagcctgggagcccacgtggctggagaggcaggaagcaagactccaggcctgagcaggattacagggttggatcctgtagaagcaagtttcgagagtactcctgaagaggtgcgacttgatccctctgatgctgactttgttgatgtgattcacacggatgcagctcccctgatcccattcttgggttttggaacgaaccaacagatgggtcatcttgacttcttccccaatggaggagagagcatgccgggatgcaagaagaatgccctgtctcagatcgtggatctagatggcatctgggcgggaacccgggactttgtggcttgcaatcacctaagaagctacaagtattacttggaaagcatcctcaatcccgatgggtttgctgcatatccctgcacttcctacaagtcctttgagtctgacaagtgcttcccgtgtccagatcaaggatgcccacagatgggtcactatgctgataaatttgctggcaggacaagtgaagagcagcagaaattcttcttgaacacaggagaggctagcaatttcgctcgctggagatatggggtttccatcacactgtctggaagaacagccactggtcagatcaaagttgctttgtttggaaataagggaaacactcaccagtacagtatcttcagggggattctcaaaccaggctcaacccattcctatgagtttgatgcaaagctggatgttggaacaattgagaaagtcaagtttctttggaataacaatgtgataaatccaaccctccccaaagtgggtgccaccaagatcactgtgcaaaagggagaagagaagacagtgtacaacttctgtagcgaagacacagtgcgggaagacacgctgctcaccctcacgccctgctaagctcccggggcgacgaggctgctgcgttcacactaataaaatccactggtgcatctgta

SEQ ID NO: 163561 - DNA, 445 bp, Homo sapiens
  Payload ID: 12207
  Gene Symbol: PNLIPRP1
  Gene Name: pancreatic lipase-related protein 1
  ENST ID: ENST00000471549
  CDS Start-End: 51-445
ctgctctggcaatgcccggtgagactgaattatgtttaaatttattgtagatgctgatcttctggacaatcacacttttcctgctgggagcagccaaaggaaaagaagtttgctatgaggacctcgggtgcttttctgacactgagccctggggcgggacagcaatcaggcccctgaaaattctcccctggagccctgagaagatcggcacccgcttcctgctgtacaccaatgaaaacccaaacaactttcaaattctcctcctctctgatccatcaacaattgaggcatcaaattttcaaatggacagaaagacccggttcatcatccatggcttcatagacaaaggagatgagagctgggtgacagacatgtgcaagaaactgttcgaggtggaggaggtgaactgcatctgcgtggactggaagaagggctcccaagccac

SEQ ID NO: 163562 - DNA, 1012 bp, Homo sapiens
  Payload ID: 12207
  Gene Symbol: PNLIPRP1
  Gene Name: pancreatic lipase-related protein 1
  ENST ID: ENST00000497792
  CDS Start-End: 25-381
ctttccccctgctgtgacgtacagatgctgatcttctggacaatcacacttttcctgctgggagcagccaaaggaaaagaagtttgctatgaggacctcgggtgcttttctgacactgagccctggggcgggacagcaatcaggcccctgaaaattctcccctggagccctgagaagatcggcacccgcttcctgctgtacaccaatgaaaacccaaacaactttcaaattctcctcctctctgatccatcaacaattgaggcatcaaattttcaaatggacagaaagacccggttcatcatccatggcttcatagacaaaggagatgagagctgggtgacagacatgtgcaagcagcctggggcatcgccaagagcctgaaaggaccccttacagtcaaatccacaaggtcatttagacactggccaccggagattgcacctaagacttttccttttcaaaacaggactcttttcatgatgcaattgtttttcccttactaaccaaccttactgaatttggttgaaggaaaccagagagtagccagcttccaattaatctgcaagctggagggggaatcagtttgcctttctcatagcattcaccctgaaggataactcctaattaccaacaggattccctaacagagtctagtttatctcatgccctagctaggagaagagagaagtggccatttctgagccctggctggataaggtttcccctgctcccattatctccccaaccccactatctccccaacaccagaaactgttcgaggtggaggaggtgaactgcatctgcgtggactggaagaagggctcccaagccacctacacacaggctgccaacaacgtgcgagtggtgggcgcccaggtggcccagatgctcgacatcctcttgacagagtatagctaccccccttccaaagttcacctcattggccacagcctgggagcccacgtggctggagaggcaggaagcaagactccaggcctgagcaggattacag

SEQ ID NO: 163563 - DNA, 579 bp, Homo sapiens
  Payload ID: 12207
  Gene Symbol: PNLIPRP1
  Gene Name: pancreatic lipase-related protein 1
  ENST ID: ENST00000527980
  CDS Start-End: 89-579
gaggtaaacagtactgaagtccagggcgtcggtgctcactgctctggcaatgcccggtgagactgaattatgtttaaatttattgtagatgctgatcttctggacaatcacacttttcctgctgggagcagccaaaggaaaagaagtttgctatgaggacctcgggtgcttttctgacactgagccctggggcgggacagcaatcaggcccctgaaaattctcccctggagccctgagaagatcggcacccgcttcctgctgtacaccaatgaaaacccaaacaactttcaaattctcctcctctctgatccatcaacaattgaggcatcaaattttcaaatggacagaaagacccggttcatcatccatggcttcatagacaaaggagatgagagctgggtgacagacatgtgcaagactccaggcctgagcaggattacagggttggatcctgtagaagcaagtttcgagagtactcctgaagaggtgcgacttgatccctctgatgctgactttgttgatgtgattcacacggatgcagctcccctgatcccattcttgggttttggaacgaacca

SEQ ID NO: 163564 - DNA, 1533 bp, Homo sapiens
  Payload ID: 12207
  Gene Symbol: PNLIPRP1
  Gene Name: pancreatic lipase-related protein 1
  Uniprot ID: P54315
  ENST ID: ENST00000528052
  CDS Start-End: 72-1475
gagggaacatctggaacattagacagggtaagccacctttgcaactcctttccccctgctgtgacgtacagatgctgatcttctggacaatcacacttttcctgctgggagcagccaaaggaaaagaagtttgctatgaggacctcgggtgcttttctgacactgagccctggggcgggacagcaatcaggcccctgaaaattctcccctggagccctgagaagatcggcacccgcttcctgctgtacaccaatgaaaacccaaacaactttcaaattctcctcctctctgatccatcaacaattgaggcatcaaattttcaaatggacagaaagacccggttcatcatccatggcttcatagacaaaggagatgagagctgggtgacagacatgtgcaagaaactgttcgaggtggaggaggtgaactgcatctgcgtggactggaagaagggctcccaagccacctacacacaggctgccaacaacgtgcgagtggtgggcgcccaggtggcccagatgctcgacatcctcttgacagagtatagctaccccccttccaaagttcacctcattggccacagcctgggagcccacgtggctggagaggcaggaagcaagactccaggcctgagcaggattacagggttggatcctgtagaagcaagtttcgagagtactcctgaagaggtgcgacttgatccctctgatgctgactttgttgatgtgattcacacggatgcagctcccctgatcccattcttgggttttggaacgaaccaacagatgggtcatcttgacttcttccccaatggaggagagagcatgccgggatgcaagaagaatgccctgtctcagatcgtggatctagatggcatctgggcgggaacccgggactttgtggcttgcaatcacctaagaagctacaagtattacttggaaagcatcctcaatcccgatgggtttgctgcatatccctgcacttcctacaagtcctttgagtctgacaagtgcttcccgtgtccagatcaaggatgcccacagatgggtcactatgctgataaatttgctggcaggacaagtgaagagcagcagaaattcttcttgaacacaggagaggctagcaatttcgctcgctggagatatggggtttccatcacactgtctggaagaacagccactggtcagatcaaagttgctttgtttggaaataagggaaacactcaccagtacagtatcttcagggggattctcaaaccaggctcaacccattcctatgagtttgatgcaaagctggatgttggaacaattgagaaagtcaagtttctttggaataacaatgtgataaatccaaccctccccaaagtgggtgccaccaagatcactgtgcaaaagggagaagagaagacagtgtacaacttctgtagcgaagacacagtgcgggaagacacgctgctcaccctcacgccctgctaagctcccggggcgacgaggctgctgcgttcacactaataaaatccactggtgcatctgt

SEQ ID NO: 163565 - DNA, 1459 bp, Homo sapiens
  Payload ID: 12207
  Gene Symbol: PNLIPRP1
  Gene Name: pancreatic lipase-related protein 1
  ENST ID: ENST00000534537
  CDS Start-End: 1-1404
atgctgatcttctggacaatcacacttttcctgctgggagcagccaaaggaaaagaagtttgctatgaggacctcgggtgcttttctgacactgagccctggggcgggacagcaatcaggcccctgaaaattctcccctggagccctgagaagatcggcacccgcttcctgctgtacaccaatgaaaacccaaacaactttcaaattctcctcctctctgatccatcaacaattgaggcatcaaattttcaaatggacagaaagacccggttcatcatccatggcttcatagacaaaggagatgagagctgggtgacagacatgtgcaagaaactgttcgaggtggaggaggtgaactgcatctgcgtggactggaagaagggctcccaagccacctacacacaggctgccaacaacgtgcgagtggtgggcgcccaggtggcccagatgctcgacatcctcttggtgaagtatagctaccccccttccaaagttcacctcattggccacagcctgggagcccacgtggctggagaggcaggaagcaagactccaggcctgagcaggattacagggttggatcctgtagaagcaagtttcgagagtactcctgaagaggtgcgacttgatccctctgatgctgactttgttgatgtgattcacacggatgcagctcccctgatcccattcttgggttttggaacgaaccaacagatgggtcatcttgacttcttccccaatggaggagagagcatgccgggatgcaagaagaatgccctgtctcagatcgtggatctagatggcatctgggcgggaacccgggactttgtggcttgcaatcacctaagaagctacaagtattacttggaaagcatcctcaatcccgatgggtttgctgcatatccctgcacttcctacaagtcctttgagtctgacaagtgcttcccgtgtccagatcaaggatgcccacagatgggtcactatgctgataaatttgctggcaggacaagtgaagagcagcagaaattcttcttgaacacaggagaggctagcaatttcgctcgctggagatatggggtttccatcacactgtctggaagaacagccactggtcagatcaaagttgctttgtttggaaataagggaaacactcaccagtacagtatcttcagggggattctcaaaccaggctcaacccattcctatgagtttgatgcaaagctggatgttggaacaattgagaaagtcaagtttctttggaataacaatgtgataaatccaaccctccccaaagtgggtgccaccaagatcactgtgcaaaagggagaagagaagacagtgtacaacttctgtagcgaagacacagtgcgggaagacacgctgctcaccctcacgccctgctaagctcccggggcgacgaggctgctgcgttcacactaataaaatccactggtgcatc

SEQ ID NO: 163566 - DNA, 1014 bp, Homo sapiens
  Payload ID: 12207
  Gene Symbol: PNLIPRP1
  Gene Name: pancreatic lipase-related protein 1
  ENST ID: ENST00000482833
  CDS Start-End: 1-540
aaactgttcgaggtggaggaggtgaactgcatctgcgtggactggaagaagggctcccaagccacctacacacaggctgccaacaacgtgcgagtggtgggcgcccaggtggcccagatgctcgacatcctcttgacagagtatagctaccccccttccaaagttcacctcattggccacagcctgggagcccacgtggctggagaggcaggaagcaagactccaggcctgagcaggattacagggttggatcctgtagaagcaagtttcgagagtactcctgaagaggtgcgacttgatccctctgatgctgactttgttgatgtgattcacacggatgcagctcccctgatcccattcttgggttttggaacgaaccaacagatgggtcatcttgacttcttccccaatggaggagagagcatgccgggatgcaagaagaatgccctgtctcagatcgtggatctagatggcatctgggcgggacaagtgcttcccgtgtccagatcaaggatgcccacagatgggtcactatgctgataaatttgctggcaggacaagtgaagagcagcagaaattcttcttgaacacaggagaggctagcaatttcgctcgctggagatatggggtttccatcacactgtctggaagaacagccactggtcagatcaaagttgctttgtttggaaataagggaaacactcaccagtacagtatcttcagggggattctcaaaccaggctcaacccattcctatgagtttgatgcaaagctggatgttggaacaattgagaaagtcaagtttctttggaataacaatgtgataaatccaaccctccccaaagtgggtgccaccaagatcactgtgcaaaagggagaagagaagacagtgtacaacttctgtagcgaagacacagtgcgggaagacacgctgctcaccctcacgccctgctaagctcccggggcgacgaggctgctgcgttcacactaataaaatccactggtgcatctgta

SEQ ID NO: 163567 - DNA, 734 bp, Homo sapiens
  Payload ID: 12207
  Gene Symbol: PNLIPRP1
  Gene Name: pancreatic lipase-related protein 1
  ENST ID: ENST00000531984
  CDS Start-End: 161-734
agctactgtgagggctgttgaatttttctccaaagctcagatgcccagtattcctagtcttcgaaagagagagaggaagattgagagagagagagagagagagagagagagaagaagttttcttaatcagagatttctctttactttcaactaattgcagatgctgatcttctggacaatcacacttttcctgctgggagcagccaaaggaaaagaagtttgctatgaggacctcgggtgcttttctgacactgagccctggggcgggacagcaatcaggcccctgaaaattctcccctggagccctgagaagatcggcacccgcttcctgctgtacaccaatgaaaacccaaacaactttcaaattctcctcctctctgatccatcaacaattgaggcatcaaattttcaaatggacagaaagacccggttcatcatccatggcttcatagacaaaggagatgagagctgggtgacagacatgtgcaagaaactgttcgaggtggaggaggtgaactgcatctgcgtggactggaagaagggctcccaagccacctacacacaggctgccaacaacgtgcgagtggtgggcgcccaggtggcccagatgctcgacatcctcttgacagagtatagctaccccccttccaaagttcacctcattggccacagcctgggagcccacgtggctggagaggcaggaagcaagactccaggcctgagcaggattacag

SEQ ID NO: 163568 - DNA, 581 bp, Homo sapiens
  Payload ID: 12207
  Gene Symbol: PNLIPRP1
  Gene Name: pancreatic lipase-related protein 1
  ENST ID: ENST00000530319
  CDS Start-End: 25-581
ctttccccctgctgtgacgtacagatgctgatcttctggacaatcacacttttcctgctgggagcagccaaaggaaaagaagtttgctatgaggacctcgggtgcttttctgacactgagccctggggcgggacagcaatcaggcccctgaaaattctcccctggagccctgagaagatcggcacccgcttcctgctgtacaccaatgaaaacccaaacaactttcaaattctcctcctctctgatccatcaacaattgaggcatcaaattttcaaatggacagaaagacccggttcatcatccatggcttcatagacaaaggagatgagagctgggtgacagacatgtgcaagacagagtatagctaccccccttccaaagttcacctcattggccacagcctgggagcccacgtggctggagaggcaggaagcaagactccaggcctgagcaggattacagggttggatcctgtagaagcaagtttcgagagtactcctgaagaggtgcgacttgatccctctgatgctgactttgttgatgtgattcacacggatgcagctcccctgatcccattctt

SEQ ID NO: 163569 - DNA, 1482 bp, Homo sapiens
  Payload ID: 12208
  Gene Symbol: PNLIPRP2
  Gene Name: pancreatic lipase-related protein 2
  ENST ID: ENST00000579578
  CDS Start-End: 27-1436
gtgagtggaagctctggtgcagcatgatgctgcccccttggaccctcggccttctcctgctggccacagtcagaggaaaagaggtctgctacggacaacttggctgcttttctgatgaaaaaccatgggcaggaacccttcagcgacctgtaaaattacttccctggtcccccgaggacattgacacccgctttcttctgtacacaaatgaaaatccaaacaacttccaactaatcactggcacggaaccagacaccattgaggcttcaaacttccaactggaccgcaagacacgcttcatcatccatggcttcttagacaaggcggaggacagctggccatcggacatgtgcaagaaaatgtttgaagtggagaaggtgaactgcatctgtgtggactggaggcacgggtcccgggcaatgtacacccaagccgtgcaaaacattcgggttgttggggcggagacagctttcttaatacaagcactgtcgacgcagctagggtacagccttgaggacgtgcatgtcatcggccacagcctgggcgcgcacacggccgcggaggcgggcaggaggctggggggccgcgtgggcaggatcacagggctggatccagcagggccgtgcttccaggatgaacctgaggaggttcggttggatccatctgacgccgtgtttgtggatgtgattcacacagattcttctcccatagttccttccctaggtttcggaatgagccaaaaggtgggccatctggatttctttccaaatggaggaaaggaaatgcccggatgtaagaaaaatgtcctttcaaccattactgatattgatggaatatgggaaggaattggtggctttgtgtcttgcaatcacctaagaagcttcgagtattactcaagcagcgtcctcaaccctgatggcttcctgggctatccctgtgcctcctacgatgagtttcaggagagtaagtgtttcccttgtccagctgaaggatgccccaaaatggggcactatgctgaccaatttaaggggaaaacaagtgctgtggaacaaacctttttcctgaacacaggagagagtggtaactttactagttgaagatataagatatcagtcacactttctggaaaagagaaagtgaatgggtacatcaggattgctttgtatggaagtaatgaaaactcaaaacaatatgagattttcaaaggatccctcaaaccagatgcaagtcacacgtgtgctattgatgtggattttaatgttggaaaaatacagaaagttaaattcctctggaacaaacgtgggataaatctatctgagcccaaactgggggcttcccaaatcacagtgcaaagtggtgaagatgggactgagtataatttttgtagcagcgacactgtggaagaaaacgtcttgcaatctctttacccttgttaaaaacgtggtgcagctattgcggtaataaaatctttaatgcactcgg

SEQ ID NO: 163570 - DNA, 1456 bp, Homo sapiens
  Payload ID: 12208
  Gene Symbol: PNLIPRP2
  Gene Name: pancreatic lipase-related protein 2
  ENST ID: ENST00000591655
  CDS Start-End: 1-1410
atgctgcccccttggaccctcggccttctcctgctggccacagtcagaggaaaagaggtctgctacggacaacttggctgcttttctgatgaaaaaccatgggcaggaacccttcagcgacctgtaaaattacttccctggtcccccgaggacattgacacccgctttcttctgtacacaaatgaaaatccaaacaacttccaactaatcactggcacggaaccagacaccattgaggcttcaaacttccaactggaccgcaagacacgcttcatcatccatggcttcttagacaaggcggaggacagctggccatcggacatgtgcaagaaaatgtttgaagtggagaaggtgaactgcatctgtgtggactggaggcacgggtcccgggcaatgtacacccaagccgtgcaaaacattcgggttgttggggcggagacagctttcttaatacaagcactgtcgacgcagctagggtacagccttgaggacgtgcatgtcatcggccacagcctgggcgcgcacacggccgcggaggcgggcaggaggctggggggccgcgtgggcaggatcacagggctggatccagcagggccgtgcttccaggatgaacctgaggaggttcggttggatccatctgacgccgtgtttgtggatgtgattcacacagattcttctcccatagttccttccctaggtttcggaatgagccaaaaggtgggccatctggatttctttccaaatggaggaaaggaaatgcccggatgtaagaaaaatgtcctttcaaccattactgatattgatggaatatgggaaggaattggtggctttgtgtcttgcaatcacctaagaagcttcgagtattactcaagcagcgtcctcaaccctgatggcttcctgggctatccctgtgcctcctacgatgagtttcaggagagtaagtgtttcccttgtccagctgaaggatgccccaaaatggggcactatgctgaccaatttaaggggaaaacaagtgctgtggaacaaacctttttcctgaacacaggagagagtggtaactttactagctggagatataagatatcagtcacactttctggaaaagagaaagtgaatgggtacatcaggattgctttgtatggaagtaatgaaaactcaaaacaatatgagattttcaaaggatccctcaaaccagatgcaagtcacacgtgtgctattgatgtggattttaatgttggaaaaatacagaaagttaaattcctctggaacaaacgtgggataaatctatctgagcccaaactgggggcttcccaaatcacagtgcaaagtggtgaagatgggactgagtataatttttgtagcagcgacactgtggaagaaaacgtcttgcaatctctttacccttgttaaaaacgtggtgcagctattgcggtaataaaatctttaatgcactcgg

SEQ ID NO: 163571 - DNA, 1407 bp, Homo sapiens
  Payload ID: 12208
  Gene Symbol: PNLIPRP2
  Gene Name: pancreatic lipase-related protein 2
  ENST ID: ENST00000611850
  CDS Start-End: 1-1407
atgctgcccccttggaccctcggccttctcctgctggccacagtcagaggaaaagaggtctgctacggacaacttggctgcttttctgatgaaaaaccatgggcaggaacccttcagcgacctgtaaaattacttccctggtcccccgaggacattgacacccgctttcttctgtacacaaatgaaaatccaaacaacttccaactaatcactggcacggaaccagacaccattgaggcttcaaacttccaactggaccgcaagacacgcttcatcatccatggcttcttagacaaggcggaggacagctggccatcggacatgtgcaagaaaatgtttgaagtggagaaggtgaactgcatctgtgtggactggaggcacgggtcccgggcaatgtacacccaagccgtgcaaaacattcgggttgttggggcggagacagctttcttaatacaagcactgtcgacgcagctagggtacagccttgaggacgtgcatgtcatcggccacagcctgggcgcgcacacggccgcggaggcgggcaggaggctggggggccgcgtgggcaggatcacagggctggatccagcagggccgtgcttccaggatgaacctgaggaggttcggttggatccatctgacgccgtgtttgtggatgtgattcacacagattcttctcccatagttccttccctaggtttcggaatgagccaaaaggtgggccatctggatttctttccaaatggaggaaaggaaatgcccggatgtaagaaaaatgtcctttcaaccattactgatattgatggaatatgggaaggaattggtggctttgtgtcttgcaatcacctaagaagcttcgagtattactcaagcagcgtcctcaaccctgatggcttcctgggctatccctgtgcctcctacgatgagtttcaggagagtaagtgtttcccttgtccagctgaaggatgccccaaaatggggcactatgctgaccaatttaaggggaaaacaagtgctgtggaacaaacctttttcctgaacacaggagagagtggtaactttactagtagatataagatatcagtcacactttctggaaaagagaaagtgaatgggtacatcaggattgctttgtatggaagtaatgaaaactcaaaacaatatgagattttcaaaggatccctcaaaccagatgcaagtcacacgtgtgctattgatgtggattttaatgttggaaaaatacagaaagttaaattcctctggaacaaacgtgggataaatctatctgagcccaaactgggggcttcccaaatcacagtgcaaagtggtgaagatgggactgagtataatttttgtagcagcgacactgtggaagaaaacgtcttgcaatctctttacccttgttaa

SEQ ID NO: 163572 - DNA, 2354 bp, Homo sapiens
  Payload ID: 12209
  Gene Symbol: PNLIPRP3
  Gene Name: pancreatic lipase-related protein 3
  Uniprot ID: Q17RR3
  ENST ID: ENST00000369230
  CDS Start-End: 147-1550
ggtggaataacatgttcttttaaacgtagagtttaaacattgagttgcatcattgtgaggaaaaccacttagtattttatagtgaggtgactttacaagtaaagatcttcaagaagatttttatgtgatttaaaaaatcagcttagatgcttggaatttggattgttgcattcttgttctttggcacatcaagaggaaaagaagtttgctatgaaaggttagggtgtttcaaagatggtttaccatggaccaggactttctcaacagagttggtaggtttaccctggtctccagagaagataaacactcgtttcctgctctacactatacacaatcccaatgcctatcaggagatcagtgcggttaattcttcaactatccaagcctcatattttggaacagacaagatcacccgtatcaacatagctggatggaaaacagatggcaaatggcagagagacatgtgcaatgtgttgctacagctggaagatataaattgcattaatttagattggatcaacggttcacgggaatacatccatgctgtaaacaatctccgtgttgttggtgctgaggtggcttattttattgatgttctcatgaaaaaatttgaatattccccttctaaagtgcacttgattggccacagcttgggagcacacctggctggggaagctgggtcaaggataccaggccttggaagaataactgggttggacccagctgggccatttttccacaacactccaaaggaagtcaggctagacccctcggatgccaactttgttgacgttattcatacaaatgcagctcgcatcctctttgagcttggtgttggaaccattgatgcttgtggtcatcttgacttttacccaaatggagggaagcacatgccaggatgtgaagacttaattacacctttactgaaatttaacttcaatgcttacaaaaaagaaatggcttccttctttgactgtaaccatgcccgaagttatcaattttatgctgaaagcattcttaatcctgatgcatttattgcttatccttgtagatcctacacatcttttaaagcaggaaattgcttcttttgttccaaagaaggttgcccaacaatgggtcattttgctgatagatttcacttcaaaaatatgaagactaatggatcacattattttttaaacacagggtccctttccccatttgcccgttggaggcacaaattgtctgttaaactcagtggaagcgaagtcactcaaggaactgtctttcttcgtgtaggcggggcagttaggaaaactggggagtttgccattgtcagtggaaaacttgagccaggcatgacttacacaaaattaatcgatgcagatgttaacgttggaaacattacaagtgttcagttcatctggaaaaaacatttgtttgaagattctcagaataagttgggagcagaaatggtgataaatacatctgggaaatatggatataaatctaccttctgtagccaagacattatgggacctaatattctccagaacctgaaaccatgctaatctcagatacagtcttgatggatttctttagtaggagcaatgaagaaaagtgtctccttccacctggcatccagaccaaatttgacccttgtaaatgacttagtcatttacaagggtcttactcagagtcaagtacgggtttgctttttttctgtgtagaatgttcatctaactgcaccttaaaaacacactgaaccctgggacaaaagataattactatgatctgtaggaatctggatatcattgacaaaatagagctgttttggaattttcctgaataagaggaggtgatgcaaatgtatgttgagtgtataaactcactggacaaaagtaagcctctggcttgctgagtttttgaagtatattttcaggtataataatcattgttctaaaattatataaaactatttgttatgttgttaaatcttgctgagacaaattatgactatagtgcatgatatatagtagattataaccttgtgggttgatgtgtctatctagtaataataaaaactaatgagatggcactagtatttccaaggtgttccttggtgttcagggtgtgcacaagagagattttggagcttatctgttatgtgttcatcagttagcaatgggacctgaagttcaacaacccagggtatagcccccttcctccaaagtccctgccacaggagaattactcctctccctgggtcttgaatgctctatggtgaatttgtatttagcctcaaggcagcatttcatttgtaaagcacttgggtaaccctttgttcttgcaataacaatattataatatttaaa

SEQ ID NO: 163573 - DNA, 460 bp, Homo sapiens
  Payload ID: 12210
  Gene Symbol: PPY
  Gene Name: pancreatic polypeptide
  Uniprot ID: P01298
  ENST ID: ENST00000225992
  CDS Start-End: 49-336
tgaggcaggtgctcgcttggtctagtgcccatttactctggactccggatggctgccgcacgcctctgcctctccctgctgctcctgtccacctgcgtggctctgttactacagccactgctgggtgcccagggagccccactggagccagtgtacccaggggacaatgccacaccagagcagatggcccagtatgcagctgatctccgtagatacatcaacatgctgaccaggcctaggtatgggaaaagacacaaagaggacacgctggccttctcggagtgggggtccccgcatgctgctgtccccagggagctcagcccgctggacttataatgccaccttctgtctcctacgactccatgagcagcgccagcccagctctcccctctgcacccttggctctggccaaagcttgctccctgctcccacacaggctcaataaagcaagtcaaagcca

SEQ ID NO: 163574 - DNA, 431 bp, Homo sapiens
  Payload ID: 12210
  Gene Symbol: PPY
  Gene Name: pancreatic polypeptide
  ENST ID: ENST00000587006
  CDS Start-End: 1-318
atggctgccgcacgcctctgcctctccctgctgctcctgtccacctgcgtggctctgttactacagccactgctgggtgcccagggagccccactggagccagtgtacccaggggacaatgccacaccagagcagatggcccagtatgcagctgatctccgtagatacatcaacatgctgaccaggcctagtgcttgcccctgctgcctcttccctcccaggtatgggaaaagacacaaagaggacacgctggccttctcggagtgggggtccccgcatgctgctgtccccagggagctcagcccgctggacttataatgccaccttctgtctcctacgactccatgagcagcgccagcccagctctcccctctgcacccttggctctggccaaagcttgctccctgctcccacacaggctcaataaagca

SEQ ID NO: 163575 - DNA, 499 bp, Homo sapiens
  Payload ID: 12210
  Gene Symbol: PPY
  Gene Name: pancreatic polypeptide
  Uniprot ID: P01298
  ENST ID: ENST00000591228
  CDS Start-End: 89-376
gtcacgctagaagagccgtctgctgactgcacgtgtgtgtgcacactcgtgtgcatggctgtgaactggaatgtgtgactgtgaccttatggctgccgcacgcctctgcctctccctgctgctcctgtccacctgcgtggctctgttactacagccactgctgggtgcccagggagccccactggagccagtgtacccaggggacaatgccacaccagagcagatggcccagtatgcagctgatctccgtagatacatcaacatgctgaccaggcctaggtatgggaaaagacacaaagaggacacgctggccttctcggagtgggggtccccgcatgctgctgtccccagggagctcagcccgctggacttataatgccaccttctgtctcctacgactccatgagcagcgccagcccagctctcccctctgcacccttggctctggccaaagcttgctccctgctcccacacaggctcaataaagcaagtcaaagcc

SEQ ID NO: 163576 - DNA, 563 bp, Homo sapiens
  Payload ID: 12210
  Gene Symbol: PPY
  Gene Name: pancreatic polypeptide
  ENST ID: ENST00000591703
  CDS Start-End: 46-285
ggcaggtgctcgcttggtctagtgcccatttactctggactccggatggctgccgcacgcctctgcctctccctgctgctcctgtccacctgcgtggctctgttactacagccactgctgggtgcccagggagccccactggagccagtgtacccaggggacaatgccacaccagagcagatggcccagtatgcagctgatctccgtagatacatcaacatgctgaccaggcctaggcctagaccaatgtgccctgggcaagatggtgcctacaggcagatatgaaacaggtgggctggcacctgggcacagtgcttgcccctgctgcctcttccctcccaggtatgggaaaagacacaaagaggacacgctggccttctcggagtgggggtccccgcatgctgctgtccccagggagctcagcccgctggacttataatgccaccttctgtctcctacgactccatgagcagcgccagcccagctctcccctctgcacccttggctctggccaaagcttgctccctgctcccacacaggctcaataaagcaagtcaaagcca

SEQ ID NO: 163577 - DNA, 521 bp, Homo sapiens
  Payload ID: 12210
  Gene Symbol: PPY
  Gene Name: pancreatic polypeptide
  ENST ID: ENST00000587070
  CDS Start-End: 1-397
ccagtatgcagctgatctccgtagatacatcaacatgctgaccaggcctaggtgtgtgccacagttggggagagagatcccagcccctgggaccctgggcccactccacattcctggccacaccctatccccagccccagccccagccccttccaggcctgctcttgggaaaacagggcatctgtgctcaacaggcctagaccaatgtgccctgggcaagatggtgcctacaggcagatatgaaacaggtgggctggcacctgggcacagtgcttgcccctgctgcctcttccctcccaggtatgggaaaagacacaaagaggacacgctggccttctcggagtgggggtccccgcatgctgctgtccccagggagctcagcccgctggacttataatgccaccttctgtctcctacgactccatgagcagcgccagcccagctctcccctctgcacccttggctctggccaaagcttgctccctgctcccacacaggctcaataaagcaagtcaaagcca

SEQ ID NO: 163578 - DNA, 627 bp, Homo sapiens
  Payload ID: 12211
  Gene Symbol: PPDPF
  Gene Name: pancreatic progenitor cell differentiation and proliferation factor
  ENST ID: ENST00000370177
  CDS Start-End: 146-568
cgcctctctgtcgtggcgcggcttcccgcggtcttctctgcaaatgggctccgtggcctagcgcccccgtccccgccacccgtgatcgtgcgccgaggcccgcgaggggtcgccgcccagatcccaccagccagcaagctaaagcatggcggccatcccctccagcggctcgctcgtggccacccacgactactaccggcgccgcctgggttccacttccagcaacagctcctgcagcagtaccgagtgccccggggaagccattccccaccccccaggtgagtgcaggatcgcccctttctccccccgctcctccaggagctggcagcatcaagaccccacttcgcttctctcaggtctccccaaggctgacccgggtcattggtgggccagcttctttttcgggaagtccaccctcccgttcatggccacggtgttggagtccgcagagcactcggaacctccccaggcctccagcagcatgaccgcctgtggcctggctcgggacgccccgaggaagcagcccggcggtcagtccagcacagccagcgctgggcccccgtcctgacctgagcggttaccaccagccccaggcctgcggaggcgctagtccaccagagcccctcc

SEQ ID NO: 163579 - DNA, 868 bp, Homo sapiens
  Payload ID: 12211
  Gene Symbol: PPDPF
  Gene Name: pancreatic progenitor cell differentiation and proliferation factor
  Uniprot ID: Q9H3Y8
  ENST ID: ENST00000370179
  CDS Start-End: 197-541
gcggcccccgcgcatataagtgggcgcgtccgcgcgtgcgcaccccgcgcgcgcctctctgtcgtggcgcggcttcccgcggtcttctctgcaaatgggctccgtggcctagcgcccccgtccccgccacccgtgatcgtgcgccgaggcccgcgaggggtcgccgcccagatcccaccagccagcaagctaaagcatggcggccatcccctccagcggctcgctcgtggccacccacgactactaccggcgccgcctgggttccacttccagcaacagctcctgcagcagtaccgagtgccccggggaagccattccccaccccccaggtctccccaaggctgacccgggtcattggtgggccagcttctttttcgggaagtccaccctcccgttcatggccacggtgttggagtccgcagagcactcggaacctccccaggcctccagcagcatgaccgcctgtggcctggctcgggacgccccgaggaagcagcccggcggtcagtccagcacagccagcgctgggcccccgtcctgacctgagcggttaccaccagccccaggcctgcggaggcgctagtccaccagagcccctccccgcccctctccccactccgcatccctcgcccccctccccacctcccaccccccaccctgtaaactaggcggctgcagcaagcagaccttcgcatcaacacagcagacaccaaaaaccagtgagagccccgctctctaccgcccggccccagcactcgctagctttcctgacacctggaactgtgcacctggcaccaagcggaaaataaactccaagcagccagtagccccgatggtgtgtgcctgagctgtgtggcccgaggttcca

SEQ ID NO: 163580 - DNA, 2769 bp, Homo sapiens
  Payload ID: 12212
  Gene Symbol: PANX1
  Gene Name: pannexin 1
  Uniprot ID: Q96RD7
  ENST ID: ENST00000227638
  CDS Start-End: 386-1666
gggcggcgcggaggggcagggccagagggaagcgctttgttccgcgcgtggttcccgcgcctgggggtgcgcgggagaggcgcgaatccgagtgccgcgcgcggcccggggacttgcacgggcgtgcggggtggaaccgcaggaagcggagctctcgggttcccgccccgccccgccccgccggcggcggaggcagcgagcgcgagagcccagcggagtcgctgggagcctgaggcaccgagacacaaaggcaggcgggatgcgggagcaggcaaagggaaagcgaaagccgcgcgcccggccggtgactgggtgaaggcgccgcgcagctttcccgacgccggctgtacccggacctcctggtcgagcctggcgcgccgcagccatggccatcgctcaactggccacggagtacgtgttctcggatttcttgctgaaggagcccacggagcccaagttcaaggggctgcgactggagctggctgtggacaagatggtcacgtgcattgcggtggggctgcccctgctgctcatctcgctggccttcgcgcaggagatctcgattggtacacagataagctgtttctctccaagttctttctcctggcgtcaggctgcctttgtggattcatattgctgggcggctgttcagcagaagaactcactgcagagcgagtctggaaacctcccactgtggctgcataagtttttcccctacatcctgctgctctttgcgatcctcctgtacctgcccccgctgttctggcgtttcgcagctgctcctcatatttgctcagacttgaagtttatcatggaagaacttgacaaagtttacaaccgtgcaattaaggctgcaaagagtgcgcgtgaccttgacatgagagatggagcctgctcagttccaggtgttaccgagaacttagggcaaagtttgtgggaggtatctgaaagccacttcaagtacccaattgtggagcagtacttgaagacaaagaaaaattctaataatttaatcatcaagtacattagctgccgcctgctgacactcatcattatactgttagcgtgtatctacctgggctattacttcagcctctcctcactctcagacgagtttgtgtgcagcatcaaatcagggatcctgagaaacgacagcaccgtgcccgatcagtttcagtgcaaactcattgccgtgggcatcttccagttgctcagtgtcattaaccttgtggtttatgtcctgctggctcccgtggttgtctacacgctgtttgttccattccgacagaagacagatgttctcaaagtgtacgaaatcctccccacttttgatgttctgcatttcaaatctgaagggtacaacgatttgagcctctacaatctcttcttggaggaaaatataagtgaggtcaagtcatacaagtgtcttaaggtactggagaatattaagagcagtggtcaggggatcgacccaatgctactcctgacaaaccttggcatgatcaagatggatgttgttgatggcaaaactcccatgtctgcagagatgagagaggagcaggggaaccagacggcagagctccaaggtatgaacatagacagtgaaactaaagcaaataatggagagaagaatgcccgacagagacttctggattcttcttgctgatgatttttttccttgagctgtaaatctgtgacttctgcgacatgggatttaatttggctaaagcacccctgttggtttcacagctggtttgcaataaatggttcttggtggagatactgagcatgtcttattgagtccctaatggaaatggtgatcaacaaaaggttatggaagaatggtttatgaacttcccataggaagcacctgagagatagtaaactgcagcaagtaactatgtgtaagtcctcatcaaatgaaaagcagaaagacaagaacaattagtcaagagcagtagccctgtcagagcctcggagcaatacctttctgtacccgtggtgagacaagacccagagctactggaaaacaagcactttggaagatttgttttgttttcatggaataataatatgtcagggtataatttaacgtgagtttcttatgtgcccttaaagactgttagacaagaaaagcattcactggctaataatccataggtcgacctatgtcctaagttaggtgtaaggtccgatgccttggcccacactcgagctctctttacattgttagttgtcaaccttggctgatggaaatcccgtaaccactatttgttgcactgtgccttgaagggcagcaggcccaagtgctgctctgactgaaaactgagttaacaagatgaaatctaaaggatattcacagtgacttcaattcaggaagaatgcttccaaaagagcccagtggggaaatctgacatcacagaagacattaattcagtcactttcaaagagtttgtctacaggcggtttctctgttatcaaaggcatttgaaataggattttacttaaacaataatggaacacaggagtatttaaagtgaagaacactttgcctgaatgtgatcagggcacataagtgacattggcatgcttcatatggcgtgcttggagccagaaaaacttagcggtttattttgtttatatttaagcacagctttaaaaaattcattatcgtttattcagtgtccgaattgaggccatttgggaagaaaattctagcactggtggagaattatagaataaagattataaatggttggataagacaaa

SEQ ID NO: 163581 - DNA, 2750 bp, Homo sapiens
  Payload ID: 12212
  Gene Symbol: PANX1
  Gene Name: pannexin 1
  Uniprot ID: Q96RD7
  ENST ID: ENST00000436171
  CDS Start-End: 385-1653
ggcggcgcggaggggcagggccagagggaagcgctttgttccgcgcgtggttcccgcgcctgggggtgcgcgggagaggcgcgaatccgagtgccgcgcgcggcccggggacttgcacgggcgtgcggggtggaaccgcaggaagcggagctctcgggttcccgccccgccccgccccgccggcggcggaggcagcgagcgcgagagcccagcggagtcgctgggagcctgaggcaccgagacacaaaggcaggcgggatgcgggagcaggcaaagggaaagcgaaagccgcgcgcccggccggtgactgggtgaaggcgccgcgcagctttcccgacgccggctgtacccggacctcctggtcgagcctggcgcgccgcagccatggccatcgctcaactggccacggagtacgtgttctcggatttcttgctgaaggagcccacggagcccaagttcaaggggctgcgactggagctggctgtggacaagatggtcacgtgcattgcggtggggctgcccctgctgctcatctcgctggccttcgcgcaggagatctcgattggtacacagataagctgtttctctccaagttctttctcctggcgtcaggctgcctttgtggattcatattgctgggcggctgttcagcagaagaactcactgcagagcgagtctggaaacctcccactgtggctgcataagtttttcccctacatcctgctgctctttgcgatcctcctgtacctgcccccgctgttctggcgtttcgcagctgctcctcatatttgctcagacttgaagtttatcatggaagaacttgacaaagtttacaaccgtgcaattaaggctgcaaagagtgcgcgtgaccttgacatgagagatggagcctgctcagttccaggtgttaccgagaacttagggcaaagtttgtgggaggtatctgaaagccacttcaagtacccaattgtggagcagtacttgaagacaaagaaaaattctaataatttaatcatcaagtacattagctgccgcctgctgacactcatcattatactgttagcgtgtatctacctgggctattacttcagcctctcctcactctcagacgagtttgtgtgcagcatcaaatcagggatcctgagaaacgacagcaccgtgcccgatcagtttcagtgcaaactcattgccgtgggcatcttccagttgctcagtgtcattaaccttgtggtttatgtcctgctggctcccgtggttgtctacacgctgtttgttccattccgacagaagacagatgttctcaaagtgtacgaaatcctccccacttttgatgttctgcatttcaaatctgaagggtacaacgatttgagcctctacaatctcttcttggaggaaaatataagtgaggtcaagtcatacaagtgtcttaaggtactggagaatattaagagcagtggtcaggggatcgacccaatgctactcctgacaaaccttggcatgatcaagatggatgttgttgatggcaaaactcccatgtctgcagagatgagagaggagcaggggaaccagacggcagagctccaagacagtgaaactaaagcaaataatggagagaagaatgcccgacagagacttctggattcttcttgctgatgatttttttccttgagctgtaaatctgtgacttctgcgacatgggatttaatttggctaaagcacccctgttggtttcacagctggtttgcaataaatggttcttggtggagatactgagcatgtcttattgagtccctaatggaaatggtgatcaacaaaaggttatggaagaatggtttatgaacttcccataggaagcacctgagagatagtaaactgcagcaagtaactatgtgtaagtcctcatcaaatgaaaagcagaaagacaagaacaattagtcaagagcagtagccctgtcagagcctcggagcaatacctttctgtacccgtggtgagacaagacccagagctactggaaaacaagcactttggaagatttgttttgttttcatggaataataatatgtcagggtataatttaacgtgagtttcttatgtgcccttaaagactgttagacaagaaaagcattcactggctaataatccataggtcgacctatgtcctaagttaggtgtaaggtccgatgccttggcccacactcgagctctctttacattgttagttgtcaaccttggctgatggaaatcccgtaaccactatttgttgcactgtgccttgaagggcagcaggcccaagtgctgctctgactgaaaactgagttaacaagatgaaatctaaaggatattcacagtgacttcaattcaggaagaatgcttccaaaagagcccagtggggaaatctgacatcacagaagacattaattcagtcactttcaaagagtttgtctacaggcggtttctctgttatcaaaggcatttgaaataggattttacttaaacaataatggaacacaggagtatttaaagtgaagaacactttgcctgaatgtgatcagggcacataagtgacattggcatgcttcatatggcgtgcttggagccagaaaaacttagcggtttattttgtttatatttaagcacagctttaaaaaattcattatcgtttattcagtgtccgaattgaggccatttgggaagaaaattctagcactggtggagaattatagaataaagattataaatggttggataa

SEQ ID NO: 163582 - DNA, 2964 bp, Homo sapiens
  Payload ID: 12213
  Gene Symbol: PANX2
  Gene Name: pannexin 2
  Uniprot ID: Q96RD6
  ENST ID: ENST00000159647
  CDS Start-End: 1-1932
atgcaccacctcctggagcagtcggcggacatggcgaccgcgctgctggcgggagagaagctgcgggagctgatcctgccgggcgcgcaggacgacaaggcgggcgcgctggccgcgctgcttctgcagctgaagctggagctgccgttcgaccgggtggtcaccatcggcaccgtgctggtgcccatcctgctggtcaccctggtcttcaccaagaacttcgcagaggaacccatttactgttacaccccgcacaacttcacgcgcgaccaggcgctgtacgcccgcggctactgctggacggagctgcgggacgcgctgcccggcgtggacgccagcctgtggccgtcgctgtttgagcacaagttcctgccctacgcgctgctggccttcgccgccatcatgtacgtgcccgcgctgggctgggagttcctggcctccacgcgcctcacctccgagctcaacttcctgctgcaggagatcgacaactgttaccaccgggcggccgagggccgcgcgcccaagatcgagaagcagatccagtccaagggcccgggcatcacggagcgcgagaagcgcgagatcatcgagaacgcggagaaggagaagagcccggagcagaacctgttcgagaagtacctggagcgccgcggccgcagcaacttcctggccaagctgtacctggcgcggcacgtgctgatcctgctgctgagcgccgtgcccatctcctacctgtgcacctactacgccacgcagaagcagaacgagttcacctgcgcgctgggcgcgtccccggacggggcggcaggtgcggggcccgcggtgcgcgtgagctgcaagctcccgtccgtgcaactgcagcgcatcatcgcgggcgtggacatcgtgctgctgtgcgtcatgaacctcatcatcctcgtcaacctcatccacctcttcatcttccgcaagagcaacttcatcttcgacaagctgcacaaggtgggcatcaagacgcgccggcagtggcgccgctcgcagttctgcgacatcaacatcctggccatgttctgcaacgagaaccgcgaccacatcaagtcgctcaaccggctggacttcatcaccaacgagagcgacctcatgtacgacaacgtggtccggcagctgctggcggcgctggcgcagtccaaccacgacgccacccccacggtgcgcgactcgggggtgcagaccgtggaccccagcgccaaccccgccgagcccgacggcgccgccgagccgcccgtggtcaagcggccgcgcaagaagatgaagtggatccccaccagcaacccgcttccgcagcccttcaaggagccgctggccatcatgcgcgtggagaacagcaaggcggagaagccgaagcccgcgcgcaggaagacggccacggacacgctgatcgcgccgctgctggaccgctccgcccaccactacaagggcggagggggcgacccgggccccggccccgcccctgcccccgccccgccgcccgcccctgacaagaagcacgcgcgccacttctccctggacgtgcacccctacatcctcggcaccaagaaggccaaggccgaggcggtgcccgccgccctgcccgcctcccggagccaggaggggggcttcctgtcccaggcggaggactgtgggctaggcctggccccggcgcccatcaaagatgctccgctccccgagaaggaaatcccgtaccccacagagccagcccgggcagggcttccctcggggggcccgttccacgtccgctcacctcccgccgcccctgctgtggcccctctgacaccagccagcctgggcaaggcggagcccctcaccatcctgagccgaaacgccacacacccgctgctgcacatcaacacgctatcctcatcgccaccttcgacgagccgagaacggtcgtgagtactgtggagttttgagggatggcaccgtccaggccgccgagagcccctctgcctgtgtcgtgtggcctggccagcctcccggtggacaccagccctgcgtggacgtggcctgtgcttcgcccgcactgcgcgcatccccaacctctgtccgcatgcctggggccttcgcccccacgtgctcgacaggggaacccgcccggacggcatcgccaggcactggctggggtggggaaaggtggcccagtggagccggtggccaggaaggctgaagcccgcttcccatgctcctgcatcaggtgcccagccgtgggtgggggccctgaggtgaagagtttatttttttagtccgtttcgtcctggccccgggctgtggcgagacagcccaactcccccagcccagctcccccagcccagagccagggaagaggaaggtggggccagtcccaccagtggggtggccacgcccatggggtcacatgctcaggggtcaccccctgcagggacctgatgccctcgggtgggagggaccgaggtccaccctcgggtcaaaggtcaacgtgcactttctccttgtcgcctgacagacattttattttactaagactgctgtaccgaacaagcatatttatcatcaggagacaggatgggtttaaagcaggatggtgtgtgtgtgaacgggcatgagcagaggtgagcgtgagcgagcgggtgtgtatgtacgagtgtgcacgtgtgtgcgtgtgcacagagggtgtggtgccagcttgagtgggagtgtgtgagtgtgagcaggcgggcgagtgcgtgagtgcacgccagcgcgtggcccatgtatgaggagtgaaggggcccaacgcaataaccacgtcccccacccgggccccccgccgcggctgaggccacatggcttcctgtgggagccccggccggcacccggctggtcccaccccaaatacctcagccatggagaccatgtcatgcagaattaacaaggtagcaccgagcatatcaataaatattattctgataa

SEQ ID NO: 163583 - DNA, 3051 bp, Homo sapiens
  Payload ID: 12213
  Gene Symbol: PANX2
  Gene Name: pannexin 2
  Uniprot ID: Q96RD6
  ENST ID: ENST00000395842
  CDS Start-End: 1-2034
atgcaccacctcctggagcagtcggcggacatggcgaccgcgctgctggcgggagagaagctgcgggagctgatcctgccgggcgcgcaggacgacaaggcgggcgcgctggccgcgctgcttctgcagctgaagctggagctgccgttcgaccgggtggtcaccatcggcaccgtgctggtgcccatcctgctggtcaccctggtcttcaccaagaacttcgcagaggaacccatttactgttacaccccgcacaacttcacgcgcgaccaggcgctgtacgcccgcggctactgctggacggagctgcgggacgcgctgcccggcgtggacgccagcctgtggccgtcgctgtttgagcacaagttcctgccctacgcgctgctggccttcgccgccatcatgtacgtgcccgcgctgggctgggagttcctggcctccacgcgcctcacctccgagctcaacttcctgctgcaggagatcgacaactgttaccaccgggcggccgagggccgcgcgcccaagatcgagaagcagatccagtccaagggcccgggcatcacggagcgcgagaagcgcgagatcatcgagaacgcggagaaggagaagagcccggagcagaacctgttcgagaagtacctggagcgccgcggccgcagcaacttcctggccaagctgtacctggcgcggcacgtgctgatcctgctgctgagcgccgtgcccatctcctacctgtgcacctactacgccacgcagaagcagaacgagttcacctgcgcgctgggcgcgtccccggacggggcggcaggtgcggggcccgcggtgcgcgtgagctgcaagctcccgtccgtgcaactgcagcgcatcatcgcgggcgtggacatcgtgctgctgtgcgtcatgaacctcatcatcctcgtcaacctcatccacctcttcatcttccgcaagagcaacttcatcttcgacaagctgcacaaggtgggcatcaagacgcgccggcagtggcgccgctcgcagttctgcgacatcaacatcctggccatgttctgcaacgagaaccgcgaccacatcaagtcgctcaaccggctggacttcatcaccaacgagagcgacctcatgtacgacaacgtggtccggcagctgctggcggcgctggcgcagtccaaccacgacgccacccccacggtgcgcgactcgggggtgcagaccgtggaccccagcgccaaccccgccgagcccgacggcgccgccgagccgcccgtggtcaagcggccgcgcaagaagatgaagtggatccccaccagcaacccgcttccgcagcccttcaaggagccgctggccatcatgcgcgtggagaacagcaaggcggagaagccgaagcccgcgcgcaggaagacggccacggacacgctgatcgcgccgctgctggaccgctccgcccaccactacaagggcggagggggcgacccgggccccggccccgcccctgcccccgccccgccgcccgcccctgacaagaagcacgcgcgccacttctccctggacgtgcacccctacatcctcggcaccaagaaggccaaggccgaggcggtgcccgccgccctgcccgcctcccggagccaggaggggggcttcctgtcccaggcggaggactgtgggctaggcctggccccggcgcccatcaaagatgctccgctccccgagaaggaaatcccgtaccccacagagccagcccgggcagggcttccctcggggggcccgttccacgtccgctcacctcccgccgcccctgctgtggcccctctgacaccagccagcctgggcaaggcggagcccctcaccatcctgagccgaaacgccacacacccgctgctgcacatcaacacgctgtacgaggcccgggaggaggaggacgggggcccccgcctgccgcaggacgtgggggacctcatcgccatccctgccccacagcagatcctcatcgccaccttcgacgagccgagaacggtcgtgagtactgtggagttttgagggatggcaccgtccaggccgccgagagcccctctgcctgtgtcgtgtggcctggccagcctcccggtggacaccagccctgcgtggacgtggcctgtgcttcgcccgcactgcgcgcatccccaacctctgtccgcatgcctggggccttcgcccccacgtgctcgacaggggaacccgcccggacggcatcgccaggcactggctggggtggggaaaggtggcccagtggagccggtggccaggaaggctgaagcccgcttcccatgctcctgcatcaggtgcccagccgtgggtgggggccctgaggtgaagagtttatttttttagtccgtttcgtcctggccccgggctgtggcgagacagcccaactcccccagcccagctcccccagcccagagccagggaagaggaaggtggggccagtcccaccagtggggtggccacgcccatggggtcacatgctcaggggtcaccccctgcagggacctgatgccctcgggtgggagggaccgaggtccaccctcgggtcaaaggtcaacgtgcactttctccttgtcgcctgacagacattttattttactaagactgctgtaccgaacaagcatatttatcatcaggagacaggatgggtttaaagcaggatggtgtgtgtgtgaacgggcatgagcagaggtgagcgtgagcgagcgggtgtgtatgtacgagtgtgcacgtgtgtgcgtgtgcacagagggtgtggtgccagcttgagtgggagtgtgtgagtgtgagcaggcgggcgagtgcgtgagtgcacgccagcgcgtggcccatgtatgaggagtgaaggggcccaacgcaataaccacgtcccccacccgggccccccgccgcggctgaggccacatggcttcctgtgggagccccggccggcacccggctggtcccaccccaaatacctcagccatggagaccatgtcatgcagaattaacaaggtagcaccgagcatatcaataaatattattctgataatc

SEQ ID NO: 163584 - DNA, 2291 bp, Homo sapiens
  Payload ID: 12213
  Gene Symbol: PANX2
  Gene Name: pannexin 2
  ENST ID: ENST00000402472
  CDS Start-End: 1-234
atggcgaccgcgctgctggcgggagagaagctgcgggagctgatcctgccgggcgcgcaggacgacaaggcgggcgcgctggccgcgctgcttctgcagctgaagctggagctgccgttcgaccgggtggtcaccatcggcaccgtgctggtgcccatcctgctggtcaccctggtcttcaccaagaacttcgcagggtggacgctcttctctggctcctgggattggctgtgaggacaaaacataaaggaacccatttactgttacaccccgcacaacttcacgcgcgaccaggcgctgtacgcccgcggctactgctggacggagctgcgggacgcgctgcccggcgtggacgccagcctgtggccgtcgctgtttgagcacaagttcctgccctacgcgctgctggccttcgccgccatcatgtacgtgcccgcgctgggctgggagttcctggcctccacgcgcctcacctccgagctcaacttcctgctgcaggagatcgacaactgttaccaccgggcggccgagggccgcgcgcccaagatcgagaagcagatccagtccaagggcccgggcatcacggagcgcgagaagcgcgagatcatcgagaacgcggagaaggagaagagcccggagcagaacctgttcgagaagtacctggagcgccgcggccgcagcaacttcctggccaagctgtacctggcgcggcacgtgctgatcctgctgctgagcgccgtgcccatctcctacctgtgcacctactacgccacgcagaagcagaacgagttcacctgcgcgctgggcgcgtccccggacggggcggcaggtgcggggcccgcggtgcgcgtgagctgcaagctcccgtccgtgcaactgcagcgcatcatcgcgggcgtggacatcgtgctgctgtgcgtcatgaacctcatcatcctcgtcaacctcatccacctcttcatcttccgcaagagcaacttcatcttcgacaagctgcacaaggtgggcatcaagacgcgccggcagtggcgccgctcgcagttctgcgacatcaacatcctggccatgttctgcaacgagaaccgcgaccacatcaagtcgctcaaccggctggacttcatcaccaacgagagcgacctcatgtacgacaacgtggtccggcagctgctggcggcgctggcgcagtccaaccacgacgccacccccacggtgcgcgactcgggggtgcagaccgtggaccccagcgccaaccccgccgagcccgacggcgccgccgagccgcccgtggtcaagcggccgcgcaagaagatgaagtggatccccaccagcaacccgcttccgcagcccttcaaggagccgctggccatcatgcgcgtggagaacagcaaggcggagaagccgaagcccgcgcgcaggaagacggccacggacacgctgatcgcgccgctgctggaccgctccgcccaccactacaagggcggagggggcgacccgggccccggccccgcccctgcccccgccccgccgcccgcccctgacaagaagcacgcgcgccacttctccctggacgtgcacccctacatcctcggcaccaagaaggccaaggccgaggcggtgcccgccgccctgcccgcctcccggagccaggaggggggcttcctgtcccaggcggaggactgtgggctaggcctggccccggcgcccatcaaagatgctccgctccccgagaaggaaatcccgtaccccacagagccagcccgggcagggcttccctcggggggcccgttccacgtccgctcacctcccgccgcccctgctgtggcccctctgacaccagccagcctgggcaaggcggagcccctcaccatcctgagccgaaacgccacacacccgctgctgcacatcaacacgctatcctcatcgccaccttcgacgagccgagaacggtcgtgagtactgtggagttttgagggatggcaccgtccaggccgccgagagcccctctgcctgtgtcgtgtggcctggccagcctcccggtggacaccagccctgcgtggacgtggcctgtgcttcgcccgcactgcgcgcatccccaacctctgtccgcatgcctggggccttcgcccccacgtgctcgacaggggaacccgcccggacggcatcgccaggcactggctggggtggggaaaggtggcccagtggagccggtggccaggaaggctgaagcccgcttcccatgctcctgcatcaggtgcccagccgtgggtgggggccctgaggtgaagagttta

SEQ ID NO: 163585 - DNA, 1667 bp, Homo sapiens
  Payload ID: 12214
  Gene Symbol: PANX3
  Gene Name: pannexin 3
  Uniprot ID: Q96QZ0
  ENST ID: ENST00000284288
  CDS Start-End: 68-1246
ccgtctcctcattccaccatcccaggacccctgctgccacctctgcacccccaagctcagcagcatcatgtcacttgcacacacagctgcagagtacatgctctcagatgccctgctgcctgaccgcaggggaccccgcctcaaaggactgcgtctggaactgcccctggaccggatagtcaagttcgtagctgtgggctcccccttgttgctgatgtccctggcattcgcccaggagttctcctctgggtctccgatcagctgcttctctcccagtaacttcagcatccggcaggcagcctacgtggacagctcctgctgggactcactgcttcaccataagcaggacgggcctggccaggacaaaatgaaatctctctggccccacaaggccctcccctactccctgctggccctggccttgctcatgtacctgccggtgctgctgtggcagtatgcagctgtgccagccctcagctccgatctgctgttcatcatcagcgaactggacaaatcttataatcgctccatccgcctcgtgcagcacatgctgaagatccggcagaagagttccgacccctatgtgttctggaatgagctggagaaggctcggaaagaacgatactttgaattccctttgctagagcggtacctggcatgtaagcagcgttcacattcgctagtggctacctacctcctgaggaactccctcttgctcatcttcacctccgccacttacctataccttggtcatttccatctggatgtcttcttccaggaagaattcagctgctccatcaagacagggctgctaagtgatgagacccatgtccccaatctgatcacatgcaggctgacatcactgtccattttccagattgttagcctctccagtgtagcaatatacaccatattggttccagtgataatatacaacctcacacggctatgtcggtgggacaaacgacttttatctgtctatgagatgctcccagcttttgatctcctcagcagaaagatgctaggatgtcccatcaatgacctcaatgtgatccttcttttcctccgagctaacatctctgagctcatctcttttagctggctgagtgtcttatgtgtgttgaaggatacaaccacccagaagcacaatattgacacagtagttgattttatgactttattggctggcttagaaccctcaaaacccaaacacctcaccaactcggcatgtgatgaacacccatagttaagaaaccatggagcaagaaagcttgtggaaagtctctctccttcctcataagacatgcacactaatacacatacacaccaaaaaattacacattttaaaactgctaagcttggatttaactgaatcatatatcttttatcatgttatcctaaaagtgagaagacataaccaagacatggaaataaatgtgaaagctggagccgaagagtcaaagagctaaaaaattaagtctagaacattctatgaggatagtataaataaaaagaaatacagtctagacatgctgcaaggaaagaagattctaaagtccgtttatggaggcaattccatatcctttcttgaacgcacattcagcttaccccagagagcaagtgaggcaatctggcaaaagattaataaagatgtaaacccctggaaa

SEQ ID NO: 163586 - DNA, 6976 bp, Homo sapiens
  Payload ID: 12215
  Gene Symbol: PANK1
  Gene Name: pantothenate kinase 1
  Uniprot ID: Q8TE04
  ENST ID: ENST00000307534
  CDS Start-End: 271-2067
accaaacgcacaggcacacacgcgcgcgcgcgtaagcacacactcacaaagcggggagggtaacgtgaatgaccttgcaaaggtatcttgctcactggggacaggattagcaaacctgacacctctgcaaataattgtcttcctcccgtattcctcctgaaacggttcgctcctttcgctgtctctcccagacccatctggttttcacatcgccatacaaagcccaacccgcccatctcctctctgcaagcccagagaacttgattccccatgttgaaactcgtcggtggcggtggcgggcaggactgggcatgctcagtggcggggaccagtctgggaggcgaggaagccgcgtttgaagtcgcgcggcctggggatcaggggaaggcgggcggcgggagccccggctgggggtgcgcggggatccccgattccgcgcccggggctggcgtgctccaggccggcgccgtggggccggcgcgcggggggcagggcgcagaggaggtgggggagtcggcaggaggaggggaggagcgccgggttcgccatccccaggcgccggctctgcggctgctgaatcggaagccgcagggaggatccggggaaataaagacgccggagaatgacctccagcgaggccgcctgagccggggcccgcgcacagccccgccagcccccggcatgggcgaccgcagcgggcagcaggagcgctcggtcccgcactctccaggggcccccgtgggcaccagcgccgccgctgtgaacgggctgctgcacaacggcttccatccgccgccagtccagccgccgcacgtctgcagccggggtccagtgggcggcagcgacgcggcgccccagcgcctcccgctcctgccggagctgcagccgcagccactgctccctcagcatgactccccggccaagaaatgccggctgcggaggaggatggactcggggagaaagaacaggccgccattcccatggtttggcatggacatcggtggaacgctggttaaattggtgtatttcgagccgaaggatattacagccgaagaggagcaagaggaagtggagaacctgaagagcatccggaagtatttgacttctaatactgcttatgggaaaactgggatccgagacgtccacctggaactgaaaaacctgaccatgtgtggacgcaaagggaacctgcacttcatccgctttcccagctgtgctatgcacaggttcattcagatgggcagcgagaagaacttctctagccttcacaccaccctctgtgccacaggaggcggggctttcaaattcgaagaggacttcagaatgattgctgacctgcagctgcataaactggatgaactggactgtctgattcagggcctgctttatgtcgactctgttggcttcaacggcaagccagaatgttactattttgaaaatcccacaaatcctgaattgtgtcaaaaaaagccgtactgccttgataacccataccctatgttgctggttaacatgggctcaggtgtcagcattctagccgtgtactccaaggacaactataaaagagttacagggaccagtcttggaggtggaacattcctaggcctatgttgcttgctgactggttgtgagacctttgaagaagctctggaaatggcagctaaaggcgacagcaccaatgttgataaactggtgaaggacatttacggaggagactatgaacgatttggccttcaaggatctgctgtagcatcaagctttggcaacatgatgagtaaagaaaagcgagattccatcagcaaggaagacctcgcccgggccacattggtcaccatcaccaacaacattggctccattgctcggatgtgcgcgttgaatgagaacatagacagagttgtgtttgttggaaattttctcagaatcaatatggtctccatgaagctgctggcatatgccatggatttttggtccaaaggacaactgaaagctctgtttttggaacatgagggttattttggagccgttggggcactgttggaactgttcaaaatgactgatgacaagtagagacgagcagtggaggaaacagcctcccaaaaggacagagaactaaaaaattgctgctggagaaggtgaaagtcgctttgggacggaagccaagccattatggcagatgaacctgctggatttgtaaataatttaaaatccttccagatgatcttttactcttaggttttgagctaatgattcaaaacgggggaatataaaaggttttttttctgtatactgtatttttttaaaaaaatggtgcagcgtggccaaacctaccaattgtatgcattaactttgaaaagttgtttgatgtttaagaaggacctgatatgtaagcgctggtcatttttcttctggggtttactgatcagtgtggtgattttaacttcatttagtaattactctaggagattttaccttgacttatatttttcatgacgtttcatgatttgctgttggtttcaaatgaaactacaaatctggcatgttttactgtgaacacttttgttatttgttttgtacccttttttgtcttgtttttctgttttagttgtcttctgaaaaaagagtcgttccctctgtttctgtcctcagatgatgtccctccccctacctgtaacctttctttgacataattgttcatatcaatgaaggtgctgaccagctcaatacaaagttaagcacaagatctaaagctcttgaaaatgcccgtgaagagaagactgaatgtgttaatgaatttaatgagtctggcaaaagttgcaaattatatgcaagtttgtcctatcgcttataaatgtagtgtttcattggatttattttatgctaggttatattaagttgaaatagtctgtgattaaatgtcctcatccatgcacagaatatgaatggcagcaaatctttgtgcaagaaatttgaaacttattgggaaaagcctcccagtagattaattgttcatatcaggagatttagggtaagtcatgggttgaggtgtcagatagtaatatctatttgttttgtacatgtatatatctaggaactttgtaacaacacatctttaataatgttaaaggttttttcatttttaatattttaaactaaaaactgtacttcaatctcagtttctaaaattaaaaataatttatactgatctatatattttttctttttgaaagatttcattaagactgatgggtaactttcaaatgagggtcatgtacaaatattgggatgcatgagatcccatgatcttgtgtattgagcttattgttgaaagggatttttgaaggacagaacaattactccatgatgaatcttcctttctctgccttctgagcaccgtctttaatttccatatcttcaagtcttgaagaagttgatgttaattgaagaattcacttgtctggttgaaataaagcctgtttctgttgtgatgtttttagtgtatatgttattttcatttcttaattctcatgtttatagtatctgctttgtaccatgaaatgactgtctgttgtgtttttgctactctacatttcaaaattggaggctttcccatgagtgtggtatggtccaaaacactgtcttcaggtgaagctgtagccctatgcatagatttttaaaatagagctttattgtttctatacaagtgactccttaatgccaactacctctgctatatttggtaattccaaaggagtttcaaaatttggtcatcacagatacattttaccaacttctatctggctttaaaaaaattcagacagctaaagtgttcttgaaaaggataagttaaaaatctacatattatttataattagtgccttttgatggcctcttctattcctattctcatctatcaggtaacagcagaccttgattccgcagatcatggttctacaaaggaaatcagggcaagttagtgtgactgtattttttttaattatctgaaatcacttgatctctcattacaaacatttaaaatattggtgtagctgagaaaatacattattccattatacaaatatcagttaaatgttgactacatatagccagcctgttttttacaaaagagatcttgtagcctgaggattttcacattcacttgaattacagaaacttttcttagaatcaacatcacaaagaaactgggaagactaaagaattttgaccttgtgcaatatgaagtaagagcatggctttttatcgtgaggcagcttcagtctgggtccagcttagtcagttaccagttcaaagatatgctaagcctctttctaaaccatagtttcctcacctataaaatgggacaaataattgttttacatacatatttaaagagctcagcacaggggttgacacaaagtaaatgcttcattaatgatagctacaatgaaaaaataaattatttaaactaatttattaaatcagtaattcttaactttctggattgtgggaaacccatgttagtatggagatgtttcaccaatctccgtatgctaatacatatccacagctccttgtccacacttccaaaatcccatacttaagaaatctatcttgacagctcacttggcagcaaaagctgacttgagcattatttctcacatgtagtagggctcttcacatgttttgttgcaaagctcgtcatgagttagataacaggatactgactctgacaggggtgttaagtaataaacgattttgaattggctgggtgtggtggctcacgcctgtaatcccagcactttgggaggccgaggcaggcggatcatgaggtcaggagatcgagaccatcctggctaatacggtgaaaccccgtctctactgaaaatacaaaaagctaggcatggtggtgggcacctgtagtcccagctacttgggaggctgaggcgggagaatggcgtgaacctgggaggcagagcttgcggtgagccgagatcacaccaatgcactccagcctgggagacagagtgagactgtctcaaaaaaataaaataaataaataaataaatgattctgaattttgaaacacatctgatcccgagttttagacaaagggattgtggaaatatagttgtgttcttcaccttatgcagtatacatggattcagagtctctttgttgggaacaattgttataggtaatgtatacttgatgtcgttcagtcatagaaggaatattaagaagttactctgtgccaggaaggaactggagactaagatgcataggatacagcccctgcagagaaagacagcaaaatctcaagccaacatcagtcatcaagtgccacaagtgccattcaatcatttattcattcacattcacagcagtaaacagaacaaagatccaccatcacagagcttatattctagaagggaagacaggtacattactaaatatataatgttagatcagtactacaaagaaaaagtaagctggtgtaaaggctaaataaggggtagttctattcagaaaaatgagaaggggaggaatatctcagggtggtctaagacagcctttcctaggaagtgacctttgagcagagagttgaatggaggtgagaacacattgtgtaaatgtctgagaaaatatttttcactcctggcaaatgaaaatagggatttgaggaactgcaaagaggccagtgtctggagttaaaaatagaaagtggtgggagatgcagtgttgggagtaaacttgagccaggtcctataagaaatctgtgagggtagtggcctctacccagaagagaggttggtcatttgtcttccagaaggtgctagagaaggttttgtgaagtcttaaccaaagaataggaatcactaagtggagaggaagggagggctttccaagcagagggagctgggtgagcagaagcgctgagggaagaaaccacttggcttattcagggactggaagctctttgctatagctggagcctggttcatgagacagaaaccaggtagtgagaaagaggaagctggcccaactgtggaaggacttgtcttccatgctaacattgcggacttttccgtagtcactgtggagccatcaaagagtttcaaggaaagtgaaactagaaataatcaggtttcaaagtggtaaagcaaaatgctctgttgaagtaaatgagtaaacaagttacgtacttttgaatacctaacattattccatttttttccctattgtgccagacctcatgcagtagctacagagtgaaccatgctttcgctgtaagtaggatggctataaaaattattgagaactttctcagaggacacaggctactaatagctacagccccactatgagtctattcattgagcaagaaggtttcaatactgggagcatcgtaaactatcactcacaagaattgttagaaagcagttttcctcccagtgatcagaagatgacgccacatttgtgaaaaagatttcattagtgtacatcgtttattaggtctaccagctgcccattcttttgctcatctgtttaatttttaataaatatcaatgatctgagaggcattgggtagcactgaggatgcaatccgatgtgaacaagacttcaggagctctgctttcattaggcttacatttggttaatggagataaacttgaagcatataaaccaataaataaacaagaaaatatcagggagtgacaattgctattaaggaaagaaacagggtgataggatagagagggaggagagagacttcttcagtcagatgatcataaaatgcaagtatgattaagtcatggcctcaacttttaaggaatgatgggctcaccttgctttcattcttgccacctcctcaatgaaaatgaaagatgtttttgggaaactgatagctaattttctttttcttagaatatttgatttagataatatgtatttaaaataaagttatcacgtaaaataa

SEQ ID NO: 163587 - DNA, 2513 bp, Homo sapiens
  Payload ID: 12215
  Gene Symbol: PANK1
  Gene Name: pantothenate kinase 1
  Uniprot ID: Q8TE04
  ENST ID: ENST00000322191
  CDS Start-End: 151-1095
cacaatctaaagcttgtatatataatggtagtttgtaaagtgtaccttccccacaggacgctgtgggatgtaaatttgtaggtcgagtttacagctggtttttcttgactgaagctcattcaactggttacttctttgtgggtgtctttaatgaagcttataaatggcaaaaagcaaacattcccatggtttggcatggacatcggtggaacgctggttaaattggtgtatttcgagccgaaggatattacagccgaagaggagcaagaggaagtggagaacctgaagagcatccggaagtatttgacttctaatactgcttatgggaaaactgggatccgagacgtccacctggaactgaaaaacctgaccatgtgtggacgcaaagggaacctgcacttcatccgctttcccagctgtgctatgcacaggttcattcagatgggcagcgagaagaacttctctagccttcacaccaccctctgtgccacaggaggcggggctttcaaattcgaagaggacttcagaatgattgctgacctgcagctgcataaactggatgaactggactgtctgattcagggcctgctttatgtcgactctgttggcttcaacggcaagccagaatgttactattttgaaaatcccacaaatcctgaattgtgtcaaaaaaagccgtactgccttgataacccataccctatgttgctggttaacatgggctcaggtgtcagcattctagccgtgtactccaaggacaactataaaagagttacagggaccagctttggcaacatgatgagtaaagaaaagcgagattccatcagcaaggaagacctcgcccgggccacattggtcaccatcaccaacaacattggctccattgctcggatgtgcgcgttgaatgagaacatagacagagttgtgtttgttggaaattttctcagaatcaatatggtctccatgaagctgctggcatatgccatggatttttggtccaaaggacaactgaaagctctgtttttggaacatgagggttattttggagccgttggggcactgttggaactgttcaaaatgactgatgacaagtagagacgagcagtggaggaaacagcctcccaaaaggacagagaactaaaaaattgctgctggagaaggtgaaagtcgctttgggacggaagccaagccattatggcagatgaacctgctggatttgtaaataatttaaaatccttccagatgatcttttactcttaggttttgagctaatgattcaaaacgggggaatataaaaggttttttttctgtatactgtatttttttaaaaaaatggtgcagcgtggccaaacctaccaattgtatgcattaactttgaaaagttgtttgatgtttaagaaggacctgatatgtaagcgctggtcatttttcttctggggtttactgatcagtgtggtgattttaacttcatttagtaattactctaggagattttaccttgacttatatttttcatgacgtttcatgatttgctgttggtttcaaatgaaactacaaatctggcatgttttactgtgaacacttttgttatttgttttgtacccttttttgtcttgtttttctgttttagttgtcttctgaaaaaagagtcgttccctctgtttctgtcctcagatgatgtccctccccctacctgtaacctttctttgacataattgttcatatcaatgaaggtgctgaccagctcaatacaaagttaagcacaagatctaaagctcttgaaaatgcccgtgaagagaagactgaatgtgttaatgaatttaatgagtctggcaaaagttgcaaattatatgcaagtttgtcctatcgcttataaatgtagtgtttcattggatttattttatgctaggttatattaagttgaaatagtctgtgattaaatgtcctcatccatgcacagaatatgaatggcagcaaatctttgtgcaagaaatttgaaacttattgggaaaagcctcccagtagattaattgttcatatcaggagatttagggtaagtcatgggttgaggtgtcagatagtaatatctatttgttttgtacatgtatatatctaggaactttgtaacaacacatctttaataatgttaaaggttttttcatttttaatattttaaactaaaaactgtacttcaatctcagtttctaaaattaaaaataatttatactgatctatatattttttctttttgaaagatttcattaagactgatgggtaactttcaaatgagggtcatgtacaaatattgggatgcatgagatcccatgatcttgtgtattgagcttattgttgaaagggatttttgaaggacagaacaattactccatgatgaatcttcctttctctgccttctgagcaccgtctttaatttccatatcttcaagtcttgaagaagttgatgttaattgaagaattcacttgtctggttgaaataaagcctgtttctgttgtga

SEQ ID NO: 163588 - DNA, 2703 bp, Homo sapiens
  Payload ID: 12215
  Gene Symbol: PANK1
  Gene Name: pantothenate kinase 1
  Uniprot ID: Q8TE04
  ENST ID: ENST00000342512
  CDS Start-End: 164-1285
aagtgcattatttcacaatctaaagcttgtatatataatggtagtttgtaaagtgtaccttccccacaggacgctgtgggatgtaaatttgtaggtcgagtttacagctggtttttcttgactgaagctcattcaactggttacttctttgtgggtgtctttaatgaagcttataaatggcaaaaagcaaacattcccatggtttggcatggacatcggtggaacgctggttaaattggtgtatttcgagccgaaggatattacagccgaagaggagcaagaggaagtggagaacctgaagagcatccggaagtatttgacttctaatactgcttatgggaaaactgggatccgagacgtccacctggaactgaaaaacctgaccatgtgtggacgcaaagggaacctgcacttcatccgctttcccagctgtgctatgcacaggttcattcagatgggcagcgagaagaacttctctagccttcacaccaccctctgtgccacaggaggcggggctttcaaattcgaagaggacttcagaatgattgctgacctgcagctgcataaactggatgaactggactgtctgattcagggcctgctttatgtcgactctgttggcttcaacggcaagccagaatgttactattttgaaaatcccacaaatcctgaattgtgtcaaaaaaagccgtactgccttgataacccataccctatgttgctggttaacatgggctcaggtgtcagcattctagccgtgtactccaaggacaactataaaagagttacagggaccagtcttggaggtggaacattcctaggcctatgttgcttgctgactggttgtgagacctttgaagaagctctggaaatggcagctaaaggcgacagcaccaatgttgataaactggtgaaggacatttacggaggagactatgaacgatttggccttcaaggatctgctgtagcatcaagctttggcaacatgatgagtaaagaaaagcgagattccatcagcaaggaagacctcgcccgggccacattggtcaccatcaccaacaacattggctccattgctcggatgtgcgcgttgaatgagaacatagacagagttgtgtttgttggaaattttctcagaatcaatatggtctccatgaagctgctggcatatgccatggatttttggtccaaaggacaactgaaagctctgtttttggaacatgagggttattttggagccgttggggcactgttggaactgttcaaaatgactgatgacaagtagagacgagcagtggaggaaacagcctcccaaaaggacagagaactaaaaaattgctgctggagaaggtgaaagtcgctttgggacggaagccaagccattatggcagatgaacctgctggatttgtaaataatttaaaatccttccagatgatcttttactcttaggttttgagctaatgattcaaaacgggggaatataaaaggttttttttctgtatactgtatttttttaaaaaaatggtgcagcgtggccaaacctaccaattgtatgcattaactttgaaaagttgtttgatgtttaagaaggacctgatatgtaagcgctggtcatttttcttctggggtttactgatcagtgtggtgattttaacttcatttagtaattactctaggagattttaccttgacttatatttttcatgacgtttcatgatttgctgttggtttcaaatgaaactacaaatctggcatgttttactgtgaacacttttgttatttgttttgtacccttttttgtcttgtttttctgttttagttgtcttctgaaaaaagagtcgttccctctgtttctgtcctcagatgatgtccctccccctacctgtaacctttctttgacataattgttcatatcaatgaaggtgctgaccagctcaatacaaagttaagcacaagatctaaagctcttgaaaatgcccgtgaagagaagactgaatgtgttaatgaatttaatgagtctggcaaaagttgcaaattatatgcaagtttgtcctatcgcttataaatgtagtgtttcattggatttattttatgctaggttatattaagttgaaatagtctgtgattaaatgtcctcatccatgcacagaatatgaatggcagcaaatctttgtgcaagaaatttgaaacttattgggaaaagcctcccagtagattaattgttcatatcaggagatttagggtaagtcatgggttgaggtgtcagatagtaatatctatttgttttgtacatgtatatatctaggaactttgtaacaacacatctttaataatgttaaaggttttttcatttttaatattttaaactaaaaactgtacttcaatctcagtttctaaaattaaaaataatttatactgatctatatattttttctttttgaaagatttcattaagactgatgggtaactttcaaatgagggtcatgtacaaatattgggatgcatgagatcccatgatcttgtgtattgagcttattgttgaaagggatttttgaaggacagaacaattactccatgatgaatcttcctttctctgccttctgagcaccgtctttaatttccatatcttcaagtcttgaagaagttgatgttaattgaagaattcacttgtctggttgaaataaagcctgtttctgttgtga

SEQ ID NO: 163589 - DNA, 2280 bp, Homo sapiens
  Payload ID: 12216
  Gene Symbol: PANK2
  Gene Name: pantothenate kinase 2
  Uniprot ID: Q9BZ23
  ENST ID: ENST00000316562
  CDS Start-End: 7-1719
gggtggatgaggaggctcgggcccttccacccacgcgtccattgggcggcgccgccatcactctcttctgggctacaccgccttctcttcctccgcggaacccggatcccctcctccaccaccctctccccgccccgtcacgatagcctctcattggacggaggcacggtcaatcctcctcgagttagggagccgactggacgcgaggcctttgggccgtccccagcctcgtcggattggcttcctgcgcgttggcgcaacggaagaggcggccggccgagggcgcgcctctgctctggctggactgccgcggaggaggcgagaaggaatccgacgctggggggcttgctcgggcggcagcgactgctgctgcggatgggagggggccggctcggcgcgcccatggagcgccacggcagggcttccgccacctccgtctcgtcggctggggagcaggcggccggggaccccgaagggcggcggcaggagccactgcggcgccgggcgagcagcgcgtcggtgcccgcggtcggggcctcggctgagggcacgaggcgggatcgactgggctcttacagcggccccacctcggtctcccgccagcgcgtcgaaagcctgaggaaaaagcggccgctttttccatggtttggactggatatcggtggaactctggtcaagctggtatattttgaacccaaagacatcactgctgaagaagaagaggaagaagtggaaagtcttaaaagcattcggaagtacctgacctccaatgtggcttatgggtctacaggcattcgggacgtgcacctcgagctgaaggacctgactctgtgtggacgcaaaggcaatctgcactttatacgctttcccactcatgacatgcctgcttttattcaaatgggcagagataaaaacttctcgagtctccacactgtcttttgtgccactggaggtggagcgtacaaatttgagcaggattttctcacaataggtgatcttcagctttgcaaactggatgaactagattgcttgatcaaaggaattttatacattgactcagtcggattcaatggacggtcacagtgctattactttgaaaaccctgctgattctgaaaagtgtcagaagttaccatttgatttgaaaaatccgtatcctctgcttctggtgaacattggctcaggggttagcatcttagcagtatattccaaagataattacaaacgggtcacaggtactagtcttggaggaggaactttttttggtctctgctgtcttcttactggctgtaccacttttgaagaagctcttgaaatggcatctcgtggagatagcaccaaagtggataaactagtacgagatatttatggaggggactatgagaggtttggactgccaggctgggctgtggcttcaagctttggaaacatgatgagcaaggagaagcgagaggctgtcagtaaagaggacctggccagagcgactttgatcaccatcaccaacaacattggctcaatagcaagaatgtgtgcccttaatgaaaacattaaccaggtggtatttgttggaaatttcttgagaattaatacgatcgccatgcggcttttggcatatgctttggattattggtccaaggggcagttgaaagcacttttttcggaacacgagggttattttggagctgttggagcactccttgagctgttgaagatcccgtgatcattacctggggaggggttcctgaaaccttccacaatgggatctgtggactttcatttttttaagagacttactcaatttcatgactgtactacctgaaacaaagtgagaaaggacaggtgtatttttctaagtcatcaagataaatccttaagaattcagtctaaattagcaaccaggaaggaaaaatatattaaaaacaacaaaaaagtggcacatgtccaggcagtgtgaggatttgctgtatataagttgcctgctttgtatttttgaaatctctgcatcactcattggaagtgcttctgaagagagctgctctgtgttcagttgactggttttgtgtcctgtttgaacttgctgaatgtaaggcaggctactatgcgttataatctaatcacaatttgtcaatatggtcttggcaatcatctgtgcattactctggtttgcattaagcctgtgtgtgaacttactgtaaaacatgttttatttcaaggttctgcaaaattaattgggcaggttaattgtgtacctgaaacttaacaagcagtttttggaagggca

SEQ ID NO: 163590 - DNA, 4815 bp, Homo sapiens
  Payload ID: 12216
  Gene Symbol: PANK2
  Gene Name: pantothenate kinase 2
  Uniprot ID: Q9BZ23
  ENST ID: ENST00000497424
  CDS Start-End: 312-1151
atgctgggggaggggctggcggcctcgacggcagctgcggaactaggccgagggacaaaggctaagtttttccatggtttggactggatatcggtggaactctggtcaagctggtatattttgaacccaaagacatcactgctgaagaagaagaggaagaagtggaaagtcttaaaagcattcggaagtacctgacctccaatgtggcttatgggtctacaggcattcgggacgtgcacctcgagctgaaggacctgactctgtgtggacgcaaaggcaatctgcactttatacgctttcccactcatgacatgcctgcttttattcaaatgggcagagataaaaacttctcgagtctccacactgtcttttgtgccactggaggtggagcgtacaaatttgagcaggattttctcacaataggtgatcttcagctttgcaaactggatgaactagattgcttgatcaaaggaattttatacattgactcagtcggattcaatggacggtcacagtgctattactttgaaaaccctgctgattctgaaaagtgtcagaagttaccatttgatttgaaaaatccgtatcctctgcttctggtgaacattggctcaggggttagcatcttagcagtatattccaaagataattacaaacgggtcacaggtactagtcttggaggaggaactttttttggtctctgctgtcttcttactggctgtaccacttttgaagaagctcttgaaatggcatctcgtggagatagcaccaaagtggataaactagtacgagatatttatggaggggactatgagaggtttggactgccaggctgggctgtggcttcaagctttggaaacatgatgagcaaggagaagcgagaggctgtcagtaaagaggacctggccagagcgactttgatcaccatcaccaacaacattggctcaatagcaagaatgtgtgcccttaatgaaaacattaaccaggtggtatttgttggaaatttcttgagaattaatacgatcgccatgcggcttttggcatatgctttggattattggtccaaggggcagttgaaagcacttttttcggaacacgagggttattttggagctgttggagcactccttgagctgttgaagatcccgtgatcattacctggggaggggttcctgaaaccttccacaatgggatctgtggactttcatttttttaagagacttactcaatttcatgactgtactacctgaaacaaagtgagaaaggacaggtgtatttttctaagtcatcaagataaatccttaagaattcagtctaaattagcaaccaggaaggaaaaatatattaaaaacaacaaaaaagtggcacatgtccaggcagtgtgaggatttgctgtatataagttgcctgctttgtatttttgaaatctctgcatcactcattggaagtgcttctgaagagagctgctctgtgttcagttgactggttttgtgtcctgtttgaacttgctgaatgtaaggcaggctactatgcgttataatctaatcacaatttgtcaatatggtcttggcaatcatctgtgcattactctggtttgcattaagcctgtgtgtgaacttactgtaaaacatgttttatttcaaggttctgcaaaattaattgggcaggttaattgtgtacctgaaacttaacaagcagtttttggaagggcagttccacgttactttacactaaatcctgggaatgaatgtctggagagacagggcttcttttcttggcagaatttccttgggtagtgggcggactgttctgatgcaagtgggtacactggcagaagcagcacaatctggaggactaacatgagtcagcagggccactagaattgacaccccctcaggggatcagggagaatctggtttttctttcaggctaagtagaaaaggaagaactgaagtgtctgtcaaagaactcatggggagtggggggtccttcagggcactgtggcacttgggaggtgagtctcagaagactgcctgaggagagtgccaggctgcaggtgctcttggtaggggctgaagcttttctttctgctttgcagaataatttcaaaagcctttcccaaggagagaatgcaccttttatatctgaggtcttaagtggtgcccatattgctgttgaaggcaaggatgggcctgtacaaagcagccttggaccaggagggaaaaccccaaggctctgcagcctccctgctcccctccgtttaaggctgtggtcagggagggatgggcagggtgccagccgcatggaggcagcagagacacccgtgttccagctggggcaaggggaactgatatgtgggctgtgggctgttccactaggcgtggccacctctgcacatgggccttggcacttaggaaatatgggtgctgctgcattgggaccttgtgtgggtgcagagcaggatggctgctgcgtggagggtaattttgtcccctggagagtgattggtgaccctcttccctgctgctgctgtttgcaggctcctggcctatactacctctgacgccctgatcctgagttcctctgccctcctctgctgccagcagcgctgttggtggcctcaccctcctccagtacccaggcaccaaagatggcaccaccatcctcctgcttgtaccacagggtgctgctccctgggccaactcctgtgaacttgctcacttcccatggagaccgaggccagggcctgcccctctgaggcccctgttttgtggtcctgctgcctctgctgtgctgcgttcaggaggttgtccactgctcgacgtgggtcaccatgcagcccttgctgttcccacaatttaacagaaaaggaaactgaacggatgagtaaggctgcccagggtcactcagctggaaaagagtagagctggactcaaacccgggactgtctgtctctggtgcctgagttgggaagacgctgttgatgtccccttctgcctcgctttgagcttcctcctccgtgggccctccccctactctagagaaactagtccattccctcatgttccaccttgtgctcagtaaaccctgtcactccacagcagggtttttgagacagtctcgctgtgtcacccaggtggagtgcagtggggcgatctcagctcactgcaacctctgccttccaggctcaagcaattctcctgccttagcctcctgcgtagctgagactacaggcatgtgccaccatggctggctaatttttatatttttagtagagatggggtttcaccatgatggccaggctggtctcgaactccagaccccaggtgatccgcctgccttggcctcccaaagtgctgggaatacaggtgtgagcccctgcgcccggctcacagcagggttcttgataggccaccagtgaatcccatgccaccgaatctggcattcatttcacagcctcatctcagttctcactcagcagagccctcttgcctgtcctgccacccaggctactaatgttctggttcattctctgctgacagttagctgtggctgtcctcagcctcagtcctgggtctccccaagcagtcattagcatcaccttgactgatttccagggaacacttcaaccaccccttacctctgagctccagccccgagacactgccttctctctgcatttgttgatctctgtgcagcagtgcccacatcctcatcccagcttactgccgtctcaccaccttcaggttgtgaggtgcccataaactctgctgttaccattgccacttccctgtcttagcagctgtccctttcagtctgccctccactagtggccatgaagggggctgtgaccgtggtccaggtgagaaaggaaggcctgaactaagatgggaggtgggtggccagaatggagaggggagaagtggatggccagaatggagagatgcttagagggctgtgttgggaagtggtgactggatacaggggagggaggagagatacaagagggcacctgggctcatttgtggactacgtgattttgagactccaaataagcactgggtatttgggttggagatacagagctgagaatgatatgcatgtaggtgggcaaagcaagggggatttcatgagttctaaggtagggtgagaaaaataaccgagagttgagcagtgacggaggaagctgcaaagaaaacgactgctcagggagaggctggccaggggcctgtggctcaggggactgagaagaggagctctctaggcatctgaattgaggttgcccacaattggttgcaagatcgtggctggccttgatggaagctgggaagccactcggtcctagtgaggggtggtgaggagagcagcaacggccacacaggaaggctttggacgttttttctcctgacactagttatttccaggcctgggatatagctaggggcttggggtgggggcaactctttgcagggtggtgtggcctgtggaggaaacaggctcagttccactactttggccaggtgcaatggctcatgcctgtaatcccagcactttggaaggccaaggcgggtggatcacctgaggtcaggagttcaagaccagcctggacaacatggtgaaaccccgtctctactgaaaatacaaaaataattagccgggaatggtggtgcgtgcctgtaatcccaggtactcgagaggctgaggcagacagttgcttgaacctgggaggcagaggttgctgcagtgagccgagattgctgcactgcactccagcctgggtgacagcaagactgtctcaaaaaaaaaaaaaaaaaa

SEQ ID NO: 163591 - DNA, 967 bp, Homo sapiens
  Payload ID: 12216
  Gene Symbol: PANK2
  Gene Name: pantothenate kinase 2
  ENST ID: ENST00000495692
  CDS Start-End: 621-967
ccgacgaccagcggccagacgctgcgggagcactgctgggctggaggagggctcgagctgcgaggacggcacggagcagcgggtttttccatggtttggactggatatcggtggaactctggtcaagctggtatattttgaacccaaagacatcactgctgaagaagaagaggaagaagtggaaagtcttaaaagcattcggaagtacctgacctccaatgtggcttatgggtctacaggcattcgggacgtgcacctcgagctgaaggacctgactctgtgtggacgcaaagataggtgatcttcagctttgcaaactggatgaactagattgcttgatcaaaggaattttatacattgactcagtcggattcaatggacggtcacagtgctattactttgaaaaccctgctgattctgaaaagtgtcagaagttaccatttgatttgaaaaatccgtatcctctgcttctggtgaacattggctcaggggttagcatcttagcagtatattccaaagataattacaaacgggtcacaggtactagtcttggaggaggaactttttttggtctctgctgtcttcttactggctgtaccacttttgaagaagctcttgaaatggcatctcgtggagatagcaccaaagtggataaactagtacgagatatttatggaggggactatgagaggtttggactgccaggctgggctgtggcttcaagctttggaaacatgatgagcaaggagaagcgagaggctgtcagtaaagaggacctggccagagcgactttgatcaccatcaccaacaacattggctcaatagcaagaatgtgtgcccttaatgaaaacattaaccaggtggtatttgttggaaatttcttgagaattaatacgatcgccatgcggcttttggcatatgctttggattattggtccaaggggcagttgaaagcacttttttcgga

SEQ ID NO: 163592 - DNA, 1843 bp, Homo sapiens
  Payload ID: 12216
  Gene Symbol: PANK2
  Gene Name: pantothenate kinase 2
  ENST ID: ENST00000336066
  CDS Start-End: 82-558
tctggctggactgccgcggaggaggcgagaaggaatccgacgctggggggcttgctcgggcggcagcgactgctgctgcggatgggagggggccggctcggcgcgcccatggagcgccacggcagggcttccgccacctccgtctcgtcggctggggagcaggcggccggggaccccgaagggcggcggcaggagccactgcggcgccgggcgagcagcgcgtcggtgcccgcggtcggggcctcggctgagggcacgaggcgggatcgactgggctcttacagcggccccacctcggtctcccgccagcgcgtcgaaagcctgaggaaaaagcggccgctttttccatggtttggactggatatcggtggaactctggtcaagctggtatattttgaacccaaagacatcactgctgaagaagaagaggaagaagtggaaagtcttaaaagcattcggaagtacctgacctccaatgtggcttatgggtctacaggcattcgggacgtgcacctcgagctgaaggacctgactctgtgtggacgcaaagataggtgatcttcagctttgcaaactggatgaactagattgcttgatcaaaggaattttatacattgactcagtcggattcaatggacggtcacagtgctattactttgaaaaccctgctgattctgaaaagtgtcagaagttaccatttgatttgaaaaatccgtatcctctgcttctggtgaacattggctcaggggttagcatcttagcagtatattccaaagataattacaaacgggtcacaggtactagtcttggaggaggaactttttttggtctctgctgtcttcttactggctgtaccacttttgaagaagctcttgaaatggcatctcgtggagatagcaccaaagtggataaactagtacgagatatttatggaggggactatgagaggtttggactgccaggctgggctgtggcttcaagctttggaaacatgatgagcaaggagaagcgagaggctgtcagtaaagaggacctggccagagcgactttgatcaccatcaccaacaacattggctcaatagcaagaatgtgtgcccttaatgaaaacattaaccaggtggtatttgttggaaatttcttgagaattaatacgatcgccatgcggcttttggcatatgctttggattattggtccaaggggcagttgaaagcacttttttcggaacacgagggttattttggagctgttggagcactccttgagctgttgaagatcccgtgatcattacctggggaggggttcctgaaaccttccacaatgggatctgtggactttcatttttttaagagacttactcaatttcatgactgtactacctgaaacaaagtgagaaaggacaggtgtatttttctaagtcatcaagataaatccttaagaattcagtctaaattagcaaccaggaaggaaaaatatattaaaaacaacaaaaaagtggcacatgtccaggcagtgtgaggatttgctgtatataagttgcctgctttgtatttttgaaatctctgcatcactcattggaagtgcttctgaagagagctgctctgtgttcagttgactggttttgtgtcctgtttgaacttgctgaatgtaaggcaggctactatgcgttataatctaatcacaatttgtcaatatggtcttggcaatcatctgtgcattactctggtttgcattaagcctgtgtgtgaacttactgtaaaacatgttttatttcaaggttctgcaaaattaattgggcaggttaattgtgtacctgaaacttaacaagcagtttttggaagggca

SEQ ID NO: 163593 - DNA, 1807 bp, Homo sapiens
  Payload ID: 12216
  Gene Symbol: PANK2
  Gene Name: pantothenate kinase 2
  Uniprot ID: Q9BZ23
  ENST ID: ENST00000610179
  CDS Start-End: 56-1399
gagaaggaatccgacgctggggggcttgctcgggcggcagcgactgctgctgcggatgggagggggccggctcggcgcgcccatggagcgccacggcagggcttccgccacctccgtctcgtcggctggggagcaggcggccggggaccccgaagggcggcggcaggagccactgcggcgccgggcgagcagcgcgtcggtgcccgcggtcggggcctcggctgagggcacgaggcgggatcgactgggctcttacagcggccccacctcggtctcccgccagcgcgtcgaaagcctgaggaaaaagcggccgctttttccatggtttggactggatatcggtggaactctggtcaagctggtatattttgaacccaaagacatcactgctgaagaagaagaggaagaagtggaaagtcttaaaagcattcggaagtacctgacctccaatgtggcttatgggtctacaggcattcgggacgtgcacctcgagctgaaggacctgactctgtgtggacgcaaaggcaatctgcactttatacgctttcccactcatgacatgcctgcttttattcaaatgggcagagataaaaacttctcgagtctccacactgtcttttgtgccactggaggtggagcgtacaaatttgagcaggattttctcacaataggtgatcttcagctttgcaaactggatgaactagattgcttgatcaaaggaattttatacattgactcagtcggattcaatggacggtcacagtgctattactttgaaaaccctgctgattctgaaaagtgtcagaagttaccatttgatttgaaaaatccgtatcctctgcttctggtgaacattggctcaggggttagcatcttagcagtatattccaaagataattacaaacgggtcacaggtactagtcttggaggaggaactttttttggtctctgctgtcttcttactggctgtaccacttttgaagaagctcttgaaatggcatctcgtggagatagcaccaaagtggataaactagtacgagatatttatggaggggactatgagaggtttggactgccaggctgggctgtggcttcaagctttggaaacatgatgagcaaggagaagcgagaggctgtcagtaaagaggacctggccagagcgactttgatcaccatcaccaacaacattggctcaatagcaagaatgtgtgcccttaatgaaaacattaaccaggtggtatttgttggaaatttcttgagaattaatacgatcgccatgcggcttttggcatatgctttggattattggtccaaggggcagttgaaagcacttttttcggaacacgagggttattttggagctgttggagcactccttgagctgttgaagatcccgtgatcattacctggggaggggttcctgaaaccttccacaatgggatctgtggactttcatttttttaagagacttactcaatttcatgactgtactacctgaaacaaagtgagaaaggacaggtgtatttttctaagtcatcaagataaatccttaagaattcagtctaaattagcaaccaggaaggaaaaatatattaaaaacaacaaaaaagtggcacatgtccaggcagtgtgaggatttgctgtatataagttgcctgctttgtatttttgaaatctctgcatcactcattggaagtgcttctgaagagagctgctctgtgttcagttgactggttttgtgtcctgtttgaacttgctgaatgtaaggcaggctactatgcgttataatctaatcacaatttgtcaa

SEQ ID NO: 163594 - DNA, 1763 bp, Homo sapiens
  Payload ID: 12216
  Gene Symbol: PANK2
  Gene Name: pantothenate kinase 2
  Uniprot ID: Q9BZ23
  ENST ID: ENST00000621507
  CDS Start-End: 363-1202
ccgcgcgcggacactgtccccgcacggtggtccctcgttggtgcgtggcctgacatccggctggaggcctcgggtgctccgaaagcggtaccttcgggggcccccccgcacccattgtttttccatggtttggactggatatcggtggaactctggtcaagctggtatattttgaacccaaagacatcactgctgaagaagaagaggaagaagtggaaagtcttaaaagcattcggaagtacctgacctccaatgtggcttatgggtctacaggcattcgggacgtgcacctcgagctgaaggacctgactctgtgtggacgcaaaggcaatctgcactttatacgctttcccactcatgacatgcctgcttttattcaaatgggcagagataaaaacttctcgagtctccacactgtcttttgtgccactggaggtggagcgtacaaatttgagcaggattttctcacaataggtgatcttcagctttgcaaactggatgaactagattgcttgatcaaaggaattttatacattgactcagtcggattcaatggacggtcacagtgctattactttgaaaaccctgctgattctgaaaagtgtcagaagttaccatttgatttgaaaaatccgtatcctctgcttctggtgaacattggctcaggggttagcatcttagcagtatattccaaagataattacaaacgggtcacaggtactagtcttggaggaggaactttttttggtctctgctgtcttcttactggctgtaccacttttgaagaagctcttgaaatggcatctcgtggagatagcaccaaagtggataaactagtacgagatatttatggaggggactatgagaggtttggactgccaggctgggctgtggcttcaagctttggaaacatgatgagcaaggagaagcgagaggctgtcagtaaagaggacctggccagagcgactttgatcaccatcaccaacaacattggctcaatagcaagaatgtgtgcccttaatgaaaacattaaccaggtggtatttgttggaaatttcttgagaattaatacgatcgccatgcggcttttggcatatgctttggattattggtccaaggggcagttgaaagcacttttttcggaacacgagggttattttggagctgttggagcactccttgagctgttgaagatcccgtgatcattacctggggaggggttcctgaaaccttccacaatgggatctgtggactttcatttttttaagagacttactcaatttcatgactgtactacctgaaacaaagtgagaaaggacaggtgtatttttctaagtcatcaagataaatccttaagaattcagtctaaattagcaaccaggaaggaaaaatatattaaaaacaacaaaaaagtggcacatgtccaggcagtgtgaggatttgctgtatataagttgcctgctttgtatttttgaaatctctgcatcactcattggaagtgcttctgaagagagctgctctgtgttcagttgactggttttgtgtcctgtttgaacttgctgaatgtaaggcaggctactatgcgttataatctaatcacaatttgtcaatatggtcttggcaatcatctgtgcattactctggtttgcattaagcctgtgtgtgaacttactgtaaaacatgttttatttcaaggttctgcaaaattaattgggcaggttaattgtgtacctgaaacttaacaagcagtttttggaagggca

SEQ ID NO: 163595 - DNA, 10506 bp, Homo sapiens
  Payload ID: 12217
  Gene Symbol: PANK3
  Gene Name: pantothenate kinase 3
  Uniprot ID: Q9H999
  ENST ID: ENST00000239231
  CDS Start-End: 318-1430
gcggcggcggcggcggtggcggcggctccggggaccggggccttttgtttggagcggctgcgggggggccccggagcggcgaggccggcggccttccccagcttgctcggtcccggccacccctcgcgggggtggggggccgccccctgggccgggcatctcctcaggcgccgccgccccgccctaggccggccccgcccggcctgaggggaggaaccggccgggcctcgccgcgcggcccagccacctccggagtcgccgcctctgctctcagtgccccggatcggaggccgtccatcgcccctcgggccgacgccatgaagatcaaagatgccaagaaaccctctttcccatggtttggcatggacattgggggaactctagtaaagctctcgtactttgaacctattgatatcacagcagaggaagagcaagaagaagttgagagtttaaaaagtattcggaaatatttgacttctaacgtggcatatggatccaccggcattcgggatgtacaccttgaactgaaagatttaacactttttggccgaagagggaacttgcactttatcaggtttccaacccaggacctgcctacttttatccaaatgggaagagataaaaacttctcaacattgcagacggtgctatgtgctacaggaggtggtgcttacaagtttgaaaaagattttcgcacaattggaaacctccacctgcacaaactggatgaacttgactgccttgtaaagggcttgctgtatatagactctgtcagtttcaatggacaagccgagtgctattattttgctaatgcctcagaacctgagcgatgccaaaagatgccttttaacctggatgatccctatccactgcttgtagtgaacattggctcaggagtcagtattttagcagtccattccaaagacaactataaacgagtgactgggacaagccttggagggggtacctttctgggtttatgcagtttattgactggctgtgaaagttttgaagaggctcttgaaatggcatccaaaggtgatagcacacaagctgacaagctggtccgtgatatttatggaggagattatgaaagatttggtttgccaggttgggctgtagcatctagttttgggaatatgatttataaggagaagcgagaatctgttagtaaagaagatctggcaagagctactttagttactatcaccaataacattggttctgtggcacgaatgtgtgctgttaatgagaaaataaacagagttgtctttgttggaaactttttacgtgtcaataccctctcaatgaaacttttggcatatgcactggattactggtcaaaaggtcaactaaaagcattgtttctagaacatgagggttactttggagcagttggtgcacttcttgggctgccaaatttcagctaaagcatcaggtctctctctctgctaataaatgtcatccaagaggaactaaaaccagaggcattattactgcattgtttgtcactgggaaccaaaggataaaagagtagcataagctgctgaatgttgccatattaaaggagagaacttggtaacgtgaagtatttctcattgaaatgctttcccttttgtatatagccagtgttaaatccttaaatgcaatacagcctctgattattgagcttcctcttaaaaagatttttttattttatgtagccaacattgcagtactgtatgctcaaacacaaatcttaaagtatcggaactgtttagcttatgaaaataatcgactctgaatatttgttacaagtctgttttatgtgttttgattactagtgagcagaaaataacataccctgtattcaaaattactgaaatggcaatcaaagatgatcatttttatgtgattttagaaatgttaaggcaatactactaattattgtaggtttttttaacgtatcacccaaagcatgtatgtgatctttccccattagtatctttttctcaaatgccataattaactgaaatactattattaaattttcatgagaattctaaaatgaatcctgggaaatgcacgtttggtgatgttgcactttctgtattttacaggaattagtcaatacatgttgaaatgtttaacattttaagattggaggcttaattactgggagtctgtctaatgaagtcctgggactattgtaatggaatatgatttgagttcactgtgctctttttgtttgtttgttttggtcatatatacattcagaacttttattttaaaacaaccacaataacattaataatagaaaattcatctgtaaatattcacagtctagtcactgaaaaatgggaaaacctctaccatgccttattattaccctttgctgtttgaggagccagaaatagaggtgcagttagaggacggtcactttttccaacaaaacccactccatagccatgtggatttttatccaaaggctcaacaaccagagggaatggtgagacctgataactaaaatactgttattggcaagggtttgaaatgtgtaagaacctaggagggaaaggaagattgagcaacataggaaaaggggaagagaggctgagtgtcaccaaggtccaaactccatttataaaaatactgcaaaaccaggagttgatggtagaaatgcatatgatccatggcaggagtaaatctctccacctcctctaactctctgaaaactctagagttggagcaagtcttccatttgcttcttatccccttaaaagaatgccttccacttcccaacagcccccatcaagggaccccaagaggccaccatgctcttatctcgcactttctttcctattccccttgcctgaatctggagtggggttgagccctctgccttcaaccttaagatttaggaagttctttccccaactgtctaacttggaaaggtagatgagtctgaattttgaagtaacgaatgcaaattccactcagcagaggcaatgttatttatgtacatagggatagtggaatgagttttaatagattctgtccaaaaggggtttgttcctcttatttcctctatgtaggaagttgtgtcttaggcaactttatcagtatcaatggaaaaatgataggcactacaatgaaatggcaggatgccaatatgagatatttcaggaataataagaaatacagtttgtttgtataaaataaactatctcaagaaagttttcaacgacagtgatagtgttcatttgtaagagagagttctagaacttcgatgtccagtgcagtagccactacccatatgtagctgttgagcatttgaaatatggttagtccaaattgagatgtgctctaaaggacaataaaaggttaaatatctcctaattttttgtattgattacatgttgaaatgttaacattggaaatattgggttaaagaaaaatacacaattaaaatgaatcttggccaggcgcagtggctcacgcctctaatcccagcactttgagaggccagggtgggcaggtcacctgaggtcaggagttcgagaccagcctggccagtgtggcaaaaccctgcctactaaaaatacaaaaattagccaggcatggtggtgcgcacctgtagtcccagctacttgggaggctgaggcaggagaattgcttgaacccaggaggaggaggctgcagtgagctgagattgtgccactgcactccagcctgggcgacagagtgagactctgtctcaaaaaaaagaatcatctgtttccaattatttttaaatgtgcttactagaaaagataaaatcacacatggtttacattttatttctattaagacagcaccgttaagaacatagagctttgaggaattgtggtattagaaccaaatctatttaccacagtgagcttacagggagttactcgagatcttaataaaaaattataatctttggcagccttcattatgattttgtgttcttattattccagtacctctagattacatatgggaaaagctaaagagccacagtggtgagatggttgctcactctagcaggtaatttcagtttgaaaggataaaatatatgaatcatagttcacattaaccaaagtacagtgatgaaataacttagactctgaccattccattttttcttaaagattgccctaaatctatagatgctaatacagtatttgccacaggtataaaacttgtagttactgtcattcaattaagattcttatctgtacagatatacaaatcagaaacttttaaaataaattgaactaatggaattttggctccaatatttagtcactacaatggaaatattaaagcaaggaacatgaagtcattgtagggttttaaaatggctactgactgacatgaattcagagtttcaaacagtctaaattctaaaaacttaactttacacgcttttcctcctaaataaccactctaataattcatacattcatatcttcaggtaaagaaaactgaattttaaacaattgaggctgggtgcagtggctcatgcctgtaatcgaatataaggacttgagtataaaatttgaaaactacatggggaaatgtctttatcatgcatctcttgatagtctactgaaaactattaagtaaacctgcggtctgtaaacaaaaaaacccatagtgatacttaccttgtgtaatgtaaacaattttttaagctctttaaagtacatctagatttactggtaatgtatagaagtcaattttatccccaagcatttctacttcctaaaccattagcaagagtctcaaaacaacttcactaaactattggacctccagtgttaacttgccaacataaaaatctgaaaaactttgtaatcactatcaaaaatacaaaagagagaataaattcccaggtaaaaggctttacaaattttggaactattatgcttttgtttactaaacactgatccttttagtaattctgcagtattgcctcagactcccacaaagtttcaaaatagctcatctattagattcctgtaacatttatttgggataaacgtggttttgttgccgttgttcataatagaataaaatatttagctttgatggttcagatgtaatacaaagaaataactaagtttgggcctgagataaatgtggtaaagcaagaatgcagagatgctgtaatgatgagtgagttttatagcattactgaggacctgaaaacttgctgccaaggacactttgaaggttttgttggctggaagaagtgtctctggaatcccactcctagctcttcttgaatatttgaaaagaattagataagggccatggggacccaggtcaccccacctcttcttttcagtttggctacaacattggagtcatcagtgctcctgagacagtcatacaggactttctcagttacactttgaaagagaggtcagaagactctccctctgaggttttgctcatgtccccctggcccttgtctgtggccatcttccccaatggtgatatgattggctcctttctgttgcactctttgtcaaccactttggcaggtgcagttcaatgcttatcataatttgttggctattactggttgccttatgggattctgcagacaagctgagttggttgaaatgctgatcctgggccactagattactggcttgtaatgcggactctgcacaagttttgtgcccatgtacattggagagatctcgcctactcccctttggggtacctttagtgctctcaaccagctggacgtcgttggtattctggagatccagatctttggtctggagttcatcttggggtctgaagagctatgcccagtgatactgggctttaccatccttccagctgtcctataaagtgtagcccttccattttgccctggaagtcgtaagtttttgctcattaacagaaaggaagagtactaatgagatccttcagcaattgtaggggactcaggatgtgtcccaggacatctaggagataagagtgctaggatgatacaagaaaagcaagtcactacactggcgctctttagagtacccagctaccaacaacccactgtcatttccatcatgctccagctctctcagtagctctctggaatcaatgttgtcttctattactcaatgagaatcttcaaggatgcaggtgttgagaagccaatctatagattagtgcaggagtggttaatattatcttcttgactgtagtctctctgtttgtggttgaaagggcaggaaggactttacatatgataggtcttgaggcatggcgttttgttctgtcctcatgattgtttctttgttattaaaggatgagtatggtgggatgagctttgtctgtagtggggctatcttggtctttgtggccttctctgaagttggaccagactccgttccctggaatactgtggccacactcttcagtttgcaatagcagtggctggttgctccaactggacctccaactttctagttggattgctcttcctgaacaattattatctagtttaagtgtgttgttgctttagggtcatggcatgcttatgtatttctgttaccatctgaccatggtactatgccaagttctcttaggggacctgaatctttccagtagaccacatttgagagagtatgagtcaactgggcatagttcccaacaacccaaaatacatacgtacttcactgaagcagatctcatgattccattgacttcatttctaaaattggactttgagcagccaatttctaaggattaaaaagaaactttaatgcattgtagacctctgtacacagaaaaatctttgtaacttttgggcttaattttcattcttaaaaaatctggtaactttttcaaatgcaaccactgtcagtttgctgtgaggctaggcaaacaacacaaggtatagaatttcccatcaccaccaccctgaccccgcgagaagattgccttttaattagagacttgtagaactagtgccttttaagttctacactcatcttttccaaagactattagtaaacttgccatgtaatttgacatggcagttccttgctcagctactctaaataaagttggaaattaggtggtctcttagtttgggtaaagtcagtactattgccagtaatatacatggtaattgaaagcccttaaagtggttcagattatttgccaaatattagactctataaaaatttctgaggttttttttcttttacctttgagtgtacatgtgattgctataatgtaaataccagtcccttaaagactgtttctataagcagaatgatgcagcacaaagtggaaaggttttcctcttattccagcagtattcttgccttcaaagagtagtccatcttgccttgatttttaaggttgttttcttggatggaaagcttaactggatagtaatttccatatgttctttataaccactctgtatattataagcaaagttttttcatattgtatctttttctgttgagcactttatgcattttagtctattgcatttgagaatgtagtttagaaattcactgtttaaagccatgtgaaaactgatagaggataatgaaaatgagtgtacattattttgaatttaacttaactgttttgtggtgggtgtgaacaaaacattagaaatatattatctttttgtgataatactctctgacctcacttaaagtgatctgccatgaggtatccatgatcaagtttatgtttattctaatacctaaggaattcagccaactttgtttctatcatcagataatctcagaaaatagtgtgttttatctatattactgcctcttttcaatatttaagagaataattgtcttctggtttctactgagcctagtaataatcactaaagacctaaaaaaggaattccttctgttaagagtatttggatagcccattcacgataatggtggtgtgaaaatcaatcatcccagcttttctgacatatctaaattttgaataattaatttccacttccaaaaaattcaaatgttttctcaaagcagtcactacttatttgcattattcctgcatattcagtgaatgtgaggtcatatttggtattgtattagaagtagtgttggtcactggtcttgcctctttgaacattatttttatttgtaaaatgagggagttggtttgttatgatgggaaatgagtcagttttcagggtcctgagaaaattgcttcattcatggctgtgtttgagataactaaagtaaattttttttcaggtatttggtgtcatgttttggagttaatatttagtgcttatataattttaagttattacataatttttattggtatatatttgataggtactaggtattggattctcaccaaaccagtagaatggtattctctcttaatatgtgattgcctgtaatggccaggtagatataccttaaagtaatatgaaaggttttatatgtatattaaaatgtttgtacttttaaatctgtaaaggttatctggaatttttactgtgttaacttcagaattatatgggcattatgactttttcattgtacaaaaaattattcataaatgttagaatacagatgttccttgacttacaatagggttatgttccagtagacccattgtaaattgaaaataccgtaagttgaaaatacatttaatacgcctaacctactgaacatcccagcttagcctagcctatcttaaatgtgttctgaacacttaacgttggcctttagctgggcaaaatcatctaatacaaaacctattttataatgaagtgtttaatatctcaaataagagtattgtaccacatatcgttatcccaggataatatcagagtacaaaatttgaagtacagtttttaactgaatgtgtattgcttttgccccattataaagttgaaaaaccataagtcaaaccattgttaagtcggactgtttgtgttacatatatttgggattttttagtggccctttttaaaaagctgtttcttatttctgatcattgtgagtggggatagatgtgggaagaaccatgtctctactaaaaatacaaaaaatagccaggcttgttggcacacacctatagtcccagctactcgggagaccgaggcaggagaatcacttgaaccgggaggcagagggcagatcatgccactgtattccagcctgggcaacagagtaagactctgtctcaaaaatgaatgaatgaatgaatgaacgaatgaatgtactatgagctgatactgggatttcaggtaccgcagtttgtgctgaatgatatgtttggggtaaatcagtttttttcttatagaatttcggcgtttttgctgcaactgccactaattttgcatttaaaagaacaaaagaggaatgtatttttcaaaggagtgaatgaggttaaaatcaagattttgaatggtataaatatgcaactaattcagttgtaggatattattaaattttttattgctaaatatgtttctttcatacgttgcagtgcttacagttccaacagctttccaagaaaacatttccatatttgtgttatttgtaaagtatacataaataatgtaaaataatttgggattatttcaactttacattgtatgtctgaatttcatcgatgttgtacctggctcagtcaatagttgtcacaggtattaagccattttggaatttgccacttttttctgggtaacctgttttagtttagtttacagcatttagaaacagaaggtaactttatagaagtaacaccaatatcctagtctgcttgccccgaatataactaatagtattaggatgtaagcaatattaagatggtttttattattttttatacactgtgtgcttttactttttatttaaactacagcaaaaaactgattttttaactaaaattgaatggcgtttatcttaatgaccagttattgaccaaagtgtactcagaagatgttattatgtcccaatctaaggaatcctttaatttggggattaattttacttacacatgccatttcagtttcagttgcctcattctattacatcattcttgtcaagtctaagctttatcatgtctgaattcttttaacactgaatctgtgatgtaaaaatgtatgatgtgccataaattttattcataataaactaagttatagcctattgtaatctgtaaaacatttcttgtaaattacctaatttattttttcatttatgtacagtatcttatgtaaatttgaaaaatgtttgccatggcgcattctgtaaacattcccgtattcttttccttaatgcttatttgcatgaaggtaacttgggttttgcttgtttgtattggataaccattaagccaacttcagtttctctgcctttttttctgtagtttaaccatttctaattttgttcatattctaaatagatgttagaatcatactttttattttctactttctaaataaattatctaagttgtttacta

SEQ ID NO: 163596 - DNA, 552 bp, Homo sapiens
  Payload ID: 12217
  Gene Symbol: PANK3
  Gene Name: pantothenate kinase 3
  ENST ID: ENST00000522176
  CDS Start-End: 187-552
cggagtcgccgcctctgctctcagtgccccggatcggaggccgtccatcgcccctcgggccgacgccatgaagatcaaagatgccaagaaaccctaaaacgcagataaacaagaaagataaagtcacccgtattccccgcacccggagcgaaccgctattaatattatgctttcccatggtttggcatggacattgggggaactctagtaaagctctcgtactttgaacctattgatatcacagcagaggaagagcaagaagaagttgagagtttaaaaagtattcggaaatatttgacttctaacgtggcatatggatccaccggcattcgggatgtacaccttgaactgaaagatttaacactttttggccgaagagggaacttgcactttatcaggtttccaacccaggacctgcctacttttatccaaatgggaagagataaaaacttctcaacattgcagacggtgctatgtgctacaggaggtggtgcttacaagtttgaaaaagattttcgcacaattggaaacctccacctgcacaaactggat

SEQ ID NO: 163597 - DNA, 2677 bp, Homo sapiens
  Payload ID: 12218
  Gene Symbol: PANK4
  Gene Name: pantothenate kinase 4
  Uniprot ID: Q9NVE7
  ENST ID: ENST00000378466
  CDS Start-End: 18-2363
atatatctccatggctgatgagctggccgggcactttcaaaatggcggagtgtggagcgagcggcagcgggagcagcggggacagtctggacaagagcatcacgctgccccccgacgagatcttccgcaacctggagaacgccaagcgcttcgccatcgacataggcgggtcgttaaccaagctggcctactattcaacggtacagcacaaagtcgccaaggtgcggtctttcgaccactccggaaaggacacagaacgtgaacatgagccgccctatgagatttcagttcaagaagagatcactgctcgactgcacttcattaagtttgagaatacctacatcgaagcctgcctggacttcatcaaagaccatctcgtcaacacagagaccaaggtcatccaggcgaccgggggcggggcctacaagttcaaagacctcatcgaagagaagctgcggctgaaagtcgacaaggaggacgtgatgacgtgcctgattaaggggtgcaacttcgtgctcaagaacatcccccatgaggccttcgtgtaccagaaggattccgaccctgagttccggttccagaccaaccacccccacattttcccctatcttcttgtcaatatcggctctggagtctccatcgtgaaggtggagacggaggacaggttcgagtgggtcggcggcagctccattggaggcggcaccttctgggggcttggcgctctgctcaccaaaacgaagaagtttgacgagctcctgcacctggcctcgaggggccagcacagcaatgtggacatgctggtgcgggacgtctacggcggcgcccaccagactctcgggctgagcgggaacctcatcgccagcagcttcgggaagtcggccaccgccgaccaagagttctccaaagaagacatggcgaagagcctgctgcacatgatcagcaacgacattgggcagctggcctgcctccacgcacggctgcacagcctggaccgcgtgtactttggaggcttctttatccggggccaccccgtgaccatgcgcaccatcacctatagcatcaacttcttctccaagggggaagtgcaggcgctgtttctgaggcacgaaggctacctgggagccatcggagcgttcctgaaaggagctgagcaggacaatcctaaccagtacagctggggagagaactatgcaggcagctccgggctgatgagtgcatcacccgagctcggcccggcgcagcgggcgcggagtggcacttttgacttgctggaaatggaccggctggagaggccactggttgacctgccgctcctcctggacccgccctcctacgtgcccgacacggtggacctcaccgatgacgctctggcccgaaaatactggctcacctgctttgaggaggccctggacggggtagtgaagcgcgcagtggcgagccagccagactctgtggatgcagccgagagggcggagaagttccggcagaagtactggaacaagcttcagaccctgaggcagcagcccttcgcctatgggaccctgaccgtgcgcagcctgctggacaccagggagcactgtctgaacgagttcaacttcccggatccctactccaaagtgaagcagcgggagaatggcgtggcgctgaggtgcttccccggggtcgtgcgctccctggacgcgctgggctgggaggaacggcagctggcgctggtgaaaggcctcctggcggggaatgtcttcgactggggggccaaagccgtgtctgctgtccttgaatccgacccctactttgggtttgaagaagcaaagaggaagttacaagaaagaccctggctcgtggattcctacagcgagtggcttcagagattaaaggggccccctcataaatgtgccttaattttcgcagataacagtggaatagacatcattttgggagtcttcccctttgtcagggagctactccttagagggacagaggtcatcctggcgtgcaactcaggccccgccctgaacgacgtgacccacagcgagtccctcatcgtggcagagcgtattgcgggcatggaccctgtcgtgcactctgcgctccaggaagagaggctgctgctggtgcagacgggctccagctccccgtgcctcgacctcagccgcctggataaggggctggccgcactggtgcgggagcgtggcgcggatctggtggtcatcgagggcatgggccgtgctgtccacacaaactaccacgcagccctgcgctgcgagagcctcaagctggccgtcatcaagaacgcgtggctggccgagcggctgggcggccggctcttcagcgtcatcttcaagtacgaggtcccagccgagtgaggcgctgcagctgccggactcttctgcttgtcacttgtcaggaatgtgtttttaccaccacagggaaactgcgttcaaatcaacgtatttatatggtactgctgtgacgcggcacatacaccccagccgcacagatgcgtgtgacccagaggcgagacgcagctttgtcctgggagacgttcatattggaatctatttaactgctaaagaaccttttatatatatatatatataaatagagagatctatacaggtatgtctgacgggacgcagcaccgtgggcacgcaccaaatagagtttttaaaagaggccg

SEQ ID NO: 163598 - DNA, 2524 bp, Homo sapiens
  Payload ID: 12218
  Gene Symbol: PANK4
  Gene Name: pantothenate kinase 4
  ENST ID: ENST00000435556
  CDS Start-End: 1-2214
actttcaaaatggcggagtgtggagcgagcggcagcgggagcagcggggacagtctggacaagagcatcacgctgccccccgacgagatcttccgcaacctggagaacgccaagcgcttcgccatcgacataggcgggtcgttaaccaagctggcctactattcaacggtacagcacaaagtcgccaaggtgcggtctttcgaccactccggaaaggacacagaacgtgaacatgagccgccctatgagatttcagttcaagaagagatcactgctcgactgcacttcattaagtttgagaatacctacatcgaagcctgcctggacttcatcaaagaccatctcgtcaacacagagaccaaggtcatccaggcgaccgggggcggggccttcgtgtaccagaaggattccgaccctgagttccggttccagaccaaccacccccacattttcccctatcttcttgtcaatatcggctctggagtctccatcgtgaaggtggagacggaggacaggttcgagtgggtcggcggcagctccattggaggcggcaccttctgggggcttggcgctctgctcaccaaaacgaagaagtttgacgagctcctgcacctggcctcgaggggccagcacagcaatgtggacatgctggtgcgggacgtctacggcggcgcccaccagactctcgggctgagcgggaacctcatcgccagcagcttcgggaagtcggccaccgccgaccaagagttctccaaagaagacatggcgaagagcctgctgcacatgatcagcaacgacattgggcagctggcctgcctccacgcacggctgcacagcctggaccgcgtgtactttggaggcttctttatccggggccaccccgtgaccatgcgcaccatcacctatagcatcaacttcttctccaagggggaagtgcaggcgctgtttctgaggcacgaaggctacctgggagccatcggagcgttcctgaaaggagctgagcaggacaatcctaaccagtacagctggggagagaactatgcaggcagctccgggctgatgagtgcatcacccgagctcggcccggcgcagcgggcgcggagtggcacttttgacttgctggaaatggaccggctggagaggccactggttgacctgccgctcctcctggacccgccctcctacgtgcccgacacggtggacctcaccgatgacgctctggcccgaaaatactggctcacctgctttgaggaggccctggacggggtagtgaagcgcgcagtggcgagccagccagactctgtggatgcagccgagagggcggagaagttccggcagaagtactggaacaagcttcagaccctgaggcagcagcccttcgcctatgggaccctgaccgtgcgcagcctgctggacaccagggagcactgtctgaacgagttcaacttcccggatccctactccaaagtgaagcagcgggagaatggcgtggcgctgaggtgcttccccggggtcgtgcgctccctggacgcgctgggctgggaggaacggcagctggcgctggtgaaaggcctcctggcggggaatgtcttcgactggggggccaaagccgtgtctgctgtccttgaatccgacccctactttgggtttgaagaagcaaagaggaagttacaagaaagaccctggctcgtggattcctacagcgagtggcttcagagattaaaggggccccctcataaatgtgccttaattttcgcagataacagtggaatagacatcattttgggagtcttcccctttgtcagggagctactccttagagggacagaggtcatcctggcgtgcaactcaggccccgccctgaacgacgtgacccacagcgagtccctcatcgtggcagagcgtattgcgggcatggaccctgtcgtgcactctgcgctccaggaagagaggctgctgctggtgcagacgggctccagctccccgtgcctcgacctcagccgcctggataaggggctggccgcactggtgcgggagcgtggcgcggatctggtggtcatcgagggcatgggccgtgctgtccacacaaactaccacgcagccctgcgctgcgagagcctcaagctggccgtcatcaagaacgcgtggctggccgagcggctgggcggccggctcttcagcgtcatcttcaagtacgaggtcccagccgagtgaggcgctgcagctgccggactcttctgcttgtcacttgtcaggaatgtgtttttaccaccacagggaaactgcgttcaaatcaacgtatttatatggtactgctgtgacgcggcacatacaccccagccgcacagatgcgtgtgacccagaggcgagacgcagctttgtcctgggagacgttcatattggaatctatttaactgctaaagaaccttttatatatatatatatataaatagagagatctatacaggtatgtctgacgggacgcagcaccgtgggcacgcaccaaatagagtttttaaaagag

SEQ ID NO: 163599 - DNA, 706 bp, Homo sapiens
  Payload ID: 12218
  Gene Symbol: PANK4
  Gene Name: pantothenate kinase 4
  ENST ID: ENST00000502512
  CDS Start-End: 1-411
ttccggcagaagtactggaacaagcttcagaccctgaggcagcagcccttcgcctatgggaccctgaccgtgcgcagcctgctggacaccagggagcactgtctgaacgagttcaacttcccggatccctactccaaagtgaagcagcgggagaatggcgtggcgctgaggtgcttccccggggtcgtgcgctccctggacgcgctgggctgggaggaacggcagctggcgctggtgaaaggcctcctggcggggaatgtcttcgactggggggccaaagccgtgtctgctgtccttgaatccgacccctactttgggtttgaagaagcaaagaggaagttacaagaaagaccctggctcgtggattcctacagcgagtggcttcagagattaaagataacagtggaatagacatcattttgggagtcttcccctttgtcagggagctactccttagagggacagaggtcatcctggcgtgcaactcaggccccgccctgaacgacgtgacccacagcgagtccctcatcgtggcagagcgtattgcgggcatggaccctgtcgtgcactctgcgctccaggaagagaggctgctgctggtgcagacgggctccagctccccgtgcctcgacctcaggtaaccccgcaccctgcacctgttctctccctcctgggctctgtgccctctgtgccgtgcacctgcacc

SEQ ID NO: 163600 - DNA, 879 bp, Homo sapiens
  Payload ID: 12218
  Gene Symbol: PANK4
  Gene Name: pantothenate kinase 4
  ENST ID: ENST00000486396
  CDS Start-End: 1-126
ggagcgagcggcagcgggagcagcggggacagtctggacaagagcatcacgctgccccccgacgagatcttccgcaacctggagaacgccaagcgcttcgccatcgacataggacacagaacgtgaacatgagccgccctatgagatttcagttcaagaagagatcactgctcgactgcacttcattaagtttgagaatacctacatcgaagcctgcctggacttcatcaaagaccatctcgtcaacacagagaccaaggtcatccaggcgaccgggggcggggcctacaagttcaaagacctcatcgaagagaagctgcggctgaaagtcgacaaggaggacgtgatgacgtgcctgattaaggggtgcaacttcgtgctcaagaacatcccccatgaggccttcgtgtaccagaaggattccgaccctgagttccggttccagaccaaccacccccacattttcccctatcttcttgtcaatatcggctctggagtctccatcgtgaaggtggagacggaggacaggttcgagtgggtcggcggcagctccattggaggcggcaccttctgggggcttggcgctctgctcaccaaaacgaagaagtttgacgagctcctgcacctggcctcgaggggccagcacagcaatgtggacatgctggtgcgggacgtctacggcggcgcccaccagactctcgggctgagcgggaacctcatcgccagcagcttcgggaagtcggccaccgccgaccaagagttctccaaagaagacatggcgaagagcctgctgcacatgatcagcaacgacattgggcagctggcctgcctccacgcacggctgcacagcctggaccgcgtgtactttggaggcttctt

SEQ ID NO: 163601 - DNA, 1041 bp, Homo sapiens
  Payload ID: 12218
  Gene Symbol: PANK4
  Gene Name: pantothenate kinase 4
  ENST ID: ENST00000502770
  CDS Start-End: 1-465
actttcaaaatggcggagtgtggagcgagcggcagcgggagcagcggggacagtctggacaagagcatcacgctgccccccgacgagatcttccgcaacctggagaacgccaagcgcttcgccatcgacatagggtttttaagttccagtagccccaaacccctcatctacagagactttagtctccaggacacccagagagtgtggggcatggacccccaggccccgctgtgtcctggtcctgaatcctgcccggtttgtgtctcccctgcaggcgggtcgttaaccaagctggcctactattcaacggtacagcacaaagtcgccaaggtgcggtctttcgaccactccggaaaggtgagcctgcactgtggccacccggggcagggcagccgcttctctgtcgtcttggacctggcacttgtctcgcagtcatccctctgctgctgcagacctcgactttagtgtcctgggagtttctagcagggacagcctcccctgccttccgccgtgtcccttcaagaccctttgtaggaacctgcgcccgcctgtgctcccccgggagaggcttccgctcctgctgggtggccctgaggtcgccacggtcctaggctcctccctcttgcccaggattctgcctcagagcgccgcctggttgaaggctggcgcgaacagccagctccactagggcagggtgcgcacagcccagcccggcgcggtgtcccacacacatgcggcctcccctactctgttttccaggacacagaacgtgaacatgagccgccctatgagatttcagttcaagaagagatcactgctcgactgcacttcattaagtttgagaatacctacatcgaagcctgcctggacttcatcaaagaccatctcgtcaacacagagaccaaggtcatccaggcgaccgggggcggggcctacaagttcaaagacctcatcgaagagaagctgcggctgaaagtcgacaaggaggacgtgatgacgtgcctgattaaggggtgcaacttcgtgctcaagaacatcccc

SEQ ID NO: 163602 - DNA, 1913 bp, Homo sapiens
  Payload ID: 12218
  Gene Symbol: PANK4
  Gene Name: pantothenate kinase 4
  ENST ID: ENST00000505228
  CDS Start-End: 1-1421
acaaggaggacgtgatgacgtgcctgattaaggggtgcaacttcgtgctcaagaacatcccccatgaggccttcgtgtaccagaaggattccgaccctgagttccggttccagaccaaccacccccacattttcccctatcttcttgtcaatatcggctctggagtctccatcgtgaaggtggagacggaggacaggttcgagtgggtcggcggcagctccattggaggcggcaccttctgggggcttggcgctctgctcaccaaaacgaagaagtttgacgagctcctgcacctggcctcgaggggccagcacagcaatgtggacatgctggtgcgggacgtctacggcggcgcccaccagactctcgggctgagcgggaacctcatcgccagcagcttcgggaagtcggccaccgccgaccaagagttctccaaagaagacatggcgaagagcctgctgcacatgatcagcaacgacattgggcagctggcctgcctccacgcacggctgcacagcctggaccgcgtgtactttggaggcttctttatccggggccaccccgtgaccatgcgcaccatcacctatagcatcaacttcttctccaagggggaagtgcaggcgctgtttctgaggcacgaaggctacctgggagccatcggagcgttcctgaaaggagctgagcaggacaatcctaaccagtacagctggggagagaactatgcaggcagctccgggctgatgagtgcatcacccgagctcggcccggcgcagcgggcgcggagtggcacttttgacttgctggaaatggaccggctggagaggccactggttgacctgccgctcctcctggacccgccctcctacgtgcccgacacggtggacctcaccgatgacgctctggcccgaaaatactggctcacctgctttgaggaggccctggacggggtagtgaagcgcgcagtggcgagccagccagactctgtggatgcagccgagagggcggagaagttccggcagaagtactggaacaagcttcagaccctgaggcagcagcccttcgcctatgggaccctgaccgtgcgcagcctgctggacaccagggagcactgtctgaacgagttcaacttcccggatccctactccaaagtgaagcagcgggagaatggcgtggcgctgaggtgcttccccggggtcgtgcgctccctggacgcgctgggctgggaggaacggcagctggcgctggtgaaaggcctcctggcggggaatgtcttcgactggggggccaaagccgtgtctgctgtccttgaatccgacccctactttgggtttgaagaagcaaagaggaagttacaagaaagaccctggctcgtggattcctacagcgagtggcttcagagattaaagataacagtggaatagacatcattttgggagtcttcccctttgtcagggagctactccttagagggacagaggtcatcctggcgtgcaactcaggccccgccctgaacgacgtgacccacagcgagtccctcatcgtggcagagcgtattgcgggcatggaccctgtcgtgcactctgcgctccaggaagagaggctgctgctggtgcagacgggctccagctccccgtgcctcgacctcagccgcctggataaggggctggccgcactggtgcgggagcgtggcgcggatctggtggtcatcgagggcatgggccgtgctgtccacacaaactaccacgcagccctgcgctgcgagagcctcaagctggccgtcatcaagaacgcgtggctggccgagcggctgggcggccggctcttcagcgtcatcttcaagtacgaggtcccagccgagtgaggcgctgcagctgccggactcttctgcttgtcacttgtcaggaatgtgtttt

SEQ ID NO: 163603 - DNA, 670 bp, Homo sapiens
  Payload ID: 12218
  Gene Symbol: PANK4
  Gene Name: pantothenate kinase 4
  ENST ID: ENST00000468002
  CDS Start-End: 1-573
ctgctgcacatgatcagcaacgacattgggcagctggcctgcctccacgcacggctgcacagcctggaccgcgtgtactttggaggcttctttatccggggccaccccgtgaccatgcgcaccatcacctatagcatcaacttcttctccaagggggaagtgcaggcgctgtttctgaggcacgaaggctacctgggagccatcggagcgttcctgaaaggagctgagcaggacaatcctaaccagtacagctggggagagaactatgcaggcagctccgggctgatgagtgcatcacccgagctcggcccggcgcagcgggcgcggagtggcacttttgacttgctggaaatggaccggctggagaggccactggttgacctgccgctcctcctggacccgccctcctacgtgcccgacacggtggacctcaccgatgacgctctggcccgaaaatactggctcacctgctttgaggaggccctggacggggcaaaaataccgctcctggccacctggtgggtcagtgaggacgtggcgtctgcgaggcacgttgcttctaagggcagctgatagttctgctagctagcacattccttcaaaaagcaatttaggagacgtctctgctcttttgaggtagtgaagcgcgcagtggcgagccagccagact

SEQ ID NO: 163604 - DNA, 2649 bp, Homo sapiens
  Payload ID: 12218
  Gene Symbol: PANK4
  Gene Name: pantothenate kinase 4
  Uniprot ID: Q9NVE7
  ENST ID: ENST00000615291
  CDS Start-End: 14-2335
gggcactttcaaaatggcggagtgtggagcgagcggcagcgggagcagcggggacagtctggacaagagcatcacgctgccccccgacgagatcttccgcaacctggagaacgccaagcgcttcgccatcgacataggcgggtcgttaaccaagctggcctactattcaacggtacagcacaaagtcgccaaggtgcggtctttcgaccactccggaaaggacacagaacgtgaacatgagccgccctatgagatttcagttcaagaagagatcactgctcgactgcacttcattaagtttgagaatacctacatcgaagcctgcctggacttcatcaaagaccatctcgtcaacacagagaccaaggtcatccaggcgaccgggggcggggcctacaagttcaaagacctcatcgaagagaagctgcggctgaaagtcgacaaggaggacgtgatgacgtgcctgattaaggggtgcaacttcgtgctcaagaacatcccccatgaggccttcgtgtaccagaaggattccgaccctgagttccggttccagaccaaccacccccacattttcccctatcttcttgtcaatatcggctctggagtctccatcgtgaaggtggagacggaggacaggttcgagtgggtcggcggcagctccattggaggcggcaccttctgggggcttggcgctctgctcaccaaaacgaagaagtttgacgagctcctgcacctggcctcgaggggccagcacagcaatgtggacatgctggtgcgggacgtctacggcggcgcccaccagactctcgggctgagcgggaacctcatcgccagcagcttcgggaagtcggccaccgccgaccaagagttctccaaagaagacatggcgaagagcctgctgcacatgatcagcaacgacattgggcagctggcctgcctccacgcacggctgcacagcctggaccgcgtgtactttggaggcttctttatccggggccaccccgtgaccatgcgcaccatcacctatagcatcaacttcttctccaagggggaagtgcaggcgctgtttctgaggcacgaaggctacctgggagccatcggagcgttcctgaaaggagctgagcaggacaatcctaaccagtacagctggggagagaactatgcaggcagctccgggctgatgagtgcatcacccgagctcggcccggcgcagcgggcgcggagtggcacttttgacttgctggaaatggaccggctggagaggccactggttgacctgccgctcctcctggacccgccctcctacgtgcccgacacggtggacctcaccgatgacgctctggcccgaaaatactggctcacctgctttgaggaggccctggacggggtagtgaagcgcgcagtggcgagccagccagactctgtggatgcagccgagagggcggagaagttccggcagaagtactggaacaagcttcagaccctgaggcagcagcccttcgcctatgggaccctgaccgtgcgcagcctgctggacaccagggagcactgtctgaacgagttcaacttcccggatccctactccaaagtgaagcagcgggagaatggcgtggcgctgaggtgcttccccggggtcgtgcgctccctggacgcgctgggctgggaggaacggcagctggcgctggtgaaaggcctcctggcggggaatgtcttcgactggggggccaaagccgtgtctgctgtccttgaatccgacccctactttgggtttgaagaagcaaagaggaagttacaagaaagaccctggctcgtggattcctacagcgagtggcttcagagattaaaggggccccctcataaatgtgccttaattttcgcagataacagtggaatagacatcattttgggagtcttcccctttgtcagggagctactccttagagggacagaggtcatcctggcgtgcaactcaggccccgccctgaacgacgtgacccacagcgagtccctcatcgtggcagagcgtattgcgggcatggaccctgtcgtgcactctgcgctccaggaagagaggctgctgctggtgcagacgggctccagctccccgtgcctcgacctcagccgcctggataaggggctggccgcactggtgcgggagcgtggcgcggatctggtggtcatcgagggcatgggccgtgctgtccacacaaactaccacgcagccctgcgctgcgagagcctcaagctggccgtcatcaagaacgcgtggctggccgagcggctgggcggccggctcttcagcgtcatcttcaagtacgaggtcccagccgagtgaggcgctgcagctgccggactcttctgcttgtcacttgtcaggaatgtgtttttaccaccacagggaaactgcgttcaaatcaacgtatttatatggtactgctgtgacgcggcacatacaccccagccgcacagatgcgtgtgacccagaggcgagacgcagctttgtcctgggagacgttcatattggaatctatttaactgctaaagaaccttttatatatatatatatataaatagagagatctatacaggtatgtctgacgggacgcagcaccgtgggcacgcaccaaatagagtttttaaaagaggccg

SEQ ID NO: 163605 - DNA, 1041 bp, Homo sapiens; identical to SEQ ID NO: 163601
  Payload ID: 12218
  Gene Symbol: PANK4
  Gene Name: pantothenate kinase 4
  ENST ID: ENST00000628687
  CDS Start-End: 10-465

SEQ ID NO: 163606 - DNA, 706 bp, Homo sapiens; identical to SEQ ID NO: 163599
  Payload ID: 12218
  Gene Symbol: PANK4
  Gene Name: pantothenate kinase 4
  ENST ID: ENST00000625442
  CDS Start-End: 1-411

SEQ ID NO: 163607 - DNA, 2524 bp, Homo sapiens; identical to SEQ ID NO: 163598
  Payload ID: 12218
  Gene Symbol: PANK4
  Gene Name: pantothenate kinase 4
  ENST ID: ENST00000630982
  CDS Start-End: 10-2214

SEQ ID NO: 163608 - DNA, 1913 bp, Homo sapiens; identical to SEQ ID NO: 163602
  Payload ID: 12218
  Gene Symbol: PANK4
  Gene Name: pantothenate kinase 4
  ENST ID: ENST00000626423
  CDS Start-End: 1-1421

SEQ ID NO: 163609 - DNA, 879 bp, Homo sapiens; identical to SEQ ID NO: 163600
  Payload ID: 12218
  Gene Symbol: PANK4
  Gene Name: pantothenate kinase 4
  ENST ID: ENST00000627774
  CDS Start-End: 1-126

SEQ ID NO: 163610 - DNA, 670 bp, Homo sapiens; identical to SEQ ID NO: 163603
  Payload ID: 12218
  Gene Symbol: PANK4
  Gene Name: pantothenate kinase 4
  ENST ID: ENST00000628406
  CDS Start-End: 1-573

SEQ ID NO: 163611 - DNA, 3129 bp, Homo sapiens
  Payload ID: 12219
  Gene Symbol: PAPD4
  Gene Name: PAP associated domain containing 4
  Uniprot ID: Q6PIY7
  ENST ID: ENST00000296783
  CDS Start-End: 300-1754
gtgttgctcctcccctggcagccgtgaggggggttagatctcagccggagccggagctgggcctagctgtcccacgggccaccactacctcctttggttcgggagaaagctacgaccaagtacgcccagctcgggccttagaacttctgaacgggcagtgcgggtaggccctgcttagcccttcccggaggacacctgaccaaaagaggaagatagtcttgggacccttgcatggtgtttcaaagggtggtgaagaactaaggtagaagaatacatgttcacttccagtgaacaagagcatgttcccaaactcaattttgggtcgcccacccttcactccaaatcatcaacaacataataacttctttaccctgtcacctactgtttattcacaccagcagcttatagatgcacaattcaactttcagaatgcagacttgtctagagctgtgtcattacagcagctgacatatggaaatgtcagtccaatacagacctcagcttccccattatttcgaggaaggaagagattaagcgatgaaaaaaaccttcctcttgacggtaaacggcaacgtttccattcaccccaccaagagccaactgtagttaaccagatagtgcctttatcaggtgaacgaagatactcaatgccaccattgtttcatacacattatgtaccagatatagtcagatgtgttccaccttttcgagaaattgcatttttagaacctagagaaatcacactgcctgaggccaaagataagttgagtcagcagatactggagttatttgaaacatgtcagcagcaaataagtgatttaaagaagaaagaactctgtcgaacacagctgcagagagaaattcagctgttatttccacaaagcagactttttttggttgggtcctctttaaatggatttggtacccggagcagtgatggtgatttatgcctagttgttaaggaagaaccatgtttttttcaggtaaatcagaagactgaagcacggcatatactcaccttagtccataaacacttctgtactagactttcgggctacattgagagacctcagctgattcgagcaaaagtgccaattgtgaagttcagggataaagtcagttgtgtggagtttgacttgaatgtaaacaatattgttggaataagaaacacattccttctcagaacttatgcataccttgaaaatcgagttcgtccgttagtgctggtgattaagaagtgggcaagtcaccatcagataaatgatgccagtcgtggtactttaagcagctatagtcttgtattgatggttttgcactatttacaaaccctacctgaacccatccttccatccctccaaaaaatttacccagagtcttttagtcctgctatacagctgcaccttgtacatcaagctccatgtaatgttcctccttacctctcaaagaatgaatcaaaccttggggacctcttactgggctttcttaaatattatgctacagaatttgactggaatagtcaaatgatttcagttcgtgaagccaaagccattccaaggcctgatggtattgaatggagaaataaatacatctgtgtagaagaaccttttgatggaacaaatacagccagagcagtgcacgaaaagcagaaatttgatatgatcaaggatcaatttttaaagtcatggcacagattgaaaaacaagagagatttgaacagtatactacctgtaagagctgctgtcctgaaaagataactggcctctatttcttaataaattcttccaagaaataaagaacaatagtttcatcataatacattatgtttacctccatcatagttgcttttttcatagttcttgttttcatgttttatttttaaaaagacatataaagattgcatattttattatgacatttcctaataaacccctttgatttaaaaatgtatttttaaaaatgtttacattgatgatgagtaatattgcatgtgttttcaggtgatcagataaaatatattttgggaaattaactgaacaaataaaaagtttttgatataacttcaattaattgtaccacatgctaatcctgaagagatgtgtagaattttggaaagggtctaattcatacatgcttaaagtataacctacgttagatagtttgttgtcaaagtctgttctagtaaagtgaagattcaagtcagttgttcagttacttgaagcaaaacgaaatctttcatttcagtcaaatcactgcagtcatgaaatactgaacaattgccttaagtctttgcttgactcactgggatagactgaggctttgggtgtgtctgtattagcatttcattagtacttcacatgcttttgatgtactcttgagattgctttaaattttgtattgaaacaacaatacattttgcactgtagtaatgggagcactaactcttacaacagttagtgaatcgttttaaagaatcagttcagtgtagacattttgaaaagattgtttcctgtgctttacgatagcttagtgcaatgtgcacttctgttttacttgccattttcctgctctgttttctctgtgacatgaagcaacagaaactgagatcaaagttaagattatatcctgtttgtagtatcagatatttttctgtgtacaattataggattgtaatctaaactggaatttttaggcagtaagtcaccacaaaatgttttagataagacacaataaaattattataaataaaagcttaatgtttgtaaaaaatctcttttttagtatttcttttttcacatgaaagaagtggtggctgctaaaaaaaaagctacagtgtttattaagggtctttttgatttatgtaaatatttgtaaattggtcagtgcctgtaaatttaaatataaaaagtaaccttgaaaacagttttaactttttcaaaagaactatgtccaacattttttagacctgctgtagtacagttttgtacctctaacgtattttttttttgcagaccaaatgctaaaacttttgcttttctttgacttgtaaaaggtgcacattttcattttcttccttaagttcaaatttttgtatgatgtcaaatgcaataaaatttatatatggacattgtt

SEQ ID NO: 163612 - DNA, 3223 bp, Homo sapiens
  Payload ID: 12219
  Gene Symbol: PAPD4
  Gene Name: PAP associated domain containing 4
  Uniprot ID: Q6PIY7
  ENST ID: ENST00000423041
  CDS Start-End: 406-1848
ctattctcatccggggtcacgtcggtcttccgggtgtctttgacagggttttctacgccgctttttcggcgactttttgctcttccgctttttgccaccgcccccaaccttctatatccttgcagcccctaccttttcttgtgttgctcctcccctggcagccgtgaggggggttagatctcagccggagccggagctgggcctagctgtcccacgggccaccactacctcctttggttcgggagaaagctacgaccaagtacgcccagctcgggccttagaacttctgaacgggcagtgcgggaccaaaagaggaagatagtcttgggacccttgcatggtgtttcaaagggtggtgaagaactaaggtagaagaatacatgttcacttccagtgaacaagagcatgttcccaaactcaattttgggtcgcccacccttcactccaaatcatcaacaacataataacttctttaccctgtcacctactgtttattcacaccagcagcttatagatgcacaattcaactttcagaatgcagacttgtctagagctgtgtcattacagcagctgacatatggaaatgtcagtccaatacagacctcagcttccccattatttcgaggaaggaagagattaagcgatgaaaaaaaccttcctcttgacggtaaacggcaacgtttccattcaccccaccaagagccaactgtagttaaccagatagtgcctttatcaggtgaacgaagatactcaatgccaccattgtttcatacacattatgtaccagatatagtcagatgtgttccaccttttcgagaaattgcatttttagaacctagagaaatcacactgcctgaggccaaagataagttgagtcagcagatactggagttatttgaaacatgtcagcagcaaataagtgatttaaagaagaaagaactctgtcgaacacagctgcagagagaaattcagctgttatttccacaaagcagactttttttggttgggtcctctttaaatggatttggtacccggagcagtgatggtgatttatgcctagttgttaaggaagaaccagtaaatcagaagactgaagcacggcatatactcaccttagtccataaacacttctgtactagactttcgggctacattgagagacctcagctgattcgagcaaaagtgccaattgtgaagttcagggataaagtcagttgtgtggagtttgacttgaatgtaaacaatattgttggaataagaaacacattccttctcagaacttatgcataccttgaaaatcgagttcgtccgttagtgctggtgattaagaagtgggcaagtcaccatcagataaatgatgccagtcgtggtactttaagcagctatagtcttgtattgatggttttgcactatttacaaaccctacctgaacccatccttccatccctccaaaaaatttacccagagtcttttagtcctgctatacagctgcaccttgtacatcaagctccatgtaatgttcctccttacctctcaaagaatgaatcaaaccttggggacctcttactgggctttcttaaatattatgctacagaatttgactggaatagtcaaatgatttcagttcgtgaagccaaagccattccaaggcctgatggtattgaatggagaaataaatacatctgtgtagaagaaccttttgatggaacaaatacagccagagcagtgcacgaaaagcagaaatttgatatgatcaaggatcaatttttaaagtcatggcacagattgaaaaacaagagagatttgaacagtatactacctgtaagagctgctgtcctgaaaagataactggcctctatttcttaataaattcttccaagaaataaagaacaatagtttcatcataatacattatgtttacctccatcatagttgcttttttcatagttcttgttttcatgttttatttttaaaaagacatataaagattgcatattttattatgacatttcctaataaacccctttgatttaaaaatgtatttttaaaaatgtttacattgatgatgagtaatattgcatgtgttttcaggtgatcagataaaatatattttgggaaattaactgaacaaataaaaagtttttgatataacttcaattaattgtaccacatgctaatcctgaagagatgtgtagaattttggaaagggtctaattcatacatgcttaaagtataacctacgttagatagtttgttgtcaaagtctgttctagtaaagtgaagattcaagtcagttgttcagttacttgaagcaaaacgaaatctttcatttcagtcaaatcactgcagtcatgaaatactgaacaattgccttaagtctttgcttgactcactgggatagactgaggctttgggtgtgtctgtattagcatttcattagtacttcacatgcttttgatgtactcttgagattgctttaaattttgtattgaaacaacaatacattttgcactgtagtaatgggagcactaactcttacaacagttagtgaatcgttttaaagaatcagttcagtgtagacattttgaaaagattgtttcctgtgctttacgatagcttagtgcaatgtgcacttctgttttacttgccattttcctgctctgttttctctgtgacatgaagcaacagaaactgagatcaaagttaagattatatcctgtttgtagtatcagatatttttctgtgtacaattataggattgtaatctaaactggaatttttaggcagtaagtcaccacaaaatgttttagataagacacaataaaattattataaataaaagcttaatgtttgtaaaaaatctcttttttagtatttcttttttcacatgaaagaagtggtggctgctaaaaaaaaagctacagtgtttattaagggtctttttgatttatgtaaatatttgtaaattggtcagtgcctgtaaatttaaatataaaaagtaaccttgaaaacagttttaactttttcaaaagaactatgtccaacattttttagacctgctgtagtacagttttgtacctctaacgtattttttttttgcagaccaaatgctaaaacttttgcttttctttgacttgtaaaaggtgcacattttcattttcttccttaagttcaaatttttgtatgatgtcaaatgcaataaaatttatatatggacattgtt

SEQ ID NO: 163613 - DNA, 2204 bp, Homo sapiens
  Payload ID: 12219
  Gene Symbol: PAPD4
  Gene Name: PAP associated domain containing 4
  Uniprot ID: Q6PIY7
  ENST ID: ENST00000428308
  CDS Start-End: 443-1897
ctacgccgctttttcggcgactttttgctcttccgctttttgccaccgcccccaaccttctatatccttgcagcccctaccttttcttgtgttgctcctcccctggcagccgtgaggggggttagatctcagccggagccggagctgggcctagctgtcccacgggccaccactacctcctttggttcgggagaaagctacgaccaagtacgcccagctcgggccttagaacttctgaacgggcagtgcgggaccaaaagaggaagatagtcttgggacccttgcatggtgtttcaaagggtggtgaagaactaaggggctccagagcttgatatatttctgggaatttggaatatgctaaactagatttctgccctagactaaacatctggctgtggactcaatgtagaagaatacatgttcacttccagtgaacaagagcatgttcccaaactcaattttgggtcgcccacccttcactccaaatcatcaacaacataataacttctttaccctgtcacctactgtttattcacaccagcagcttatagatgcacaattcaactttcagaatgcagacttgtctagagctgtgtcattacagcagctgacatatggaaatgtcagtccaatacagacctcagcttccccattatttcgaggaaggaagagattaagcgatgaaaaaaaccttcctcttgacggtaaacggcaacgtttccattcaccccaccaagagccaactgtagttaaccagatagtgcctttatcaggtgaacgaagatactcaatgccaccattgtttcatacacattatgtaccagatatagtcagatgtgttccaccttttcgagaaattgcatttttagaacctagagaaatcacactgcctgaggccaaagataagttgagtcagcagatactggagttatttgaaacatgtcagcagcaaataagtgatttaaagaagaaagaactctgtcgaacacagctgcagagagaaattcagctgttatttccacaaagcagactttttttggttgggtcctctttaaatggatttggtacccggagcagtgatggtgatttatgcctagttgttaaggaagaaccatgtttttttcaggtaaatcagaagactgaagcacggcatatactcaccttagtccataaacacttctgtactagactttcgggctacattgagagacctcagctgattcgagcaaaagtgccaattgtgaagttcagggataaagtcagttgtgtggagtttgacttgaatgtaaacaatattgttggaataagaaacacattccttctcagaacttatgcataccttgaaaatcgagttcgtccgttagtgctggtgattaagaagtgggcaagtcaccatcagataaatgatgccagtcgtggtactttaagcagctatagtcttgtattgatggttttgcactatttacaaaccctacctgaacccatccttccatccctccaaaaaatttacccagagtcttttagtcctgctatacagctgcaccttgtacatcaagctccatgtaatgttcctccttacctctcaaagaatgaatcaaaccttggggacctcttactgggctttcttaaatattatgctacagaatttgactggaatagtcaaatgatttcagttcgtgaagccaaagccattccaaggcctgatggtattgaatggagaaataaatacatctgtgtagaagaaccttttgatggaacaaatacagccagagcagtgcacgaaaagcagaaatttgatatgatcaaggatcaatttttaaagtcatggcacagattgaaaaacaagagagatttgaacagtatactacctgtaagagctgctgtcctgaaaagataactggcctctatttcttaataaattcttccaagaaataaagaacaatagtttcatcataatacattatgtttacctccatcatagttgcttttttcatagttcttgttttcatgttttatttttaaaaagacatataaagattgcatattttattatgacatttcctaataaacccctttgatttaaaaatgtatttttaaaaatgtttacattgatgatgagtaatattgcatgtgttttcaggtgatcagataaaatatattttgggaaattaactgaacaaataaaaagtttttgatataacttc

SEQ ID NO: 163614 - DNA, 3523 bp, Homo sapiens
  Payload ID: 12219
  Gene Symbol: PAPD4
  Gene Name: PAP associated domain containing 4
  Uniprot ID: Q6PIY7
  ENST ID: ENST00000453514
  CDS Start-End: 694-2148
cgctccccgctgcctattctcatccggggtcacgtcggtcttccgggtgtctttgacagggttttctacgccgctttttcggcgactttttgctcttccgctttttgccaccgcccccaaccttctatatccttgcagcccctaccttttcttgtgttgctcctcccctggcagccgtgaggggggttagatctcagccggagccggagctgggcctagctgtcccacgggccaccactacctcctttggttcgggagaaagctacgaccaagtacgcccagctcgggccttagaacttctgaacgggcagtgcgggtaggccctgcttagcccttcccggaggacacctgtgagtttagggggtttcggagaggaacgcagcagtgtaggcccaggtcggcggcggggcacgggaaacttttccgaaacggtagcgttttgttttgcgtgggaggttccagcagtatctcttggttattccaaatttatgggcggcatctgggctgctgtacattttgaagaatcttaggaccgcttactttgcttactcgttttctattcctcgcgtactgcctcgtccaccactccaggaccaaaagaggaagatagtcttgggacccttgcatggtgtttcaaagggtggtgaagaactaaggtagaagaatacatgttcacttccagtgaacaagagcatgttcccaaactcaattttgggtcgcccacccttcactccaaatcatcaacaacataataacttctttaccctgtcacctactgtttattcacaccagcagcttatagatgcacaattcaactttcagaatgcagacttgtctagagctgtgtcattacagcagctgacatatggaaatgtcagtccaatacagacctcagcttccccattatttcgaggaaggaagagattaagcgatgaaaaaaaccttcctcttgacggtaaacggcaacgtttccattcaccccaccaagagccaactgtagttaaccagatagtgcctttatcaggtgaacgaagatactcaatgccaccattgtttcatacacattatgtaccagatatagtcagatgtgttccaccttttcgagaaattgcatttttagaacctagagaaatcacactgcctgaggccaaagataagttgagtcagcagatactggagttatttgaaacatgtcagcagcaaataagtgatttaaagaagaaagaactctgtcgaacacagctgcagagagaaattcagctgttatttccacaaagcagactttttttggttgggtcctctttaaatggatttggtacccggagcagtgatggtgatttatgcctagttgttaaggaagaaccatgtttttttcaggtaaatcagaagactgaagcacggcatatactcaccttagtccataaacacttctgtactagactttcgggctacattgagagacctcagctgattcgagcaaaagtgccaattgtgaagttcagggataaagtcagttgtgtggagtttgacttgaatgtaaacaatattgttggaataagaaacacattccttctcagaacttatgcataccttgaaaatcgagttcgtccgttagtgctggtgattaagaagtgggcaagtcaccatcagataaatgatgccagtcgtggtactttaagcagctatagtcttgtattgatggttttgcactatttacaaaccctacctgaacccatccttccatccctccaaaaaatttacccagagtcttttagtcctgctatacagctgcaccttgtacatcaagctccatgtaatgttcctccttacctctcaaagaatgaatcaaaccttggggacctcttactgggctttcttaaatattatgctacagaatttgactggaatagtcaaatgatttcagttcgtgaagccaaagccattccaaggcctgatggtattgaatggagaaataaatacatctgtgtagaagaaccttttgatggaacaaatacagccagagcagtgcacgaaaagcagaaatttgatatgatcaaggatcaatttttaaagtcatggcacagattgaaaaacaagagagatttgaacagtatactacctgtaagagctgctgtcctgaaaagataactggcctctatttcttaataaattcttccaagaaataaagaacaatagtttcatcataatacattatgtttacctccatcatagttgcttttttcatagttcttgttttcatgttttatttttaaaaagacatataaagattgcatattttattatgacatttcctaataaacccctttgatttaaaaatgtatttttaaaaatgtttacattgatgatgagtaatattgcatgtgttttcaggtgatcagataaaatatattttgggaaattaactgaacaaataaaaagtttttgatataacttcaattaattgtaccacatgctaatcctgaagagatgtgtagaattttggaaagggtctaattcatacatgcttaaagtataacctacgttagatagtttgttgtcaaagtctgttctagtaaagtgaagattcaagtcagttgttcagttacttgaagcaaaacgaaatctttcatttcagtcaaatcactgcagtcatgaaatactgaacaattgccttaagtctttgcttgactcactgggatagactgaggctttgggtgtgtctgtattagcatttcattagtacttcacatgcttttgatgtactcttgagattgctttaaattttgtattgaaacaacaatacattttgcactgtagtaatgggagcactaactcttacaacagttagtgaatcgttttaaagaatcagttcagtgtagacattttgaaaagattgtttcctgtgctttacgatagcttagtgcaatgtgcacttctgttttacttgccattttcctgctctgttttctctgtgacatgaagcaacagaaactgagatcaaagttaagattatatcctgtttgtagtatcagatatttttctgtgtacaattataggattgtaatctaaactggaatttttaggcagtaagtcaccacaaaatgttttagataagacacaataaaattattataaataaaagcttaatgtttgtaaaaaatctcttttttagtatttcttttttcacatgaaagaagtggtggctgctaaaaaaaaagctacagtgtttattaagggtctttttgatttatgtaaatatttgtaaattggtcagtgcctgtaaatttaaatataaaaagtaaccttgaaaacagttttaactttttcaaaagaactatgtccaacattttttagacctgctgtagtacagttttgtacctctaacgtattttttttttgcagaccaaatgctaaaacttttgcttttctttgacttgtaaaaggtgcacattttcattttcttccttaagttcaaatttttgtatgatgtcaaatgcaataaaatttatatatggacattgtt

SEQ ID NO: 163615 - DNA, 2997 bp, Homo sapiens
  Payload ID: 12219
  Gene Symbol: PAPD4
  Gene Name: PAP associated domain containing 4
  ENST ID: ENST00000504233
  CDS Start-End: 679-2004
attctcatccggggtcacgtcggtcttccgggtgtctttgacagggttttctacgccgctttttcggcgactttttgctcttccgctttttgccaccgcccccaaccttctatatccttgcagcccctaccttttcttgtgttgctcctcccctggcagccgtgaggggggttagatctcagccggagccggagctgggcctagctgtcccacgggccaccactacctcctttggttcgggagaaagctacgaccaagtacgcccagctcgggccttagaacttctgaacgggcagtgcgggtaggccctgcttagcccttcccggaggacacctgtgagtttagggggtttcggagaggaacgcagcagtgtaggcccaggtcggcggcggggcacgggaaacttttccgaaacggtagcgttttgttttgcgtgggaggttccagcagtatctcttggttattccaaatttatgggcggcatctgggctgctgtacattttgaagaatcttaggaccgcttactttgcttactcgttttctattcctcgcgtactgcctcgtccaccactccaggaccaaaagaggaagatagtcttgggacccttgcatggtgtttcaaagggtggtgaagaactaaggtagaagaatacatgttcacttccagtgaacaagagcatgttcccaaactcaattttgggtcgcccacccttcactccaaatcatcaacaacataataacttctttaccctgtcacctactgtttattcacaccagcagcttatagatgcacaattcaactttcagaatgcagacttgtctagagctgtgtcattacagcagctgacatatggaaatgtcagtccaatacagacctcagcttccccattatttcgaggaaggaagagattaagcgatgaaaaaaaccttcctcttgacggtaaacggcaacgtttccattcaccccaccaagagccaactgtagttaaccagatagtgcctttatcaggtgaacgaagatactcaatgccaccattgtttcatacacattatgtaccagatatagtcagatgtgttccaccttttcgagaaattgcatttttagaacctagagaaatcacactgcctgaggccaaagataagttgagtcagcagatactggagttatttgaaacatgtcagcagcaaataagtgatttaaagaagaaagaactctgtcgaacacagctgcagagagaaattcagctgttatttccacaaagcagactttttttggttgggtcctctttaaatggatttggtacccggagcagtgatggtgatttatgcctagttgttaaggaagaaccatgtttttttcaggtaaatcagaagactgaagcacggcatatactcaccttagtccataaacacttctgtactagactttcgggctacattgagagacctcagctgattcgagcaaaagtgccaattgtgaagttcagggataaagtcagttgtgtggagtttgacttgaatgtaaacaatattgttggaataagaaacacattccttctcagaacttatgcataccccctacctgaacccatccttccatccctccaaaaaatttacccagagtcttttagtcctgctatacagctgcaccttgtacatcaagctccatgtaatgttcctccttacctctcaaagaatgaatcaaaccttggggacctcttactgggctttcttaaatattatgctacagaatttgactggaatagtcaaatgatttcagttcgtgaagccaaagccattccaaggcctgatggtattgaatggagaaataaatacatctgtgtagaagaaccttttgatggaacaaatacagccagagcagtgcacgaaaagcagaaatttgatatgatcaaggatcaatttttaaagtcatggcacagattgaaaaacaagagagatttgaacagtatactacctgtaagagctgctgtcctgaaaagataactggcctctatttcttaataaattcttccaagaaataaagaacaatagtttcatcataatacattatgtttacctccatcatagttgcttttttcatagttcttgttttcatgttttatttttaaaaagacatataaagattgcatattttattatgacatttcctaataaacccctttgatttaaaaatgtatttttaaaaatgtttacattgatgatgagtaatattgcatgtgttttcaggtgatcagataaaatatattttgggaaattaactgaacaaataaaaagtttttgatataacttcaattaattgtaccacatgctaatcctgaagagatgtgtagaattttggaaagggtctaattcatacatgcttaaagtataacctacgttagatagtttgttgtcaaagtctgttctagtaaagtgaagattcaagtcagttgttcagttacttgaagcaaaacgaaatctttcatttcagtcaaatcactgcagtcatgaaatactgaacaattgccttaagtctttgcttgactcactgggatagactgaggctttgggtgtgtctgtattagcatttcattagtacttcacatgcttttgatgtactcttgagattgctttaaattttgtattgaaacaacaatacattttgcactgtagtaatgggagcactaactcttacaacagttagtgaatcgttttaaagaatcagttcagtgtagacattttgaaaagattgtttcctgtgctttacgatagcttagtgcaatgtgcacttctgttttacttgccattttcctgctctgttttctctgtgacatgaagcaacagaaactgagatcaaagttaagattatatcctgtttgtagtatcagatatttttctgtgtacaattataggattgtaatctaaactggaatttttaggcagtaagtcaccacaaaatgttttagataagacacaataaaattattataaataaaa

SEQ ID NO: 163616 - DNA, 7233 bp, Homo sapiens
  Payload ID: 12220
  Gene Symbol: PAPD5
  Gene Name: PAP associated domain containing 5
  ENST ID: ENST00000357464
  CDS Start-End: 1-910
gatatttggaagttttaaaactggactttatttacctactagtgacatcgacctagtggtgtttgggaagtgggagaacctacccctctggactctggaagaagctcttcggaaacacaaagtcgcagatgaggattcggtgaaagttttagacaaagcaactgtacctattattaaattaacagattcttttactgaagtgaaagttgatatcagctttaatgtacagaatggcgtgagagcagctgacctcatcaaagattttaccaagaaatatcctgtattgccatacttggttttagtattgaaacaattcctattgcagagggaccttaatgaagtatttacaggtggaattggttcttatagtctctttttaatggcagtcagtttccttcagttacatcccagggaagatgcttgcatccccaatacaaactatggtgttctcttaatagaattttttgaattatatggacgacacttcaattatttaaagactggcatccggataaaggatggtggttcatatgtggccaaagatgaagtacagaaaaatatgctagatggctacaggccatcaatgctttatatcgaagatcctttacaaccaggtaacgatgttggaaggagttcatatggggccatgcaagtgaagcaggcctttgattatgcctacgttgttttgagtcatgctgtatcaccaatagcaaagtactatcccaacaatgaaacagaaagcatactaggtagaataattagagtaacagatgaagttgccacatatagagattggatatcaaagcagtggggcttgaagaatagacctgagccttcatgcaatggtaagatattttccttggtccagtgtcgtcctcttctgccacacagtccagctctagtgatgtagattccgatgcaacaccatgcaaaaccccgaaacagctgctttgccgtccgtccactgggaaccgagtagggtcgcaagatgtatccttggagtcctctcaggcagttgggaaaatgcaaagcacccaaaccactaacacatccaacagcaccaacaaatctcagcatggatcagcaaggctctttcgttcttccagcaaaggcttccaaggtacaactcaaacaagccatggttccttgatgacaaacaaacaacatcaaggcaaatccaataatcagtattaccatggcaaaaagaggaaacacaagagggacgcgcccctctcagacctctgtagatagtcagcgctgcgcggtggactgtcttctctgtgcaatgatctcatgctcaggacagttgcgcagggactcctgggagatattcaggagcctcacactgttcagacgttgacttagcaactgcgttttttcccagctcgccacagaatggatcatgaagactgacaactgcaaaaaaaacaaaacaaaacaaaaaaaaaagcaagcaaaaaagagggaaaaaaaaggctgcttatttgataagtcatatgctacaacagggtcattttaagatttaaagcttgaatgtaaaataaatatatttctcattggctttatgcagagttatagggaatagtattcagtgttggtagggtgatagaaacaaaaaacagtatcagaggatgaggtggggaaggaaaacaaaggtatctgataggaagtccagattccaaaggggaaagtgatctgtgcatgttttttttttaaatatttttgcatatatttaccattttattgtgtgtatatatagaagaccatataggagattgatatttgtaatagtggatttgttaataatactttttacataacattactgtttaaattgtaaacagattttttctcaggattagtttgaaaaataatctaaattgtcatcttaacatccatatatagggaagtgattagttctattactcaatttgtttttctcagcattgaaatgacttaatagaacccttgtgtcctgctgcaaaaatttttcctctctaaagaaaaggtttatggtggcaaatgatgtttattttattttgtaaaaaaaaaaaaatgtactatgtacttttgtgtaaacactgaaaaatctctggtcatctccgagaattaacttgcaactgttttctatagtgctgtcgtcttgggcaatgggcaattacatgactttgtgtttgcttcctttgcagtcttttttttttccccccatttcttcctaataggaaaaaaaaaaaaaaaaaggtcacccatgtctggtctcattcctgttgcagtgaaacttcgagttccacagactttgcatgctggcttctctaaccctgtgtgctgcgtgtgcctgtttctcatctcttattctttttaaaattcatgcttaactactgtgggagaataactgtaaacagctttaattaaatcatacttataaaaaactattttcttatattccactctatgcttttggtattgttgatctttacaaattaaatggtctttgataatggatctattttgtattgccttattaagaccaaatacttcttgtcatcccattctttatcctcttctttcatggaattgttatcgttaattaaaacttttttaaacattggcttgtttcaatcatactgtaaattttggttgtagtcagctttgagtgcaatgagatgtataattctgttatcattacctgttgagtttgaaactcagttgggaatatttaatataatagaatgtaagtgacatttctgaaaatgctttctttcagggtgaaagctcttatgtttagcatcaatgtgtatggctctgttaaatgcagccatttctgagacgagattcttttatatatatatacatataaagtactattggcttttaggagtttcttttatatacatttatgaaatactgaagaccaatcagaccattaatggacacttagtgtaactttttataaagaaaataatgctaaagtaagaccaaaactgatgtcatcactgaaattaacaattttcaatatgttcatattttaattcacaatggaaaaatgtgttccaaaactggaaactcatagtactcgtgtaaactgtggaagatttcaaatgtgatgttattttgacaatgttttaaattttagagtcacattttattctgatcagaatttttattgagatgttgagcttttgtttttgaaactagtttgtcataacattgtgcataatcacagtatttattttctaggacaattgtgaatgtgtagacttatgtttactgctaagggaacaattatttataaaataatattaaatccagtattagctgcctatttcagacacttaatacttgcagagatctatgttacatttaccacactgaagttttttttgttgttttttgtttgtttttaaagaatcaccctcattgttgaaagtaaatgtactcttagggtgcgaatattagtgttccaataagcatgtgattatattaaggtggtggtagcgggaagataattctgattccattgggaatcttaggttttcgtaaatttattgggaaaatagtttttcctgtactgctgaagtttctttttggtaaacagtatctttctaaaagaaaaaagcatgaaggagaaattgaggtgtgtatacatttcctcaaatgaccagcattgtattcgtgaatactgtgtatcttgcagtgaacagtgtggaagctgttcatttttcaatctgaagtaaaatactttcaagaacttttagtttgcctgctcatttgttttatacatttcatctatttgactcctatcttatttcttttttgagttttaatacttcctatattttgtgaatatatcagaaatgtgtcatttatatattagagtccattcatatccatgaatcataaccttcctttgctaatacttgttgaatgggattttacaaattctccctcactctggtgacatttctcaggcagtcatgtatgtgtacctggccattagaaatattaatatttaaagactgttttttagaggagctgatgggttggtgaggtgtcagcacaaaatcttactggttatgttttgatgataaaagtatatccattttttccctccagctttaaggtgactgtgaaggtgcctggttttgaatgtctttgtttggtttggagatgtcgcactcagttttcaaatctagcttggatctgtaggacctatgttttttacaagtaattgccctccagtcttcaacagttgattctgttttatttttatcctgttttgagtgtactttacctttacttgcattttgagcctcattaatatttaggttatttgatttggctccagatattcctagatctgcacagggcaaaacatgggctatagggtgagcatttttaattgtctttttctgctggaaccttatatctctccatgtgttttctgctccttccctcccccatgaaatggtaagtgtgacttgtgtttgcctgaacctgtggactagtgtttggggtttctggaaacactagagggtcagaaaagagtaatgaccaccgtgacgtgcaggattctcttgctgtgacatgttcattgcaaagccctctccagtgactaggaggtgtagttattaaggttgatctgttagaaatcaccattattaggtattagtggtagatgttgctgatacttttattggtcatgactacatctcagttttactttaatattgatctatagtttgatcagttccttgaattctaatatgttgatttctcagtgtttctgtcactaaccaagaatgtttctaggcagttggttgcttcacagtcaaaactaaatggtaaactatcaaaaatacattcccaattttgctgtgataaatattgaaatgttaaaattaatgaacagaagaatttattcttacccatctattcttgttctcctagttcattaaactttcagttattggaaaggcacattctcaaagtattttatgagcaaaatattctataaatgcgtctaacaaacctaattgaatataaaagttatatttagtagttactgttgatagtaattttcatcagggtcatagttcatctagtaaaatatttagagaatgatgttaacattccagcattaaagtgggaacaaagatttatatatgaaattccttaaaagagttcatcttgccttggtttctgaccctcaagactctagctacctgccatcttgtcaaaacatttgtgggtagaataagtgttaaagatcaaattttaatatgcttctcgatatttaacatagctaagaagccagattttactgtagaagttatttacatgatttgaaaacttgacctaactggaagcctttttctcagtcatcttgttctaagccatcttgacttcacacccttagcgacttttcttttttttttggtcaaagataatgagctaaatatatatagacgttgaatgttgacaaaattattaaccagaaaaattgcttataaaggctgctgatctatttgatacctagaattaaatatttgaggacagtttttagttaataaactgctaatgtttattttactgtctctcaggtttttggtttttttaaaaaaaatgtgtttggcctttacattttctacttaagtgtgtactttattgagtttaaccttgtctgtagcctagtagcctgaaagaaaaggagacagaaccagagagatggatgtagtgcattccctttggttattacacatttgtggtagctcctggatttactgagagatattttagctatgtcaataagaacagctaatgatgtggaaatcaggtgttctcttgtgtatttcagtgaacatttttattagtagttgcatatcatctctagttccacattttaacttaacgtctttgtggcttcaccactgagctacctttcactacaccagcttctgtgtggcctggtaacatggaaggtctctcctaaggacagtctggacgtattttgggggaatgttatttatcttaaagatgcctagaaacaaaacgcatatagtaccagtgagaaactatgaagtaaacaagttgctcaggccgggcatggtggctcacgcctgtaatcccagcactttgggaggccgaagcgggaggatggcttgaggctgggagtttgagaccttcatctcttaaaaaaacaaacaaaaacctgaatggtgaggtgtggtggaattgggtaggggagggaaaggaggacttggaaaagcattctccaaagccagcaacttggtgaagttcagtacttgcctcttagaggttaggccatgcctttcaaagagagtgaaatgatgggttatcagccacattcttggagttaatatttttcttcatctttcagtttgggttctgtgctattcatagttcttccctaagaccatttcattattaccttttatatttagttgcaatttattataatatgttgttttgtccctgaacttaatctcctaattttaagatcctctctgatttttgcatattgaaacttacagaagtcactttaaaaaagtcttttgaaagtcctacaatcctaaaataaatcacaagcttgtttgttagacgtgtcaagagtctccagtctttactactaaaaagcagcactgccttaacacacattgttatgggtgaaaagtgagggacgaccagtgtagtttctggatataaagtgtgaaggactgttgagttaaacatttttagtggaatatacatagataacgtgtatttagaaactttggtgaagccagtatttgtttttagtaacctttttatgtatttccttctttgattagcattgtcttcagtgttaagaaatgtggactcctgtgaggtgctggaggtttgaatcatcttgaaaactttccaatcttgtctagttaccactgcagagacactaaggaatttaccagaaaaagatatttgatacaagtgatttaagaaatctcaacatttcctgaggccgtatcactgggcaaccagtgatgaaaactatgaatgaattgcacacctggaagattttttaagctaatgacagtttcttcaaagatgtcaattatttgccttggaaattttataaattgcatttctatgcacatcggcctctagtgcttaccactcggtttattattcataatctgcaattcaataaaggctttgtgttttcatttatcttcaaaa

SEQ ID NO: 163617 - DNA, 4635 bp, Homo sapiens
  Payload ID: 12220
  Gene Symbol: PAPD5
  Gene Name: PAP associated domain containing 5
  Uniprot ID: Q8NDF8
  ENST ID: ENST00000436909
  CDS Start-End: 36-2132
acaacgcgctccctgcggggcgggcggcaacctccatgcggcctcgtccacgctcagcaccggggaagccgaggcggagaagccgcgcgcgcctcagaagctcccggacgcccagcggcggcgcgagcggcggcggcggcagcagcagcagcagcagcacggccaccggcgggagcggcagcagcaccggcagccccggcggcgcggcctcggccccggccccggccccggccggcatgtatcgctccggggagcgcctgctgggcagccacgcgctgcccgcggagcagcgggacttcctgcccctagagacgaccaacaacaacaacaaccaccaccagcccggggcctgggcccgccgggcgggctcctcggcgtcctcgcctccctcggcgtcctcgtccccgcacccttcggccgccgtccccgccgccgatccagccgattcggcctcgggcagcagcaacaagaggaagcgcgacaacaaggccagcacgtatggactcaactacagcctgctgcagcccagcggagggcgggccgcggggggcggccgagcagacggcggcggggtcgtgtacagcgggaccccgtggaaacggaggaactacaaccagggagtcgtgggtctgcatgaagaaatcagtgatttttatgaatacatgtctccaagacctgaggaggagaagatgcggatggaggtggtgaacaggatcgagagtgtaattaaggagctctggcccagcgctgacgtccagatatttggaagttttaaaactggactttatttacctactagtgacatcgacctagtggtgtttgggaagtgggagaacctacccctctggactctggaagaagctcttcggaaacacaaagtcgcagatgaggattcggtgaaagttttagacaaagcaactgtacctattattaaattaacagattcttttactgaagtgaaagttgatatcagctttaatgtacagaatggcgtgagagcagctgacctcatcaaagattttaccaagaaatatcctgtattgccatacttggttttagtattgaaacaattcctattgcagagggaccttaatgaagtatttacaggtggaattggttcttatagtctctttttaatggcagtcagtttccttcagttacatcccagggaagatgcttgcatccccaatacaaactatggtgttctcttaatagaattttttgaattatatggacgacacttcaattatttaaagactggcatccggataaaggatggtggttcatatgtggccaaagatgaagtacagaaaaatatgctagatggctacaggccatcaatgctttatatcgaagatcctttacaaccaggtaacgatgttggaaggagttcatatggggccatgcaagtgaagcaggcctttgattatgcctacgttgttttgagtcatgctgtatcaccaatagcaaagtactatcccaacaatgaaacagaaagcatactaggtagaataattagagtaacagatgaagttgccacatatagagattggatatcaaagcagtggggcttgaagaatagacctgagccttcatgcaatggaaatggtgttaccttgatagtagatactcagcagttagataaatgtaataataatctatctgaagaaaatgaagcccttggaaaatgtagaagtaaaacctcggaatctcttagtaaacactcttcaaactcttcatcaggtccagtgtcgtcctcttctgccacacagtccagctctagtgatgtagattccgatgcaacaccatgcaaaaccccgaaacagctgctttgccgtccgtccactgggaaccgagtagggtcgcaagatgtatccttggagtcctctcaggcagttgggaaaatgcaaagcacccaaaccactaacacatccaacagcaccaacaaatctcagcatggatcagcaaggctctttcgttcttccagcaaaggcttccaaggtacaactcaaacaagccatggttccttgatgacaaacaaacaacatcaaggcaaatccaataatcagtattaccatggcaaaaagaggaaacacaagagggacgcgcccctctcagacctctgtagatagtcagcgctgcgcggtggactgtcttctctgtgcaatgatctcatgctcaggacagttgcgcagggactcctgggagatattcaggagcctcacactgttcagacgttgacttagcaactgcgttttttcccagctcgccacagaatggatcatgaagactgacaactgcaaaaaaaacaaaacaaaacaaaaaaaaaagcaagcaaaaaagagggaaaaaaaaggctgcttatttgataagtcatatgctacaacagggtcattttaagatttaaagcttgaatgtaaaataaatatatttctcattggctttatgcagagttatagggaatagtattcagtgttggtagggtgatagaaacaaaaaacagtatcagaggatgaggtggggaaggaaaacaaaggtatctgataggaagtccagattccaaaggggaaagtgatctgtgcatgttttttttttaaatatttttgcatatatttaccattttattgtgtgtatatatagaagaccatataggagattgatatttgtaatagtggatttgttaataatactttttacataacattactgtttaaattgtaaacagattttttctcaggattagtttgaaaaataatctaaattgtcatcttaacatccatatatagggaagtgattagttctattactcaatttgtttttctcagcattgaaatgacttaatagaacccttgtgtcctgctgcaaaaatttttcctctctaaagaaaaggtttatggtggcaaatgatgtttattttattttgtaaaaaaaaaaaaatgtactatgtacttttgtgtaaacactgaaaaatctctggtcatctccgagaattaacttgcaactgttttctatagtgctgtcgtcttgggcaatgggcaattacatgactttgtgtttgcttcctttgcagtcttttttttttccccccatttcttcctaataggaaaaaaaaaaaaaaaaaggtcacccatgtctggtctcattcctgttgcagtgaaacttcgagttccacagactttgcatgctggcttctctaaccctgtgtgctgcgtgtgcctgtttctcatctcttattctttttaaaattcatgcttaactactgtgggagaataactgtaaacagctttaattaaatcatacttataaaaaactattttcttatattccactctatgcttttggtattgttgatctttacaaattaaatggtctttgataatggatctattttgtattgccttattaagaccaaatacttcttgtcatcccattctttatcctcttctttcatggaattgttatcgttaattaaaacttttttaaacattggcttgtttcaatcatactgtaaattttggttgtagtcagctttgagtgcaatgagatgtataattctgttatcattacctgttgagtttgaaactcagttgggaatatttaatataatagaatgtaagtgacatttctgaaaatgctttctttcagggtgaaagctcttatgtttagcatcaatgtgtatggctctgttaaatgcagccatttctgagacgagattcttttatatatatatacatataaagtactattggcttttaggagtttcttttatatacatttatgaaatactgaagaccaatcagaccattaatggacacttagtgtaactttttataaagaaaataatgctaaagtaagaccaaaactgatgtcatcactgaaattaacaattttcaatatgttcatattttaattcacaatggaaaaatgtgttccaaaactggaaactcatagtactcgtgtaaactgtggaagatttcaaatgtgatgttattttgacaatgttttaaattttagagtcacattttattctgatcagaatttttattgagatgttgagcttttgtttttgaaactagtttgtcataacattgtgcataatcacagtatttattttctaggacaattgtgaatgtgtagacttatgtttactgctaagggaacaattatttataaaataatattaaatccagtattagctgcctatttcagacacttaatacttgcagagatctatgttacatttaccacactgaagttttttttgttgttttttgtttgtttttaaagaatcaccctcattgttgaaagtaaatgtactcttagggtgcgaatattagtgttccaataagcatgtgattatattaaggtggtggtagcgggaagataattctgattccattgggaatcttaggttttcgtaaatttattgggaaaatagtttttcctgtactgctgaagtttctttttggtaaacagtatctttctaaaagaaaaaagcatgaaggagaaattgaggtgtgtatacatttcctcaaatgaccagcattgtattcgtgaatactgtgtatcttgcagtgaacagtgtggaagctgttcatttttcaatctgaagtaaaatactttcaagaactttta

SEQ ID NO: 163618 - DNA, 2916 bp, Homo sapiens
  Payload ID: 12220
  Gene Symbol: PAPD5
  Gene Name: PAP associated domain containing 5
  ENST ID: ENST00000561678
  CDS Start-End: 75-1841
ccaccggcgggagcggcagcagcaccggcagccccggcggcgcggcctcggccccggccccggccccggccggcatgtatcgctccggggagcgcctgctgggcagccacgcgctgcccgcggagcagcgggacttcctgcccctagagacgaccaacaacaacaacaaccaccaccagcccggggcctgggcccgccgggcgggctcctcggcgtcctcgcctccctcggcgtcctcgtccccgcacccttcggccgccgtccccgccgccgatccagccgattcggcctcgggcagcagcaacaagaggaagcgcgacaacaaggccagcacgtatggactcaactacagcctgctgcagcccagcggagggcgggccgcggggggcggccgagcagacggcggcggggtcgtgtacagcgggaccccgtggaaacggaggaactacaaccagggagtcgtgggtctgcatgaagaaatcagtgatttttatgaatacatgtctccaagacctgaggaggagaagatgcggatggaggtggtgaacaggatcgagagtgtaattaaggagctctggcccagcgctgacgtccagatatttggaagttttaaaactggactttatttacctactagtgacatcgacctagtggtgtttgggaagtgggagaacctacccctctggactctggaagaagctcttcggaaacacaaagtcgcagatgaggattcggtgaaagttttagacaaagcaactgtacctattattaaattaacagattcttttactgaagtgaaagttgatatcagctttaatgtacagaatggcgtgagagcagctgacctcatcaaagattttaccaagttacatcccagggaagatgcttgcatccccaatacaaactatggtgttctcttaatagaattttttgaattatatggacgacacttcaattatttaaagactggcatccggataaaggatggtggttcatatgtggccaaagatgaagtacagaaaaatatgctagatggctacaggccatcaatgctttatatcgaagatcctttacaaccaggtaacgatgttggaaggagttcatatggggccatgcaagtgaagcaggcctttgattatgcctacgttgttttgagtcatgctgtatcaccaatagcaaagtactatcccaacaatgaaacagaaagcatactaggtagaataattagagtaacagatgaagttgccacatatagagattggatatcaaagcagtggggcttgaagaatagacctgagccttcatgcaatggaaatggtgttaccttgatagtagatactcagcagttagataaatgtaataataatctatctgaagaaaatgaagcccttggaaaatgtagaagtaaaacctcggaatctcttagtaaacactcttcaaactcttcatcaggtccagtgtcgtcctcttctgccacacagtccagctctagtgatgtagattccgatgcaacaccatgcaaaaccccgaaacagctgctttgccgtccgtccactgggaaccgagtagggtcgcaagatgtatccttggagtcctctcaggcagttgggaaaatgcaaagcacccaaaccactaacacatccaacagcaccaacaaatctcagcatggatcagcaaggctctttcgttcttccagcaaaggcttccaaggtacaactcaaacaagccatggttccttgatgacaaacaaacaacatcaaggcaaatccaataatcagtattaccatggcaaaaagaggaaacacaagagggacgcgcccctctcagacctctgtagatagtcagcgctgcgcggtggactgtcttctctgtgcaatgatctcatgctcaggacagttgcgcagggactcctgggagatattcaggagcctcacactgttcagacgttgacttagcaactgcgttttttcccagctcgccacagaatggatcatgaagactgacaactgcaaaaaaaacaaaacaaaacaaaaaaaaaagcaagcaaaaaagagggaaaaaaaaggctgcttatttgataagtcatatgctacaacagggtcattttaagatttaaagcttgaatgtaaaataaatatatttctcattggctttatgcagagttatagggaatagtattcagtgttggtagggtgatagaaacaaaaaacagtatcagaggatgaggtggggaaggaaaacaaaggtatctgataggaagtccagattccaaaggggaaagtgatctgtgcatgttttttttttaaatatttttgcatatatttaccattttattgtgtgtatatatagaagaccatataggagattgatatttgtaatagtggatttgttaataatactttttacataacattactgtttaaattgtaaacagattttttctcaggattagtttgaaaaataatctaaattgtcatcttaacatccatatatagggaagtgattagttctattactcaatttgtttttctcagcattgaaatgacttaatagaacccttgtgtcctgctgcaaaaatttttcctctctaaagaaaaggtttatggtggcaaatgatgtttattttattttgtaaaaaaaaaaaaatgtactatgtacttttgtgtaaacactgaaaaatctctggtcatctccgagaattaacttgcaactgttttctatagtgctgtcgtcttgggcaatgggcaattacatgactttgtgtttgcttcctttgcagtcttttttttttccccccatttcttcctaataggaaaaaaaaaaaaaaaaaggtcacccatgtctggtctcattcctgttgcagtgaaacttcgagttccacagactttgcatgctggcttctctaaccctgtgtgc

SEQ ID NO: 163619 - DNA, 5459 bp, Homo sapiens
  Payload ID: 12221
  Gene Symbol: PAPD7
  Gene Name: PAP associated domain containing 7
  Uniprot ID: Q5XG87
  ENST ID: ENST00000230859
  CDS Start-End: 978-3356
ccacgctgccctgcgcacgcgcagcgcggctcaggcggcagcccggtgacaccggccctagcgcgcatgtctgcacgccggggtctgcgcgccgcggcgggccgagggcggcgtgcgggccttccagccgctgcctattccacccaacgccggcctagtcagtaatggctcaacgccaccgcctctccctccagcccctcccagtcgcgtagcttctgacgccgtcctcaccccgcccgcggccgacggggccccaacgcgcaggcgcggtaaccacggcggcagtgtctagtgaggatttgaaatcggtcgcgcgtgcgcaccggcgacacggcccggcgaccgaggccgcgcttcctcctgccgcccccgtccccgccccctcccccgcccctcattggagcggacgcggcggcggccccctccttcccccgcgctgtcgccgccgagagtgtcttttcaccgccgccgccgccgccgccgcaggagcgccgagccagcggcgcgagcgtgactgagggctagccgcacgggcggcggcgcctcccgcgggtccttcagccgctcggcgcctgggcccgccccctcggccccgccgcccgcccttctccgatggcctctccccgcggcccgagtggaacgccgccgccgccgcggcccccgcgcccgccccgcgccgcgtgaagcgggagcccggagaccgcagccgcccgctgggacgcgccaagcgccggagccgcccgccgcggcctgccggggcccatcaccgccgccgccgccccacgccggagcccgacgggagcgcggctagagcaggaggccggggctcggcccgcccgccgccgccgccgccgccgccgccaccggcccaggcccgtccgtccgtccgtgcgcgcgcggccgggcctcggggcgcggcgggggcggggccgcgtcggggcgggcgggcgcgcgggccccgcgggggcggcgcgtggatggatccgcgcgtggcctggatccagcccgagcagaaggggccggccaatgccctgtggatgcagatctgggagacctcgcagggcgtgggccgcggcggctcgggcttcgcgtcctatttctgcctcaactcgccggcgctggacacggcggccgcggcgggggcggccgggcggggcagtggcggcctgggccccgcgctgcccgccgcgtcgcccccgccgcccggccccaccgcgcccgccgcgctgccccccgcgctgctgacggcgctggggcccgcggccgagggcgcgcggcgcttgcacaagtcgccgtcgctgtcgtcctcgtcgtcgtcctcctcgtccaacgcggagtcgggcaccgagagccccggctgctcgtcgtcgtcctccagcagcgcctcgctgggccggccgggcggcggccgcggcggcgccttcttcaacttcgccgacggcgcgcccagcgcccctggcacagccaacgggcaccccgggccgcgcggccccgcgcccgccggctccccgtcgcagcaccagttccacccgggtcgccggaaacgcgagaacaaggccagcacctacggcctcaactacctgctgtccggcagccgcgcggccgctctcagcggagggggcggccccggggcccaggcgccgcggcccggcaccccgtggaagagccgcgcgtacagcccgggcatccagggactacatgaggaaataattgacttttataacttcatgtccccttgtcctgaagaagcagctatgagaagagaggtggtgaaacggatcgaaactgtggtgaaagacctttggccgacggctgatgtacagatatttggcagctttagtacaggtctttatcttccaactagcgacatagacctggtggtcttcgggaaatgggagcgtcctcctttacagctgctggagcaagccctgcggaagcacaacgtggctgagccgtgttccatcaaagtccttgacaaggctacggtaccaataataaagctcacagatcaggagactgaagtgaaagttgacatcagctttaacatggagacgggcgtccgggcagcggagttcatcaagaattacatgaagaaatattcattgctgccttacttgattttagtattgaaacagttccttctgcagagggacctgaatgaagtttttacaggtggaattagctcatacagcctaattttaatggccattagctttctacagttgcatccaagaattgatgcccggagagctgatgaaaaccttggaatgcttcttgtagaattttttgaactctatgggagaaattttaattacttgaaaaccggtattagaatcaaagaaggaggtgcctatatcgccaaagaggagatcatgaaagccatgaccagcgggtacagaccgtcgatgctgtgcattgaggaccccctgctgccagggaatgacgttggccggagctcctatggcgccatgcaggtgaagcaggtcttcgattatgcctacatagtgctcagccatgctgtgtcaccgctggccaggtcctatccaaacagagacgccgaaagtactttaggaagaatcatcaaagtaactcaggaggtgattgactaccggaggtggatcaaagagaagtggggcagcaaagcccacccgtcgccaggcatggacagcaggatcaagatcaaagagcgaatagccacatgcaatggggagcagacgcagaaccgagagcccgagtctccctatggccagcgcttgactttgtcgctgtccagcccccagctcctgtcttcaggctcctcggcctcttctgtgtcttcactttctgggagtgacgttgattcagacacaccgccctgcacaacgcccagtgtttaccagttcagtctgcaagcgccagctcctctcatggccggcttacccaccgccttgccaatgcccagtggcaaacctcagcccaccacttccagaacactgatcatgacaaccaacaatcagaccaggtttactatacctccaccgaccctaggggttgctcctgttccttgcagacaagctggtgtagaaggaactgcgtctttgaaagccgtccaccacatgtcttccccggccattccctcagcgtcccccaacccgctctcgagccctcatctgtatcataagcagcacaacggcatgaaactgtccatgaagggctctcacggccacacccaaggcggcggctacagctctgtgggtagcggaggtgtgcggccccctgtgggcaacaggggacaccaccagtataaccgcaccggctggaggaggaaaaaacacacacacacacgggacagtctgcccgtgagcctcagcagataatggctcctggctgcgtcagcctcccccacccctctgcagactgccccgcggcctcggccaccggcaggggaaccgagaccagcaccccgcacgtcagccgggctcgcggcacgcccgccgctgatcactctgcatgtttcttcgtgtggtggtcgcgtccatcttcaagaacagctcgttgtgctcatctgtgaagccttattaaacgtggacgttgttttctgccttcccaggattcttccttcagtgctgaggcaggtcgggctcaggaactgcagggacgtgaacatgcgcttgcggtttgaggtagccgtgtctgttccttcgcggtttgctattttcatttcctgttcgtcaaagcagcagaggagatcaaaccccgttcgtgtgtctttcctccacggataagcttgggaggtcattgttttactgccctcacattttgtttgaaatttcagaactgtttttctatgtaaatattgaaaacttatgatttgtgcaataactcagatattttttatttaatttcctattttcacataagttatatttaagggaggagggaattttttttaaacaagcttaggtcctttcccgagctgcattttctaagttgggtcatcgtgtcggctggttgtctgacgagcatcgttacaaacaccatgatgaggggtttggggttttattttgatgtcttttcttttggtcggaagtgagtgaaggagccaggtcgccctgaaggttttccaaagggcttggctccagagccacctggcagactgcccgtggccctgctgtcgggccccaggccgttgtcctgctctgaccacagagttttaatgttttggttttcacttcttttaaactggacaacaaatccagcatttcaagtgccagaagtataactttctaaggagagaagggttgtcacattataaaatctttaggaaaatgtgaactggaaaacgcttcggtcagttttagtgacatagcctgtgatgatgggtctggtgactattattgcggaccgtggtacccagttttaggaatgtggagaaaggaattctgttgattccgttgaggaatctgtagcgtatgcattcgttctgttaagagcaaatctaggagaagtgcttcagctgcccagtgcgccgtggggagtgttttaacggatcgtgtcgcaggagagcacagcccagcgttggggccgggaccgctggcgcccgacgtcggaagcatacaggtatactatgcaagtgtattctgccacaacaaccactgtctttgttacctttttttgaacaagaatatatccatcctgcctaaccctgagtttttggagcaccacagttgtcctgggagttggttgcatcttgtaggccatctgacttcctgtttttaaaacgggggtctggtcttgctaaacactacaggtaggttggtctttgaagtccactagtggagaatgtcaagacaagatacttattaccatgacatctgatgcatgtgcagcagtggggagttctagattgatctctgaatgtgatcgacgcccagcaaggacaagctttaaaatgtctgcggtctgcccttttgaagcaggactggctcactctgtcattgggagctgtcagctgcgactgcaggttctctaggaggcattccagaatagagtagcacactgtgtctgcagttctcgatgaccgaaagttatcaaaaatatttaaaatatttaaattgtgaacctattgataaagaatatttataaaaactgatctgtaggcctgtactaatctctacgcattagcaatattgactgtaaacccacattaaggaaaccactacgggtctggcagtgcgtgtcccgtggggtgtgcattttaaaactcgattcatagacacaggtaccatgttccatttccgtcatggtgaagcaaatgaattggcctggctaccactgtggtcgcgtgctacaggtttgacaaaaagatatcatgtttcgatttttttgtgtgtggacaacaatatggaagctaaaattgacatatttttatgtaaagtttttctattctttgatttttaataaactttggaaaccagttt

SEQ ID NO: 163620 - DNA, 603 bp, Homo sapiens
  Payload ID: 12221
  Gene Symbol: PAPD7
  Gene Name: PAP associated domain containing 7
  ENST ID: ENST00000515721
  CDS Start-End: 523-603
cccggggcccaggcgccgcggcccggcaccccgtggaagagccgcgcgtacagcccgggcatccaggggtgagtgcgcggggaggccgcgggggcgggggcggggcccatggtcctggccggcgcccgcggtgcagacacccgtcccaggcgcccgggcttttggaggatggatgttgaaggctaaggccaaggcccgactctgcactgaaagttttttttttaaacatcagactcatttatcgtggagtgacttgcccagatcctacaagtaacagtccaagaaaaggggctgctgggtaggacctgcaggtatttgtcttttttactcttgagattggaacgggaaatcgactctctacccctccaccccgcctccgggcaagtgaggaaccccttgtcaaagtggggcgtagataagtgtggagtttcacgtaagttaagttgcagaataatttagcattgccaggaactcgaatcacgtcgaagactacatgaggaaataattgacttttataacttcatgtccccttgtcctgaagaagcagctatgagaagagaggtggtgaaacggatcgaaactgtggtgaaagacctttggccg

SEQ ID NO: 163621 - DNA, 1902 bp, Homo sapiens
  Payload ID: 12221
  Gene Symbol: PAPD7
  Gene Name: PAP associated domain containing 7
  Uniprot ID: Q5XG87
  ENST ID: ENST00000631941
  CDS Start-End: 189-1817
gcttttggaggatggatgttgaaggctaaggccaaggcccgactctgcactgaaagttttttttttaaacatcagactcatttatcgtggagtgacttgcccagatcctacaagtaacagtccaagaaaaggggctgctgggtaggacctgcagactacatgaggaaataattgacttttataacttcatgtccccttgtcctgaagaagcagctatgagaagagaggtggtgaaacggatcgaaactgtggtgaaagacctttggccgacggctgatgtacagatatttggcagctttagtacaggtctttatcttccaactagcgacatagacctggtggtcttcgggaaatgggagcgtcctcctttacagctgctggagcaagccctgcggaagcacaacgtggctgagccgtgttccatcaaagtccttgacaaggctacggtaccaataataaagctcacagatcaggagactgaagtgaaagttgacatcagctttaacatggagacgggcgtccgggcagcggagttcatcaagaattacatgaagaaatattcattgctgccttacttgattttagtattgaaacagttccttctgcagagggacctgaatgaagtttttacaggtggaattagctcatacagcctaattttaatggccattagctttctacagttgcatccaagaattgatgcccggagagctgatgaaaaccttggaatgcttcttgtagaattttttgaactctatgggagaaattttaattacttgaaaaccggtattagaatcaaagaaggaggtgcctatatcgccaaagaggagatcatgaaagccatgaccagcgggtacagaccgtcgatgctgtgcattgaggaccccctgctgccagggaatgacgttggccggagctcctatggcgccatgcaggtgaagcaggtcttcgattatgcctacatagtgctcagccatgctgtgtcaccgctggccaggtcctatccaaacagagacgccgaaagtactttaggaagaatcatcaaagtaactcaggaggtgattgactaccggaggtggatcaaagagaagtggggcagcaaagcccacccgtcgccaggcatggacagcaggatcaagatcaaagagcgaatagccacatgcaatggggagcagacgcagaaccgagagcccgagtctccctatggccagcgcttgactttgtcgctgtccagcccccagctcctgtcttcaggctcctcggcctcttctgtgtcttcactttctgggagtgacgttgattcagacacaccgccctgcacaacgcccagtgtttaccagttcagtctgcaagcgccagctcctctcatggccggcttacccaccgccttgccaatgcccagtggcaaacctcagcccaccacttccagaacactgatcatgacaaccaacaatcagaccaggtttactatacctccaccgaccctaggggttgctcctgttccttgcagacaagctggtgtagaaggaactgcgtctttgaaagccgtccaccacatgtcttccccggccattccctcagcgtcccccaacccgctctcgagccctcatctgtatcataagcagcacaacggcatgaaactgtccatgaagggctctcacggccacacccaaggcggcggctacagctctgtgggtagcggaggtgtgcggccccctgtgggcaacaggggacaccaccagtataaccgcaccggctggaggaggaaaaaacacacacacacacgggacagtctgcccgtgagcctcagcagataatggctcctggctgcgtcagcctcccccacccctctgcagactgccccgcggcctcggccaccggcaggggaaccgagaccagcac

SEQ ID NO: 163622 - DNA, 4182 bp, Homo sapiens
  Payload ID: 12222
  Gene Symbol: PAPLN
  Gene Name: papilin, proteoglycan-like sulfated glycoprotein
  ENST ID: ENST00000216658
  CDS Start-End: 20-2446
ccagcgaagacaggctgagatgcggctgctcctgctcgtgccgctgctgctggctccagcgcccgggtcctcggctcccaaggtgaggcggcagagtgacacctggggaccctggagccagtggagcccctgcagccggacctgtggagggggtgtcagcttccgggagcgcccctgctactcccagaggagagatggaggctccagctgcgtgggccccgcccggagccaccgctcttgtcgcacggagagctgccccgacggcgcccgggacttccgggccgagcagtgcgcggagttcgacggagcggagttccaggggcggcggtatcggtggctgccctactacagcgccccaaacaagtgtgaactgaactgcattcccaagggggagaacttctactacaagcacagggaggctgtggttgatgggacgccctgcgagcctggcaagagggatgtctgtgtggatggcagctgccgggttgtcggctgtgatcacgagctggactcgtccaagcaggaggacaagtgtctgcggtgtgggggtgacggcacgacctgctaccccgtcgcaggcacctttgacgctaatgacctcagccgaggctacaaccagatcctcatagttcccatgggtgccaccagcatcctcatcgacgaggctgctgccagcaggaacttcctggctgtgaagaatgttcgtggggaatactacctcaatgggcactggaccatcgaggcggcccgggccctgccagcagccagcaccatcctgcattacgagcggggtgctgagggggacctggcccctgagcgactccatgcccggggccccacctcggagcccctggtcatcgagctcatcagccaggagcccaaccccggtgtgcactatgagtaccacctgcccctgcgccgccccagccccggcttcagctggagccacggctcatggagtgactgcagcgcggagtgtggcggaggtcaccagtcccgcctggtgttctgcaccatcgaccatgaggcctaccccgaccacatgtgccagcgccagccacggccagctgaccggcgttcctgcaatcttcacccttgcccggagaccaagcgctggaaggcagggccatgggcaccctgctcagcctcctgtggaggaggctcccagtcccgctccgtgtactgcatctcgtctgacggggccggcatccaggaggccgtggaggaggctgagtgtgccgggctgcctgggaagccccctgccattcaggcctgtaacctgcagcgctgtgcagcctggagcccggagccctggggagagtgttctgtcagttgtggcgttggcgtccggaagcggagcgttacttgccggggtgaaaggggttctttgctccataccgcagcgtgctccttggaagaccggccacctctgactgagccctgtgtgcatgaggactgccccctcctcagtgaccaggcctggcatgttggcacctggggtctatgctccaagagctgcagctcgggcactcggaggcgacaggtcatctgtgccattgggccgcccagccactgcgggagcctgcagcactccaagcctgtggatgtggagccttgtaacacgcagccctgtcatctcccccaggaggtccccagcatgcaggatgtgcacacccctgccagcaacccctggatgccgttgggccctcaggagtcccctgcctcagactccagaggccagtggtgggcagcccaggaacacccctcagccaggggtgaccacaggggagaacgaggtgaccccaggggcgaccaaggcacccacctgtcagccctgggccccgctccctctctgcagcagcccccataccagcaacccctgcggtcgggctcagggccccacgactgcagacacagtcctcacgggtgctgccccgatggccacacggcatctctcgggcctcagtggcaaggctgccctggggccccctgtcagcagagcaggtacgggtgctgccctgacagggtatctgtcgctgaggggccccatcacgctggctgcacaaagtcgtatggtggtgacagcaccgggggcatgcccaggtcaagggcagtggcttctacagtccacaacacccaccagccccaggcccagcagaatgagcccagtgagtgccggggctcccagtttggctgttgctatgacaacgtggccactgcagccggtcctcttggggaaggctgtgtgggccagcccagccatggattagcttggcaggtgtggagccctcgttggtgcaggcagccctggggcagttggtgcggctctcctgctcagacgacactgccccggaatcccaggctgcctggcagaaagatggccagcccatctcctctgacaggtgtgtgtgacggccccccgacctcctctgacaggtgtgtgtgacagccccccgacctcctctgacaggttcacgtgacagctccctccacctccgctgacaggcacaggctgcagttcgacggatccctgatcatccaccccctgcaggcagaggacgcgggcacctacagctgtggcagcacccggccaggccgcgactcccagaagatccaacttcgcatcatagggggtgacatggccgtgctgtctgaggctgagctgagccgcttccctcagcccagggacccagctcaggactttggccaagcgggggctgctgggcccctgggggccatcccctcttcacacccacagcctgcaaacaggctgcgtttggaccagaaccagccccgggtggtggatgccagtccaggccagcggatccggatgacctgccgtgccgaaggcttcccgcccccagccatcgagtggcagagagatgggcagcctgtctcttctcccagacaccagctgcagcctgatggctccctggtcattagccgagtggctgtagaagatggcggcttctacacctgtgtcgctttcaatgggcaggaccgagaccagcgatgggtccagctcagagttctgggggagctgacaatctcaggactgccccctactgtgacagtgccagagggtgatacggccaggctattgtgtgtggtagcaggagaaagtgtgaacatcaggtggtccaggaacgggctacctgtgcaggctgatggccaccgtgtccaccagtccccagatggcacgctgctcatttacaacttgcgggccagggatgagggctcctacacgtgcagtgcctaccaggggagccaggcagtcagccgcagcaccgaggtgaaggtggtctcaccagcacccaccgcccagcccagggaccctggcagggactgcgtcgaccagccagagctggccaactgtgatttgatcctgcaggcccagctttgtggcaatgagtattactccagcttctgctgtgccagctgttcacgtttccagcctcacgctcagcccatctggcagtagggatgaaggctagttccagccccagtccaaaatagttcatagggctagggagaaaggaagatggactcttggcttcctctctctggctggcaaagggagttatcttctggaatacattagctctttcaaaaacccacccagtgtttagcctcaacggcagccagttaccagcttctctctgtagccttcagcagtgtttgcatctctgacataaccacaggctgctgttttcaagaagagcaatctgtttggataagaaaaacctttactttacagcttccctttataatttgttacacaggaatagttaaatgcatttgtttgtttgttttttgagacagagtttcactcttgttgcccaggctggagggcaatggcgcgatctcagctcactgcaacctccgtctcctgggttcttgattctcctgtgtcagccttctgagtagctaggattacagatgcctatcaccatgcctgggtaatttttgtatttttagttgagatggggtttcaccatgttggccaggctggtctcgaacttctgacctcagatgatctgcccgcctcagcctcccaaagtgctgggattacaggcatgagccaccacgcccagccatcaatgcattttttttattttttttttgagacagagtttcgcacttcttgcccaggctggagtacaatggtgcgatcttggctca

SEQ ID NO: 163623 - DNA, 5834 bp, Homo sapiens
  Payload ID: 12222
  Gene Symbol: PAPLN
  Gene Name: papilin, proteoglycan-like sulfated glycoprotein
  Uniprot ID: O95428
  ENST ID: ENST00000340738
  CDS Start-End: 103-3858
gcgttccttgcggcccggccgacctcgcgggcttgggcctgggcgggcaccgacggagcggccctggctgcagcctcccggcgccagcgaagacaggctgagatgcggctgctcctgctcgtgccgctgctgctggctccagcgcccgggtcctcggctcccaaggtgaggcggcagagtgacacctggggaccctggagccagtggagcccctgcagccggacctgtggagggggtgtcagcttccgggagcgcccctgctactcccagaggagagatggaggctccagctgcgtgggccccgcccggagccaccgctcttgtcgcacggagagctgccccgacggcgcccgggacttccgggccgagcagtgcgcggagttcgacggagcggagttccaggggcggcggtatcggtggctgccctactacagcgccccaaacaagtgtgaactgaactgcattcccaagggggagaacttctactacaagcacagggaggctgtggttgatgggacgccctgcgagcctggcaagagggatgtctgtgtggatggcagctgccgggttgtcggctgtgatcacgagctggactcgtccaagcaggaggacaagtgtctgcggtgtgggggtgacggcacgacctgctaccccgtcgcaggcacctttgacgctaatgacctcagccgagctgtgaagaatgttcgtggggaatactacctcaatgggcactggaccatcgaggcggcccgggccctgccagcagccagcaccatcctgcattacgagcggggtgctgagggggacctggcccctgagcgactccatgcccggggccccacctcggagcccctggtcatcgagctcatcagccaggagcccaaccccggtgtgcactatgagtaccacctgcccctgcgccgccccagccccggcttcagctggagccacggctcatggagtgactgcagcgcggagtgtggcggaggtcaccagtcccgcctggtgttctgcaccatcgaccatgaggcctaccccgaccacatgtgccagcgccagccacggccagctgaccggcgttcctgcaatcttcacccttgcccggagaccaagcgctggaaggcagggccatgggcaccctgctcagcctcctgtggaggaggctcccagtcccgctccgtgtactgcatctcgtctgacggggccggcatccaggaggccgtggaggaggctgagtgtgccgggctgcctgggaagccccctgccattcaggcctgtaacctgcagcgctgtgcagcctggagcccggagccctggggagagtgttctgtcagttgtggcgttggcgtccggaagcggagcgttacttgccggggtgaaaggggttctttgctccataccgcagcgtgctccttggaagaccggccacctctgactgagccctgtgtgcatgaggactgccccctcctcagtgaccaggcctggcatgttggcacctggggtctatgctccaagagctgcagctcgggcactcggaggcgacaggtcatctgtgccattgggccgcccagccactgcgggagcctgcagcactccaagcctgtggatgtggagccttgtaacacgcagccctgtcatctcccccaggaggtccccagcatgcaggatgtgcacacccctgccagcaacccctggatgccgttgggccctcaggagtcccctgcctcagactccagaggccagtggtgggcagcccaggaacacccctcagccaggggtgaccacaggggagaacgaggtgaccccaggggcgaccaaggcacccacctgtcagccctgggccccgctccctctctgcagcagcccccataccagcaacccctgcggtcgggctcagggccccacgactgcagacacagtcctcacgggtgctgccccgatggccacacggcatctctcgggcctcagtggcaaggctgccctggggccccctgtcagcagagcaggtacgggtgctgccctgacagggtatctgtcgctgaggggccccatcacgctggctgcacaaagtcgtatggtggtgacagcaccgggggcatgcccaggtcaagggcagtggcttctacagtccacaacacccaccagccccaggcccagcagaatgagcccagtgagtgccggggctcccagtttggctgttgctatgacaacgtggccactgcagccggtcctcttggggaaggctgtgtgggccagcccagccatgcctaccccgtgcggtgcctgctgcccagtgcccatggctcttgcgcagactgggctgcccgctggtacttcgttgcctctgtgggccaatgtaaccgcttctggtatggcggctgccatggcaatgccaataactttgcctcggagcaagagtgcatgagcagctgccagggatctctccatgggccccgtcgtccccagcctggggcttctggaaggagcacccacacggatggtggcggcagcagtcctgcaggcgagcaggaacccagccagcacaggacaggggccgcggtgcagagaaagccctggccttctggtggtctctggcggcaagaccaacagcctgggccaggggaggccccccacacccaggcctttggagaatggccatgggggcaggagcttgggtccagggcccctggactgggtggagatgccggatcaccagcgccacccttccacagctcctcctacaggattagcttggcaggtgtggagccctcgttggtgcaggcagccctggggcagttggtgcggctctcctgctcagacgacactgccccggaatcccaggctgcctggcagaaagatggccagcccatctcctctgacaggcacaggctgcagttcgacggatccctgatcatccaccccctgcaggcagaggacgcgggcacctacagctgtggcagcacccggccaggccgcgactcccagaagatccaacttcgcatcatagggggtgacatggccgtgctgtctgaggctgagctgagccgcttccctcagcccagggacccagctcaggactttggccaagcgggggctgctgggcccctgggggccatcccctcttcacacccacagcctgcaaacaggctgcgtttggaccagaaccagccccgggtggtggatgccagtccaggccagcggatccggatgacctgccgtgccgaaggcttcccgcccccagccatcgagtggcagagagatgggcagcctgtctcttctcccagacaccagctgcagcctgatggctccctggtcattagccgagtggctgtagaagatggcggcttctacacctgtgtcgctttcaatgggcaggaccgagaccagcgatgggtccagctcagagttctgggggagctgacaatctcaggactgccccctactgtgacagtgccagagggtgatacggccaggctattgtgtgtggtagcaggagaaagtgtgaacatcaggtggtccaggaacgggctacctgtgcaggctgatggccaccgtgtccaccagtccccagatggcacgctgctcatttacaacttgcgggccagggatgagggctcctacacgtgcagtgcctaccaggggagccaggcagtcagccgcagcaccgaggtgaaggtggtctcaccagcacccaccgcccagcccagggaccctggcagggactgcgtcgaccagccagagctggccaactgtgatttgatcctgcaggcccagctttgtggcaatgagtattactccagcttctgctgtgccagctgttcacgtttccagcctcacgctcagcccatctggcagtagggatgaaggctagttccagccccagtccaaaatagttcatagggctagggagaaaggaagatggactcttggcttcctctctctggctggcaaagggagttatcttctggaatacattagctctttcaaaaacccacccagtgtttagcctcaacggcagccagttaccagcttctctctgtagccttcagcagtgtttgcatctctgacataaccacaggctgctgttttcaagaagagcaatctgtttggataagaaaaacctttactttacagcttccctttataatttgttacacaggaatagttaaatgcatttgtttgtttgttttttgagacagagtttcactcttgttgcccaggctggagggcaatggcgcgatctcagctcactgcaacctccgtctcctgggttcttgattctcctgtgtcagccttctgagtagctaggattacagatgcctatcaccatgcctgggtaatttttgtatttttagttgagatggggtttcaccatgttggccaggctggtctcgaacttctgacctcagatgatctgcccgcctcagcctcccaaagtgctgggattacaggcatgagccaccacgcccagccatcaatgcattttttttattttttttttgagacagagtttcgcacttcttgcccaggctggagtacaatggtgcgatcttggctcactgcaacctccacctcctgggttcaagcgcttctccagcctcagcctcctgagtagctgggattacaggtatgtgccaccatgcctggctaattttgtatttttagtagagacggggtttctccatgttggtcagactggtcttgaactcccgacctcaggtaatccgcccgcctcggcctcccaaaatgctgggattagaggtgtgagccactgtgcccagcccatcaatgtgttttaaagctagctgtcagggttccacttaatttaaagctgggcagggagatgtgtaatgatttcaaagttaacacctgtttgttttctaaagggcatgccaagtcctgctgtatcagggaagtattctgtgctaaaatcagcgatggttcattgctctagtctctctcacccttctaggcagtgcatcagtcagctctaaatctggtgcagagggttaacagcataacccttgttggcaaaatggaatagatgttaagacctcaaatagggatttgggatgaaacagctgcagttagcactgttatctgagcatgaaagaactggaaacgctccttacgtcgagatgttggaccttgaagccctcctgaggccaacatgcaaatctggctgtgacggttcatctgacacctgtgtaaagctgaccagcctgctctgtacagtgacaatgaggagcccctctcttccttaagtaggaatctgtgaagcaaaatgtttgctgccaaagacaaatcagactgtcagtcattaaaaacagcattagcaggatgaggatagcaatggggaagggttgtgggcaatgcagtaacagggaaatggcttcagaaatggtttgagttggaagacaacattcttcatctctcaggacttctaattccttgatgctaaaagaagaggcatggattctatgagcttccaagtccctttccactttaaccttctacaaatctttcagaggactgcctagtagcaaaggttattcctggacacaggaaagacgggcattacagggaccaaagctctgaaaggtgacttttattaccaacacactggctggaaaagggacaaaccacatcacgggtgagtgatacttctcagtcttctctactcattcaacaaaggaaatgtgggctggggcagaggtcttttttcatttaatactggaaaaatattgaagagcatccatgttcacttatggctggttttgctatagaaattggaaaataaaggccacttttttgaaatccccagtttaattaaa

SEQ ID NO: 163624 - DNA, 3709 bp, Homo sapiens
  Payload ID: 12222
  Gene Symbol: PAPLN
  Gene Name: papilin, proteoglycan-like sulfated glycoprotein
  ENST ID: ENST00000557061
  CDS Start-End: 1-645
gtccacaacacccaccagccccaggcccagcagaatgagcccagtgagtgccggggctcccagtttggctgttgctatgacaacgtggccactgcagccggtcctcttggggaaggctgtgtgggccagcccagccatgcctaccccgtgcggtgcctgctgcccagtgcccatggctcttgcgcagactgggctgcccgctggtacttcgttgcctctgtgggccaatgtaaccgcttctggtatggcggctgccatggcaatgccaataactttgcctcggagcaagagtgcatgagcagctgccagggatctctccatgggccccgtcgtccccagcctggggcttctggaaggagcacccacacggatggtggcggcagcagtcctgcaggcgagcaggaacccagccagcacaggacaggggccgcggtgcagagaaagccctggccttctggtggtctctggcggcaagaccaacagcctgggccaggggaggccccccacacccaggcctttggagaatggccatgggggcaggagcttgggtccagggcccctggactgggtggagatgccggatcaccagcgccacccttccacagctcctcctacagatctcacttcccacctctccaggattagcttggcaggtgtggagccctcgttggtgcaggcagccctggggcagttggtgcggctctcctgctcagacgacactgccccggaatcccaggctgcctggcagaaagatggccagcccatctcctctgacaggcacaggctgcagttcgacggatccctgatcatccaccccctgcaggcagaggacgcgggcacctacagctgtggcagcacccggccaggccgcgactcccagaagatccaacttcgcatcatagggggtgacatggccgtgctgtctgaggctgagctgagccgcttccctcagcccagggacccagctcaggactttggccaagcgggggctgctgggcccctgggggccatcccctcttcacacccacagcctgcaaacaggctgcgtttggaccagaaccagccccgggtggtggatgccagtccaggccagcggatccggatgacctgccgtgccgaaggcttcccgcccccagccatcgagtggcagagagatgggcagcctgtctcttctcccagacaccagctgcagcctgatggctccctggtcattagccgagtggctgtagaagatggcggcttctacacctgtgtcgctttcaatgggcaggaccgagaccagcgatgggtccagctcagagttctgggggagctgacaatctcaggactgccccctactgtgacagtgccagagggtgatacggccaggctattgtgtgtggtagcaggagaaagtgtgaacatcaggtggtccaggaacgggctacctgtgcaggctgatggccaccgtgtccaccagtccccagatggcacgctgctcatttacaacttgcgggccagggatgagggctcctacacgtgcagtgcctaccaggggagccaggcagtcagccgcagcaccgaggtgaaggtggtctcaccagcacccaccgcccagcccagggaccctggcagggactgcgtcgaccagccagagctggccaactgtgatttgatcctgcaggcccagctttgtggcaatgagtattactccagcttctgctgtgccagctgttcacgtttccagcctcacgctcagcccatctggcagtagggatgaaggctagttccagccccagtccaaaatagttcatagggctagggagaaaggaagatggactcttggcttcctctctctggctggcaaagggagttatcttctggaatacattagctctttcaaaaacccacccagtgtttagcctcaacggcagccagttaccagcttctctctgtagccttcagcagtgtttgcatctctgacataaccacaggctgctgttttcaagaagagcaatctgtttggataagaaaaacctttactttacagcttccctttataatttgttacacaggaatagttaaatgcatttgtttgtttgttttttgagacagagtttcactcttgttgcccaggctggagggcaatggcgcgatctcagctcactgcaacctccgtctcctgggttcttgattctcctgtgtcagccttctgagtagctaggattacagatgcctatcaccatgcctgggtaatttttgtatttttagttgagatggggtttcaccatgttggccaggctggtctcgaacttctgacctcagatgatctgcccgcctcagcctcccaaagtgctgggattacaggcatgagccaccacgcccagccatcaatgcattttttttattttttttttgagacagagtttcgcacttcttgcccaggctggagtacaatggtgcgatcttggctcactgcaacctccacctcctgggttcaagcgcttctccagcctcagcctcctgagtagctgggattacaggtatgtgccaccatgcctggctaattttgtatttttagtagagacggggtttctccatgttggtcagactggtcttgaactcccgacctcaggtaatccgcccgcctcggcctcccaaaatgctgggattagaggtgtgagccactgtgcccagcccatcaatgtgttttaaagctagctgtcagggttccacttaatttaaagctgggcagggagatgtgtaatgatttcaaagttaacacctgtttgttttctaaagggcatgccaagtcctgctgtatcagggaagtattctgtgctaaaatcagcgatggttcattgctctagtctctctcacccttctaggcagtgcatcagtcagctctaaatctggtgcagagggttaacagcataacccttgttggcaaaatggaatagatgttaagacctcaaatagggatttgggatgaaacagctgcagttagcactgttatctgagcatgaaagaactggaaacgctccttacgtcgagatgttggaccttgaagccctcctgaggccaacatgcaaatctggctgtgacggttcatctgacacctgtgtaaagctgaccagcctgctctgtacagtgacaatgaggagcccctctcttccttaagtaggaatctgtgaagcaaaatgtttgctgccaaagacaaatcagactgtcagtcattaaaaacagcattagcaggatgaggatagcaatggggaagggttgtgggcaatgcagtaacagggaaatggcttcagaaatggtttgagttggaagacaacattcttcatctctcaggacttctaattccttgatgctaaaagaagaggcatggattctatgagcttccaagtccctttccactttaaccttctacaaatctttcagaggactgcctagtagcaaaggttattcctggacacaggaaagacgggcattacagggaccaaagctctgaaaggtgacttttattaccaacacactggctggaaaagggacaaaccacatcacgggtgagtgatacttctcagtcttctctactcattcaacaaaggaaatgtgggctggggcagaggtcttttttcatttaatactggaaaaatattgaagagcatccatgttcacttatggctggttttgctatagaaattggaaaataaaggccacttttttg

SEQ ID NO: 163625 - DNA, 4282 bp, Homo sapiens
  Payload ID: 12222
  Gene Symbol: PAPLN
  Gene Name: papilin, proteoglycan-like sulfated glycoprotein
  Uniprot ID: O95428
  ENST ID: ENST00000555445
  CDS Start-End: 155-3943
gcggtgcaccgaggcgcacccggctgtcctgttgcgggtctcctggtcacctgtgggccatagggagagacgcgcccacacactctcgcccgcgcccaggacagctgcgggagccccgggccgctctaacccaatgcgtctcccgcaggctgagatgcggctgctcctgctcgtgccgctgctgctggctccagcgcccgggtcctcggctcccaaggtgaggcggcagagtgacacctggggaccctggagccagtggagcccctgcagccggacctgtggagggggtgtcagcttccgggagcgcccctgctactcccagaggagagatggaggctccagctgcgtgggccccgcccggagccaccgctcttgtcgcacggagagctgccccgacggcgcccgggacttccgggccgagcagtgcgcggagttcgacggagcggagttccaggggcggcggtatcggtggctgccctactacagcgccccaaacaagtgtgaactgaactgcattcccaagggggagaacttctactacaagcacagggaggctgtggttgatgggacgccctgcgagcctggcaagagggatgtctgtgtggatggcagctgccgggttgtcggctgtgatcacgagctggactcgtccaagcaggaggacaagtgtctgcggtgtgggggtgacggcacgacctgctaccccgtcgcaggcacctttgacgctaatgacctcagccgaggctacaaccagatcctcatagttcccatgggtgccaccagcatcctcatcgacgaggctgctgccagcaggaacttcctggctgtgaagaatgttcgtggggaatactacctcaatgggcactggaccatcgaggcggcccgggccctgccagcagccagcaccatcctgcattacgagcggggtgctgagggggacctggcccctgagcgactccatgcccggggccccacctcggagcccctggtcatcgagctcatcagccaggagcccaaccccggtgtgcactatgagtaccacctgcccctgcgccgccccagccccggcttcagctggagccacggctcatggagtgactgcagcgcggagtgtggcggaggtcaccagtcccgcctggtgttctgcaccatcgaccatgaggcctaccccgaccacatgtgccagcgccagccacggccagctgaccggcgttcctgcaatcttcacccttgcccggagaccaagcgctggaaggcagggccatgggcaccctgctcagcctcctgtggaggaggctcccagtcccgctccgtgtactgcatctcgtctgacggggccggcatccaggaggccgtggaggaggctgagtgtgccgggctgcctgggaagccccctgccattcaggcctgtaacctgcagcgctgtgcagcctggagcccggagccctggggagagtgttctgtcagttgtggcgttggcgtccggaagcggagcgttacttgccggggtgaaaggggttctttgctccataccgcagcgtgctccttggaagaccggccacctctgactgagccctgtgtgcatgaggactgccccctcctcagtgaccaggcctggcatgttggcacctggggtctatgctccaagagctgcagctcgggcactcggaggcgacaggtcatctgtgccattgggccgcccagccactgcgggagcctgcagcactccaagcctgtggatgtggagccttgtaacacgcagccctgtcatctcccccaggaggtccccagcatgcaggatgtgcacacccctgccagcaacccctggatgccgttgggccctcaggagtcccctgcctcagactccagaggccagtggtgggcagcccaggaacacccctcagccaggggtgaccacaggggagaacgaggtgaccccaggggcgaccaaggcacccacctgtcagccctgggccccgctccctctctgcagcagcccccataccagcaacccctgcggtcgggctcagggccccacgactgcagacacagtcctcacgggtgctgccccgatggccacacggcatctctcgggcctcagtggcaaggctgccctggggccccctgtcagcagagcaggtacgggtgctgccctgacagggtatctgtcgctgaggggccccatcacgctggctgcacaaagtcgtatggtggtgacagcaccgggggcatgcccaggtcaagggcagtggcttctacagtccacaacacccaccagccccaggcccagcagaatgagcccagtgagtgccggggctcccagtttggctgttgctatgacaacgtggccactgcagccggtcctcttggggaaggctgtgtgggccagcccagccatgactgggctgcccgctggtacttcgttgcctctgtgggccaatgtaaccgcttctggtatggcggctgccatggcaatgccaataactttgcctcggagcaagagtgcatgagcagctgccagggatctctccatgggccccgtcgtccccagcctggggcttctggaaggagcacccacacggatggtggcggcagcagtcctgcaggcgagcaggaacccagccagcacaggacaggggccgcggtgcagagaaagccctggccttctggtggtctctggcggcaagaccaacagcctgggccaggggaggccccccacacccaggcctttggagaatggccatgggggcaggagcttgggtccagggcccctggactgggtggagatgccggatcaccagcgccacccttccacagctcctcctacaggattagcttggcaggtgtggagccctcgttggtgcaggcagccctggggcagttggtgcggctctcctgctcagacgacactgccccggaatcccaggctgcctggcagaaagatggccagcccatctcctctgacaggcacaggctgcagttcgacggatccctgatcatccaccccctgcaggcagaggacgcgggcacctacagctgtggcagcacccggccaggccgcgactcccagaagatccaacttcgcatcatagggggtgacatggccgtgctgtctgaggctgagctgagccgcttccctcagcccagggacccagctcaggactttggccaagcgggggctgctgggcccctgggggccatcccctcttcacacccacagcctgcaaacaggctgcgtttggaccagaaccagccccgggtggtggatgccagtccaggccagcggatccggatgacctgccgtgccgaaggcttcccgcccccagccatcgagtggcagagagatgggcagcctgtctcttctcccagacaccagctgcagcctgatggctccctggtcattagccgagtggctgtagaagatggcggcttctacacctgtgtcgctttcaatgggcaggaccgagaccagcgatgggtccagctcagagttctgggggagctgacaatctcaggactgccccctactgtgacagtgccagagggtgatacggccaggctattgtgtgtggtagcaggagaaagtgtgaacatcaggtggtccaggaacgggctacctgtgcaggctgatggccaccgtgtccaccagtccccagatggcacgctgctcatttacaacttgcgggccagggatgagggctcctacacgtgcagtgcctaccaggggagccaggcagtcagccgcagcaccgaggtgaaggtggtctcaccagcacccaccgcccagcccagggaccctggcagggactgcgtcgaccagccagagctggccaactgtgatttgatcctgcaggcccagctttgtggcaatgagtattactccagcttctgctgtgccagctgttcacgtttccagcctcacgctcagcccatctggcagtagggatgaaggctagttccagccccagtccaaaatagttcatagggctagggagaaaggaagatggactcttggcttcctctctctggctggcaaagggagttatcttctggaatacattagctctttcaaaaacccacccagtgtttagcctcaacggcagccagttaccagcttctctctgtagccttcagcagtgtttgcatctctgacataaccacaggctgctgttttcaagaagagcaatctgtttggataagaaaaacctttactttacagcttccctttataatttgttacacaggaatagttaaatgcatttgtttgtttgttttttgagac

SEQ ID NO: 163626 - DNA, 4090 bp, Homo sapiens
  Payload ID: 12222
  Gene Symbol: PAPLN
  Gene Name: papilin, proteoglycan-like sulfated glycoprotein
  Uniprot ID: O95428
  ENST ID: ENST00000554301
  CDS Start-End: 164-4000
gtgttctctgcggtgcaccgaggcgcacccggctgtcctgttgcgggtctcctggtcacctgtgggccatagggagagacgcgcccacacactctcgcccgcgcccaggacagctgcgggagccccgggccgctctaacccaatgcgtctcccgcaggctgagatgcggctgctcctgctcgtgccgctgctgctggctccagcgcccgggtcctcggctcccaaggtgaggcggcagagtgacacctggggaccctggagccagtggagcccctgcagccggacctgtggagggggtgtcagcttccgggagcgcccctgctactcccagaggagagatggaggctccagctgcgtgggccccgcccggagccaccgctcttgtcgcacggagagctgccccgacggcgcccgggacttccgggccgagcagtgcgcggagttcgacggagcggagttccaggggcggcggtatcggtggctgccctactacagcgccccaaacaagtgtgaactgaactgcattcccaagggggagaacttctactacaagcacagggaggctgtggttgatgggacgccctgcgagcctggcaagagggatgtctgtgtggatggcagctgccgggttgtcggctgtgatcacgagctggactcgtccaagcaggaggacaagtgtctgcggtgtgggggtgacggcacgacctgctaccccgtcgcaggcacctttgacgctaatgacctcagccgaggctacaaccagatcctcatagttcccatgggtgccaccagcatcctcatcgacgaggctgctgccagcaggaacttcctggctgtgaagaatgttcgtggggaatactacctcaatgggcactggaccatcgaggcggcccgggccctgccagcagccagcaccatcctgcattacgagcggggtgctgagggggacctggcccctgagcgactccatgcccggggccccacctcggagcccctggtcatcgagctcatcagccaggagcccaaccccggtgtgcactatgagtaccacctgcccctgcgccgccccagccccggcttcagctggagccacggctcatggagtgactgcagcgcggagtgtggcggaggtcaccagtcccgcctggtgttctgcaccatcgaccatgaggcctaccccgaccacatgtgccagcgccagccacggccagctgaccggcgttcctgcaatcttcacccttgcccggagaccaagcgctggaaggcagggccatgggcaccctgctcagcctcctgtggaggaggctcccagtcccgctccgtgtactgcatctcgtctgacggggccggcatccaggaggccgtggaggaggctgagtgtgccgggctgcctgggaagccccctgccattcaggcctgtaacctgcagcgctgtgcagcctggagcccggagccctggggagagtgttctgtcagttgtggcgttggcgtccggaagcggagcgttacttgccggggtgaaaggggttctttgctccataccgcagcgtgctccttggaagaccggccacctctgactgagccctgtgtgcatgaggactgccccctcctcagtgaccaggcctggcatgttggcacctggggtctatgctccaagagctgcagctcgggcactcggaggcgacaggtcatctgtgccattgggccgcccagccactgcgggagcctgcagcactccaagcctgtggatgtggagccttgtaacacgcagccctgtcatctcccccaggaggtccccagcatgcaggatgtgcacacccctgccagcaacccctggatgccgttgggccctcaggagtcccctgcctcagactccagaggccagtggtgggcagcccaggaacacccctcagccaggggtgaccacaggggagaacgaggtgaccccaggggcgaccaaggcacccacctgtcagccctgggccccgctccctctctgcagcagcccccataccagcaacccctgcggtcgggctcagggccccacgactgcagacacagtcctcacgggtgctgccccgatggccacacggcatctctcgggcctcagtggcaaggctgccctggggccccctgtcagcagagcaggtacgggtgctgccctgacagggtatctgtcgctgaggggccccatcacgctggctgcacaaagtcgtatggtggtgacagcaccgggggcatgcccaggtcaagggcagtggcttctacagtccacaacacccaccagccccaggcccagcagaatgagcccagtgagtgccggggctcccagtttggctgttgctatgacaacgtggccactgcagccggtcctcttggggaaggctgtgtgggccagcccagccatgcctaccccgtgcggtgcctgctgcccagtgcccatggctcttgcgcagactgggctgcccgctggtacttcgttgcctctgtgggccaatgtaaccgcttctggtatggcggctgccatggcaatgccaataactttgcctcggagcaagagtgcatgagcagctgccagggatctctccatgggccccgtcgtccccagcctggggcttctggaaggagcacccacacggatggtggcggcagcagtcctgcaggcgagcaggaacccagccagcacaggacaggggccgcggtgcagagaaagccctggccttctggtggtctctggcggcaagaccaacagcctgggccaggggaggccccccacacccaggcctttggagaatggccatgggggcaggagcttgggtccagggcccctggactgggtggagatgccggatcaccagcgccacccttccacagctcctcctacaggattagcttggcaggtgtggagccctcgttggtgcaggcagccctggggcagttggtgcggctctcctgctcagacgacactgccccggaatcccaggctgcctggcagaaagatggccagcccatctcctctgacaggcacaggctgcagttcgacggatccctgatcatccaccccctgcaggcagaggacgcgggcacctacagctgtggcagcacccggccaggccgcgactcccagaagatccaacttcgcatcatagggggtgacatggccgtgctgtctgaggctgagctgagccgcttccctcagcccagggacccagctcaggactttggccaagcgggggctgctgggcccctgggggccatcccctcttcacacccacagcctgcaaacaggctgcgtttggaccagaaccagccccgggtggtggatgccagtccaggccagcggatccggatgacctgccgtgccgaaggcttcccgcccccagccatcgagtggcagagagatgggcagcctgtctcttctcccagacaccagctgcagcctgatggctccctggtcattagccgagtggctgtagaagatggcggcttctacacctgtgtcgctttcaatgggcaggaccgagaccagcgatgggtccagctcagagttctgggggagctgacaatctcaggactgccccctactgtgacagtgccagagggtgatacggccaggctattgtgtgtggtagcaggagaaagtgtgaacatcaggtggtccaggaacgggctacctgtgcaggctgatggccaccgtgtccaccagtccccagatggcacgctgctcatttacaacttgcgggccagggatgagggctcctacacgtgcagtgcctaccaggggagccaggcagtcagccgcagcaccgaggtgaaggtggtctcaccagcacccaccgcccagcccagggaccctggcagggactgcgtcgaccagccagagctggccaactgtgatttgatcctgcaggcccagctttgtggcaatgagtattactccagcttctgctgtgccagctgttcacgtttccagcctcacgctcagcccatctggcagtagggatgaaggctagttccagccccagtccaaaatagttcatagggctagggagaaaggaagatggactcttggcttcctctctctggctgg

SEQ ID NO: 163627 - DNA, 4108 bp, Homo sapiens
  Payload ID: 12222
  Gene Symbol: PAPLN
  Gene Name: papilin, proteoglycan-like sulfated glycoprotein
  ENST ID: ENST00000555123
  CDS Start-End: 21-2810
gccagcgaagacaggctgagatgcggctgctcctgctcgtgccgctgctgctggctccagcgcccgggtcctcggctcccaaggtgaggcggcagagtgacacctggggaccctggagccagtggagcccctgcagccggacctgtggagggggtgtcagcttccgggagcgcccctgctactcccagaggagagatggaggctccagctgcgtgggccccgcccggagccaccgctcttgtcgcacggagagctgccccgacggcgcccgggacttccgggccgagcagtgcgcggagttcgacggagcggagttccaggggcggcggtatcggtggctgccctactacagcgccccaaacaagtgtgaactgaactgcattcccaagggggagaacttctactacaagcacagggaggctgtggttgatgggacgccctgcgagcctggcaagagggatgtctgtgtggatggcagctgccgggttgtcggctgtgatcacgagctggactcgtccaagcaggaggacaagtgtctgcggtgtgggggtgacggcacgacctgctaccccgtcgcaggcacctttgacgctaatgacctcagccgagctgtgaagaatgttcgtggggaatactacctcaatgggcactggaccatcgaggcggcccgggccctgccagcagccagcaccatcctgcattacgagcggggtgctgagggggacctggcccctgagcgactccatgcccggggccccacctcggagcccctggtcatcgagctcatcagccaggagcccaaccccggtgtgcactatgagtaccacctgcccctgcgccgccccagccccggcttcagctggagccacggctcatggagtgactgcagcgcggagtgtggcggaggtcaccagtcccgcctggtgttctgcaccatcgaccatgaggcctaccccgaccacatgtgccagcgccagccacggccagctgaccggcgttcctgcaatcttcacccttgcccggagaccaagcgctggaaggcagggccatgggcaccctgctcagcctcctgtggaggaggctcccagtcccgctccgtgtactgcatctcgtctgacggggccggcatccaggaggccgtggaggaggctgagtgtgccgggctgcctgggaagccccctgccattcaggcctgtaacctgcagcgctgtgcagcctggagcccggagccctggggagagtgttctgtcagttgtggcgttggcgtccggaagcggagcgttacttgccggggtgaaaggggttctttgctccataccgcagcgtgctccttggaagaccggccacctctgactgagccctgtgtgcatgaggactgccccctcctcagtgaccaggcctggcatgttggcacctggggtctatgctccaagagctgcagctcgggcactcggaggcgacaggtcatctgtgccattgggccgcccagccactgcgggagcctgcagcactccaagcctgtggatgtggagccttgtaacacgcagccctgtcatctcccccaggaggtccccagcatgcaggatgtgcacacccctgccagcaacccctggatgccgttgggccctcaggagtcccctgcctcagactccagaggccagtggtgggcagcccaggaacacccctcagccaggggtgaccacaggggagaacgaggtgaccccaggggcgaccaaggcacccacctgtcagccctgggccccgctccctctctgcagcagcccccataccagcaacccctgcggtcgggctcagggccccacgactgcagacacagtcctcacgggtgctgccccgatggccacacggcatctctcgggcctcagtggcaaggctgccctggggccccctgtcagcagagcaggtacgggtgctgccctgacagggtatctgtcgctgaggggccccatcacgctggctgcacaaagtcgtatggtggtgacagcaccgggggcatgcccaggtcaagggcagtggcttctacagtccacaacacccaccagccccaggcccagcagaatgagcccagtgagtgccggggctcccagtttggctgttgctatgacaacgtggccactgcagccggtcctcttggggaaggctgtgtgggccagcccagccatgcctaccccgtgcggtgcctgctgcccagtgcccatggctcttgcgcagactgggctgcccgctggtacttcgttgcctctgtgggccaatgtaaccgcttctggtatggcggctgccatggcaatgccaataactttgcctcggagcaagagtgcatgagcagctgccagggatctctccatgggccccgtcgtccccagcctggggcttctggaaggagcacccacacggatggtggcggcagcagtcctgcaggcgagcaggaacccagccagcacaggacaggggccgcggtgcagagaaagccctggccttctggtggtctctggcggcaagaccaacagcctgggccaggggaggccccccacacccaggcctttggagaatggccatgggggcaggagcttgggtccagggcccctggactgggtggagatgccggatcaccagcgccacccttccacagctcctcctacaggattagcttggcaggtgtggagccctcgttggtgcaggcagccctggggcagttggtgcggctctcctgctcagacgacactgccccggaatcccaggctgcctggcagaaagatggccagcccatctcctctgacaggttcacgtgacagctccctccacctccgctgacaggcacaggctgcagttcgacggatccctgatcatccaccccctgcaggcagaggacgcgggcacctacagctgtggcagcacccggccaggccgcgactcccagaagatccaacttcgcatcatagggggtgacatggccgtgctgtctgaggctgagctgagccgcttccctcagcccagggacccagctcaggactttggccaagcgggggctgctgggcccctgggggccatcccctcttcacacccacagcctgcaaacaggctgcgtttggaccagaaccagccccgggtggtggatgccagtccaggccagcggatccggatgacctgccgtgccgaaggcttcccgcccccagccatcgagtggcagagagatgggcagcctgtctcttctcccagcacccaccgcccagcccagggaccctggcagggactgcgtcgaccagccagagctggccaactgtgatttgatcctgcaggcccagctttgtggcaatgagtattactccagcttctgctgtgccagctgttcacgtttccagcctcacgctcagcccatctggcagtagggatgaaggctagttccagccccagtccaaaatagttcatagggctagggagaaaggaagatggactcttggcttcctctctctggctggcaaagggagttatcttctggaatacattagctctttcaaaaacccacccagtgtttagcctcaacggcagccagttaccagcttctctctgtagccttcagcagtgtttgcatctctgacataaccacaggctgctgttttcaagaagagcaatctgtttggataagaaaaacctttactttacagcttccctttataatttgttacacaggaatagttaaatgcatttgtttgtttgttttttgagacagagtttcactcttgttgcccaggctggagggcaatggcgcgatctcagctcactgcaacctccgtctcctgggttcttgattctcctgtgtcagccttctgagtagctaggattacagatgcctatcaccatgcctgggtaatttttgtatttttagttgagatggggtttcaccatgttggccaggctggtctcgaacttctgacctcagatgatctgcccgcctcagcctcccaaagtgctgggattacaggcatgagccaccacgcccagccatcaatgcattttttttattttttttttgagacagagtttcgcacttcttgcccaggctggagtacaatggtgcgatcttggctca

SEQ ID NO: 163628 - DNA, 2994 bp, Homo sapiens
  Payload ID: 12222
  Gene Symbol: PAPLN
  Gene Name: papilin, proteoglycan-like sulfated glycoprotein
  ENST ID: ENST00000559759
  CDS Start-End: 1-935
agtgcatgagcagctgccagggatctctccatgggccccgtcgtccccagcctggggcttctggaaggagcacccacacggatggtggcggcagcagtcctgcaggcgagcaggaacccagccagcacaggacaggggccgcggtgcagagaaagccctggccttctggtggtctctggcggcaagaccaacagcctgggccaggggaggccccccacacccaggcctttggagaatggccatgggggcaggagcttgggtccagggcccctggactgggtggagatgccggatcaccagcgccacccttccacagctcctcctacaggattagcttggcaggtgtggagccctcgttggtgcaggcagccctggggcagttggtgcggctctcctgctcagacgacactgccccggaatcccaggctgcctggcagaaagatggccagcccatctcctctgacaggcacaggctgcagttcgacggatccctgatcatccaccccctgcaggcagaggacgcgggcacctacagctgtggcagcacccggccaggccgcgactcccagaagatccaacttcgcatcatagggggtgacatggccgtgctgtctgaggctgagctgagccgcttccctcagcccagggacccagctcaggactttggccaagcgggggctgctgggcccctgggggccatcccctcttcacacccacagcctgcaaacaggctgcgtttggaccagaaccagccccgggtggtggatgccagtccaggccagcggatccggatgacctgccgtgccgaaggcttcccgcccccagccatcgagtggcagagagatgggcagcctgtctcttctcccagcacccaccgcccagcccagggaccctggcagggactgcgtcgaccagccagagctggccaactgtgatttgatcctgcaggcccagctttgtggcaatgagtattactccagcttctgctgtgccagctgttcacgtttccagcctcacgctcagcccatctggcagtagggatgaaggctagttccagccccagtccaaaatagttcatagggctagggagaaaggaagatggactcttggcttcctctctctggctggcaaagggagttatcttctggaatacattagctctttcaaaaacccacccagtgtttagcctcaacggcagccagttaccagcttctctctgtagccttcagcagtgtttgcatctctgacataaccacaggctgctgttttcaagaagagcaatctgtttggataagaaaaacctttactttacagcttccctttataatttgttacacaggaatagttaaatgcatttgtttgtttgttttttgagacagagtttcactcttgttgcccaggctggagggcaatggcgcgatctcagctcactgcaacctccgtctcctgggttcttgattctcctgtgtcagccttctgagtagctaggattacagatgcctatcaccatgcctgggtaatttttgtatttttagttgagatggggtttcaccatgttggccaggctggtctcgaacttctgacctcagatgatctgcccgcctcagcctcccaaagtgctgggattacaggcatgagccaccacgcccagccatcaatgcattttttttattttttttttgagacagagtttcgcacttcttgcccaggctggagtacaatggtgcgatcttggctcactgcaacctccacctcctgggttcaagcgcttctccagcctcagcctcctgagtagctgggattacaggtatgtgccaccatgcctggctaattttgtatttttagtagagacggggtttctccatgttggtcagactggtcttgaactcccgacctcaggtaatccgcccgcctcggcctcccaaaatgctgggattagaggtgtgagccactgtgcccagcccatcaatgtgttttaaagctagctgtcagggttccacttaatttaaagctgggcagggagatgtgtaatgatttcaaagttaacacctgtttgttttctaaagggcatgccaagtcctgctgtatcagggaagtattctgtgctaaaatcagcgatggttcattgctctagtctctctcacccttctaggcagtgcatcagtcagctctaaatctggtgcagagggttaacagcataacccttgttggcaaaatggaatagatgttaagacctcaaatagggatttgggatgaaacagctgcagttagcactgttatctgagcatgaaagaactggaaacgctccttacgtcgagatgttggaccttgaagccctcctgaggccaacatgcaaatctggctgtgacggttcatctgacacctgtgtaaagctgaccagcctgctctgtacagtgacaatgaggagcccctctcttccttaagtaggaatctgtgaagcaaaatgtttgctgccaaagacaaatcagactgtcagtcattaaaaacagcattagcaggatgaggatagcaatggggaagggttgtgggcaatgcagtaacagggaaatggcttcagaaatggtttgagttggaagacaacattcttcatctctcaggacttctaattccttgatgctaaaagaagaggcatggattctatgagcttccaagtccctttccactttaaccttctacaaatctttcagaggactgcctagtagcaaaggttattcctggacacaggaaagacgggcattacagggaccaaagctctgaaaggtgacttttattaccaacacactggctggaaaagggacaaaccacatcacgggtgagtgatacttctcagtcttctctactcattcaacaaaggaaatgtgggctggggcagaggtcttttttcatttaatactggaaaaatattgaagagcatccatgttcacttatggctggttttgctatagaaattggaaaataaaggccacttttttg

SEQ ID NO: 163629 - DNA, 2105 bp, Homo sapiens
  Payload ID: 12223
  Gene Symbol: PRCC
  Gene Name: papillary renal cell carcinoma (translocation-associated)
  Uniprot ID: Q92733
  ENST ID: ENST00000271526
  CDS Start-End: 273-1748
attggtgaggcaaggaggaggcggagtgactcggcggccattagctgtgtgtagttgcccgggactaggagcttaagtgaagaggtacgccttgttcggtggaaatcagccgtagccatgagtttctgccggggctagccctagagtacggagcaggcggacttttcggttccccgccccgccaggtggcggggcctactaggcctccgggcatccccggtctcaagtaggcctcatctgccggcaagggcgcccgaaacgcgggaggcgccatgtcgctggttgcttacgccagcagcgatgagagcgagccggatgaggctgagcccgagccggaggaagaggaggcggtggctcctacatctgggcccgctttagggggcttgttcgcttctctccctgcgcccaagggtccggccttgctgcctccgccccctcagatgctggcgccagcctttcccccgccgctgttgcttcccccacccaccggagaccccaggcttcagcctcctccccccttgcccttcggcctgggaggcttccccccacctccaggcgtgagcccggctgaagcggcgggagttggggagggactgggattggggttgccctcgccccgaggccctggcctcaatctgccccctccaattggcggtgccggtcccccgctggggcttcccaagccaaagaagaggaaagagcccgtgaagatcgcggcgccggagttgcataagggagattcagattctgaggaagatgaacccacaaagaagaaaactatccttcagggatccagtgaggggactggtttgtctgccttgcttccccaacctaaaaacctgactgtgaaagagactaacaggttgctcctgccccatgccttctcccgcaaaccctcggatggctcccctgatactaagccctccagactggcttctaagaccaagacttcctctcttgcccctgttgtgggcaccacaaccaccactccgtcgccctctgctatcaaggctgctgccaagagtgctgccctgcaggtgacaaagcagatcacgcaggaagaagacgacagtgatgaggaagtagcccccgaaaactttttctccctccctgaaaaggctgagccacctggagttgagccatacccttaccccatccccactgtccctgaagagctgcctccaggcacggaaccagagccggctttccaggacgatgcagccaatgccccccttgaattcaagatggcagcaggttcaagtggggccccttggatgcctaagcctggggacgactacagctacaatcagttttccacatatggcgatgccaatgccgctggtgcttattatcaggattattacagtggtggctactatcctgcacaggacccggccctggtccccccccaggaaattgccccagatgcctccttcatcgatgacgaagcatttaagcggctgcagggcaagaggaaccgagggagagaagaaatcaactttgtggagatcaaaggtgatgaccagctcagtggggcccagcaatggatgactaagtcattgacagaagagaaaaccatgaagtcattcagcaaaaagaaaggtgagcagccaacaggccagcagcggcggaaacaccagatcacatatcttattcatcaggccaaggagcgggagctggaactgaagaacacctggtcagagaacaagctcagccgccgtcagacccaagccaaatatggattctagggctctggaactgattgctcccaggatctcctgccagcccagctggcctggcccccagcttcacctctgggaccccagctgctctaagcccaggatctctttccccaaggacccagccctcgcctctgcgagaatgaacatatttgatagatttttcttaacaagttagaaaattcagctcctttctgtcctggagctagcaaagacttgtgtgatgcctccgaaggggctctgagttctggggtgggagttttgctctctgtcaggtgtgataaaatgttgaaccctccccaccaccacttttttttttttaaaccagggatgtctgttgaaataaaacattcagtctgacaaaca

SEQ ID NO: 163630 - DNA, 1084 bp, Homo sapiens
  Payload ID: 12223
  Gene Symbol: PRCC
  Gene Name: papillary renal cell carcinoma (translocation-associated)
  ENST ID: ENST00000454659
  CDS Start-End: 1-773
gtgatgaggaagtagcccccgaaaactttttctccctccctgaaaaggctgagccacctggagttgagccatacccttaccccatccccactgtccctgaagagctgcctccaggcacggaaccagagccggctttccaggacgatgcagccaatgccccccttgaattcaagatggcagcaggttcaagtggggccccttggatgcctaagcctggggacgactacagctacaatcagttttccacatatggcgatgccaatgccgctggtgcttattatcagggtctgcagcaacatctgggccactcgcctctaaggggaatcatgagattcctgaactcaaaatctggtaaacgaacctgctttgttcccagctttgattattacagtggtggctactatcctgcacaggacccggccctggtccccccccaggaaattgccccagatgcctccttcatcgatgacgaagcatttaagcggctgcagggcaagaggaaccgagggagagaagaaatcaactttgtggagatcaaaggtgatgaccagctcagtggggcccagcaatggatgactaagtcattgacagaagagaaaaccatgaagtcattcagcaaaaagaaaggtgagcagccaacaggccagcagcggcggaaacaccagatcacatatcttattcatcaggccaaggagcgggagctggaactgaagaacacctggtcagagaacaagctcagccgccgtcagacccaagccaaatatggattctagggctctggaactgattgctcccaggatctcctgccagcccagctggcctggcccccagcttcacctctgggaccccagctgctctaagcccaggatctctttccccaaggacccagccctcgcctctgcgagaatgaacatatttgatagatttttcttaacaagttagaaaattcagctcctttctgtcctggagctagcaaagacttgtgtgatgcctccgaaggggctctgagttctggggtgggagttttgctctctgtcaggtgtgataaaatgttgaaccctccccaccaccacttttttttttt

SEQ ID NO: 163631 - DNA, 634 bp, Homo sapiens
  Payload ID: 12223
  Gene Symbol: PRCC
  Gene Name: papillary renal cell carcinoma (translocation-associated)
  ENST ID: ENST00000526188
  CDS Start-End: 1-597
caggaagaagacgacagtgatgaggaagtagcccccgaaaactttttctccctccctgaaaaggctgagccacctggagttgagccatacccttaccccatccccactgtccctgaagagctgcctccaggcacggaaccagagccggctttccaggacgatgcagccaatgccccccttgaattcaagatggcagcaggttcaagtggggccccttggatgcctaagcctggggacgactacagctacaatcagttttccacatatggcgatgccaatgccgctggtgcttattatcagtttaagcggctgcagggcaagaggaaccgagggagagaagaaatcaactttgtggagatcaaaggtgatgaccagctcagtggggcccagcaatggatgactaagtcattgacagaagagaaaaccatgaagtcattcagcaaaaagaaaggtgagcagccaacaggccagcagcggcggaaacaccagatcacatatcttattcatcaggccaaggagcgggagctggaactgaagaacacctggtcagagaacaagctcagccgccgtcagacccaagccaaatatggattctagggctctggaactgattgctcccaggatctcctgccag

SEQ ID NO: 163632 - DNA, 4369 bp, Homo sapiens
  Payload ID: 12224
  Gene Symbol: PAPPA2
  Gene Name: pappalysin 2
  Uniprot ID: Q9BXP8
  ENST ID: ENST00000367661
  CDS Start-End: 1165-3648
gggcatgactctctctcttgagtaggcacacactcccttttctcgggtgtgtactttttgctttgtgatacatctctgcactttcagtattttccaactcatccttaaattccttctcacaacagtgtcaagagcctggacgccagccaggattgaggtcctacgggtgtttggggacctccccaagcccacgagtatcaatggcagtatcaattgtctgtgacagtgattaaggagcaaaacacttggaacccacaagactcccagaaggtgaagttaagagctcccagactcataaggttattagaacagcaaactggcaccccaaagaactttacggagacttgcaacctatcaacaagttggatgagggattaaaagccttcaacaaccaacaaccccaagcatcaaactgaaggaaacattctaaccttcacagacagactggaggctggatggggacctggctgaagacatctggagaatgaaagttaagtaccagcttgcatttttgtgcccctagattatttttgcattttaaaataagaagcatcaaattgcgtgtctctgtgtaaaagttctagcaatttgttttaaggtgaacttattttggcttagggactacaaaaagagaaggtaattcctagggaaggaagaagagaaagaaatgaaaattagagaataagattattttgaatgacttcaggtagcgaggagtgtgtgtttgtgagtgtgtatttgagagacttggctcatgcctgtgggtcttctcttctagtatcagtgaggggagggattactgaagaagaaggggggaaaaaaaaagaaagaaatctgagctttctgggaggaaattcaaaggaaccaagagaaattaacttcgttctgcaaggactaaagtacagcaagaggagagaggtcaagcgagaagcgtgcgggaagcacatgccctggggaggcatagaagccacactggcagagcggccagcacaggtagccagcagaggcattcttggggctatttgaaaaagtttggtctgtgaacaaaacagtttccctggtgactgcaaatccattgctagctgcctctttctcgtctgcccatcactctggtgtggtacccagaagttgacttctggttctgtagaaagagctaggggaggtatgatgtgcttaaagatcctaagaataagcctggcgattttggctgggtgggcactctgttctgccaactctgagctgggctggacacgcaagaaatccttggttgagagggaacacctgaatcaggtgctgttggaaggagaacgttgttggctgggggccaaggttcgaagacccagagcttctccacagcatcacctctttggagtctaccccagcagggctgggaactacctaaggccctaccccgtgggggagcaagaaatccatcatacaggacgcagcaaaccagacactgaaggaaatgctgtgagccttgttcccccagacctgactgaaaatccagcaggactgaggggtgcagttgaagagccggctgccccatgggtaggggatagtcctattgggcaatctgagctgctgggagatgatgacgcttatctcggcaatcaaagatccaaggagtctctaggtgaggccgggattcagaaaggctcagccatggctgccactactaccaccgccattttcacaaccctgaacgaacccaaaccagagacccaaaggaggggctgggccaagtccaggcagcgtcgccaagtgtggaagaggcgggcggaagatgggcagggagactccggtatctcttcacatttccaaccttggcccaagcattcccttaaacacagggtcaaaaagagtccaccggaggaaagcaaccaaaatggtggagagggctcctaccgagaagcagagacctttaactcccaagtaggactgcccatcttatacttctctgggaggcgggagcggctgctgctgcgtccagaagtgctggctgagattccccgggaggcgttcacagtggaagcctgggttaaaccggagggaggacagaacaacccagccatcatcgcaggtgtgtttgataactgctcccacactgtcagtgacaaaggctgggccctggggatccgctcagggaaggacaagggaaagcgggatgctcgcttcttcttctccctctgcaccgaccgcgtgaagaaagccaccatcttgattagccacagtcgctaccaaccaggcacatggacccatgtggcagccacttacgatggacggcacatggccctgtatgtggatggcactcaggtggctagcagtctagaccagtctggtcccctgaacagccccttcatggcatcttgccgctctttgctcctggggggagacagctctgaggatgggcactatttccgtggacacctgggcacactggttttctggtcgaccgccctgccacaaagccattttcagcacagttctcagcattcaagtggggaggaggaagcgactgacttggtcctgacagcgagctttgagcctgtgaacacagagtgggttccctttagagatgagaagtacccacgacttgaggttctccagggctttgagccagagcctgagattctgtcgcctttgcagcccccactctgtgggcaaacagtctgtgacaatgtggaattgatctcccagtacaatggatactggccccttcggggagagaaggtgatacgctaccaggtggtgaacatctgtgatgatgagggcctaaaccccattgtgagtgaggagcagattcgtctgcagcacgaggcactgaatgaggccttcagccgctacaacatcagctggcagctgagcgtccaccaggtccacaattccaccctgcgacaccgggttgtgcttgtgaactgtgagcccagcaagattggcaatgaccattgtgaccccgagtgtgagcacccactcacaggctatgatgggggtgactgccgcctgcagggccgctgctactcctggaaccgcagggatgggctctgtcacgtggagtgtaacaacatgctgaacgactttgacgacggagactgctgcgacccccaggtggctgatgtgcgcaagacctgctttgaccctgactcacccaagagggcatacatgagtgtgaaggagctgaaggaggccctgcagctgaacagtactcacttcctcaacatctactttgccagctcagtgcgggaagaccttgcaggtgctgccacctggccttgggacaaggacgctgtcactcacctgggtggcattgtcctcagcccagcatattatgggatgcctggccacaccgacaccatgatccatgaagtgggacatgttctgggactctaccatgtctttaaaggagtcagtgaaagagaatcctgcaatgacccctgcaaggagacagtgccatccatggaaacgggagacctctgtgccgacaccgcccccactcccaagagtgagctgtgccgggaaccagagcccactagtgacacctgtggcttcactcgcttcccaggggctccgttcaccaactacatgagctacacgggtatcaccactgtcttgttttgttttctgttaagaatacatgggggcctttgagagctgggagggtggaggtgtgggagctgatgggagaatgattaagtggtcatttgtgtcggagagttgaagtgtatttattataaggtattattattttttcatgtctttgaagaacttgaagaaatactgacatattaaggtactttgttcactgaattctcctctactagatattttaaaatatacttctatcctcgatagtaaaaaaggcacagagccaaaagccctcttgtgatccccttgacttctagaatgtggttattcttatttttgcccgcattcttagacatttactctgaagaagagtccaatggaaataaaggaaaagagtttatgggtcaaggtggcccattgtactgtttttgaagttggtcaacaaggtggcttggttaatttaggctcagcatgttttactgtatgttactaaaaaaaaaaaaaaaaaaaatcagattctctttttccagcactagtcaagcacaaattcttagctgcctaccaccctttccccaccaaaaggtgacatctaattttaaaaaaatggcatcttcctggccctcggaaaaacttgtcatctggtctttcttgccttaattcagcttctgtattattcttcgctgtctctcacgccttccttgtttcttgtgaaaagtaatagtgactggtttcctataatggactcaaagttatccctaaaattaaagacttatttgatgaccta

SEQ ID NO: 163633 - DNA, 9691 bp, Homo sapiens
  Payload ID: 12224
  Gene Symbol: PAPPA2
  Gene Name: pappalysin 2
  Uniprot ID: Q9BXP8
  ENST ID: ENST00000367662
  CDS Start-End: 1165-6540
gggcatgactctctctcttgagtaggcacacactcccttttctcgggtgtgtactttttgctttgtgatacatctctgcactttcagtattttccaactcatccttaaattccttctcacaacagtgtcaagagcctggacgccagccaggattgaggtcctacgggtgtttggggacctccccaagcccacgagtatcaatggcagtatcaattgtctgtgacagtgattaaggagcaaaacacttggaacccacaagactcccagaaggtgaagttaagagctcccagactcataaggttattagaacagcaaactggcaccccaaagaactttacggagacttgcaacctatcaacaagttggatgagggattaaaagccttcaacaaccaacaaccccaagcatcaaactgaaggaaacattctaaccttcacagacagactggaggctggatggggacctggctgaagacatctggagaatgaaagttaagtaccagcttgcatttttgtgcccctagattatttttgcattttaaaataagaagcatcaaattgcgtgtctctgtgtaaaagttctagcaatttgttttaaggtgaacttattttggcttagggactacaaaaagagaaggtaattcctagggaaggaagaagagaaagaaatgaaaattagagaataagattattttgaatgacttcaggtagcgaggagtgtgtgtttgtgagtgtgtatttgagagacttggctcatgcctgtgggtcttctcttctagtatcagtgaggggagggattactgaagaagaaggggggaaaaaaaaagaaagaaatctgagctttctgggaggaaattcaaaggaaccaagagaaattaacttcgttctgcaaggactaaagtacagcaagaggagagaggtcaagcgagaagcgtgcgggaagcacatgccctggggaggcatagaagccacactggcagagcggccagcacaggtagccagcagaggcattcttggggctatttgaaaaagtttggtctgtgaacaaaacagtttccctggtgactgcaaatccattgctagctgcctctttctcgtctgcccatcactctggtgtggtacccagaagttgacttctggttctgtagaaagagctaggggaggtatgatgtgcttaaagatcctaagaataagcctggcgattttggctgggtgggcactctgttctgccaactctgagctgggctggacacgcaagaaatccttggttgagagggaacacctgaatcaggtgctgttggaaggagaacgttgttggctgggggccaaggttcgaagacccagagcttctccacagcatcacctctttggagtctaccccagcagggctgggaactacctaaggccctaccccgtgggggagcaagaaatccatcatacaggacgcagcaaaccagacactgaaggaaatgctgtgagccttgttcccccagacctgactgaaaatccagcaggactgaggggtgcagttgaagagccggctgccccatgggtaggggatagtcctattgggcaatctgagctgctgggagatgatgacgcttatctcggcaatcaaagatccaaggagtctctaggtgaggccgggattcagaaaggctcagccatggctgccactactaccaccgccattttcacaaccctgaacgaacccaaaccagagacccaaaggaggggctgggccaagtccaggcagcgtcgccaagtgtggaagaggcgggcggaagatgggcagggagactccggtatctcttcacatttccaaccttggcccaagcattcccttaaacacagggtcaaaaagagtccaccggaggaaagcaaccaaaatggtggagagggctcctaccgagaagcagagacctttaactcccaagtaggactgcccatcttatacttctctgggaggcgggagcggctgctgctgcgtccagaagtgctggctgagattccccgggaggcgttcacagtggaagcctgggttaaaccggagggaggacagaacaacccagccatcatcgcaggtgtgtttgataactgctcccacactgtcagtgacaaaggctgggccctggggatccgctcagggaaggacaagggaaagcgggatgctcgcttcttcttctccctctgcaccgaccgcgtgaagaaagccaccatcttgattagccacagtcgctaccaaccaggcacatggacccatgtggcagccacttacgatggacggcacatggccctgtatgtggatggcactcaggtggctagcagtctagaccagtctggtcccctgaacagccccttcatggcatcttgccgctctttgctcctggggggagacagctctgaggatgggcactatttccgtggacacctgggcacactggttttctggtcgaccgccctgccacaaagccattttcagcacagttctcagcattcaagtggggaggaggaagcgactgacttggtcctgacagcgagctttgagcctgtgaacacagagtgggttccctttagagatgagaagtacccacgacttgaggttctccagggctttgagccagagcctgagattctgtcgcctttgcagcccccactctgtgggcaaacagtctgtgacaatgtggaattgatctcccagtacaatggatactggccccttcggggagagaaggtgatacgctaccaggtggtgaacatctgtgatgatgagggcctaaaccccattgtgagtgaggagcagattcgtctgcagcacgaggcactgaatgaggccttcagccgctacaacatcagctggcagctgagcgtccaccaggtccacaattccaccctgcgacaccgggttgtgcttgtgaactgtgagcccagcaagattggcaatgaccattgtgaccccgagtgtgagcacccactcacaggctatgatgggggtgactgccgcctgcagggccgctgctactcctggaaccgcagggatgggctctgtcacgtggagtgtaacaacatgctgaacgactttgacgacggagactgctgcgacccccaggtggctgatgtgcgcaagacctgctttgaccctgactcacccaagagggcatacatgagtgtgaaggagctgaaggaggccctgcagctgaacagtactcacttcctcaacatctactttgccagctcagtgcgggaagaccttgcaggtgctgccacctggccttgggacaaggacgctgtcactcacctgggtggcattgtcctcagcccagcatattatgggatgcctggccacaccgacaccatgatccatgaagtgggacatgttctgggactctaccatgtctttaaaggagtcagtgaaagagaatcctgcaatgacccctgcaaggagacagtgccatccatggaaacgggagacctctgtgccgacaccgcccccactcccaagagtgagctgtgccgggaaccagagcccactagtgacacctgtggcttcactcgcttcccaggggctccgttcaccaactacatgagctacacggatgataactgcactgacaacttcactcctaaccaagtggcccgaatgcattgctatttggacctagtctatcagcagtggactgaaagcagaaagcccacccccatccccattccacctatggtcatcggacagaccaacaagtccctcactatccactggctgcctcctattagtggagttgtatatgacagggcctcaggcagcttgtgtggcgcttgcactgaagatgggacctttcgtcagtatgtgcacacagcttcctcccggcgggtgtgtgactcctcaggttattggaccccagaggaggctgtggggcctcctgatgtggatcagccctgcgagccaagcttacaggcctggagccctgaggtccacctgtaccacatgaacatgacggtcccctgccccacagaaggctgtagcttggagctgctcttccaacacccggtccaagccgacaccctcaccctgtgggtcacttccttcttcatggagtcctcgcaggtcctctttgacacagagatcttgctggaaaacaaggagtcagtgcacctgggccccttagacactttctgtgacatcccactcaccatcaaactgcacgtggatgggaaggtgtcgggggtgaaagtctacacctttgatgagaggatagagattgatgcagcactcctgacttctcagccccacagtcccttgtgctctggctgcaggcctgtgaggtaccaggttctccgcgatcccccatttgccagtggtttgcccgtggtggtgacacattctcacaggaagttcacggacgtggaggtcacacctggacagatgtatcagtaccaagttctagctgaagctggaggagaactgggagaagcttcgcctcctctgaaccacattcatggagctccttattgtggagatgggaaggtgtcagagagactgggagaagagtgtgatgatggagaccttgtgagcggagatggctgctccaaggtgtgtgagctggaggaaggtttcaactgtgtaggagagccaagcctttgctacatgtatgagggagatggcatatgtgaaccttttgagagaaaaaccagcattgtagactgtggcatctacactcccaaaggatacttggatcaatgggctacccgggcttactcctctcatgaagacaagaagaagtgtcctgtttccttggtaactggagaacctcattccctaatttgcacatcataccatccagatttacccaaccaccgtcccctaactggctggtttccctgtgttgccagtgaaaatgaaactcaggatgacaggagtgaacagccagaaggtagcctgaagaaagaggatgaggtttggctcaaagtgtgtttcaatagaccaggagaggccagagcaatttttatttttttgacaactgatggcctagttcccggagagcatcagcagccgacagtgactctctacctgaccgatgtccgtggaagcaaccactctcttggaacctatggactgtcatgccagcataatccactgattatcaatgtgacccatcaccagaatgtccttttccaccataccacctcagtgctgctgaatttctcatccccacgggtcggcatctcagctgtggctctaaggacatcctcccgcattggtctttcggctcccagtaactgcatctcagaggacgaggggcagaatcatcagggacagagctgtatccatcggccctgtgggaagcaggacagctgtccgtcattgctgcttgatcatgctgatgtggtgaactgtacctctataggcccaggtctcatgaagtgtgctatcacttgtcaaaggggatttgcccttcaggccagcagtgggcagtacatcaggcccatgcagaaggaaattctgctcacatgttcttctgggcactgggaccagaatgtgagctgccttcccgtggactgcggtgttcccgacccgtctttggtgaactatgcaaacttctcctgctcagagggaaccaaatttctgaaacgctgctcaatctcttgtgtcccaccagccaagctgcaaggactgagcccatggctgacatgtcttgaagatggtctctggtctctccctgaagtctactgcaagttggagtgtgatgctccccctattattctgaatgccaacttgctcctgcctcactgcctccaggacaaccacgacgtgggcaccatctgcaaatatgaatgcaaaccagggtactatgtggcagaaagtgcagagggtaaagtcaggaacaagctcctgaagatacaatgcctggaaggtggaatctgggagcaaggcagctgcattcctgtggtgtgtgagccaccccctcctgtgtttgaaggcatgtatgaatgtaccaatggcttcagcctggacagccagtgtgtgctcaactgtaaccaggaacgtgaaaagcttcccatcctctgcactaaagagggcctgtggacccaggagtttaagttgtgtgagaatctgcaaggagaatgcccaccacccccctcagagctgaattctgtggagtacaaatgtgaacaaggatatgggattggtgcagtgtgttccccattgtgtgtaatcccccccagtgaccccgtgatgctacctgagaatatcactgctgacactctggagcactggatggaacctgtcaaagtccagagcattgtgtgcactggccggcgtcaatggcacccagaccccgtcttagtccactgcatccagtcatgtgagcccttccaagcagatggttggtgtgacactatcaacaaccgagcctactgccactatgacgggggagactgctgctcttccacactctcctccaagaaggtcattccatttgctgctgactgtgacctggatgagtgcacctgccgggaccccaaggcagaagaaaatcagtaactgtgggaacaagcccctccctccactgcctcagaggcagtaagaaagagaggccgacccaggaggaaacaaagggtgaatgaagaagaacaatcatgaaatggaagaaggaggaagagcatgaaggatcttataagaaatgcaagaggatattgataggtgtgaactagttcatcaagtagcccaagtaggagagaatcataggcaaaagtttctttaaagtggcagttgattaacatggaaggggaaatatgatagatatataaggaccctcctccctcacttatattctattaaatcctatcctcaactcttgccctgctctccgctccaccccctgccaactactcagtcccacccaacttgtaaaccaataccaaaatactagaggagaagttggcagggatactgttaatacccattttgaatggattgccatctttcagagcttgtctgctctcaactggctctttttctttttgtgtagtttcccttaaataatgaagttagttattaattctttataagtatttaaacataattatataaatatattatatatattatattttttgctgtttactaagctaaaaattattcattgttccacacatgctgctgtgaagttcacattcaagatgaatgttgagactttgaggacagaaaggcaacttattttcccatctttctatggatgcggattggcaggttgaatgggaagtacagaaggagagagagtaattagatggaattctggatgctagcatgtaaagctaatcatctttttttttatgacctgggagctgggcccattttatgaccaaggagatggggagttggaatggtggtactaagaggcataggaagttgagtgtgaataccattggtgatgggtccaggagaactagactatggttcttgaatatctgtccacaaagaatatactaacttttgtcaacttctcagaactcccaactggagtcggtgagacctaggattttctgcacttccacacatgcctgttccaagtgtggctgtcagccagtcaacaagtttgtactatggcccattctctgatcaccaggattacaggaactcacacactcctcatacttggcctgtagtcctacttcttgttagaagtctccaagtctggccagtcacatgaccaagtgttgatttttctggaggaaaaattttatggaaatgatataggggaaaggtgggaggagatgaaagaacaggcaagagctgtcagggttaaatccaggcccgggcatgagaatggaagtgatcagggagactcggtccttgttccaagtctccaaagaagaccaaagtgggtcccttgagcaatgaagaatctgagataaattctcttcaagtatcatgtacaaaatctgtgagccagagattttgacttgagcaagccatggaaatgcatggagcaagggtgacactctgtggggagacagaagaatttcaactatttaatgtccattttgttgtttttaccctttcttatccaatagatggaatgcacatgaaatgaccatattaagcctctctctatttacatcccaggctcactgggatgtgatctactgcagttacattttcttgtaacggtttctggattagaccctagggaaagtgagtaaggagccagtttctgtttaacattctagttttactcattttaggaaggctgtgagtgaggcttgtctcctttaaagtttcttctccaatggaaaccaagaacagacaaaatttagagctcagctgtggtctcttctcatcttctgctcttttgctttgaccacagtttttctactcttcccatcaacactagagcaatggctgtgcaaataggaataggaaatactaccacaatgatagaaatattatccacactatcacgtagggaagaacaatatcctgaaagagaataaaacacgaataaggtgatgtacccacattaatctgtgggtttgtggaatgagggttgcaaagttattgggaaaaggaaagagcagagttcacccattcaaaaaaaaccttttgtctactaatctctagtgtaaagaaaatgtagttcagataccattcattgtcttgggtcatgcttagtgcccccaagaagacaaacatatttattcttgggattctgataggcttcaatatgcaaaggacaatggaaaagtttagacactctattttcaaaattttataaacttgttttattggggaaaatgtccaaattgctagacacattctaagttctgccttggagaatcctactttgtctgagattgaggcagaggaattgttatcctgggcattactcagctcaggaacatggagcctgtggttcatgccagtgtgtgtcttcatgcagtctctccacaagagcaacagtaagaacatttctgttttaaatttcattttaaaatattttattatctgcaattcaccactgctctgggaaagcaaaaggaaagttcctgttgtgtgtgaagagcctcttaggctataaggcttcccagccatagtcagctatagctattcagagacagcaggttcttccagtctttgttcctgggacctgatgttttgagcaactcaggtcactgataaagtggaaggactaagacactgtggtcacagatcccagcaacatcaactcacactcaatccatgtggtggtccacattctgctactcttatccacccatgtggtcattgagagcctttctcagagactcttctgtgtgtttgattgtgcccaggtggcccagggctagctggctctaacaactagcatgacagcctccaatcagaaaggcaggtaaggggacagggtgaggagaatgggcagatactgacagaaattaaagtaaagggattgtgaaagtaaagagctcttcctgattctcatcttctcttttttctattacaaggcattgaacttggcacttcctgtattctttgtgatcactattgagtgcattagttaacacccaaggggatggcttgattgggaatgtagtgaaaggagctgatctactgtattgtaatgtaaaacagctacagccagttattttgtaagattataagttgttcattaaaaaatcagcacacaaaatatgaa

SEQ ID NO: 163634 - DNA, 5867 bp, Homo sapiens
  Payload ID: 12225
  Gene Symbol: PARD3
  Gene Name: par-3 family cell polarity regulator
  Uniprot ID: Q8TEW0
  ENST ID: ENST00000350537
  CDS Start-End: 327-4259
gcggccccgagcgagcgccagcgccacacagccccgggcagccgccggcgagcgcgccgcgacgccgaacaggtggccggaggctgcgggcgccgcggcggggagaggcgaggcaagccccgggcgaagcgaggcgaggcgagggcggccgggccgggcatgcgagctgagcggccccccggcgtcgccgccgcctgcccgcgcccctagccgcccgcgcgcccgagtccccagcggctcctccgcgcccagcgtcctcggtcccggcctcggctgctccggctgcgctcggcgaggggcgcgggcccgcccgcggcggcggcggcatgaaagtgaccgtgtgcttcggacggacccgggtggtcgtgccgtgcggggacggccacatgaaagttttcagcctcatccagcaggcggtgacccgctaccggaaggccatcgccaaggatccaaactactggatacaggtgcatcgcttggaacatggagatggaggaatactagaccttgatgacattctttgtgatgtagcagacgataaagacagactggtagcagtgtttgatgagcaggatccacatcacggaggtgatggcaccagtgccagttccacgggtacccagagcccagagatatttggtagtgagcttggcaccaacaatgtctcagcctttcagccttaccaagcaacaagtgaaattgaggtcacaccttcagtccttcgagcaaatatgcctcttcatgttcgacgcagtagtgacccagctctaattggcctctccacttctgtcagtgatagtaatttttcctctgaagagccttcaaggaaaaatcccacacgctggtcaacaacagctggcttcctcaagcagaacactgctgggagtcctaaaacctgcgacaggaagaaagatgaaaactacagaagcctcccgcgggatactagtaactggtctaaccaatttcagagagacaatgctcgctcgtctctgagtgccagtcacccaatggtgggcaagtggctggagaaacaagaacaggatgaggatgggacagaagaggataacagtcgtgttgaacctgttggacatgctgacacgggtttggagcatatacccaacttttctctggatgatatggtaaagctcgtagaagtccccaacgatggagggcctctgggaatccacgtagtgcctttcagtgctcgaggcggcagaaccctggggttattagtaaaacgattggagaaaggtggtaaagctgaacatgaaaatctttttcgtgagaatgattgcattgtcaggattaatgatggcgaccttcgaaatagaagatttgaacaagcacaacatatgtttcgccaagccatgcgtacacccatcatttggttccatgtggttcctgcagcaaataaagagcagtatgaacaactatcccaaagtgagaagaacaattactattcaagccgttttagccctgacagccagtatattgacaacaggagtgtgaacagtgcagggcttcacacggtgcagagagcaccccgactgaaccacccgcctgagcagatagactctcactcaagactacctcatagcgcacacccctcgggaaaaccaccatccgctccagcctcggcacctcagaatgtatttagtacgactgtaagcagtggttataacaccaaaaaaataggcaagaggcttaatatccagcttaagaaaggtacagaaggtttgggattcagcatcacttccagagatgtaacaataggtggctcagctccaatctatgtgaaaaacattctcccccggggggcggccattcaggatggccgacttaaggcaggagacagacttatagaggtaaatggagtagatttagtgggcaaatcccaagaggaagttgtttcgctgttgagaagcaccaagatggaaggaactgtgagccttctggtctttcgccaggaagacgccttccacccaagggaactgaaagcagaagatgaggatattgttcttacacctgatggcaccagggaatttctgacatttgaagtcccacttaatgattcaggatctgcaggccttggtgtcagtgtcaaaggtaaccggtcaaaagagaaccacgcagatttgggaatctttgtcaagtccattattaatggaggagcagcatctaaagatggaaggcttcgggtgaatgatcaactgatagcagtaaatggagaatccctgttgggcaagacaaaccaagatgccatggaaaccctaagaaggtctatgtctactgaaggcaataaacgaggaatgatccagcttattgttgcaaggagaataagcaagtgcaatgagctgaagtcacctgggagcccccctggacctgagctgcccattgaaacagcgttggatgatagagaacgaagaatttcccattccctctacagtgggattgaggggcttgatgaatcgcccagcagaaatgctgccctcagtaggataatgggtaaataccagctgtcccctacagtgaatatgccccaagatgacactgtcattatagaagatgacaggttgccagtgcttcctccacatctctctgaccagtcctcttccagctcccatgatgatgtggggtttgtgacggcagatgctggtacttgggccaaggctgcaatcagtgattcagccgactgctctttgagtccagatgttgatccagttcttgcttttcaacgagaaggatttggacgtcagatagctgacgagactaaactcaatacagtggatgaccagaaagcaggttctcccagcagagatgtgggtccttccctgggtctgaagaagtcaagctcgttggagagtctgcagaccgcagttgccgaggtgactttgaatggggatattcctttccatcgtccacggccgcggataatcagaggcaggggatgcaatgagagcttcagagctgccatcgacaaatcttatgataaacccgcggtagatgatgatgatgaaggcatggagaccttggaagaagacacagaagaaagttcaagatcagggagagagtctgtatccacagccagtgatcagccttcccactctctggagagacaaatgaatggaaaccaagagaaaggtgataagactgatagaaaaaaggataaaactggaaaagaaaagaagaaagatagagataaggagaaggataaaatgaaagccaagaagggaatgctgaagggcttgggagacatgttcaggtttggcaaacatcgaaaagatgacaagattgagaaaacgggtaaaataaaaatacaggaatcctttacatcagaagaggagaggatacgaatgaagcaggagcaggagaggattcaagccaaaactcgagaatttagggaacgacaagctcgagagcgtgactatgctgaaattcaagattttcatcggacatttggctgtgatgatgagttaatgtatgggggagtttcttcttatgaaggttccatggctctcaacgctagacctcagagcccacgagaagggcatatgatggatgctttgtatgcccaagtcaagaagccgcggaattccaaaccctcacctgtagacagtaacagatcaactcctagcaatcatgatcggatacagcgtctgaggcaagaatttcagcaagcaaagcaagatgaagatgtagaagatcgtcggcggacctatagttttgagcaaccctggccgaacgcacggccggcgacgcagagcgggcgacactcggtgtccgtggaggtgcagatgcagcggcagcggcaggaggagcgcgagagctcccagcaggcccagcgccagtacagctctctgcctcggcaaagcaggaaaaatgccagctcggtctcccaggactcttgggagcagaactactcccctggggaaggcttccagagtgccaaagagaaccccaggtactccagctaccaaggctccaggaacggctacctgggaggacatggcttcaacgccagggtcatgctggaaactcaggagctccttcgccaggaacagaggcggaaggagcagcagatgaagaagcagcctccttccgaggggcccagcaactatgactcgtataagaaagtccaggaccccagttacgcccctcccaaggggcccttccggcaagatgtgcccccctccccttctcaggttgcgaggctgaacagacttcagactcctgagaaagggaggcccttctattcctgagcacgcaaataacggatgcttcatgtcgcgcaataaaagacattttcctatgaagacttgtattttgggagtttttttaaaacctcgatggtactatggagtatttctgttgttggtatcagtgcctttaagcggtgtaggcaaagaaatggaaggccttaatgtctttgccactatgtctcaagtgtctgtttcatggaaggatttcccaccctgtgacaatcatctgtttgaggtgttcatatgctctgcgcctctccacagtaccaggaatctcggccctactcatgagttgtccgcggcttggttgtaacatccctgcaccacttgcagtgacaaattcacctgaagtggaggatgacgtgcggccctgtttctccctctaagttctcttagctatgggatgacatcttagtctctggtggaggaaaagtgggcgacatacaccaaaaattggggctttctggtacttcacagcacagccatttgtcgtactttgtcatcactgtggttttctctttcctttctcagctctttgtgacgggagagtcggtcatcctattacagaagctaagccatagtccaacattgtttggtcaccatgggggtccttttgtaactgccttatgactcaacattaccaataaagtgatgatcctggtctgcgtttatacatacgcttgttcggtcctgttcctgacacgtgggttgagtcaccacagctctgtgtggggaacgtgggagacaggagtggctcctgccgggggaagctgggcctgccattggccctgtgtctatcatgaggggagagctaagaaagaaattctcctaggaagagctcatggcccagtacatcctagtaattattttaattagtttttgttctgacagcttgtcaggaagggcacagaatgggacagagataaaccagacagtcattttgatctgctctctacggtttttcaagtcagaggcaattgatgcttgtctaatgcatccacacactgcatgtctgactggcgatgccgcgctcctaagtagttctgccatgaaacataaaagacaaaggaaaagccgttacacatcacacagagaacattttcgggtcccacagcggtggtggcaggaagctcactctcgcgtcagtattagagtgtgtgtgtgggtctcggggatctcggtggctcccatcttccttcattgttctgaacatcctgtattgtaaaccatggctggggtgctaaagtgcctgtgaatcccgatgtggaaaaagctggaggtgaaagctcagcataccatgtatttactttaaaaacagaaaaaaagacatgtatggatatgtctattttttttttattggcacattgtatttttgtgttgacttgtttttagaaatgatgtgtccacacacgtacccgtgtctcttctgcatttctgtgtcatggttctgtttcttaatcacgtgcggcggtgtctaagtggtgttaccagtgtacgcgcagtgaccttggatgacagtggctctttctcacagcctcccctgagctgtgagaaacagctttctctgtacatatgcaactcctaataaaaggcatatttcttcctgtt

SEQ ID NO: 163635 - DNA, 5894 bp, Homo sapiens
  Payload ID: 12225
  Gene Symbol: PARD3
  Gene Name: par-3 family cell polarity regulator
  Uniprot ID: Q8TEW0
  ENST ID: ENST00000346874
  CDS Start-End: 327-4286
gcggccccgagcgagcgccagcgccacacagccccgggcagccgccggcgagcgcgccgcgacgccgaacaggtggccggaggctgcgggcgccgcggcggggagaggcgaggcaagccccgggcgaagcgaggcgaggcgagggcggccgggccgggcatgcgagctgagcggccccccggcgtcgccgccgcctgcccgcgcccctagccgcccgcgcgcccgagtccccagcggctcctccgcgcccagcgtcctcggtcccggcctcggctgctccggctgcgctcggcgaggggcgcgggcccgcccgcggcggcggcggcatgaaagtgaccgtgtgcttcggacggacccgggtggtcgtgccgtgcggggacggccacatgaaagttttcagcctcatccagcaggcggtgacccgctaccggaaggccatcgccaaggatccaaactactggatacaggtgcatcgcttggaacatggagatggaggaatactagaccttgatgacattctttgtgatgtagcagacgataaagacagactggtagcagtgtttgatgagcaggatccacatcacggaggtgatggcaccagtgccagttccacgggtacccagagcccagagatatttggtagtgagcttggcaccaacaatgtctcagcctttcagccttaccaagcaacaagtgaaattgaggtcacaccttcagtccttcgagcaaatatgcctcttcatgttcgacgcagtagtgacccagctctaattggcctctccacttctgtcagtgatagtaatttttcctctgaagagccttcaaggaaaaatcccacacgctggtcaacaacagctggcttcctcaagcagaacactgctgggagtcctaaaacctgcgacaggaagaaagatgaaaactacagaagcctcccgcgggatactagtaactggtctaaccaatttcagagagacaatgctcgctcgtctctgagtgccagtcacccaatggtgggcaagtggctggagaaacaagaacaggatgaggatgggacagaagaggataacagtcgtgttgaacctgttggacatgctgacacgggtttggagcatatacccaacttttctctggatgatatggtaaagctcgtagaagtccccaacgatggagggcctctgggaatccacgtagtgcctttcagtgctcgaggcggcagaaccctggggttattagtaaaacgattggagaaaggtggtaaagctgaacatgaaaatctttttcgtgagaatgattgcattgtcaggattaatgatggcgaccttcgaaatagaagatttgaacaagcacaacatatgtttcgccaagccatgcgtacacccatcatttggttccatgtggttcctgcagcaaataaagagcagtatgaacaactatcccaaagtgagaagaacaattactattcaagccgttttagccctgacagccagtatattgacaacaggagtgtgaacagtgcagggcttcacacggtgcagagagcaccccgactgaaccacccgcctgagcagatagactctcactcaagactacctcatagcgcacacccctcgggaaaaccaccatccgctccagcctcggcacctcagaatgtatttagtacgactgtaagcagtggttataacaccaaaaaaataggcaagaggcttaatatccagcttaagaaaggtacagaaggtttgggattcagcatcacttccagagatgtaacaataggtggctcagctccaatctatgtgaaaaacattctcccccggggggcggccattcaggatggccgacttaaggcaggagacagacttatagaggtaaatggagtagatttagtgggcaaatcccaagaggaagttgtttcgctgttgagaagcaccaagatggaaggaactgtgagccttctggtctttcgccaggaagacgccttccacccaagggaactgaatgcagagccaagccagatgcagattccaaaagaaacgaaagcagaagatgaggatattgttcttacacctgatggcaccagggaatttctgacatttgaagtcccacttaatgattcaggatctgcaggccttggtgtcagtgtcaaaggtaaccggtcaaaagagaaccacgcagatttgggaatctttgtcaagtccattattaatggaggagcagcatctaaagatggaaggcttcgggtgaatgatcaactgatagcagtaaatggagaatccctgttgggcaagacaaaccaagatgccatggaaaccctaagaaggtctatgtctactgaaggcaataaacgaggaatgatccagcttattgttgcaaggagaataagcaagtgcaatgagctgaagtcacctgggagcccccctggacctgagctgcccattgaaacagcgttggatgatagagaacgaagaatttcccattccctctacagtgggattgaggggcttgatgaatcgcccagcagaaatgctgccctcagtaggataatgggtgagtcaggtaaataccagctgtcccctacagtgaatatgccccaagatgacactgtcattatagaagatgacaggttgccagtgcttcctccacatctctctgaccagtcctcttccagctcccatgatgatgtggggtttgtgacggcagatgctggtacttgggccaaggctgcaatcagtgattcagccgactgctctttgagtccagatgttgatccagttcttgcttttcaacgagaaggatttggacgtcagagtatgtcagaaaaacgcacaaagcaattttcagatgccagtcaattggatttcgttaaaacacgaaaatcaaaaagcatggatttaggtatagctgacgagactaaactcaatacagtggatgaccagaaagcaggttctcccagcagagatgtgggtccttccctgggtctgaagaagtcaagctcgttggagagtctgcagaccgcagttgccgaggtgactttgaatggggatattcctttccatcgtccacggccgcggataatcagaggcaggggatgcaatgagagcttcagagctgccatcgacaaatcttatgataaacccgcggtagatgatgatgatgaaggcatggagaccttggaagaagacacagaagaaagttcaagatcagggagagagtctgtatccacagccagtgatcagccttcccactctctggagagacaaatgaatggaaaccaagagaaaggtgataagactgatagaaaaaaggataaaactggaaaagaaaagaagaaagatagagataaggagaaggataaaatgaaagccaagaagggaatgctgaagggcttgggagacatgttcaggattcaagccaaaactcgagaatttagggaacgacaagctcgagagcgtgactatgctgaaattcaagattttcatcggacatttggctgtgatgatgagttaatgtatgggggagtttcttcttatgaaggttccatggctctcaacgctagacctcagagcccacgagaagggcatatgatggatgctttgtatgcccaagtcaagaagccgcggaattccaaaccctcacctgtagacagtaacagatcaactcctagcaatcatgatcggatacagcgtctgaggcaagaatttcagcaagcaaagcaagatgaagatgtagaagatcgtcggcggacctatagttttgagcaaccctggccgaacgcacggccggcgacgcagagcgggcgacactcggtgtccgtggaggtgcagatgcagcggcagcggcaggaggagcgcgagagctcccagcaggcccagcgccagtacagctctctgcctcggcaaagcaggaaaaatgccagctcggtctcccaggactcttgggagcagaactactcccctggggaaggcttccagagtgccaaagagaaccccaggtactccagctaccaaggctccaggaacggctacctgggaggacatggcttcaacgccagggtcatgctggaaactcaggagctccttcgccaggaacagaggcggaaggagcagcagatgaagaagcagcctccttccgaggggcccagcaactatgactcgtataagaaagtccaggaccccagttacgcccctcccaaggggcccttccggcaagatgtgcccccctccccttctcaggttgcgaggctgaacagacttcagactcctgagaaagggaggcccttctattcctgagcacgcaaataacggatgcttcatgtcgcgcaataaaagacattttcctatgaagacttgtattttgggagtttttttaaaacctcgatggtactatggagtatttctgttgttggtatcagtgcctttaagcggtgtaggcaaagaaatggaaggccttaatgtctttgccactatgtctcaagtgtctgtttcatggaaggatttcccaccctgtgacaatcatctgtttgaggtgttcatatgctctgcgcctctccacagtaccaggaatctcggccctactcatgagttgtccgcggcttggttgtaacatccctgcaccacttgcagtgacaaattcacctgaagtggaggatgacgtgcggccctgtttctccctctaagttctcttagctatgggatgacatcttagtctctggtggaggaaaagtgggcgacatacaccaaaaattggggctttctggtacttcacagcacagccatttgtcgtactttgtcatcactgtggttttctctttcctttctcagctctttgtgacgggagagtcggtcatcctattacagaagctaagccatagtccaacattgtttggtcaccatgggggtccttttgtaactgccttatgactcaacattaccaataaagtgatgatcctggtctgcgtttatacatacgcttgttcggtcctgttcctgacacgtgggttgagtcaccacagctctgtgtggggaacgtgggagacaggagtggctcctgccgggggaagctgggcctgccattggccctgtgtctatcatgaggggagagctaagaaagaaattctcctaggaagagctcatggcccagtacatcctagtaattattttaattagtttttgttctgacagcttgtcaggaagggcacagaatgggacagagataaaccagacagtcattttgatctgctctctacggtttttcaagtcagaggcaattgatgcttgtctaatgcatccacacactgcatgtctgactggcgatgccgcgctcctaagtagttctgccatgaaacataaaagacaaaggaaaagccgttacacatcacacagagaacattttcgggtcccacagcggtggtggcaggaagctcactctcgcgtcagtattagagtgtgtgtgtgggtctcggggatctcggtggctcccatcttccttcattgttctgaacatcctgtattgtaaaccatggctggggtgctaaagtgcctgtgaatcccgatgtggaaaaagctggaggtgaaagctcagcataccatgtatttactttaaaaacagaaaaaaagacatgtatggatatgtctattttttttttattggcacattgtatttttgtgttgacttgtttttagaaatgatgtgtccacacacgtacccgtgtctcttctgcatttctgtgtcatggttctgtttcttaatcacgtgcggcggtgtctaagtggtgttaccagtgtacgcgcagtgaccttggatgacagtggctctttctcacagcctcccctgagctgtgagaaacagctttctctgtacatatgcaactcctaataaaaggcatatttcttcctgtt

SEQ ID NO: 163636 - DNA, 3518 bp, Homo sapiens
  Payload ID: 12225
  Gene Symbol: PARD3
  Gene Name: par-3 family cell polarity regulator
  Uniprot ID: Q8TEW0
  ENST ID: ENST00000340077
  CDS Start-End: 331-3426
cccagcggccccgagcgagcgccagcgccacacagccccgggcagccgccggcgagcgcgccgcgacgccgaacaggtggccggaggctgcgggcgccgcggcggggagaggcgaggcaagccccgggcgaagcgaggcgaggcgagggcggccgggccgggcatgcgagctgagcggccccccggcgtcgccgccgcctgcccgcgcccctagccgcccgcgcgcccgagtccccagcggctcctccgcgcccagcgtcctcggtcccggcctcggctgctccggctgcgctcggcgaggggcgcgggcccgcccgcggcggcggcggcatgaaagtgaccgtgtgcttcggacggacccgggtggtcgtgccgtgcggggacggccacatgaaagttttcagcctcatccagcaggcggtgacccgctaccggaaggccatcgccaaggatccaaactactggatacaggtgcatcgcttggaacatggagatggaggaatactagaccttgatgacattctttgtgatgtagcagacgataaagacagactggtagcagtgtttgatgagcaggatccacatcacggaggtgatggcaccagtgccagttccacgggtacccagagcccagagatatttggtagtgagcttggcaccaacaatgtctcagcctttcagccttaccaagcaacaagtgaaattgaggtcacaccttcagtccttcgagcaaatatgcctcttcatgttcgacgcagtagtgacccagctctaattggcctctccacttctgtcagtgatagtaatttttcctctgaagagccttcaaggaaaaatcccacacgctggtcaacaacagctggcttcctcaagcagaacactgctgggagtcctaaaacctgcgacaggaagaaagatgaaaactacagaagcctcccgcgggatactagtaactggtctaaccaatttcagagagacaatgctcgctcgtctctgagtgccagtcacccaatggtgggcaagtggctggagaaacaagaacaggatgaggatgggacagaagaggataacagtcgtgttgaacctgttggacatgctgacacgggtttggagcatatacccaacttttctctggatgatatggtaaagctcgtagaagtccccaacgatggagggcctctgggaatccacgtagtgcctttcagtgctcgaggcggcagaaccctggggttattagtaaaacgattggagaaaggtggtaaagctgaacatgaaaatctttttcgtgagaatgattgcattgtcaggattaatgatggcgaccttcgaaatagaagatttgaacaagcacaacatatgtttcgccaagccatgcgtacacccatcatttggttccatgtggttcctgcagcaaataaagagcagtatgaacaactatcccaaagtgagaagaacaattactattcaagccgttttagccctgacagccagtatattgacaacaggagtgtgaacagtgcagggcttcacacggtgcagagagcaccccgactgaaccacccgcctgagcagatagactctcactcaagactacctcatagcgcacacccctcgggaaaaccaccatccgctccagcctcggcacctcagaatgtatttagtacgactgtaagcagtggttataacaccaaaaaaataggcaagaggcttaatatccagcttaagaaaggtacagaaggtttgggattcagcatcacttccagagatgtaacaataggtggctcagctccaatctatgtgaaaaacattctcccccggggggcggccattcaggatggccgacttaaggcaggagacagacttatagaggtaaatggagtagatttagtgggcaaatcccaagaggaagttgtttcgctgttgagaagcaccaagatggaaggaactgtgagccttctggtctttcgccaggaagacgccttccacccaagggaactgaatgcagagccaagccagatgcagattccaaaagaaacgaaagcagaagatgaggatattgttcttacacctgatggcaccagggaatttctgacatttgaagtcccacttaatgattcaggatctgcaggccttggtgtcagtgtcaaaggtaaccggtcaaaagagaaccacgcagatttgggaatctttgtcaagtccattattaatggaggagcagcatctaaagatggaaggcttcgggtgaatgatcaactgatagcagtaaatggagaatccctgttgggcaagacaaaccaagatgccatggaaaccctaagaaggtctatgtctactgaaggcaataaacgaggaatgatccagcttattgttgcaaggagaataagcaagtgcaatgagctgaagtcacctgggagcccccctggacctgagctgcccattgaaacagcgttggatgatagagaacgaagaatttcccattccctctacagtgggattgaggggcttgatgaatcgcccagcagaaatgctgccctcagtaggataatgggtaaataccagctgtcccctacagtgaatatgccccaagatgacactgtcattatagaagatgacaggttgccagtgcttcctccacatctctctgaccagtcctcttccagctcccatgatgatgtggggtttgtgacggcagatgctggtacttgggccaaggctgcaatcagtgattcagccgactgctctttgagtccagatgttgatccagttcttgcttttcaacgagaaggatttggacgtcagagtatgtcagaaaaacgcacaaagcaattttcagatgccagtcaattggatttcgttaaaacacgaaaatcaaaaagcatggatttaggtatagctgacgagactaaactcaatacagtggatgaccagaaagcaggttctcccagcagagatgtgggtccttccctgggtctgaagaagtcaagctcgttggagagtctgcagaccgcagttgccgaggtgactttgaatggggatattcctttccatcgtccacggccgcggataatcagaggcaggggatgcaatgagagcttcagagctgccatcgacaaatcttatgataaacccgcggtagatgatgatgatgaaggcatggagaccttggaagaagacacagaagaaagttcaagatcagggagagagtctgtatccacagccagtgatcagccttcccactctctggagagacaaatgaatggaaaccaagagaaaggtgataagactgatagaaaaaaggataaaactggaaaagaaaagaagaaagatagagataaggagaaggataaaatgaaagccaagaagggaatgctgaagggcttgggagacatgttcagccttgccaaactgaagcccgagaagagatgaacaacaaagcgattcaaaacatgtcttgaacagcacatattgcacagttgttgttttttttaaacaaacaataaatttacttttaatgaatt

SEQ ID NO: 163637 - DNA, 799 bp, Homo sapiens
  Payload ID: 12225
  Gene Symbol: PARD3
  Gene Name: par-3 family cell polarity regulator
  ENST ID: ENST00000374768
  CDS Start-End: 16-555
gcagagccaagccagatgcagattccaaaagaaacgaaagcagaagatgaggatattgttcttacacctgatggcaccagggaatttctgacatttgaagtcccacttaatgattcaggatctgcaggccttggtgtcagtgtcaaaggtaaccggtcaaaagagaaccacgcagatttgggaatctttgtcaagtccattattaatggaggagcagcatctaaagatggaaggcttcgggtgaatgatcaactgatagcagtaaatggagaatccctgttgggcaagacaaaccaagatgccatggaaaccctaagaaggtctatgtctactgaaggcaataaacgaggaatgatccagcttattgttgcaaggagaataagcaagtgcaatgagctgaagtcacctgggagcccccctggacctgagctgcccattgaaacagcgttggatgatagagaacgaagaatttcccattccctctacagtgggattgaggggcttgatgaatcgcccagcagaaatgctgccctcagtaggataatgggaacataggacttgccatactgaatcagaccattggtccaccagttcctgtaacctgcgtcctgcctccaatccctgatgcttcagaggaaggcgaaaaactaaaactaaaactcaaaccaaaaaaatccctaaattcagctagtgaccttttgaaatgctgtatatatgagttgaagagtcattcattttcttcctagtctgttgccccgattttgttagctacagcttcattagtcctcttcggtttgca

SEQ ID NO: 163638 - DNA, 3420 bp, Homo sapiens
  Payload ID: 12225
  Gene Symbol: PARD3
  Gene Name: par-3 family cell polarity regulator
  ENST ID: ENST00000374773
  CDS Start-End: 327-3332
gcggccccgagcgagcgccagcgccacacagccccgggcagccgccggcgagcgcgccgcgacgccgaacaggtggccggaggctgcgggcgccgcggcggggagaggcgaggcaagccccgggcgaagcgaggcgaggcgagggcggccgggccgggcatgcgagctgagcggccccccggcgtcgccgccgcctgcccgcgcccctagccgcccgcgcgcccgagtccccagcggctcctccgcgcccagcgtcctcggtcccggcctcggctgctccggctgcgctcggcgaggggcgcgggcccgcccgcggcggcggcggcatgaaagtgaccgtgtgcttcggacggacccgggtggtcgtgccgtgcggggacggccacatgaaagttttcagcctcatccagcaggcggtgacccgctaccggaaggccatcgccaaggatccaaactactggatacaggtgcatcgcttggaacatggagatggaggaatactagaccttgatgacattctttgtgatgtagcagacgataaagacagactggtagcagtgtttgatgagcaggatccacatcacggaggtgatggcaccagtgccagttccacgggtacccagagcccagagatatttggtagtgagcttggcaccaacaatgtctcagcctttcagccttaccaagcaacaagtgaaattgaggtcacaccttcagtccttcgagcaaatatgcctcttcatgttcgacgcagtagtgacccagctctaattggcctctccacttctgtcagtgatagtaatttttcctctgaagagccttcaaggaaaaatcccacacgctggtcaacaacagctggcttcctcaagcagaacactgctgggagtcctaaaacctgcgacaggaagaaagatgaaaactacagaagcctcccgcgggatactagtaactggtctaaccaatttcagagagacaatgctcgctcgtctctgagtgccagtcacccaatggtgggcaagtggctggagaaacaagaacaggatgaggatgggacagaagaggataacagtcgtgttgaacctgttggacatgctgacacgggtttggagcatatacccaacttttctctggatgatatggtaaagctcgtagaagtccccaacgatggagggcctctgggaatccacgtagtgcctttcagtgctcgaggcggcagaaccctggggttattagtaaaacgattggagaaaggtggtaaagctgaacatgaaaatctttttcgtgagaatgattgcattgtcaggattaatgatggcgaccttcgaaatagaagatttgaacaagcacaacatatgtttcgccaagccatgcgtacacccatcatttggttccatgtggttcctgcagcaaataaagagcagtatgaacaactatcccaaagtgagaagaacaattactattcaagccgttttagccctgacagccagtatattgacaacaggagtgtgaacagtgcagggcttcacacggtgcagagagcaccccgactgaaccacccgcctgagcagatagactctcactcaagactacctcatagcgcacacccctcgggaaaaccaccatccgctccagcctcggcacctcagaatgtatttagtacgactgtaagcagtggttataacaccaaaaaaataggcaagaggcttaatatccagcttaagaaaggtacagaaggtttgggattcagcatcacttccagagatgtaacaataggtggctcagctccaatctatgtgaaaaacattctcccccggggggcggccattcaggatggccgacttaaggcaggagacagacttatagaggtaaatggagtagatttagtgggcaaatcccaagaggaagttgtttcgctgttgagaagcaccaagatggaaggaactgtgagccttctggtctttcgccaggaagacgccttccacccaagggaactgaatgcagagccaagccagatgcagattccaaaagaaacgaaagcagaagatgaggatattgttcttacacctgatggcaccagggaatttctgacatttgaagtcccacttaatgattcaggatctgcaggccttggtgtcagtgtcaaaggtaaccggtcaaaagagaaccacgcagatttgggaatctttgtcaagtccattattaatggaggagcagcatctaaagatggaaggcttcgggtgaatgatcaactgatagcagtaaatggagaatccctgttgggcaagacaaaccaagatgccatggaaaccctaagaaggtctatgtctactgaaggcaataaacgaggaatgatccagcttattgttgcaaggagaataagcaagtgcaatgagctgaagtcacctgggagcccccctggacctgagctgcccattgaaacagcgttggatgatagagaacgaagaatttcccattccctctacagtgggattgaggggcttgatgaatcgcccagcagaaatgctgccctcagtaggataatgggtaaataccagctgtcccctacagtgaatatgccccaagatgacactgtcattatagaagatgacaggttgccagtgcttcctccacatctctctgaccagtcctcttccagctcccatgatgatgtggggtttgtgacggcagatgctggtacttgggccaaggctgcaatcagtgattcagccgactgctctttgagtccagatgttgatccagttcttgcttttcaacgagaaggatttggacgtcagatagctgacgagactaaactcaatacagtggatgaccagaaagcaggttctcccagcagagatgtgggtccttccctgggtctgaagaagtcaagctcgttggagagtctgcagaccgcagttgccgaggtgactttgaatggggatattcctttccatcgtccacggccgcggataatcagaggcaggggatgcaatgagagcttcagagctgccatcgacaaatcttatgataaacccgcggtagatgatgatgatgaaggcatggagaccttggaagaagacacagaagaaagttcaagatcagggagagagtctgtatccacagccagtgatcagccttcccactctctggagagacaaatgaatggaaaccaagagaaaggtgataagactgatagaaaaaaggataaaactggaaaagaaaagaagaaagatagagataaggagaaggataaaatgaaagccaagaagggaatgctgaagggcttgggagacatgttcagccttgccaaactgaagcccgagaagagatgaacaacaaagcgattcaaaacatgtcttgaacagcacatattgcacagttgttgttttttttaaacaaacaataaatttacttttaatg

SEQ ID NO: 163639 - DNA, 3389 bp, Homo sapiens
  Payload ID: 12225
  Gene Symbol: PARD3
  Gene Name: par-3 family cell polarity regulator
  Uniprot ID: Q8TEW0
  ENST ID: ENST00000374776
  CDS Start-End: 327-3293
gcggccccgagcgagcgccagcgccacacagccccgggcagccgccggcgagcgcgccgcgacgccgaacaggtggccggaggctgcgggcgccgcggcggggagaggcgaggcaagccccgggcgaagcgaggcgaggcgagggcggccgggccgggcatgcgagctgagcggccccccggcgtcgccgccgcctgcccgcgcccctagccgcccgcgcgcccgagtccccagcggctcctccgcgcccagcgtcctcggtcccggcctcggctgctccggctgcgctcggcgaggggcgcgggcccgcccgcggcggcggcggcatgaaagtgaccgtgtgcttcggacggacccgggtggtcgtgccgtgcggggacggccacatgaaagttttcagcctcatccagcaggcggtgacccgctaccggaaggccatcgccaaggatccaaactactggatacaggtgcatcgcttggaacatggagatggaggaatactagaccttgatgacattctttgtgatgtagcagacgataaagacagactggtagcagtgtttgatgagcaggatccacatcacggaggtgatggcaccagtgccagttccacgggtacccagagcccagagatatttggtagtgagcttggcaccaacaatgtctcagcctttcagccttaccaagcaacaagtgaaattgaggtcacaccttcagtccttcgagcaaatatgcctcttcatgttcgacgcagtagtgacccagctctaattggcctctccacttctgtcagtgatagtaatttttcctctgaagagccttcaaggaaaaatcccacacgctggtcaacaacagctggcttcctcaagcagaacactgctgggagtcctaaaacctgcgacaggaagaaagatgaaaactacagaagcctcccgcgggatactagtaactggtctaaccaatttcagagagacaatgctcgctcgtctctgagtgccagtcacccaatggtgggcaagtggctggagaaacaagaacaggatgaggatgggacagaagaggataacagtcgtgttgaacctgttggacatgctgacacgggtttggagcatatacccaacttttctctggatgatatggtaaagctcgtagaagtccccaacgatggagggcctctgggaatccacgtagtgcctttcagtgctcgaggcggcagaaccctggggttattagtaaaacgattggagaaaggtggtaaagctgaacatgaaaatctttttcgtgagaatgattgcattgtcaggattaatgatggcgaccttcgaaatagaagatttgaacaagcacaacatatgtttcgccaagccatgcgtacacccatcatttggttccatgtggttcctgcagcaaataaagagcagtatgaacaactatcccaaagtgagaagaacaattactattcaagccgttttagccctgacagccagtatattgacaacaggagtgtgaacagtgcagggcttcacacggtgcagagagcaccccgactgaaccacccgcctgagcagatagactctcactcaagactacctcatagcgcacacccctcgggaaaaccaccatccgctccagcctcggcacctcagaatgtatttagtacgactgtaagcagtggttataacaccaaaaaaataggcaagaggcttaatatccagcttaagaaaggtacagaaggtttgggattcagcatcacttccagagatgtaacaataggtggctcagctccaatctatgtgaaaaacattctcccccggggggcggccattcaggatggccgacttaaggcaggagacagacttatagaggtaaatggagtagatttagtgggcaaatcccaagaggaagttgtttcgctgttgagaagcaccaagatggaaggaactgtgagccttctggtctttcgccaggaagacgccttccacccaagggaactgaaagcagaagatgaggatattgttcttacacctgatggcaccagggaatttctgacatttgaagtcccacttaatgattcaggatctgcaggccttggtgtcagtgtcaaaggtaaccggtcaaaagagaaccacgcagatttgggaatctttgtcaagtccattattaatggaggagcagcatctaaagatggaaggcttcgggtgaatgatcaactgatagcagtaaatggagaatccctgttgggcaagacaaaccaagatgccatggaaaccctaagaaggtctatgtctactgaaggcaataaacgaggaatgatccagcttattgttgcaaggagaataagcaagtgcaatgagctgaagtcacctgggagcccccctggacctgagctgcccattgaaacagcgttggatgatagagaacgaagaatttcccattccctctacagtgggattgaggggcttgatgaatcgcccagcagaaatgctgccctcagtaggataatgggtaaataccagctgtcccctacagtgaatatgccccaagatgacactgtcattatagaagatgacaggttgccagtgcttcctccacatctctctgaccagtcctcttccagctcccatgatgatgtggggtttgtgacggcagatgctggtacttgggccaaggctgcaatcagtgattcagccgactgctctttgagtccagatgttgatccagttcttgcttttcaacgagaaggatttggacgtcagatagctgacgagactaaactcaatacagtggatgaccagaaagcaggttctcccagcagagatgtgggtccttccctgggtctgaagaagtcaagctcgttggagagtctgcagaccgcagttgccgaggtgactttgaatggggatattcctttccatcgtccacggccgcggataatcagaggcaggggatgcaatgagagcttcagagctgccatcgacaaatcttatgataaacccgcggtagatgatgatgatgaaggcatggagaccttggaagaagacacagaagaaagttcaagatcagggagagagtctgtatccacagccagtgatcagccttcccactctctggagagacaaatgaatggaaaccaagagaaaggtgataagactgatagaaaaaaggataaaactggaaaagaaaagaagaaagatagagataaggagaaggataaaatgaaagccaagaagggaatgctgaagggcttgggagacatgttcagccttgccaaactgaagcccgagaagagatgaacaacaaagcgattcaaaacatgtcttgaacagcacatattgcacagttgttgttttttttaaacaaacaataaatttacttttaatgaattctta

SEQ ID NO: 163640 - DNA, 5996 bp, Homo sapiens
  Payload ID: 12225
  Gene Symbol: PARD3
  Gene Name: par-3 family cell polarity regulator
  Uniprot ID: Q8TEW0
  ENST ID: ENST00000374788
  CDS Start-End: 327-4388
gcggccccgagcgagcgccagcgccacacagccccgggcagccgccggcgagcgcgccgcgacgccgaacaggtggccggaggctgcgggcgccgcggcggggagaggcgaggcaagccccgggcgaagcgaggcgaggcgagggcggccgggccgggcatgcgagctgagcggccccccggcgtcgccgccgcctgcccgcgcccctagccgcccgcgcgcccgagtccccagcggctcctccgcgcccagcgtcctcggtcccggcctcggctgctccggctgcgctcggcgaggggcgcgggcccgcccgcggcggcggcggcatgaaagtgaccgtgtgcttcggacggacccgggtggtcgtgccgtgcggggacggccacatgaaagttttcagcctcatccagcaggcggtgacccgctaccggaaggccatcgccaaggatccaaactactggatacaggtgcatcgcttggaacatggagatggaggaatactagaccttgatgacattctttgtgatgtagcagacgataaagacagactggtagcagtgtttgatgagcaggatccacatcacggaggtgatggcaccagtgccagttccacgggtacccagagcccagagatatttggtagtgagcttggcaccaacaatgtctcagcctttcagccttaccaagcaacaagtgaaattgaggtcacaccttcagtccttcgagcaaatatgcctcttcatgttcgacgcagtagtgacccagctctaattggcctctccacttctgtcagtgatagtaatttttcctctgaagagccttcaaggaaaaatcccacacgctggtcaacaacagctggcttcctcaagcagaacactgctgggagtcctaaaacctgcgacaggaagaaagatgaaaactacagaagcctcccgcgggatactagtaactggtctaaccaatttcagagagacaatgctcgctcgtctctgagtgccagtcacccaatggtgggcaagtggctggagaaacaagaacaggatgaggatgggacagaagaggataacagtcgtgttgaacctgttggacatgctgacacgggtttggagcatatacccaacttttctctggatgatatggtaaagctcgtagaagtccccaacgatggagggcctctgggaatccacgtagtgcctttcagtgctcgaggcggcagaaccctggggttattagtaaaacgattggagaaaggtggtaaagctgaacatgaaaatctttttcgtgagaatgattgcattgtcaggattaatgatggcgaccttcgaaatagaagatttgaacaagcacaacatatgtttcgccaagccatgcgtacacccatcatttggttccatgtggttcctgcagcaaataaagagcagtatgaacaactatcccaaagtgagaagaacaattactattcaagccgttttagccctgacagccagtatattgacaacaggagtgtgaacagtgcagggcttcacacggtgcagagagcaccccgactgaaccacccgcctgagcagatagactctcactcaagactacctcatagcgcacacccctcgggaaaaccaccatccgctccagcctcggcacctcagaatgtatttagtacgactgtaagcagtggttataacaccaaaaaaataggcaagaggcttaatatccagcttaagaaaggtacagaaggtttgggattcagcatcacttccagagatgtaacaataggtggctcagctccaatctatgtgaaaaacattctcccccggggggcggccattcaggatggccgacttaaggcaggagacagacttatagaggtaaatggagtagatttagtgggcaaatcccaagaggaagttgtttcgctgttgagaagcaccaagatggaaggaactgtgagccttctggtctttcgccaggaagacgccttccacccaagggaactgaatgcagagccaagccagatgcagattccaaaagaaacgaaagcagaagatgaggatattgttcttacacctgatggcaccagggaatttctgacatttgaagtcccacttaatgattcaggatctgcaggccttggtgtcagtgtcaaaggtaaccggtcaaaagagaaccacgcagatttgggaatctttgtcaagtccattattaatggaggagcagcatctaaagatggaaggcttcgggtgaatgatcaactgatagcagtaaatggagaatccctgttgggcaagacaaaccaagatgccatggaaaccctaagaaggtctatgtctactgaaggcaataaacgaggaatgatccagcttattgttgcaaggagaataagcaagtgcaatgagctgaagtcacctgggagcccccctggacctgagctgcccattgaaacagcgttggatgatagagaacgaagaatttcccattccctctacagtgggattgaggggcttgatgaatcgcccagcagaaatgctgccctcagtaggataatgggtaaataccagctgtcccctacagtgaatatgccccaagatgacactgtcattatagaagatgacaggttgccagtgcttcctccacatctctctgaccagtcctcttccagctcccatgatgatgtggggtttgtgacggcagatgctggtacttgggccaaggctgcaatcagtgattcagccgactgctctttgagtccagatgttgatccagttcttgcttttcaacgagaaggatttggacgtcagagtatgtcagaaaaacgcacaaagcaattttcagatgccagtcaattggatttcgttaaaacacgaaaatcaaaaagcatggatttaggtatagctgacgagactaaactcaatacagtggatgaccagaaagcaggttctcccagcagagatgtgggtccttccctgggtctgaagaagtcaagctcgttggagagtctgcagaccgcagttgccgaggtgactttgaatggggatattcctttccatcgtccacggccgcggataatcagaggcaggggatgcaatgagagcttcagagctgccatcgacaaatcttatgataaacccgcggtagatgatgatgatgaaggcatggagaccttggaagaagacacagaagaaagttcaagatcagggagagagtctgtatccacagccagtgatcagccttcccactctctggagagacaaatgaatggaaaccaagagaaaggtgataagactgatagaaaaaaggataaaactggaaaagaaaagaagaaagatagagataaggagaaggataaaatgaaagccaagaagggaatgctgaagggcttgggagacatgttcaggtttggcaaacatcgaaaagatgacaagattgagaaaacgggtaaaataaaaatacaggaatcctttacatcagaagaggagaggatacgaatgaagcaggagcaggagaggattcaagccaaaactcgagaatttagggaacgacaagctcgagagcgtgactatgctgaaattcaagattttcatcggacatttggctgtgatgatgagttaatgtatgggggagtttcttcttatgaaggttccatggctctcaacgctagacctcagagcccacgagaagggcatatgatggatgctttgtatgcccaagtcaagaagccgcggaattccaaaccctcacctgtagacagtaacagatcaactcctagcaatcatgatcggatacagcgtctgaggcaagaatttcagcaagcaaagcaagatgaagatgtagaagatcgtcggcggacctatagttttgagcaaccctggccgaacgcacggccggcgacgcagagcgggcgacactcggtgtccgtggaggtgcagatgcagcggcagcggcaggaggagcgcgagagctcccagcaggcccagcgccagtacagctctctgcctcggcaaagcaggaaaaatgccagctcggtctcccaggactcttgggagcagaactactcccctggggaaggcttccagagtgccaaagagaaccccaggtactccagctaccaaggctccaggaacggctacctgggaggacatggcttcaacgccagggtcatgctggaaactcaggagctccttcgccaggaacagaggcggaaggagcagcagatgaagaagcagcctccttccgaggggcccagcaactatgactcgtataagaaagtccaggaccccagttacgcccctcccaaggggcccttccggcaagatgtgcccccctccccttctcaggttgcgaggctgaacagacttcagactcctgagaaagggaggcccttctattcctgagcacgcaaataacggatgcttcatgtcgcgcaataaaagacattttcctatgaagacttgtattttgggagtttttttaaaacctcgatggtactatggagtatttctgttgttggtatcagtgcctttaagcggtgtaggcaaagaaatggaaggccttaatgtctttgccactatgtctcaagtgtctgtttcatggaaggatttcccaccctgtgacaatcatctgtttgaggtgttcatatgctctgcgcctctccacagtaccaggaatctcggccctactcatgagttgtccgcggcttggttgtaacatccctgcaccacttgcagtgacaaattcacctgaagtggaggatgacgtgcggccctgtttctccctctaagttctcttagctatgggatgacatcttagtctctggtggaggaaaagtgggcgacatacaccaaaaattggggctttctggtacttcacagcacagccatttgtcgtactttgtcatcactgtggttttctctttcctttctcagctctttgtgacgggagagtcggtcatcctattacagaagctaagccatagtccaacattgtttggtcaccatgggggtccttttgtaactgccttatgactcaacattaccaataaagtgatgatcctggtctgcgtttatacatacgcttgttcggtcctgttcctgacacgtgggttgagtcaccacagctctgtgtggggaacgtgggagacaggagtggctcctgccgggggaagctgggcctgccattggccctgtgtctatcatgaggggagagctaagaaagaaattctcctaggaagagctcatggcccagtacatcctagtaattattttaattagtttttgttctgacagcttgtcaggaagggcacagaatgggacagagataaaccagacagtcattttgatctgctctctacggtttttcaagtcagaggcaattgatgcttgtctaatgcatccacacactgcatgtctgactggcgatgccgcgctcctaagtagttctgccatgaaacataaaagacaaaggaaaagccgttacacatcacacagagaacattttcgggtcccacagcggtggtggcaggaagctcactctcgcgtcagtattagagtgtgtgtgtgggtctcggggatctcggtggctcccatcttccttcattgttctgaacatcctgtattgtaaaccatggctggggtgctaaagtgcctgtgaatcccgatgtggaaaaagctggaggtgaaagctcagcataccatgtatttactttaaaaacagaaaaaaagacatgtatggatatgtctattttttttttattggcacattgtatttttgtgttgacttgtttttagaaatgatgtgtccacacacgtacccgtgtctcttctgcatttctgtgtcatggttctgtttcttaatcacgtgcggcggtgtctaagtggtgttaccagtgtacgcgcagtgaccttggatgacagtggctctttctcacagcctcccctgagctgtgagaaacagctttctctgtacatatgcaactcctaataaaaggcatatttcttcctgtt

SEQ ID NO: 163641 - DNA, 6005 bp, Homo sapiens
  Payload ID: 12225
  Gene Symbol: PARD3
  Gene Name: par-3 family cell polarity regulator
  Uniprot ID: Q8TEW0
  ENST ID: ENST00000374789
  CDS Start-End: 327-4397
gcggccccgagcgagcgccagcgccacacagccccgggcagccgccggcgagcgcgccgcgacgccgaacaggtggccggaggctgcgggcgccgcggcggggagaggcgaggcaagccccgggcgaagcgaggcgaggcgagggcggccgggccgggcatgcgagctgagcggccccccggcgtcgccgccgcctgcccgcgcccctagccgcccgcgcgcccgagtccccagcggctcctccgcgcccagcgtcctcggtcccggcctcggctgctccggctgcgctcggcgaggggcgcgggcccgcccgcggcggcggcggcatgaaagtgaccgtgtgcttcggacggacccgggtggtcgtgccgtgcggggacggccacatgaaagttttcagcctcatccagcaggcggtgacccgctaccggaaggccatcgccaaggatccaaactactggatacaggtgcatcgcttggaacatggagatggaggaatactagaccttgatgacattctttgtgatgtagcagacgataaagacagactggtagcagtgtttgatgagcaggatccacatcacggaggtgatggcaccagtgccagttccacgggtacccagagcccagagatatttggtagtgagcttggcaccaacaatgtctcagcctttcagccttaccaagcaacaagtgaaattgaggtcacaccttcagtccttcgagcaaatatgcctcttcatgttcgacgcagtagtgacccagctctaattggcctctccacttctgtcagtgatagtaatttttcctctgaagagccttcaaggaaaaatcccacacgctggtcaacaacagctggcttcctcaagcagaacactgctgggagtcctaaaacctgcgacaggaagaaagatgaaaactacagaagcctcccgcgggatactagtaactggtctaaccaatttcagagagacaatgctcgctcgtctctgagtgccagtcacccaatggtgggcaagtggctggagaaacaagaacaggatgaggatgggacagaagaggataacagtcgtgttgaacctgttggacatgctgacacgggtttggagcatatacccaacttttctctggatgatatggtaaagctcgtagaagtccccaacgatggagggcctctgggaatccacgtagtgcctttcagtgctcgaggcggcagaaccctggggttattagtaaaacgattggagaaaggtggtaaagctgaacatgaaaatctttttcgtgagaatgattgcattgtcaggattaatgatggcgaccttcgaaatagaagatttgaacaagcacaacatatgtttcgccaagccatgcgtacacccatcatttggttccatgtggttcctgcagcaaataaagagcagtatgaacaactatcccaaagtgagaagaacaattactattcaagccgttttagccctgacagccagtatattgacaacaggagtgtgaacagtgcagggcttcacacggtgcagagagcaccccgactgaaccacccgcctgagcagatagactctcactcaagactacctcatagcgcacacccctcgggaaaaccaccatccgctccagcctcggcacctcagaatgtatttagtacgactgtaagcagtggttataacaccaaaaaaataggcaagaggcttaatatccagcttaagaaaggtacagaaggtttgggattcagcatcacttccagagatgtaacaataggtggctcagctccaatctatgtgaaaaacattctcccccggggggcggccattcaggatggccgacttaaggcaggagacagacttatagaggtaaatggagtagatttagtgggcaaatcccaagaggaagttgtttcgctgttgagaagcaccaagatggaaggaactgtgagccttctggtctttcgccaggaagacgccttccacccaagggaactgaatgcagagccaagccagatgcagattccaaaagaaacgaaagcagaagatgaggatattgttcttacacctgatggcaccagggaatttctgacatttgaagtcccacttaatgattcaggatctgcaggccttggtgtcagtgtcaaaggtaaccggtcaaaagagaaccacgcagatttgggaatctttgtcaagtccattattaatggaggagcagcatctaaagatggaaggcttcgggtgaatgatcaactgatagcagtaaatggagaatccctgttgggcaagacaaaccaagatgccatggaaaccctaagaaggtctatgtctactgaaggcaataaacgaggaatgatccagcttattgttgcaaggagaataagcaagtgcaatgagctgaagtcacctgggagcccccctggacctgagctgcccattgaaacagcgttggatgatagagaacgaagaatttcccattccctctacagtgggattgaggggcttgatgaatcgcccagcagaaatgctgccctcagtaggataatgggtgagtcaggtaaataccagctgtcccctacagtgaatatgccccaagatgacactgtcattatagaagatgacaggttgccagtgcttcctccacatctctctgaccagtcctcttccagctcccatgatgatgtggggtttgtgacggcagatgctggtacttgggccaaggctgcaatcagtgattcagccgactgctctttgagtccagatgttgatccagttcttgcttttcaacgagaaggatttggacgtcagagtatgtcagaaaaacgcacaaagcaattttcagatgccagtcaattggatttcgttaaaacacgaaaatcaaaaagcatggatttaggtatagctgacgagactaaactcaatacagtggatgaccagaaagcaggttctcccagcagagatgtgggtccttccctgggtctgaagaagtcaagctcgttggagagtctgcagaccgcagttgccgaggtgactttgaatggggatattcctttccatcgtccacggccgcggataatcagaggcaggggatgcaatgagagcttcagagctgccatcgacaaatcttatgataaacccgcggtagatgatgatgatgaaggcatggagaccttggaagaagacacagaagaaagttcaagatcagggagagagtctgtatccacagccagtgatcagccttcccactctctggagagacaaatgaatggaaaccaagagaaaggtgataagactgatagaaaaaaggataaaactggaaaagaaaagaagaaagatagagataaggagaaggataaaatgaaagccaagaagggaatgctgaagggcttgggagacatgttcaggtttggcaaacatcgaaaagatgacaagattgagaaaacgggtaaaataaaaatacaggaatcctttacatcagaagaggagaggatacgaatgaagcaggagcaggagaggattcaagccaaaactcgagaatttagggaacgacaagctcgagagcgtgactatgctgaaattcaagattttcatcggacatttggctgtgatgatgagttaatgtatgggggagtttcttcttatgaaggttccatggctctcaacgctagacctcagagcccacgagaagggcatatgatggatgctttgtatgcccaagtcaagaagccgcggaattccaaaccctcacctgtagacagtaacagatcaactcctagcaatcatgatcggatacagcgtctgaggcaagaatttcagcaagcaaagcaagatgaagatgtagaagatcgtcggcggacctatagttttgagcaaccctggccgaacgcacggccggcgacgcagagcgggcgacactcggtgtccgtggaggtgcagatgcagcggcagcggcaggaggagcgcgagagctcccagcaggcccagcgccagtacagctctctgcctcggcaaagcaggaaaaatgccagctcggtctcccaggactcttgggagcagaactactcccctggggaaggcttccagagtgccaaagagaaccccaggtactccagctaccaaggctccaggaacggctacctgggaggacatggcttcaacgccagggtcatgctggaaactcaggagctccttcgccaggaacagaggcggaaggagcagcagatgaagaagcagcctccttccgaggggcccagcaactatgactcgtataagaaagtccaggaccccagttacgcccctcccaaggggcccttccggcaagatgtgcccccctccccttctcaggttgcgaggctgaacagacttcagactcctgagaaagggaggcccttctattcctgagcacgcaaataacggatgcttcatgtcgcgcaataaaagacattttcctatgaagacttgtattttgggagtttttttaaaacctcgatggtactatggagtatttctgttgttggtatcagtgcctttaagcggtgtaggcaaagaaatggaaggccttaatgtctttgccactatgtctcaagtgtctgtttcatggaaggatttcccaccctgtgacaatcatctgtttgaggtgttcatatgctctgcgcctctccacagtaccaggaatctcggccctactcatgagttgtccgcggcttggttgtaacatccctgcaccacttgcagtgacaaattcacctgaagtggaggatgacgtgcggccctgtttctccctctaagttctcttagctatgggatgacatcttagtctctggtggaggaaaagtgggcgacatacaccaaaaattggggctttctggtacttcacagcacagccatttgtcgtactttgtcatcactgtggttttctctttcctttctcagctctttgtgacgggagagtcggtcatcctattacagaagctaagccatagtccaacattgtttggtcaccatgggggtccttttgtaactgccttatgactcaacattaccaataaagtgatgatcctggtctgcgtttatacatacgcttgttcggtcctgttcctgacacgtgggttgagtcaccacagctctgtgtggggaacgtgggagacaggagtggctcctgccgggggaagctgggcctgccattggccctgtgtctatcatgaggggagagctaagaaagaaattctcctaggaagagctcatggcccagtacatcctagtaattattttaattagtttttgttctgacagcttgtcaggaagggcacagaatgggacagagataaaccagacagtcattttgatctgctctctacggtttttcaagtcagaggcaattgatgcttgtctaatgcatccacacactgcatgtctgactggcgatgccgcgctcctaagtagttctgccatgaaacataaaagacaaaggaaaagccgttacacatcacacagagaacattttcgggtcccacagcggtggtggcaggaagctcactctcgcgtcagtattagagtgtgtgtgtgggtctcggggatctcggtggctcccatcttccttcattgttctgaacatcctgtattgtaaaccatggctggggtgctaaagtgcctgtgaatcccgatgtggaaaaagctggaggtgaaagctcagcataccatgtatttactttaaaaacagaaaaaaagacatgtatggatatgtctattttttttttattggcacattgtatttttgtgttgacttgtttttagaaatgatgtgtccacacacgtacccgtgtctcttctgcatttctgtgtcatggttctgtttcttaatcacgtgcggcggtgtctaagtggtgttaccagtgtacgcgcagtgaccttggatgacagtggctctttctcacagcctcccctgagctgtgagaaacagctttctctgtacatatgcaactcctaataaaaggcatatttcttcctgtt

SEQ ID NO: 163642 - DNA, 5825 bp, Homo sapiens
  Payload ID: 12225
  Gene Symbol: PARD3
  Gene Name: par-3 family cell polarity regulator
  ENST ID: ENST00000374790
  CDS Start-End: 327-4217
gcggccccgagcgagcgccagcgccacacagccccgggcagccgccggcgagcgcgccgcgacgccgaacaggtggccggaggctgcgggcgccgcggcggggagaggcgaggcaagccccgggcgaagcgaggcgaggcgagggcggccgggccgggcatgcgagctgagcggccccccggcgtcgccgccgcctgcccgcgcccctagccgcccgcgcgcccgagtccccagcggctcctccgcgcccagcgtcctcggtcccggcctcggctgctccggctgcgctcggcgaggggcgcgggcccgcccgcggcggcggcggcatgaaagtgaccgtgtgcttcggacggacccgggtggtcgtgccgtgcggggacggccacatgaaagttttcagcctcatccagcaggcggtgacccgctaccggaaggccatcgccaaggatccaaactactggatacaggtgcatcgcttggaacatggagatggaggaatactagaccttgatgacattctttgtgatgtagcagacgataaagacagactggtagcagtgtttgatgagcaggatccacatcacggaggtgatggcaccagtgccagttccacgggtacccagagcccagagatatttggtagtgagcttggcaccaacaatgtctcagcctttcagccttaccaagcaacaagtgaaattgaggtcacaccttcagtccttcgagcaaatatgcctcttcatgttcgacgcagtagtgacccagctctaattggcctctccacttctgtcagtgatagtaatttttcctctgaagagccttcaaggaaaaatcccacacgctggtcaacaacagctggcttcctcaagcagaacactgctgggagtcctaaaacctgcgacaggaaggatgaggatgggacagaagaggataacagtcgtgttgaacctgttggacatgctgacacgggtttggagcatatacccaacttttctctggatgatatggtaaagctcgtagaagtccccaacgatggagggcctctgggaatccacgtagtgcctttcagtgctcgaggcggcagaaccctggggttattagtaaaacgattggagaaaggtggtaaagctgaacatgaaaatctttttcgtgagaatgattgcattgtcaggattaatgatggcgaccttcgaaatagaagatttgaacaagcacaacatatgtttcgccaagccatgcgtacacccatcatttggttccatgtggttcctgcagcaaataaagagcagtatgaacaactatcccaaagtgagaagaacaattactattcaagccgttttagccctgacagccagtatattgacaacaggagtgtgaacagtgcagggcttcacacggtgcagagagcaccccgactgaaccacccgcctgagcagatagactctcactcaagactacctcatagcgcacacccctcgggaaaaccaccatccgctccagcctcggcacctcagaatgtatttagtacgactgtaagcagtggttataacaccaaaaaaataggcaagaggcttaatatccagcttaagaaaggtacagaaggtttgggattcagcatcacttccagagatgtaacaataggtggctcagctccaatctatgtgaaaaacattctcccccggggggcggccattcaggatggccgacttaaggcaggagacagacttatagaggtaaatggagtagatttagtgggcaaatcccaagaggaagttgtttcgctgttgagaagcaccaagatggaaggaactgtgagccttctggtctttcgccaggaagacgccttccacccaagggaactgaaagcagaagatgaggatattgttcttacacctgatggcaccagggaatttctgacatttgaagtcccacttaatgattcaggatctgcaggccttggtgtcagtgtcaaaggtaaccggtcaaaagagaaccacgcagatttgggaatctttgtcaagtccattattaatggaggagcagcatctaaagatggaaggcttcgggtgaatgatcaactgatagcagtaaatggagaatccctgttgggcaagacaaaccaagatgccatggaaaccctaagaaggtctatgtctactgaaggcaataaacgaggaatgatccagcttattgttgcaaggagaataagcaagtgcaatgagctgaagtcacctgggagcccccctggacctgagctgcccattgaaacagcgttggatgatagagaacgaagaatttcccattccctctacagtgggattgaggggcttgatgaatcgcccagcagaaatgctgccctcagtaggataatgggtaaataccagctgtcccctacagtgaatatgccccaagatgacactgtcattatagaagatgacaggttgccagtgcttcctccacatctctctgaccagtcctcttccagctcccatgatgatgtggggtttgtgacggcagatgctggtacttgggccaaggctgcaatcagtgattcagccgactgctctttgagtccagatgttgatccagttcttgcttttcaacgagaaggatttggacgtcagagtatgtcagaaaaacgcacaaagcaattttcagatgccagtcaattggatttcgttaaaacacgaaaatcaaaaagcatggatttaggtatagctgacgagactaaactcaatacagtggatgaccagaaagcaggttctcccagcagagatgtgggtccttccctgggtctgaagaagtcaagctcgttggagagtctgcagaccgcagttgccgaggtgactttgaatggggatattcctttccatcgtccacggccgcggataatcagaggcaggggatgcaatgagagcttcagagctgccatcgacaaatcttatgataaacccgcggtagatgatgatgatgaaggcatggagaccttggaagaagacacagaagaaagttcaagatcagggagagagtctgtatccacagccagtgatcagccttcccactctctggagagacaaatgaatggaaaccaagagaaaggtgataagactgatagaaaaaaggataaaactggaaaagaaaagaagaaagatagagataaggagaaggataaaatgaaagccaagaagggaatgctgaagggcttgggagacatgttcaggtttggcaaacatcgaaaagatgacaagattgagaaaacgggtaaaataaaaatacaggaatcctttacatcagaagaggagaggatacgaatgaagcaggagcaggagaggattcaagccaaaactcgagaatttagggaacgacaagctcgagagcgtgactatgctgaaattcaagattttcatcggacatttggctgtgatgatgagttaatgtatgggggagtttcttcttatgaaggttccatggctctcaacgctagacctcagagcccacgagaagggcatatgatggatgctttgtatgcccaagtcaagaagccgcggaattccaaaccctcacctgtagacagtaacagatcaactcctagcaatcatgatcggatacagcgtctgaggcaagaatttcagcaagcaaagcaagatgaagatgtagaagatcgtcggcggacctatagttttgagcaaccctggccgaacgcacggccggcgacgcagagcgggcgacactcggtgtccgtggaggtgcagatgcagcggcagcggcaggaggagcgcgagagctcccagcaggcccagcgccagtacagctctctgcctcggcaaagcaggaaaaatgccagctcggtctcccaggactcttgggagcagaactactcccctggggaaggcttccagagtgccaaagagaaccccaggtactccagctaccaaggctccaggaacggctacctgggaggacatggcttcaacgccagggtcatgctggaaactcaggagctccttcgccaggaacagaggcggaaggagcagcagatgaagaagcagcctccttccgaggggcccagcaactatgactcgtataagaaagtccaggaccccagttacgcccctcccaaggggcccttccggcaagatgtgcccccctccccttctcaggttgcgaggctgaacagacttcagactcctgagaaagggaggcccttctattcctgagcacgcaaataacggatgcttcatgtcgcgcaataaaagacattttcctatgaagacttgtattttgggagtttttttaaaacctcgatggtactatggagtatttctgttgttggtatcagtgcctttaagcggtgtaggcaaagaaatggaaggccttaatgtctttgccactatgtctcaagtgtctgtttcatggaaggatttcccaccctgtgacaatcatctgtttgaggtgttcatatgctctgcgcctctccacagtaccaggaatctcggccctactcatgagttgtccgcggcttggttgtaacatccctgcaccacttgcagtgacaaattcacctgaagtggaggatgacgtgcggccctgtttctccctctaagttctcttagctatgggatgacatcttagtctctggtggaggaaaagtgggcgacatacaccaaaaattggggctttctggtacttcacagcacagccatttgtcgtactttgtcatcactgtggttttctctttcctttctcagctctttgtgacgggagagtcggtcatcctattacagaagctaagccatagtccaacattgtttggtcaccatgggggtccttttgtaactgccttatgactcaacattaccaataaagtgatgatcctggtctgcgtttatacatacgcttgttcggtcctgttcctgacacgtgggttgagtcaccacagctctgtgtggggaacgtgggagacaggagtggctcctgccgggggaagctgggcctgccattggccctgtgtctatcatgaggggagagctaagaaagaaattctcctaggaagagctcatggcccagtacatcctagtaattattttaattagtttttgttctgacagcttgtcaggaagggcacagaatgggacagagataaaccagacagtcattttgatctgctctctacggtttttcaagtcagaggcaattgatgcttgtctaatgcatccacacactgcatgtctgactggcgatgccgcgctcctaagtagttctgccatgaaacataaaagacaaaggaaaagccgttacacatcacacagagaacattttcgggtcccacagcggtggtggcaggaagctcactctcgcgtcagtattagagtgtgtgtgtgggtctcggggatctcggtggctcccatcttccttcattgttctgaacatcctgtattgtaaaccatggctggggtgctaaagtgcctgtgaatcccgatgtggaaaaagctggaggtgaaagctcagcataccatgtatttactttaaaaacagaaaaaaagacatgtatggatatgtctattttttttttattggcacattgtatttttgtgttgacttgtttttagaaatgatgtgtccacacacgtacccgtgtctcttctgcatttctgtgtcatggttctgtttcttaatcacgtgcggcggtgtctaagtggtgttaccagtgtacgcgcagtgaccttggatgacagtggctctttctcacagcctcccctgagctgtgagaaacagctttctctgtacatatgcaactcctaataaaaggcatatttcttcctgtt

SEQ ID NO: 163643 - DNA, 5669 bp, Homo sapiens
  Payload ID: 12225
  Gene Symbol: PARD3
  Gene Name: par-3 family cell polarity regulator
  Uniprot ID: Q8TEW0
  ENST ID: ENST00000374794
  CDS Start-End: 327-4061
gcggccccgagcgagcgccagcgccacacagccccgggcagccgccggcgagcgcgccgcgacgccgaacaggtggccggaggctgcgggcgccgcggcggggagaggcgaggcaagccccgggcgaagcgaggcgaggcgagggcggccgggccgggcatgcgagctgagcggccccccggcgtcgccgccgcctgcccgcgcccctagccgcccgcgcgcccgagtccccagcggctcctccgcgcccagcgtcctcggtcccggcctcggctgctccggctgcgctcggcgaggggcgcgggcccgcccgcggcggcggcggcatgaaagtgaccgtgtgcttcggacggacccgggtggtcgtgccgtgcggggacggccacatgaaagttttcagcctcatccagcaggcggtgacccgctaccggaaggccatcgccaaggatccaaactactggatacaggtgcatcgcttggaacatggagatggaggaatactagaccttgatgacattctttgtgatgtagcagacgataaagacagactggtagcagtgtttgatgagcaggatccacatcacggaggtgatggcaccagtgccagttccacgggtacccagagcccagagatatttggtagtgagcttggcaccaacaatgtctcagcctttcagccttaccaagcaacaagtgaaattgaggtcacaccttcagtccttcgagcaaatatgcctcttcatgttcgacgcagtagtgacccagctctaattggcctctccacttctgtcagtgatagtaatttttcctctgaagagccttcaaggaaaaatcccacacgctggtcaacaacagctggcttcctcaagcagaacactgctgggagtcctaaaacctgcgacaggaaggatgaggatgggacagaagaggataacagtcgtgttgaacctgttggacatgctgacacgggtttggagcatatacccaacttttctctggatgatatggtaaagctcgtagaagtccccaacgatggagggcctctgggaatccacgtagtgcctttcagtgctcgaggcggcagaaccctggggttattagtaaaacgattggagaaaggtggtaaagctgaacatgaaaatctttttcgtgagaatgattgcattgtcaggattaatgatggcgaccttcgaaatagaagatttgaacaagcacaacatatgtttcgccaagccatgcgtacacccatcatttggttccatgtggttcctgcagcaaataaagagcagtatgaacaactatcccaaagtgagaagaacaattactattcaagccgttttagccctgacagccagtatattgacaacaggagtgtgaacagtgcagggcttcacacggtgcagagagcaccccgactgaaccacccgcctgagcagatagactctcactcaagactacctcatagcgcacacccctcgggaaaaccaccatccgctccagcctcggcacctcagaatgtatttagtacgactgtaagcagtggttataacaccaaaaaaataggcaagaggcttaatatccagcttaagaaaggtacagaaggtttgggattcagcatcacttccagagatgtaacaataggtggctcagctccaatctatgtgaaaaacattctcccccggggggcggccattcaggatggccgacttaaggcaggagacagacttatagaggtaaatggagtagatttagtgggcaaatcccaagaggaagttgtttcgctgttgagaagcaccaagatggaaggaactgtgagccttctggtctttcgccaggaagacgccttccacccaagggaactgaaagcagaagatgaggatattgttcttacacctgatggcaccagggaatttctgacatttgaagtcccacttaatgattcaggatctgcaggccttggtgtcagtgtcaaaggtaaccggtcaaaagagaaccacgcagatttgggaatctttgtcaagtccattattaatggaggagcagcatctaaagatggaaggcttcgggtgaatgatcaactgatagcagtaaatggagaatccctgttgggcaagacaaaccaagatgccatggaaaccctaagaaggtctatgtctactgaaggcaataaacgaggaatgatccagcttattgttgcaaggagaataagcaagtgcaatgagctgaagtcacctgggagcccccctggacctgagctgcccattgaaacagcgttggatgatagagaacgaagaatttcccattccctctacagtgggattgaggggcttgatgaatcgcccagcagaaatgctgccctcagtaggataatgggtaaataccagctgtcccctacagtgaatatgccccaagatgacactgtcattatagaagatgacaggttgccagtgcttcctccacatctctctgaccagtcctcttccagctcccatgatgatgtggggtttgtgacggcagatgctggtacttgggccaaggctgcaatcagtgattcagccgactgctctttgagtccagatgttgatccagttcttgcttttcaacgagaaggatttggacgtcagagtatgtcagaaaaacgcacaaagcaattttcagatgccagtcaattggatttcgttaaaacacgaaaatcaaaaagcatggatttaggtagttctcccagcagagatgtgggtccttccctgggtctgaagaagtcaagctcgttggagagtctgcagaccgcagttgccgaggtgactttgaatggggatattcctttccatcgtccacggccgcggataatcagaggcaggggatgcaatgagagcttcagagctgccatcgacaaatcttatgataaacccgcggtagatgatgatgatgaaggcatggagaccttggaagaagacacagaagaaagttcaagatcagggagagagtctgtatccacagccagtgatcagccttcccactctctggagagacaaatgaatggaaaccaagagaaaggtgataagactgatagaaaaaaggataaaactggaaaagaaaagaagaaagatagagataaggagaaggataaaatgaaagccaagaagggaatgctgaagggcttgggagacatgttcaggattcaagccaaaactcgagaatttagggaacgacaagctcgagagcgtgactatgctgaaattcaagattttcatcggacatttggctgtgatgatgagttaatgtatgggggagtttcttcttatgaaggttccatggctctcaacgctagacctcagagcccacgagaagggcatatgatggatgctttgtatgcccaagtcaagaagccgcggaattccaaaccctcacctgtagacagtaacagatcaactcctagcaatcatgatcggatacagcgtctgaggcaagaatttcagcaagcaaagcaagatgaagatgtagaagatcgtcggcggacctatagttttgagcaaccctggccgaacgcacggccggcgacgcagagcgggcgacactcggtgtccgtggaggtgcagatgcagcggcagcggcaggaggagcgcgagagctcccagcaggcccagcgccagtacagctctctgcctcggcaaagcaggaaaaatgccagctcggtctcccaggactcttgggagcagaactactcccctggggaaggcttccagagtgccaaagagaaccccaggtactccagctaccaaggctccaggaacggctacctgggaggacatggcttcaacgccagggtcatgctggaaactcaggagctccttcgccaggaacagaggcggaaggagcagcagatgaagaagcagcctccttccgaggggcccagcaactatgactcgtataagaaagtccaggaccccagttacgcccctcccaaggggcccttccggcaagatgtgcccccctccccttctcaggttgcgaggctgaacagacttcagactcctgagaaagggaggcccttctattcctgagcacgcaaataacggatgcttcatgtcgcgcaataaaagacattttcctatgaagacttgtattttgggagtttttttaaaacctcgatggtactatggagtatttctgttgttggtatcagtgcctttaagcggtgtaggcaaagaaatggaaggccttaatgtctttgccactatgtctcaagtgtctgtttcatggaaggatttcccaccctgtgacaatcatctgtttgaggtgttcatatgctctgcgcctctccacagtaccaggaatctcggccctactcatgagttgtccgcggcttggttgtaacatccctgcaccacttgcagtgacaaattcacctgaagtggaggatgacgtgcggccctgtttctccctctaagttctcttagctatgggatgacatcttagtctctggtggaggaaaagtgggcgacatacaccaaaaattggggctttctggtacttcacagcacagccatttgtcgtactttgtcatcactgtggttttctctttcctttctcagctctttgtgacgggagagtcggtcatcctattacagaagctaagccatagtccaacattgtttggtcaccatgggggtccttttgtaactgccttatgactcaacattaccaataaagtgatgatcctggtctgcgtttatacatacgcttgttcggtcctgttcctgacacgtgggttgagtcaccacagctctgtgtggggaacgtgggagacaggagtggctcctgccgggggaagctgggcctgccattggccctgtgtctatcatgaggggagagctaagaaagaaattctcctaggaagagctcatggcccagtacatcctagtaattattttaattagtttttgttctgacagcttgtcaggaagggcacagaatgggacagagataaaccagacagtcattttgatctgctctctacggtttttcaagtcagaggcaattgatgcttgtctaatgcatccacacactgcatgtctgactggcgatgccgcgctcctaagtagttctgccatgaaacataaaagacaaaggaaaagccgttacacatcacacagagaacattttcgggtcccacagcggtggtggcaggaagctcactctcgcgtcagtattagagtgtgtgtgtgggtctcggggatctcggtggctcccatcttccttcattgttctgaacatcctgtattgtaaaccatggctggggtgctaaagtgcctgtgaatcccgatgtggaaaaagctggaggtgaaagctcagcataccatgtatttactttaaaaacagaaaaaaagacatgtatggatatgtctattttttttttattggcacattgtatttttgtgttgacttgtttttagaaatgatgtgtccacacacgtacccgtgtctcttctgcatttctgtgtcatggttctgtttcttaatcacgtgcggcggtgtctaagtggtgttaccagtgtacgcgcagtgaccttggatgacagtggctctttctcacagcctcccctgagctgtgagaaacagctttctctgtacatatgcaactcctaataaaaggcatatttcttcctgtt

SEQ ID NO: 163644 - DNA, 5740 bp, Homo sapiens
  Payload ID: 12225
  Gene Symbol: PARD3
  Gene Name: par-3 family cell polarity regulator
  Uniprot ID: Q8TEW0
  ENST ID: ENST00000545260
  CDS Start-End: 331-4131
cccagcggccccgagcgagcgccagcgccacacagccccgggcagccgccggcgagcgcgccgcgacgccgaacaggtggccggaggctgcgggcgccgcggcggggagaggcgaggcaagccccgggcgaagcgaggcgaggcgagggcggccgggccgggcatgcgagctgagcggccccccggcgtcgccgccgcctgcccgcgcccctagccgcccgcgcgcccgagtccccagcggctcctccgcgcccagcgtcctcggtcccggcctcggctgctccggctgcgctcggcgaggggcgcgggcccgcccgcggcggcggcggcatgaaagtgaccgtgtgcttcggacggacccgggtggtcgtgccgtgcggggacggccacatgaaagttttcagcctcatccagcaggcggtgacccgctaccggaaggccatcgccaaggatccaaactactggatacaggtgcatcgcttggaacatggagatggaggaatactagaccttgatgacattctttgtgatgtagcagacgataaagacagactggtagcagtgtttgatgagcaggatccacatcacggaggtgatggcaccagtgccagttccacgggtacccagagcccagagatatttggtagtgagcttggcaccaacaatgtctcagcctttcagccttaccaagcaacaagtgaaattgaggtcacaccttcagtccttcgagcaaatatgcctcttcatgttcgacgcagtagtgacccagctctaattggcctctccacttctgtcagtgatagtaatttttcctctgaagagccttcaaggaaaaatcccacacgctggtcaacaacagctggcttcctcaagcagaacactgctgggagtcctaaaacctgcgacaggaaggatgaggatgggacagaagaggataacagtcgtgttgaacctgttggacatgctgacacgggtttggagcatatacccaacttttctctggatgatatggtaaagctcgtagaagtccccaacgatggagggcctctgggaatccacgtagtgcctttcagtgctcgaggcggcagaaccctggggttattagtaaaacgattggagaaaggtggtaaagctgaacatgaaaatctttttcgtgagaatgattgcattgtcaggattaatgatggcgaccttcgaaatagaagatttgaacaagcacaacatatgtttcgccaagccatgcgtacacccatcatttggttccatgtggttcctgcagcaaataaagagcagtatgaacaactatcccaaagtgagaagaacaattactattcaagccgttttagccctgacagccagtatattgacaacaggagtgtgaacagtgcagggcttcacacggtgcagagagcaccccgactgaaccacccgcctgagcagatagactctcactcaagactacctcatagcgcacacccctcgggaaaaccaccatccgctccagcctcggcacctcagaatgtatttagtacgactgtaagcagtggttataacaccaaaaaaataggcaagaggcttaatatccagcttaagaaaggtacagaaggtttgggattcagcatcacttccagagatgtaacaataggtggctcagctccaatctatgtgaaaaacattctcccccggggggcggccattcaggatggccgacttaaggcaggagacagacttatagaggtaaatggagtagatttagtgggcaaatcccaagaggaagttgtttcgctgttgagaagcaccaagatggaaggaactgtgagccttctggtctttcgccaggaagacgccttccacccaagggaactgaaagcagaagatgaggatattgttcttacacctgatggcaccagggaatttctgacatttgaagtcccacttaatgattcaggatctgcaggccttggtgtcagtgtcaaaggtaaccggtcaaaagagaaccacgcagatttgggaatctttgtcaagtccattattaatggaggagcagcatctaaagatggaaggcttcgggtgaatgatcaactgatagcagtaaatggagaatccctgttgggcaagacaaaccaagatgccatggaaaccctaagaaggtctatgtctactgaaggcaataaacgaggaatgatccagcttattgttgcaaggagaataagcaagtgcaatgagctgaagtcacctgggagcccccctggacctgagctgcccattgaaacagcgttggatgatagagaacgaagaatttcccattccctctacagtgggattgaggggcttgatgaatcgcccagcagaaatgctgccctcagtaggataatgggtaaataccagctgtcccctacagtgaatatgccccaagatgacactgtcattatagaagatgacaggttgccagtgcttcctccacatctctctgaccagtcctcttccagctcccatgatgatgtggggtttgtgacggcagatgctggtacttgggccaaggctgcaatcagtgattcagccgactgctctttgagtccagatgttgatccagttcttgcttttcaacgagaaggatttggacgtcagatagctgacgagactaaactcaatacagtggatgaccagaaagcaggttctcccagcagagatgtgggtccttccctgggtctgaagaagtcaagctcgttggagagtctgcagaccgcagttgccgaggtgactttgaatggggatattcctttccatcgtccacggccgcggataatcagaggcaggggatgcaatgagagcttcagagctgccatcgacaaatcttatgataaacccgcggtagatgatgatgatgaaggcatggagaccttggaagaagacacagaagaaagttcaagatcagggagagagtctgtatccacagccagtgatcagccttcccactctctggagagacaaatgaatggaaaccaagagaaaggtgataagactgatagaaaaaaggataaaactggaaaagaaaagaagaaagatagagataaggagaaggataaaatgaaagccaagaagggaatgctgaagggcttgggagacatgttcaggtttggcaaacatcgaaaagatgacaagattgagaaaacgggtaaaataaaaatacaggaatcctttacatcagaagaggagaggatacgaatgaagcaggagcaggagaggattcaagccaaaactcgagaatttagggaacgacaagctcgagagcgtgactatgctgaaattcaagattttcatcggacatttggctgtgatgatgagttaatgtatgggggagtttcttcttatgaaggttccatggctctcaacgctagacctcagagcccacgagaagggcatatgatggatgctttgtatgcccaagtcaagaagccgcggaattccaaaccctcacctgtagacagtaacagatcaactcctagcaatcatgatcggatacagcgtctgaggcaagaatttcagcaagcaaagcaagatgaagatgtagaagatcgtcggcggacctatagttttgagcaaccctggccgaacgcacggccggcgacgcagagcgggcgacactcggtgtccgtggaggtgcagatgcagcggcagcggcaggaggagcgcgagagctcccagcaggcccagcgccagtacagctctctgcctcggcaaagcaggaaaaatgccagctcggtctcccaggactcttgggagcagaactactcccctggggaaggcttccagagtgccaaagagaaccccaggtactccagctaccaaggctccaggaacggctacctgggaggacatggcttcaacgccagggtcatgctggaaactcaggagctccttcgccaggaacagaggcggaaggagcagcagatgaagaagcagcctccttccgaggggcccagcaactatgactcgtataagaaagtccaggaccccagttacgcccctcccaaggggcccttccggcaagatgtgcccccctccccttctcaggttgcgaggctgaacagacttcagactcctgagaaagggaggcccttctattcctgagcacgcaaataacggatgcttcatgtcgcgcaataaaagacattttcctatgaagacttgtattttgggagtttttttaaaacctcgatggtactatggagtatttctgttgttggtatcagtgcctttaagcggtgtaggcaaagaaatggaaggccttaatgtctttgccactatgtctcaagtgtctgtttcatggaaggatttcccaccctgtgacaatcatctgtttgaggtgttcatatgctctgcgcctctccacagtaccaggaatctcggccctactcatgagttgtccgcggcttggttgtaacatccctgcaccacttgcagtgacaaattcacctgaagtggaggatgacgtgcggccctgtttctccctctaagttctcttagctatgggatgacatcttagtctctggtggaggaaaagtgggcgacatacaccaaaaattggggctttctggtacttcacagcacagccatttgtcgtactttgtcatcactgtggttttctctttcctttctcagctctttgtgacgggagagtcggtcatcctattacagaagctaagccatagtccaacattgtttggtcaccatgggggtccttttgtaactgccttatgactcaacattaccaataaagtgatgatcctggtctgcgtttatacatacgcttgttcggtcctgttcctgacacgtgggttgagtcaccacagctctgtgtggggaacgtgggagacaggagtggctcctgccgggggaagctgggcctgccattggccctgtgtctatcatgaggggagagctaagaaagaaattctcctaggaagagctcatggcccagtacatcctagtaattattttaattagtttttgttctgacagcttgtcaggaagggcacagaatgggacagagataaaccagacagtcattttgatctgctctctacggtttttcaagtcagaggcaattgatgcttgtctaatgcatccacacactgcatgtctgactggcgatgccgcgctcctaagtagttctgccatgaaacataaaagacaaaggaaaagccgttacacatcacacagagaacattttcgggtcccacagcggtggtggcaggaagctcactctcgcgtcagtattagagtgtgtgtgtgggtctcggggatctcggtggctcccatcttccttcattgttctgaacatcctgtattgtaaaccatggctggggtgctaaagtgcctgtgaatcccgatgtggaaaaagctggaggtgaaagctcagcataccatgtatttactttaaaaacagaaaaaaagacatgtatggatatgtctattttttttttattggcacattgtatttttgtgttgacttgtttttagaaatgatgtgtccacacacgtacccgtgtctcttctgcatttctgtgtcatggttctgtttcttaatcacgtgcggcggtgtctaagtggtgttaccagtgtacgcgcagtgaccttggatgacagtggctctttctcacagcctcccctgagctgtgagaaacagctttctctgtacatatgcaactcctaataaaaggcatatttcttcctgttc

SEQ ID NO: 163645 - DNA, 5962 bp, Homo sapiens
  Payload ID: 12225
  Gene Symbol: PARD3
  Gene Name: par-3 family cell polarity regulator
  Uniprot ID: Q8TEW0
  ENST ID: ENST00000545693
  CDS Start-End: 331-4353
cccagcggccccgagcgagcgccagcgccacacagccccgggcagccgccggcgagcgcgccgcgacgccgaacaggtggccggaggctgcgggcgccgcggcggggagaggcgaggcaagccccgggcgaagcgaggcgaggcgagggcggccgggccgggcatgcgagctgagcggccccccggcgtcgccgccgcctgcccgcgcccctagccgcccgcgcgcccgagtccccagcggctcctccgcgcccagcgtcctcggtcccggcctcggctgctccggctgcgctcggcgaggggcgcgggcccgcccgcggcggcggcggcatgaaagtgaccgtgtgcttcggacggacccgggtggtcgtgccgtgcggggacggccacatgaaagttttcagcctcatccagcaggcggtgacccgctaccggaaggccatcgccaaggatccaaactactggatacaggtgcatcgcttggaacatggagatggaggaatactagaccttgatgacattctttgtgatgtagcagacgataaagacagactggtagcagtgtttgatgagcaggatccacatcacggaggtgatggcaccagtgccagttccacgggtacccagagcccagagatatttggtagtgagcttggcaccaacaatgtctcagcctttcagccttaccaagcaacaagtgaaattgaggtcacaccttcagtccttcgagcaaatatgcctcttcatgttcgacgcagtagtgacccagctctaattggcctctccacttctgtcagtgatagtaatttttcctctgaagagccttcaaggaaaaatcccacacgctggtcaacaacagctggcttcctcaagcagaacactgctgggagtcctaaaacctgcgacaggaagaaagatgaaaactacagaagcctcccgcgggatactagtaactggtctaaccaatttcagagagacaatgctcgctcgtctctgagtgccagtcacccaatggtgggcaagtggctggagaaacaagaacaggatgaggatgggacagaagaggataacagtcgtgttgaacctgttggacatgctgacacgggtttggagcatatacccaacttttctctggatgatatggtaaagctcgtagaagtccccaacgatggagggcctctgggaatccacgtagtgcctttcagtgctcgaggcggcagaaccctggggttattagtaaaacgattggagaaaggtggtaaagctgaacatgaaaatctttttcgtgagaatgattgcattgtcaggattaatgatggcgaccttcgaaatagaagatttgaacaagcacaacatatgtttcgccaagccatgcgtacacccatcatttggttccatgtggttcctgcagcaaataaagagcagtatgaacaactatcccaaagtgagaagaacaattactattcaagccgttttagccctgacagccagtatattgacaacaggagtgtgaacagtgcagggcttcacacggtgcagagagcaccccgactgaaccacccgcctgagcagatagactctcactcaagactacctcatagcgcacacccctcgggaaaaccaccatccgctccagcctcggcacctcagaatgtatttagtacgactgtaagcagtggttataacaccaaaaaaataggcaagaggcttaatatccagcttaagaaaggtacagaaggtttgggattcagcatcacttccagagatgtaacaataggtggctcagctccaatctatgtgaaaaacattctcccccggggggcggccattcaggatggccgacttaaggcaggagacagacttatagaggtaaatggagtagatttagtgggcaaatcccaagaggaagttgtttcgctgttgagaagcaccaagatggaaggaactgtgagccttctggtctttcgccaggaagacgccttccacccaagggaactgaaagcagaagatgaggatattgttcttacacctgatggcaccagggaatttctgacatttgaagtcccacttaatgattcaggatctgcaggccttggtgtcagtgtcaaaggtaaccggtcaaaagagaaccacgcagatttgggaatctttgtcaagtccattattaatggaggagcagcatctaaagatggaaggcttcgggtgaatgatcaactgatagcagtaaatggagaatccctgttgggcaagacaaaccaagatgccatggaaaccctaagaaggtctatgtctactgaaggcaataaacgaggaatgatccagcttattgttgcaaggagaataagcaagtgcaatgagctgaagtcacctgggagcccccctggacctgagctgcccattgaaacagcgttggatgatagagaacgaagaatttcccattccctctacagtgggattgaggggcttgatgaatcgcccagcagaaatgctgccctcagtaggataatgggtaaataccagctgtcccctacagtgaatatgccccaagatgacactgtcattatagaagatgacaggttgccagtgcttcctccacatctctctgaccagtcctcttccagctcccatgatgatgtggggtttgtgacggcagatgctggtacttgggccaaggctgcaatcagtgattcagccgactgctctttgagtccagatgttgatccagttcttgcttttcaacgagaaggatttggacgtcagagtatgtcagaaaaacgcacaaagcaattttcagatgccagtcaattggatttcgttaaaacacgaaaatcaaaaagcatggatttaggtatagctgacgagactaaactcaatacagtggatgaccagaaagcaggttctcccagcagagatgtgggtccttccctgggtctgaagaagtcaagctcgttggagagtctgcagaccgcagttgccgaggtgactttgaatggggatattcctttccatcgtccacggccgcggataatcagaggcaggggatgcaatgagagcttcagagctgccatcgacaaatcttatgataaacccgcggtagatgatgatgatgaaggcatggagaccttggaagaagacacagaagaaagttcaagatcagggagagagtctgtatccacagccagtgatcagccttcccactctctggagagacaaatgaatggaaaccaagagaaaggtgataagactgatagaaaaaaggataaaactggaaaagaaaagaagaaagatagagataaggagaaggataaaatgaaagccaagaagggaatgctgaagggcttgggagacatgttcaggtttggcaaacatcgaaaagatgacaagattgagaaaacgggtaaaataaaaatacaggaatcctttacatcagaagaggagaggatacgaatgaagcaggagcaggagaggattcaagccaaaactcgagaatttagggaacgacaagctcgagagcgtgactatgctgaaattcaagattttcatcggacatttggctgtgatgatgagttaatgtatgggggagtttcttcttatgaaggttccatggctctcaacgctagacctcagagcccacgagaagggcatatgatggatgctttgtatgcccaagtcaagaagccgcggaattccaaaccctcacctgtagacagtaacagatcaactcctagcaatcatgatcggatacagcgtctgaggcaagaatttcagcaagcaaagcaagatgaagatgtagaagatcgtcggcggacctatagttttgagcaaccctggccgaacgcacggccggcgacgcagagcgggcgacactcggtgtccgtggaggtgcagatgcagcggcagcggcaggaggagcgcgagagctcccagcaggcccagcgccagtacagctctctgcctcggcaaagcaggaaaaatgccagctcggtctcccaggactcttgggagcagaactactcccctggggaaggcttccagagtgccaaagagaaccccaggtactccagctaccaaggctccaggaacggctacctgggaggacatggcttcaacgccagggtcatgctggaaactcaggagctccttcgccaggaacagaggcggaaggagcagcagatgaagaagcagcctccttccgaggggcccagcaactatgactcgtataagaaagtccaggaccccagttacgcccctcccaaggggcccttccggcaagatgtgcccccctccccttctcaggttgcgaggctgaacagacttcagactcctgagaaagggaggcccttctattcctgagcacgcaaataacggatgcttcatgtcgcgcaataaaagacattttcctatgaagacttgtattttgggagtttttttaaaacctcgatggtactatggagtatttctgttgttggtatcagtgcctttaagcggtgtaggcaaagaaatggaaggccttaatgtctttgccactatgtctcaagtgtctgtttcatggaaggatttcccaccctgtgacaatcatctgtttgaggtgttcatatgctctgcgcctctccacagtaccaggaatctcggccctactcatgagttgtccgcggcttggttgtaacatccctgcaccacttgcagtgacaaattcacctgaagtggaggatgacgtgcggccctgtttctccctctaagttctcttagctatgggatgacatcttagtctctggtggaggaaaagtgggcgacatacaccaaaaattggggctttctggtacttcacagcacagccatttgtcgtactttgtcatcactgtggttttctctttcctttctcagctctttgtgacgggagagtcggtcatcctattacagaagctaagccatagtccaacattgtttggtcaccatgggggtccttttgtaactgccttatgactcaacattaccaataaagtgatgatcctggtctgcgtttatacatacgcttgttcggtcctgttcctgacacgtgggttgagtcaccacagctctgtgtggggaacgtgggagacaggagtggctcctgccgggggaagctgggcctgccattggccctgtgtctatcatgaggggagagctaagaaagaaattctcctaggaagagctcatggcccagtacatcctagtaattattttaattagtttttgttctgacagcttgtcaggaagggcacagaatgggacagagataaaccagacagtcattttgatctgctctctacggtttttcaagtcagaggcaattgatgcttgtctaatgcatccacacactgcatgtctgactggcgatgccgcgctcctaagtagttctgccatgaaacataaaagacaaaggaaaagccgttacacatcacacagagaacattttcgggtcccacagcggtggtggcaggaagctcactctcgcgtcagtattagagtgtgtgtgtgggtctcggggatctcggtggctcccatcttccttcattgttctgaacatcctgtattgtaaaccatggctggggtgctaaagtgcctgtgaatcccgatgtggaaaaagctggaggtgaaagctcagcataccatgtatttactttaaaaacagaaaaaaagacatgtatggatatgtctattttttttttattggcacattgtatttttgtgttgacttgtttttagaaatgatgtgtccacacacgtacccgtgtctcttctgcatttctgtgtcatggttctgtttcttaatcacgtgcggcggtgtctaagtggtgttaccagtgtacgcgcagtgaccttggatgacagtggctctttctcacagcctcccctgagctgtgagaaacagctttctctgtacatatgcaactcctaataaaaggcatatttcttcctgttc

SEQ ID NO: 163646 - DNA, 2475 bp, Homo sapiens
  Payload ID: 12225
  Gene Symbol: PARD3
  Gene Name: par-3 family cell polarity regulator
  ENST ID: ENST00000544292
  CDS Start-End: 144-2387
cttttaactgtaacttattgaaggtctcctacatttttaacactgaggatgaggatgggacagaagaggataacagtcgtgttgaacctgttggacatgctgacacgggtttggagcatatacccaacttttctctggatgatatggtaaagctcgtagaagtccccaacgatggagggcctctgggaatccacgtagtgcctttcagtgctcgaggcggcagaaccctggggttattagtaaaacgattggagaaaggtggtaaagctgaacatgaaaatctttttcgtgagaatgattgcattgtcaggattaatgatggcgaccttcgaaatagaagatttgaacaagcacaacatatgtttcgccaagccatgcgtacacccatcatttggttccatgtggttcctgcagcaaataaagagcagtatgaacaactatcccaaagtgagaagaacaattactattcaagccgttttagccctgacagccagtatattgacaacaggagtgtgaacagtgcagggcttcacacggtgcagagagcaccccgactgaaccacccgcctgagcagatagactctcactcaagactacctcatagcgcacacccctcgggaaaaccaccatccgctccagcctcggcacctcagaatgtatttagtacgactgtaagcagtggttataacaccaaaaaaataggcaagaggcttaatatccagcttaagaaaggtacagaaggtttgggattcagcatcacttccagagatgtaacaataggtggctcagctccaatctatgtgaaaaacattctcccccggggggcggccattcaggatggccgacttaaggcaggagacagacttatagaggtaaatggagtagatttagtgggcaaatcccaagaggaagttgtttcgctgttgagaagcaccaagatggaaggaactgtgagccttctggtctttcgccaggaagacgccttccacccaagggaactgaaagcagaagatgaggatattgttcttacacctgatggcaccagggaatttctgacatttgaagtcccacttaatgattcaggatctgcaggccttggtgtcagtgtcaaaggtaaccggtcaaaagagaaccacgcagatttgggaatctttgtcaagtccattattaatggaggagcagcatctaaagatggaaggcttcgggtgaatgatcaactgatagcagtaaatggagaatccctgttgggcaagacaaaccaagatgccatggaaaccctaagaaggtctatgtctactgaaggcaataaacgaggaatgatccagcttattgttgcaaggagaataagcaagtgcaatgagctgaagtcacctgggagcccccctggacctgagctgcccattgaaacagcgttggatgatagagaacgaagaatttcccattccctctacagtgggattgaggggcttgatgaatcgcccagcagaaatgctgccctcagtaggataatgggtaaataccagctgtcccctacagtgaatatgccccaagatgacactgtcattatagaagatgacaggttgccagtgcttcctccacatctctctgaccagtcctcttccagctcccatgatgatgtggggtttgtgacggcagatgctggtacttgggccaaggctgcaatcagtgattcagccgactgctctttgagtccagatgttgatccagttcttgcttttcaacgagaaggatttggacgtcagagtatgtcagaaaaacgcacaaagcaattttcagatgccagtcaattggatttcgttaaaacacgaaaatcaaaaagcatggatttagtagctgacgagactaaactcaatacagtggatgaccagaaagcaggttctcccagcagagatgtgggtccttccctgggtctgaagaagtcaagctcgttggagagtctgcagaccgcagttgccgaggtgactttgaatggggatattcctttccatcgtccacggccgcggataatcagaggcaggggatgcaatgagagcttcagagctgccatcgacaaatcttatgataaacccgcggtagatgatgatgatgaaggcatggagaccttggaagaagacacagaagaaagttcaagatcagggagagagtctgtatccacagccagtgatcagccttcccactctctggagagacaaatgaatggaaaccaagagaaaggtgataagactgatagaaaaaaggataaaactggaaaagaaaagaagaaagatagagataaggagaaggataaaatgaaagccaagaagggaatgctgaagggcttgggagacatgttcagccttgccaaactgaagcccgagaagagatgaacaacaaagcgattcaaaacatgtcttgaacagcacatattgcacagttgttgttttttttaaacaaacaataaatttacttttaatg

SEQ ID NO: 163647 - DNA, 3411 bp, Homo sapiens
  Payload ID: 12226
  Gene Symbol: PARD3B
  Gene Name: par-3 family cell polarity regulator beta
  Uniprot ID: Q8TEW8
  ENST ID: ENST00000351153
  CDS Start-End: 1-3411
atgaaagtgaccgtgtgcttcggcaggacgggcatcgtggtgccctgcaaggagggccagctgcgcgtcggcgagctcacccagcaggcgctgcagcggtacctgaagacccgggagaagggtcctggttactgggtgaagattcatcacttagaatatacagatggaggaatcctggatccagatgatgtcttggcagatgttgttgaagataaagacaagctgattgctgtgtttgaagaacaagaaccactccacaagattgagagccccagtggaaaccctgcagatcggcagagcccagatgcttttgagacagaagtggccgcccaactggccgcatttaagccaattggtggggagattgaagtaaccccttctgctctaaaactaggcactccactgctggtgaggagaagcagtgacccagtgccaggcccacctgctgatacccagccaagcgcttcacaccctggtggccagagtctgaaactggttgttccagattccacgcagaacttggaagacagagaagttttgaatggtgtacagacagaactactaacttcgccaagaactaaggacacattgagtgatatgacaagaacagtggagatttctggggaaggaggcccattgggaatacatgtagtgcccttcttttcatctctgagtggaaggattctaggactcttcatccgaggcattgaagacaacagcaggtccaagcgggagggactatttcacgaaaatgaatgtattgtaaaaatcaacaatgtggatctcgtagacaaaacctttgctcaggctcaagatgtcttccgccaggcaatgaaatctccaagtgtgctcctccacgtgcttcctccacaaaaccgtgaacagtatgaaaagtcagtcattggctctcttaacatttttggtaataatgatggcgttttgaaaaccaaagtgccgcctcctgtccatggaaaatcgggactaaagacagcaaatctcacaggaaccgatagtcctgaaacagatgcatcagcttccctgcaacaaaacaagagtccccgagtaccaaggctgggaggaaaaccatcctctccctcactctcgcctctcatgggatttggcagcaataaaaatgcaaagaaaattaagattgacctaaagaaaggccctgaaggacttggtttcactgtggttaccagagactcttccatacatggtcccggtcccatttttgtaaaaaacattttaccaaagggagcagcaataaaagatggccgcctacaatcaggggacagaattttggaggtaaatgggagagatgtcaccggacgaacccaggaagagcttgtggccatgctcaggagcaccaagcagggggagacagcatcgctggtcattgcccgccaagaaggacattttctgccccgagagttgaaaggagaacctgactgctgtgcactctctctggagacaagcgagcagctcacctttgagatccccctgaatgattcaggttctgctggcctcggggtgagcttaaaagggaacaaatccagagaaactggaacagacttggggatttttatcaaatccatcattcatggaggcgctgcttttaaggatggtcgtctgcgaatgaatgaccagctgattgcagttaatggggaatctcttttgggaaagtccaaccacgaagctatggaaacacttaggcggtcaatgtccatggagggaaacatccgagggatgatccagttggtgattctgaggaggccagagagaccaatggaggatcctgcagagtgtggggcattttccaagccatgctttgagaactgtcaaaatgctgtaaccacctctaggcgaaatgataatagtatcctgcatccacttggcacttgcagtccacaagacaaacagaaaggtctattgctgcccaatgacggatgggccgagagtgaagttccaccttctccaacaccacattctgctctgggattgggcctcgaagattacagccacagctctggggtggattcagcagtatattttccagatcagcacatcaacttcagatctgtgacaccggccaggcagcctgaatcaattaatttgaaagcctcgaagagcatggaccttgtgccagatgaaagcaaggttcactcattggctggacaaaaatcggacggtctgtctgataagagctctcactctggccaaggagctctgaattgtgagtctgcccctcaggggaattcggagctagaggacatggaaaataaagccaggaaagtcaaaaaaacgaaagagaaggagaagaaaaaggaaaagggcaaattgaaagtcaaggagaaaaagcgcaaagaggagaatgaagatccagaaaggaaaataaagaagaagggcttcggcgccatgctgagatttggaaagaagaaagaggataagggtggaaaggctgagcagaaaggtactctgaaacatggtggcctgagagaagaagagctggagaaaatgaaagaagagcgtgaaaggattggagcaaaacatcaggagctaagggaaaagcaggcaagaggtcttcttgattatgctactggtgcaattggatcagtgtatgatatggatgatgatgaaatggaccccaattatgccagagtgaaccactttcgggaaccatgcacatcagcaaatgtctttagatctccatctccccctcgagctggaccatttggttaccctcgggatggccatccactgtctccagaaagagaccacttagagggtctctatgccaaggtcaacaagccataccatccactggttccagctgacagtggccgtcctacgggtggaagcactgaccgtatccagaagttgcggaaagagtattatcaggctcggagggaaggtttccctttatatgaagacgacgaaggaagagcaaggccatctgagtatgacctactctgggtgcctggaaggggtccagatgggaatgcacacaacctccgctttgaagggatggagaggcagtacgcatccttacccaggggaggacccgcagatcctgtagactatctgccagcagcacctcgggggctctacaaggaaagggagcttccctattatccaggggctcatcctatgcaccctcccaaagggagctatccccgccccacagagctcagggtggcagatctccggtatcctcagcactacccacccccgccagctccccagcacaaaggaccctttcgacaagacgttccgccttcccctccccagcaccaaagaatgccagcctatcaggaaacaggcagaccagggccccgtgggggcagcccagaccagtacccttaccgaacccaggattcccggcagaagaaccccatgactgcagccgtatag

SEQ ID NO: 163648 - DNA, 3315 bp, Homo sapiens
  Payload ID: 12226
  Gene Symbol: PARD3B
  Gene Name: par-3 family cell polarity regulator beta
  Uniprot ID: Q8TEW8
  ENST ID: ENST00000349953
  CDS Start-End: 1-3315
atgaaagtgaccgtgtgcttcggcaggacgggcatcgtggtgccctgcaaggagggccagctgcgcgtcggcgagctcacccagcaggcgctgcagcggtacctgaagacccgggagaagggtcctggttactgggtgaagattcatcacttagaatatacagatggaggaatcctggatccagatgatgtcttggcagatgttgttgaagataaagacaagctgattgctgtgtttgaagaacaagaaccactccacaagattgagagccccagtggaaaccctgcagatcggcagagcccagatgcttttgagacagaagtggccgcccaactggccgcatttaagccaattggtggggagattgaagtaaccccttctgctctaaaactaggcactccactgctggtgaggagaagcagtgacccagtgccaggcccacctgctgatacccagccaagcgcttcacaccctggtggccagagtctgaaactggttgttccagattccacgcagaacttggaagacagagaagttttgaatggtgtacagacagaactactaacttcgccaagaactaaggacacattgagtgatatgacaagaacagtggagatttctggggaaggaggcccattgggaatacatgtagtgcccttcttttcatctctgagtggaaggattctaggactcttcatccgaggcattgaagacaacagcaggtccaagcgggagggactatttcacgaaaatgaatgtattgtaaaaatcaacaatgtggatctcgtagacaaaacctttgctcaggctcaagatgtcttccgccaggcaatgaaatctccaagtgtgctcctccacgtgcttcctccacaaaaccgtgaacagtatgaaaagtcagtcattggctctcttaacatttttggtaataatgatggcgttttgaaaaccaaagtgccgcctcctgtccatggaaaatcgggactaaagacagcaaatctcacaggaaccgatagtcctgaaacagatgcatcagcttccctgcaacaaaacaagagtccccgagtaccaaggctgggaggaaaaccatcctctccctcactctcgcctctcatgggatttggcagcaataaaaatgcaaagaaaattaagattgacctaaagaaaggccctgaaggacttggtttcactgtggttaccagagactcttccatacatggtcccggtcccatttttgtaaaaaacattttaccaaagggagcagcaataaaagatggccgcctacaatcaggggacagaattttggaggtaaatgggagagatgtcaccggacgaacccaggaagagcttgtggccatgctcaggagcaccaagcagggggagacagcatcgctggtcattgcccgccaagaaggacattttctgccccgagagttgaaaggagaacctgactgctgtgcactctctctggagacaagcgagcagctcacctttgagatccccctgaatgattcaggttctgctggcctcggggtgagcttaaaagggaacaaatccagagaaactggaacagacttggggatttttatcaaatccatcattcatggaggcgctgcttttaaggatggtcgtctgcgaatgaatgaccagctgattgcagttaatggggaatctcttttgggaaagtccaaccacgaagctatggaaacacttaggcggtcaatgtccatggagggaaacatccgagggatgatccagttggtgattctgaggaggccagagagaccaatggaggatcctgcagagtgtggggcattttccaagccatgctttgagaactgtcaaaatgctgtaaccacctctaggcgaaatgataatagtatcctgcatccacttggcacttgcagtccacaagacaaacagaaaggtctattgctgcccaatgacggatgggccgagagtgaagttccaccttctccaacaccacattctgctctgggattgggcctcgaagattacagccacagctctggggtggattcagcagtatattttccagatcagcacatcaacttcagatctgtgacaccggccaggcagcctgaatcaattaatttgaaagcctcgaagagcatggaccttgtgccagatgaaagcaaggttcactcattggctggacaaaaatcggaatctccaagcaaagattttggtccaactctgggtttgaaaaagtccagctccttggagagtctgcagactgcagtggccgaggtcaggaagaatgaccttccctttcacaggccccggccgcacatggttcgaggccgaggctgcaatgagagctttagagcagccattgacaaatcctacgatggacctgaagaaatagaagctgacggtctgtctgataagagctctcactctggccaaggagctctgaattgtgagtctgcccctcaggggaattcggagctagaggacatggaaaataaagccaggaaagtcaaaaaaacgaaagagaaggagaagaaaaaggaaaagggcaaattgaaagtcaaggagaaaaagcgcaaagaggagaatgaagatccagaaaggaaaataaagaagaagggcttcggcgccatgctgagatttggaaagaagaaagaggataagggtggaaaggctgagcagaaaggtactctgaaacatggtggcctgagagaagaagagctggagaaaatgaaagaagagcgtgaaagtggccgtcctacgggtggaagcactgaccgtatccagaagttgcggaaagagtattatcaggctcggagggaaggtttccctttatatgaagacgacgaaggaagagcaaggccatctgagtatgacctactctgggtgcctggaaggggtccagatgggaatgcacacaacctccgctttgaagggatggagaggcagtacgcatccttacccaggggaggacccgcagatcctgtagactatctgccagcagcacctcgggggctctacaaggaaagggagcttccctattatccaggggctcatcctatgcaccctcccaaagggagctatccccgccccacagagctcagggtggcagatctccggtatcctcagcactacccacccccgccagctccccagcacaaaggaccctttcgacaagacgttccgccttcccctccccagcaccaaagaatgccagcctatcaggaaacaggcagaccagggccccgtgggggcagcccagaccagtacccttaccgaacccaggattcccggcagaagaaccccatgactgcagccgtatag

SEQ ID NO: 163649 - DNA, 3432 bp, Homo sapiens
  Payload ID: 12226
  Gene Symbol: PARD3B
  Gene Name: par-3 family cell polarity regulator beta
  Uniprot ID: Q8TEW8
  ENST ID: ENST00000358768
  CDS Start-End: 1-3432
atgaaagtgaccgtgtgcttcggcaggacgggcatcgtggtgccctgcaaggagggccagctgcgcgtcggcgagctcacccagcaggcgctgcagcggtacctgaagacccgggagaagggtcctggttactgggtgaagattcatcacttagaatatacagatggaggaatcctggatccagatgatgtcttggcagatgttgttgaagataaagacaagctgattgctgtgtttgaagaacaagaaccactccacaagattgagagccccagtggaaaccctgcagatcggcagagcccagatgcttttgagacagaagtggccgcccaactggccgcatttaagccaattggtggggagattgaagtaaccccttctgctctaaaactaggcactccactgctggtgaggagaagcagtgacccagtgccaggcccacctgctgatacccagccaagcgcttcacaccctggtggccagagtctgaaactggttgttccagattccacgcagaacttggaagacagagaagttttgaatggtgtacagacagaactactaacttcgccaagaactaaggacacattgagtgatatgacaagaacagtggagatttctggggaaggaggcccattgggaatacatgtagtgcccttcttttcatctctgagtggaaggattctaggactcttcatccgaggcattgaagacaacagcaggtccaagcgggagggactatttcacgaaaatgaatgtattgtaaaaatcaacaatgtggatctcgtagacaaaacctttgctcaggctcaagatgtcttccgccaggcaatgaaatctccaagtgtgctcctccacgtgcttcctccacaaaaccgtgaacagtatgaaaagtcagtcattggctctcttaacatttttggtaataatgatggcgttttgaaaaccaaagtgccgcctcctgtccatggaaaatcgggactaaagacagcaaatctcacaggaaccgatagtcctgaaacagatgcatcagcttccctgcaacaaaacaagagtccccgagtaccaaggctgggaggaaaaccatcctctccctcactctcgcctctcatgggatttggcagcaataaaaatgcaaagaaaattaagattgacctaaagaaaggccctgaaggacttggtttcactgtggttaccagagactcttccatacatggtcccggtcccatttttgtaaaaaacattttaccaaagggagcagcaataaaagatggccgcctacaatcaggggacagaattttggaggtaaatgggagagatgtcaccggacgaacccaggaagagcttgtggccatgctcaggagcaccaagcagggggagacagcatcgctggtcattgcccgccaagaaggacattttctgccccgagagttggatggtcgtctgcgaatgaatgaccagctgattgcagttaatggggaatctcttttgggaaagtccaaccacgaagctatggaaacacttaggcggtcaatgtccatggagggaaacatccgagggatgatccagttggtgattctgaggaggccagagagaccaatggaggatcctgcagagtgtggggcattttccaagccatgctttgagaactgtcaaaatgctgtaaccacctctaggcgaaatgataatagtatcctgcatccacttggcacttgcagtccacaagacaaacagaaaggtctattgctgcccaatgacggatgggccgagagtgaagttccaccttctccaacaccacattctgctctgggattgggcctcgaagattacagccacagctctggggtggattcagcagtatattttccagatcagcacatcaacttcagatctgtgacaccggccaggcagcctgaatcaattaatttgaaagcctcgaagagcatggaccttgtgccagatgaaagcaaggttcactcattggctggacaaaaatcggaatctccaagcaaagattttggtccaactctgggtttgaaaaagtccagctccttggagagtctgcagactgcagtggccgaggtcaggaagaatgaccttccctttcacaggccccggccgcacatggttcgaggccgaggctgcaatgagagctttagagcagccattgacaaatcctacgatggacctgaagaaatagaagctgacggtctgtctgataagagctctcactctggccaaggagctctgaattgtgagtctgcccctcaggggaattcggagctagaggacatggaaaataaagccaggaaagtcaaaaaaacgaaagagaaggagaagaaaaaggaaaagggcaaattgaaagtcaaggagaaaaagcgcaaagaggagaatgaagatccagaaaggaaaataaagaagaagggcttcggcgccatgctgagatttggaaagaagaaagaggataagggtggaaaggctgagcagaaaggtactctgaaacatggtggcctgagagaagaagagctggagaaaatgaaagaagagcgtgaaaggattggagcaaaacatcaggagctaagggaaaagcaggcaagaggtcttcttgattatgctactggtgcaattggatcagtgtatgatatggatgatgatgaaatggaccccaattatgccagagtgaaccactttcgggaaccatgcacatcagcaaatgtctttagatctccatctccccctcgagctggaccatttggttaccctcgggatggccatccactgtctccagaaagagaccacttagagggtctctatgccaaggtcaacaagccataccatccactggttccagctgacagtggccgtcctacgggtggaagcactgaccgtatccagaagttgcggaaagagtattatcaggctcggagggaaggtttccctttatatgaagacgacgaaggaagagcaaggccatctgagtatgacctactctgggtgcctggaaggggtccagatgggaatgcacacaacctccgctttgaagggatggagaggcagtacgcatccttacccaggggaggacccgcagatcctgtagactatctgccagcagcacctcgggggctctacaaggaaagggagcttccctattatccaggggctcatcctatgcaccctcccaaagggagctatccccgccccacagagctcagggtggcagatctccggtatcctcagcactacccacccccgccagctccccagcacaaaggaccctttcgacaagacgttccgccttcccctccccagcaccaaagaatgccagcctatcaggaaacaggcagaccagggccccgtgggggcagcccagaccagtacccttaccgaacccaggattcccggcagaagaaccccatgactgcagccgtatag

SEQ ID NO: 163650 - DNA, 8174 bp, Homo sapiens
  Payload ID: 12226
  Gene Symbol: PARD3B
  Gene Name: par-3 family cell polarity regulator beta
  Uniprot ID: Q8TEW8
  ENST ID: ENST00000406610
  CDS Start-End: 208-3825
gcggccgcccctccccgattcccgccacctgccgcctggccaggtggaaggggcgctgccgcgagcctccgggcctcagggtgttccggggagcggcgccccgggtctctgggcccacccgccccgggcgtcctccgagagtgggggctgcgcccgcggggtcagacacctgttcggcccggcccggcgtggtcgccgggggccaggatgaaagtgaccgtgtgcttcggcaggacgggcatcgtggtgccctgcaaggagggccagctgcgcgtcggcgagctcacccagcaggcgctgcagcggtacctgaagacccgggagaagggtcctggttactgggtgaagattcatcacttagaatatacagatggaggaatcctggatccagatgatgtcttggcagatgttgttgaagataaagacaagctgattgctgtgtttgaagaacaagaaccactccacaagattgagagccccagtggaaaccctgcagatcggcagagcccagatgcttttgagacagaagtggccgcccaactggccgcatttaagccaattggtggggagattgaagtaaccccttctgctctaaaactaggcactccactgctggtgaggagaagcagtgacccagtgccaggcccacctgctgatacccagccaagcgcttcacaccctggtggccagagtctgaaactggttgttccagattccacgcagaacttggaagacagagaagttttgaatggtgtacagacagaactactaacttcgccaagaactaaggacacattgagtgatatgacaagaacagtggagatttctggggaaggaggcccattgggaatacatgtagtgcccttcttttcatctctgagtggaaggattctaggactcttcatccgaggcattgaagacaacagcaggtccaagcgggagggactatttcacgaaaatgaatgtattgtaaaaatcaacaatgtggatctcgtagacaaaacctttgctcaggctcaagatgtcttccgccaggcaatgaaatctccaagtgtgctcctccacgtgcttcctccacaaaaccgtgaacagtatgaaaagtcagtcattggctctcttaacatttttggtaataatgatggcgttttgaaaaccaaagtgccgcctcctgtccatggaaaatcgggactaaagacagcaaatctcacaggaaccgatagtcctgaaacagatgcatcagcttccctgcaacaaaacaagagtccccgagtaccaaggctgggaggaaaaccatcctctccctcactctcgcctctcatgggatttggcagcaataaaaatgcaaagaaaattaagattgacctaaagaaaggccctgaaggacttggtttcactgtggttaccagagactcttccatacatggtcccggtcccatttttgtaaaaaacattttaccaaagggagcagcaataaaagatggccgcctacaatcaggggacagaattttggaggtaaatgggagagatgtcaccggacgaacccaggaagagcttgtggccatgctcaggagcaccaagcagggggagacagcatcgctggtcattgcccgccaagaaggacattttctgccccgagagttgaaaggagaacctgactgctgtgcactctctctggagacaagcgagcagctcacctttgagatccccctgaatgattcaggttctgctggcctcggggtgagcttaaaagggaacaaatccagagaaactggaacagacttggggatttttatcaaatccatcattcatggaggcgctgcttttaaggatggtcgtctgcgaatgaatgaccagctgattgcagttaatggggaatctcttttgggaaagtccaaccacgaagctatggaaacacttaggcggtcaatgtccatggagggaaacatccgagggatgatccagttggtgattctgaggaggccagagagaccaatggaggatcctgcagagtgtggggcattttccaagccatgctttgagaactgtcaaaatgctgtaaccacctctaggcgaaatgataatagtatcctgcatccacttggcacttgcagtccacaagacaaacagaaaggtctattgctgcccaatgacggatgggccgagagtgaagttccaccttctccaacaccacattctgctctgggattgggcctcgaagattacagccacagctctggggtggattcagcagtatattttccagatcagcacatcaacttcagatctgtgacaccggccaggcagcctgaatcaattaatttgaaagcctcgaagagcatggaccttgtgccagatgaaagcaaggttcactcattggctggacaaaaatcggaatctccaagcaaagattttggtccaactctgggtttgaaaaagtccagctccttggagagtctgcagactgcagtggccgaggtcaggaagaatgaccttccctttcacaggccccggccgcacatggttcgaggccgaggctgcaatgagagctttagagcagccattgacaaatcctacgatggacctgaagaaatagaagctgacggtctgtctgataagagctctcactctggccaaggagctctgaattgtgagtctgcccctcaggggaattcggagctagaggacatggaaaataaagccaggaaagtcaaaaaaacgaaagagaaggagaagaaaaaggaaaagggcaaattgaaagtcaaggagaaaaagcgcaaagaggagaatgaagatccagaaaggaaaataaagaagaagggcttcggcgccatgctgagatttggaaagaagaaagaggataagggtggaaaggctgagcagaaaggtactctgaaacatggtggcctgagagaagaagagctggagaaaatgaaagaagagcgtgaaaggattggagcaaaacatcaggagctaagggaaaagcaggcaagaggtcttcttgattatgctactggtgcaattggatcagtgtatgatatggatgatgatgaaatggaccccaattatgccagagtgaaccactttcgggaaccatgcacatcagcaaatgtctttagatctccatctccccctcgagctggaccatttggttaccctcgggatggccatccactgtctccagaaagagaccacttagagggtctctatgccaaggtcaacaagccataccatccactggttccagctgacagtggccgtcctacgggtggaagcactgaccgtatccagaagttgcggaaagagtattatcaggctcggagggaaggtttccctttatatgaagacgacgaaggaagagcaaggccatctgagtatgacctactctgggtgcctggaaggggtccagatgggaatgcacacaacctccgctttgaagggatggagaggcagtacgcatccttacccaggggaggacccgcagatcctgtagactatctgccagcagcacctcgggggctctacaaggaaagggagcttccctattatccaggggctcatcctatgcaccctcccaaagggagctatccccgccccacagagctcagggtggcagatctccggtatcctcagcactacccacccccgccagctccccagcacaaaggaccctttcgacaagacgttccgccttcccctccccagcaccaaagaatgccagcctatcaggaaacaggcagaccagggccccgtgggggcagcccagaccagtacccttaccgaacccaggattcccggcagaagaaccccatgactgcagccgtatagctgagtgccaccgaggccagcccggtccagaaaggaaggtgtctactctacctttgccctttctaaacctgaagacctccttggtgttaggaattctccatgttactgataagctttttctcactgacattgtaacgcatgactgctaatcagagagaaaaagaaggggaagggaattggggaggaaaaaaaatcagaaggaagacgaaagatggggctataaaaacaaaactacctgatagttgaaacgctttcagagttgttcaaatcagtgagagtggcaacggaacacacaaacaactaattatggaactctactctggggatcctctctggctagataacctgtgctgatgtgcagacacgtggacatccccctctgagactggcggtccagaggcagtctctgccaggcagcattacccgctccgaggtggagcctcagcccccttcttagagctgttaagtctaaggtgtggcagagcagacagagatagaggcatctgaagtgagtataggttttttgactaagaaaaaaaacaacagcaaacatgactagtgatcttgaaatattttgtaccgagagaaagactgcatttatttgtagaatttatcaggtttctgataccactcattggatgtaaacatttcatgtttcctcacttttgatatgaaagtcggtaaaatgcagtattagtcccgggaggatgtgcacagctggtcagagcttccagaaggaatatcttccgaggactaaggtgatcaggttaagagggttcaacatcccacggccctcaccttcctccctcccacattccaggcatggagatatctggtttcagagtcagccccaaatctcctgcctataattactttaactggggtctctaaggttcccacttgagggctaaaatgtagttgggaaagagggcctactggggaggtctcacaggaggcagtgccctgggaaatgccaagtccagactcagtgccaagcagtaaccatctgcactcggggacagcgaggagctgaccatggcctctgatgaccagcaggtattagatggaagtgaatgagagagagagagagagagagtatgtgtgtgtgtgtgtatgtgtgtgttcgaacacatatgattgccagtatggagaatgaaagattaataatgctttctggagagtttgatgcaaaagtgggggaaacggagaaaaggcgctaaggctaaatccatctgcatttgctatatttcattagctaaagtcaggtcagggcagggccaaggcctccaattggcaaaggacagtgttatggctttaaaaagctgaaaccccaacctctaagtagatcacaatgttttctgagctttgcagtaattttctatggaaactaaaacctctaaaacatacaagctggcccaaatgagaacacaagcaaaagatgtggaagacagcaaaacctgagcactggtttgaaccaggcactgacatttgaaatgctttaagccttttcacattccttctttattccctccaaaaaaaaaagtcttgagtttaatttaggtctattttggctgagattagcatacctctgactcacaggatttaataaattatagtattattgaatacataggacatccctctaccccagcttactcttatctttttaatttaaaatagtattctgctaccaagaaggatgcaactgctagttttagatgtaaatagtgttatttactggactttgtgatattattttcttaactacactttactatggccctgttgaaaacagactatcaagttttttgtctctgttctgtcatctctcttaagccaggcacctttagagtgtttgcaatttgttcgaagtggttgaggatctcaggccctgctcacgtgaggtggagtgcaggggagctaccggtttccctgctgacctgctgaatgctaccttcccctcgagttgaatacaccttaaggaaaatgataacacgagggacgtgtaacttgttttgaagcattaaaaaccagcagctcttcactatgttccatattttaaccaaactactgtagactactaaacatagccaagccagaacattccttctggattaagcctaggccacttgaggggcagccaggggtgatggtgtcaggtgagaatcctgtgtcttgaaggagtggcctttacaggaagagtgcccatgttttcacctgcagcgttgccaccagagtgtgcaatacctcctgcacacaggctcagggtaaactgctccaaagctgggttttgtgttgcatacaaagtcaataaaatagttgctaatcctgaatggcagccagtgatgtgaaggtactattaaagtgaacaaaaactagattgcaacagttttctttccttgcttgaagtataacacacgctccatttgatcctgcctgaaagaagctaacattatatttgtgacagacagaggctccatcaagccaagcaacaattaacagctcaagtgtaagatttataaatgcccgtgtactcacccttcaattgttaccacccagaggttacaggactctttcccagcatttaggggaacaggcttttagagtatttagaagaccaggctataatcagtaatgtgcctgggagcaggaaatagctcccaatttatttatggccttgggaaaactcaatccggtgtctccttgtagctcagaacactaatagcccccctggaagagagtggcacattgagctccaaacccaatcaacatacatccacttggctgcagatctgactgctgggtcatgaaggccgtgaaatgatgtttgccctcaagtcactagatattttaagaagccctatttttctccctttttgcaggagtagagagatgaaagaggacagaccattgaaaacttttagatgcaggagaattgagacttccacaagggagagaaacacagcctccccagaatccattatgccatcgggttgtggcactctcacccttgccataataccgtttcctaacaatatcaaatcagtggatgaaatacaagctcagaaacaggaacattttcctaaatcataacctaatagcaaacaaaaattgaaaaaacaattattctgaagctcattattcttagatctgtagatatatatgtgttgactcccacaggatggcaccaagtaaagatcttaagagcatagtaggggttctgagaccgactgtcacccgtggatcctgatggggaagaacagaggcttcactgtagctatagttttccaccaagtcaatcaaattaaaacatgactcattgtcccctccaaagattcataaaattcttgagctaaagtgatcttctgaagaaaagccacctaacaatgttaggaggctcataaagctcatttctcttttccctggtatgcacaaatatcaagcctataaaaaagtaattatttccccaaacctgtaaccactgcattcgttttctttggaggaacattgtagcatttcaggagggtcgagagatctaaagagtttggtctgaatgtgtgtctgtacaattccctttggcattaaactctgaaacctacaatcaatggccttcaaattggtgttaaattgggagaacaccctactgctttctgagtctacgagcaacagaaagactggtcttagtgcaattaggcaggagggatttggactcagaaacagccacagaagtatttctcagcactcccagttcctgccaacttagctggaaacgatgccacagcgagaccagaaagaggagtcgccttaaggtatccctacaaagtcacctttctgataaaaaggagggaaaaaaaagttagatatctaaaataagcctagaatctcacacacagctgtgacttctaagtgaaactcttttctccctcatgtccttaaatagtcacagaatcacacacagcctgacttttaaagacaagcttggctacaggaaatgaaccaaccccaaagactcttctaacctgtctcctgactgggctccttcagaaagtgttctcctgttccatctgtagggctgcttactactggaacctaaaacaaaacctgttgtttgtaccatcactttttctggtgtttcctgtgcttttgtgattccaagtctgttcataagttctgaagataaattatgtgaaatcatattttggcatatgggggtggaggatgaattctttacagactttttaagatgatccatttgtaccacagaaaacattttggaagttgttatatatgagtatataaatttttcttttcatattttacattaaaataaagctttattcagtcattaa

SEQ ID NO: 163651 - DNA, 1668 bp, Homo sapiens
  Payload ID: 12226
  Gene Symbol: PARD3B
  Gene Name: par-3 family cell polarity regulator beta
  Uniprot ID: Q8TEW8
  ENST ID: ENST00000415947
  CDS Start-End: 208-447
gcggccgcccctccccgattcccgccacctgccgcctggccaggtggaaggggcgctgccgcgagcctccgggcctcagggtgttccggggagcggcgccccgggtctctgggcccacccgccccgggcgtcctccgagagtgggggctgcgcccgcggggtcagacacctgttcggcccggcccggcgtggtcgccgggggccaggatgaaagtgaccgtgtgcttcggcaggacgggcatcgtggtgccctgcaaggagggccagctgcgcgtcggcgagctcacccagcaggcgctgcagcggtacctgaagacccgggagaaggtgagcgcggcgcggaggagtggggcgcggctgcagccaaggcacctgccagggtcctggttactgggtgaagattcatcacttagaatatacagatggaggaatcctggatccagatgatgtcttggcagatgttgttgaagataaagacaagctgattgctgtgtttgaagaacaagaaccactccacaagattgagagccccagtggaaaccctgcagatcggcagagcccagatgcttttgagacagaagtggccgcccaactggccgcatttaagccaattggtggggagattgaagtaaccccttctgctctaaaactaggcactccactgctggtgaggagaagcagtgacccagtgccaggcccacctgctgatacccagccaagcgcttcacaccctggtggccagagtctgaaactggttgttccagtaggtatcctgctgcttgtagttctaatgaaagatcaaagtgctgtacccataggttaagtgggactttgcagttttaaacacattgataactagatagagatcttttgatagtatatatagtattagttatactaatagctagtatgggctattacttgtatatagttatagcgatagctattacgtatatggcactgattatgtgccaagtactattttacctgttttatattaagtcatctaaacttccacatcaaggtaagcacatgtttttatctccatttaactgataatgaaattgaggcagaggaaggtttagtaatttgtttaaggtcacatagctaataagtggcaaagcaaggaatttcacccaggtgttctggctccaaaatccttgcttctggccagtacactatactgttacatttccttcatcttccagtttcgtaatgtccaaggatatcattatatttttgttgtgttaacccaatgctttgcaaaaccataccatgtgagtggtgtacattttcaagctcccaatatcacgaaaatgtggtgccaggattggatgtgtagaactcagcattcagattgaagaaaaacaaaatcattgaccaaaagtgcttataaccagatatacttataactaataggttaagtggagaataatttcctgaagagatgatattctccttccatataggactgtgggatcttcctgctaaatcctcagttgctttgaagagctgtaattgtgaataatcctctcagatagcctgagaattcaattttggctaatgactatataccattgcaataggtaatcttcgataacatagccatattaaaaattccctaaaagcaagactctttctcactttaagtctcactgtctataacgc

SEQ ID NO: 163652 - DNA, 2968 bp, Homo sapiens
  Payload ID: 12226
  Gene Symbol: PARD3B
  Gene Name: par-3 family cell polarity regulator beta
  ENST ID: ENST00000462231
  CDS Start-End: 161-2968
aaggggcgctgccgcgagcctccgggcctcagggtgttccggggagcggcgccccgggtctctgggcccacccgccccgggcgtcctccgagagtgggggctgcgcccgcggggtcagacacctgttcggcccggcccggcgtggtcgccgggggccaggatgaaagtgaccgtgtgcttcggcaggacgggcatcgtggtgccctgcaaggagggccagctgcgcgtcggcgagctcacccagcaggcgctgcagcggtacctgaagacccgggagaagggtcctggttactgggtgaagattcatcacttagaatatacagatggaggaatcctggatccagatgatgtcttggcagatgttgttgaagataaagacaagctgattgctgtgtttgaagaacaagaaccactccacaagattgagagccccagtggaaaccctgcagatcggcagagcccagatgcttttgagacagaagtggccgcccaactggccgcatttaagccaattggtggggagattgaagtaaccccttctgctctaaaactaggcactccactgctggtgaggagaagcagtgacccagtgccaggcccacctgctgatacccagccaagcgcttcacaccctggtggccagagtctgaaactggttgttccagattccacgcagaacttggaagacagagaagttttgaatggtgtacagacagaactactaacttcgccaagaactaaggacacattgagtgatatgacaagaacagtggagatttctggggaaggaggcccattgggaatacatgtagtgcccttcttttcatctctgagtggaaggattctaggactcttcatccgaggcattgaagacaacagcaggtccaagcgggagggactatttcacgaaaatgaatgtattgtaaaaatcaacaatgtggatctcgtagacaaaacctttgctcaggctcaagatgtcttccgccaggcaatgaaatctccaagtgtgctcctccacgtgcttcctccacaaaaccgtgaacagtatgaaaagtcagtcattggctctcttaacatttttggtaataatgatggcgttttgaaaaccaaagtgccgcctcctgtccatggaaaatcgggactaaagacagcaaatctcacaggaaccgatagtcctgaaacagatgcatcagcttccctgcaacaaaacaagagtccccgagtaccaaggctgggaggaaaaccatcctctccctcactctcgcctctcatgggatttggcagcaataaaaatgcaaagaaaattaagattgacctaaagaaaggccctgaaggacttggtttcactgtggttaccagagactcttccatacatggtcccggtcccatttttgtaaaaaacattttaccaaagggagcagcaataaaagatggccgcctacaatcaggggacagaattttggaggtaaatgggagagatgtcaccggacgaacccaggaagagcttgtggccatgctcaggagcaccaagcagggggagacagcatcgctggtcattgcccgccaagaaggacattttctgccccgagagttgaaaggagaacctgactgctgtgcactctctctggagacaagcgagcagctcacctttgagatccccctgaatgattcaggttctgctggcctcggggtgagcttaaaagggaacaaatccagagaaactggaacagacttggggatttttatcaaatccatcattcatggaggcgctgcttttaaggatggtcgtctgcgaatgaatgaccagctgattgcagttaatggggaatctcttttgggaaagtccaaccacgaagctatggaaacacttaggcggtcaatgtccatggagggaaacatccgagggatgatccagttggtgattctgaggaggccagagagaccaatggaggatcctgcagagtgtggggcattttccaagccatgctttgagaactgtcaaaatgctgtaaccacctctaggcgaaatgataatagtatcctgcatccacttggcacttgcagtccacaagacaaacagaaaggtctattgctgcccaatgacggatgggccgagagtgaagttccaccttctccaacaccacattctgctctgggattgggcctcgaagattacagccacagctctggggtggattcagcagtatattttccagatcagcacatcaacttcagatctgtgacaccggccaggcagcctgaatcaattaatttgaaagcctcgaagagcatggaccttgtgccagatgaaagcaaggttcactcattggctggacaaaaatcggaatctccaagcaaagattttggtccaactctgggtttgaaaaagtccagctccttggagagtctgcagactgcagtggccgaggtcaggaagaatgaccttccctttcacaggccccggccgcacatggttcgaggccgaggctgcaatgagagctttagagcagccattgacaaatcctacgatggacctgaagaaatagaagctgacggtctgtctgataagagctctcactctggccaaggagctctgaattgtgagtctgcccctcaggggaattcggagctagaggacatggaaaataaagccaggaaagtcaaaaaaacgaaagagaaggagaagaaaaaggaaaagggcaaattgaaagtcaaggagaaaaagcgcaaagaggagaatgaagatccagaaaggaaaataaagaagaagggcttcggcgccatgctgaggtatgggcctgctttgaaggcaaagttggttctcattttgtctctcctgaaaaaagcgcacgcttttcctcgtcttcagccaaatgcatacggctctcaattctgtgctcgttctctttctgcagaggcagaggagctttttggggaaagttacagtgatgacaggacactgtcttaa

SEQ ID NO: 163653 - DNA, 7538 bp, Homo sapiens
  Payload ID: 12226
  Gene Symbol: PARD3B
  Gene Name: par-3 family cell polarity regulator beta
  ENST ID: ENST00000614500
  CDS Start-End: 1-3189
ctgattgctgtgtttgaagaacaagaaccactccacaagattgagagccccagtggaaaccctgcagatcggcagagcccagatgcttttgagacagaagtggccgcccaactggccgcatttaagccaattggtggggagattgaagtaaccccttctgctctaaaactaggcactccactgctggtgaggagaagcagtgacccagtgccaggcccacctgctgatacccagccaagcgcttcacaccctggtggccagagtctgaaactggttgttccagattccacgcagaacttggaagacagagaagttttgaatggtgtacagacagaactactaacttcgccaagaactaaggacacattgagtgatatgacaagaacagtggagatttctggggaaggaggcccattgggaatacatgtagtgcccttcttttcatctctgagtggaaggattctaggactcttcatccgaggcattgaagacaacagcaggtccaagcgggagggactatttcacgaaaatgaatgtattgtaaaaatcaacaatgtggatctcgtagacaaaacctttgctcaggctcaagatgtcttccgccaggcaatgaaatctccaagtgtgctcctccacgtgcttcctccacaaaaccgtgaacagtatgaaaagtcagtcattggctctcttaacatttttggtaataatgatggcgttttgaaaaccaaagtgccgcctcctgtccatggaaaatcgggactaaagacagcaaatctcacaggaaccgatagtcctgaaacagatgcatcagcttccctgcaacaaaacaagagtccccgagtaccaaggctgggaggaaaaccatcctctccctcactctcgcctctcatgggatttggcagcaataaaaatgcaaagaaaattaagattgacctaaagaaaggccctgaaggacttggtttcactgtggttaccagagactcttccatacatggtcccggtcccatttttgtaaaaaacattttaccaaagggagcagcaataaaagatggccgcctacaatcaggggacagaattttggaggtaaatgggagagatgtcaccggacgaacccaggaagagcttgtggccatgctcaggagcaccaagcagggggagacagcatcgctggtcattgcccgccaagaaggacattttctgccccgagagttgaaaggagaacctgactgctgtgcactctctctggagacaagcgagcagctcacctttgagatccccctgaatgattcaggttctgctggcctcggggtgagcttaaaagggaacaaatccagagaaactggaacagacttggggatttttatcaaatccatcattcatggaggcgctgcttttaaggatggtcgtctgcgaatgaatgaccagctgattgcagttaatggggaatctcttttgggaaagtccaaccacgaagctatggaaacacttaggcggtcaatgtccatggagggaaacatccgagggatgatccagttggtgattctgaggaggccagagagaccaatggaggatcctgcagagtgtggggcattttccaagccatgctttgagaactgtcaaaatgctgtaaccacctctaggcgaaatgataatagtatcctgcatccacttggcacttgcagtccacaagacaaacagaaaggtctattgctgcccaatgacggatgggccgagagtgaagttccaccttctccaacaccacattctgctctgggattgggcctcgaagattacagccacagctctggggtggattcagcagtatattttccagatcagcacatcaacttcagatctgtgacaccggccaggcagcctgaatcaattaatttgaaagcctcgaagagcatggaccttgtgccagatgaaagcaaggttcactcattggctggacaaaaatcggacggtctgtctgataagagctctcactctggccaaggagctctgaattgtgagtctgcccctcaggggaattcggagctagaggacatggaaaataaagccaggaaagtcaaaaaaacgaaagagaaggagaagaaaaaggaaaagggcaaattgaaagtcaaggagaaaaagcgcaaagaggagaatgaagatccagaaaggaaaataaagaagaagggcttcggcgccatgctgagatttggaaagaagaaagaggataagggtggaaaggctgagcagaaaggtactctgaaacatggtggcctgagagaagaagagctggagaaaatgaaagaagagcgtgaaaggattggagcaaaacatcaggagctaagggaaaagcaggcaagaggtcttcttgattatgctactggtgcaattggatcagtgtatgatatggatgatgatgaaatggaccccaattatgccagagtgaaccactttcgggaaccatgcacatcagcaaatgtctttagatctccatctccccctcgagctggaccatttggttaccctcgggatggccatccactgtctccagaaagagaccacttagagggtctctatgccaaggtcaacaagccataccatccactggttccagctgacagtggccgtcctacgggtggaagcactgaccgtatccagaagttgcggaaagagtattatcaggctcggagggaaggtttccctttatatgaagacgacgaaggaagagcaaggccatctgagtatgacctactctgggtgcctggaaggggtccagatgggaatgcacacaacctccgctttgaagggatggagaggcagtacgcatccttacccaggggaggacccgcagatcctgtagactatctgccagcagcacctcgggggctctacaaggaaagggagcttccctattatccaggggctcatcctatgcaccctcccaaagggagctatccccgccccacagagctcagggtggcagatctccggtatcctcagcactacccacccccgccagctccccagcacaaaggaccctttcgacaagacgttccgccttcccctccccagcaccaaagaatgccagcctatcaggaaacaggcagaccagggccccgtgggggcagcccagaccagtacccttaccgaacccaggattcccggcagaagaaccccatgactgcagccgtatagctgagtgccaccgaggccagcccggtccagaaaggaaggtgtctactctacctttgccctttctaaacctgaagacctccttggtgttaggaattctccatgttactgataagctttttctcactgacattgtaacgcatgactgctaatcagagagaaaaagaaggggaagggaattggggaggaaaaaaaatcagaaggaagacgaaagatggggctataaaaacaaaactacctgatagttgaaacgctttcagagttgttcaaatcagtgagagtggcaacggaacacacaaacaactaattatggaactctactctggggatcctctctggctagataacctgtgctgatgtgcagacacgtggacatccccctctgagactggcggtccagaggcagtctctgccaggcagcattacccgctccgaggtggagcctcagcccccttcttagagctgttaagtctaaggtgtggcagagcagacagagatagaggcatctgaagtgagtataggttttttgactaagaaaaaaaacaacagcaaacatgactagtgatcttgaaatattttgtaccgagagaaagactgcatttatttgtagaatttatcaggtttctgataccactcattggatgtaaacatttcatgtttcctcacttttgatatgaaagtcggtaaaatgcagtattagtcccgggaggatgtgcacagctggtcagagcttccagaaggaatatcttccgaggactaaggtgatcaggttaagagggttcaacatcccacggccctcaccttcctccctcccacattccaggcatggagatatctggtttcagagtcagccccaaatctcctgcctataattactttaactggggtctctaaggttcccacttgagggctaaaatgtagttgggaaagagggcctactggggaggtctcacaggaggcagtgccctgggaaatgccaagtccagactcagtgccaagcagtaaccatctgcactcggggacagcgaggagctgaccatggcctctgatgaccagcaggtattagatggaagtgaatgagagagagagagagagagagtatgtgtgtgtgtgtgtatgtgtgtgttcgaacacatatgattgccagtatggagaatgaaagattaataatgctttctggagagtttgatgcaaaagtgggggaaacggagaaaaggcgctaaggctaaatccatctgcatttgctatatttcattagctaaagtcaggtcagggcagggccaaggcctccaattggcaaaggacagtgttatggctttaaaaagctgaaaccccaacctctaagtagatcacaatgttttctgagctttgcagtaattttctatggaaactaaaacctctaaaacatacaagctggcccaaatgagaacacaagcaaaagatgtggaagacagcaaaacctgagcactggtttgaaccaggcactgacatttgaaatgctttaagccttttcacattccttctttattccctccaaaaaaaaaagtcttgagtttaatttaggtctattttggctgagattagcatacctctgactcacaggatttaataaattatagtattattgaatacataggacatccctctaccccagcttactcttatctttttaatttaaaatagtattctgctaccaagaaggatgcaactgctagttttagatgtaaatagtgttatttactggactttgtgatattattttcttaactacactttactatggccctgttgaaaacagactatcaagttttttgtctctgttctgtcatctctcttaagccaggcacctttagagtgtttgcaatttgttcgaagtggttgaggatctcaggccctgctcacgtgaggtggagtgcaggggagctaccggtttccctgctgacctgctgaatgctaccttcccctcgagttgaatacaccttaaggaaaatgataacacgagggacgtgtaacttgttttgaagcattaaaaaccagcagctcttcactatgttccatattttaaccaaactactgtagactactaaacatagccaagccagaacattccttctggattaagcctaggccacttgaggggcagccaggggtgatggtgtcaggtgagaatcctgtgtcttgaaggagtggcctttacaggaagagtgcccatgttttcacctgcagcgttgccaccagagtgtgcaatacctcctgcacacaggctcagggtaaactgctccaaagctgggttttgtgttgcatacaaagtcaataaaatagttgctaatcctgaatggcagccagtgatgtgaaggtactattaaagtgaacaaaaactagattgcaacagttttctttccttgcttgaagtataacacacgctccatttgatcctgcctgaaagaagctaacattatatttgtgacagacagaggctccatcaagccaagcaacaattaacagctcaagtgtaagatttataaatgcccgtgtactcacccttcaattgttaccacccagaggttacaggactctttcccagcatttaggggaacaggcttttagagtatttagaagaccaggctataatcagtaatgtgcctgggagcaggaaatagctcccaatttatttatggccttgggaaaactcaatccggtgtctccttgtagctcagaacactaatagcccccctggaagagagtggcacattgagctccaaacccaatcaacatacatccacttggctgcagatctgactgctgggtcatgaaggccgtgaaatgatgtttgccctcaagtcactagatattttaagaagccctatttttctccctttttgcaggagtagagagatgaaagaggacagaccattgaaaacttttagatgcaggagaattgagacttccacaagggagagaaacacagcctccccagaatccattatgccatcgggttgtggcactctcacccttgccataataccgtttcctaacaatatcaaatcagtggatgaaatacaagctcagaaacaggaacattttcctaaatcataacctaatagcaaacaaaaattgaaaaaacaattattctgaagctcattattcttagatctgtagatatatatgtgttgactcccacaggatggcaccaagtaaagatcttaagagcatagtaggggttctgagaccgactgtcacccgtggatcctgatggggaagaacagaggcttcactgtagctatagttttccaccaagtcaatcaaattaaaacatgactcattgtcccctccaaagattcataaaattcttgagctaaagtgatcttctgaagaaaagccacctaacaatgttaggaggctcataaagctcatttctcttttccctggtatgcacaaatatcaagcctataaaaaagtaattatttccccaaacctgtaaccactgcattcgttttctttggaggaacattgtagcatttcaggagggtcgagagatctaaagagtttggtctgaatgtgtgtctgtacaattccctttggcattaaactctgaaacctacaatcaatggccttcaaattggtgttaaattgggagaacaccctactgctttctgagtctacgagcaacagaaagactggtcttagtgcaattaggcaggagggatttggactcagaaacagccacagaagtatttctcagcactcccagttcctgccaacttagctggaaacgatgccacagcgagaccagaaagaggagtcgccttaaggtatccctacaaagtcacctttctgataaaaaggagggaaaaaaaagttagatatctaaaataagcctagaatctcacacacagctgtgacttctaagtgaaactcttttctccctcatgtccttaaatagtcacagaatcacacacagcctgacttttaaagacaagcttggctacaggaaatgaaccaaccccaaagactcttctaacctgtctcctgactgggctccttcagaaagtgttctcctgttccatctgtagggctgcttactactggaacctaaaacaaaacctgttgtttgtaccatcactttttctggtgtttcctgtgcttttgtgattccaagtctgttcataagttctgaagataaattatgtgaaatcatattttggcatatgggggtggaggatgaattctttacagactttttaagatgatccatttgtaccacagaaaacattttggaagttgttatatatgagtatataaatttttcttttcatattttacattaaaataaagctttattcagtcattaa

SEQ ID NO: 163654 - DNA, 7442 bp, Homo sapiens
  Payload ID: 12226
  Gene Symbol: PARD3B
  Gene Name: par-3 family cell polarity regulator beta
  ENST ID: ENST00000622699
  CDS Start-End: 1-3093
ctgattgctgtgtttgaagaacaagaaccactccacaagattgagagccccagtggaaaccctgcagatcggcagagcccagatgcttttgagacagaagtggccgcccaactggccgcatttaagccaattggtggggagattgaagtaaccccttctgctctaaaactaggcactccactgctggtgaggagaagcagtgacccagtgccaggcccacctgctgatacccagccaagcgcttcacaccctggtggccagagtctgaaactggttgttccagattccacgcagaacttggaagacagagaagttttgaatggtgtacagacagaactactaacttcgccaagaactaaggacacattgagtgatatgacaagaacagtggagatttctggggaaggaggcccattgggaatacatgtagtgcccttcttttcatctctgagtggaaggattctaggactcttcatccgaggcattgaagacaacagcaggtccaagcgggagggactatttcacgaaaatgaatgtattgtaaaaatcaacaatgtggatctcgtagacaaaacctttgctcaggctcaagatgtcttccgccaggcaatgaaatctccaagtgtgctcctccacgtgcttcctccacaaaaccgtgaacagtatgaaaagtcagtcattggctctcttaacatttttggtaataatgatggcgttttgaaaaccaaagtgccgcctcctgtccatggaaaatcgggactaaagacagcaaatctcacaggaaccgatagtcctgaaacagatgcatcagcttccctgcaacaaaacaagagtccccgagtaccaaggctgggaggaaaaccatcctctccctcactctcgcctctcatgggatttggcagcaataaaaatgcaaagaaaattaagattgacctaaagaaaggccctgaaggacttggtttcactgtggttaccagagactcttccatacatggtcccggtcccatttttgtaaaaaacattttaccaaagggagcagcaataaaagatggccgcctacaatcaggggacagaattttggaggtaaatgggagagatgtcaccggacgaacccaggaagagcttgtggccatgctcaggagcaccaagcagggggagacagcatcgctggtcattgcccgccaagaaggacattttctgccccgagagttgaaaggagaacctgactgctgtgcactctctctggagacaagcgagcagctcacctttgagatccccctgaatgattcaggttctgctggcctcggggtgagcttaaaagggaacaaatccagagaaactggaacagacttggggatttttatcaaatccatcattcatggaggcgctgcttttaaggatggtcgtctgcgaatgaatgaccagctgattgcagttaatggggaatctcttttgggaaagtccaaccacgaagctatggaaacacttaggcggtcaatgtccatggagggaaacatccgagggatgatccagttggtgattctgaggaggccagagagaccaatggaggatcctgcagagtgtggggcattttccaagccatgctttgagaactgtcaaaatgctgtaaccacctctaggcgaaatgataatagtatcctgcatccacttggcacttgcagtccacaagacaaacagaaaggtctattgctgcccaatgacggatgggccgagagtgaagttccaccttctccaacaccacattctgctctgggattgggcctcgaagattacagccacagctctggggtggattcagcagtatattttccagatcagcacatcaacttcagatctgtgacaccggccaggcagcctgaatcaattaatttgaaagcctcgaagagcatggaccttgtgccagatgaaagcaaggttcactcattggctggacaaaaatcggaatctccaagcaaagattttggtccaactctgggtttgaaaaagtccagctccttggagagtctgcagactgcagtggccgaggtcaggaagaatgaccttccctttcacaggccccggccgcacatggttcgaggccgaggctgcaatgagagctttagagcagccattgacaaatcctacgatggacctgaagaaatagaagctgacggtctgtctgataagagctctcactctggccaaggagctctgaattgtgagtctgcccctcaggggaattcggagctagaggacatggaaaataaagccaggaaagtcaaaaaaacgaaagagaaggagaagaaaaaggaaaagggcaaattgaaagtcaaggagaaaaagcgcaaagaggagaatgaagatccagaaaggaaaataaagaagaagggcttcggcgccatgctgagatttggaaagaagaaagaggataagggtggaaaggctgagcagaaaggtactctgaaacatggtggcctgagagaagaagagctggagaaaatgaaagaagagcgtgaaagtggccgtcctacgggtggaagcactgaccgtatccagaagttgcggaaagagtattatcaggctcggagggaaggtttccctttatatgaagacgacgaaggaagagcaaggccatctgagtatgacctactctgggtgcctggaaggggtccagatgggaatgcacacaacctccgctttgaagggatggagaggcagtacgcatccttacccaggggaggacccgcagatcctgtagactatctgccagcagcacctcgggggctctacaaggaaagggagcttccctattatccaggggctcatcctatgcaccctcccaaagggagctatccccgccccacagagctcagggtggcagatctccggtatcctcagcactacccacccccgccagctccccagcacaaaggaccctttcgacaagacgttccgccttcccctccccagcaccaaagaatgccagcctatcaggaaacaggcagaccagggccccgtgggggcagcccagaccagtacccttaccgaacccaggattcccggcagaagaaccccatgactgcagccgtatagctgagtgccaccgaggccagcccggtccagaaaggaaggtgtctactctacctttgccctttctaaacctgaagacctccttggtgttaggaattctccatgttactgataagctttttctcactgacattgtaacgcatgactgctaatcagagagaaaaagaaggggaagggaattggggaggaaaaaaaatcagaaggaagacgaaagatggggctataaaaacaaaactacctgatagttgaaacgctttcagagttgttcaaatcagtgagagtggcaacggaacacacaaacaactaattatggaactctactctggggatcctctctggctagataacctgtgctgatgtgcagacacgtggacatccccctctgagactggcggtccagaggcagtctctgccaggcagcattacccgctccgaggtggagcctcagcccccttcttagagctgttaagtctaaggtgtggcagagcagacagagatagaggcatctgaagtgagtataggttttttgactaagaaaaaaaacaacagcaaacatgactagtgatcttgaaatattttgtaccgagagaaagactgcatttatttgtagaatttatcaggtttctgataccactcattggatgtaaacatttcatgtttcctcacttttgatatgaaagtcggtaaaatgcagtattagtcccgggaggatgtgcacagctggtcagagcttccagaaggaatatcttccgaggactaaggtgatcaggttaagagggttcaacatcccacggccctcaccttcctccctcccacattccaggcatggagatatctggtttcagagtcagccccaaatctcctgcctataattactttaactggggtctctaaggttcccacttgagggctaaaatgtagttgggaaagagggcctactggggaggtctcacaggaggcagtgccctgggaaatgccaagtccagactcagtgccaagcagtaaccatctgcactcggggacagcgaggagctgaccatggcctctgatgaccagcaggtattagatggaagtgaatgagagagagagagagagagagtatgtgtgtgtgtgtgtatgtgtgtgttcgaacacatatgattgccagtatggagaatgaaagattaataatgctttctggagagtttgatgcaaaagtgggggaaacggagaaaaggcgctaaggctaaatccatctgcatttgctatatttcattagctaaagtcaggtcagggcagggccaaggcctccaattggcaaaggacagtgttatggctttaaaaagctgaaaccccaacctctaagtagatcacaatgttttctgagctttgcagtaattttctatggaaactaaaacctctaaaacatacaagctggcccaaatgagaacacaagcaaaagatgtggaagacagcaaaacctgagcactggtttgaaccaggcactgacatttgaaatgctttaagccttttcacattccttctttattccctccaaaaaaaaaagtcttgagtttaatttaggtctattttggctgagattagcatacctctgactcacaggatttaataaattatagtattattgaatacataggacatccctctaccccagcttactcttatctttttaatttaaaatagtattctgctaccaagaaggatgcaactgctagttttagatgtaaatagtgttatttactggactttgtgatattattttcttaactacactttactatggccctgttgaaaacagactatcaagttttttgtctctgttctgtcatctctcttaagccaggcacctttagagtgtttgcaatttgttcgaagtggttgaggatctcaggccctgctcacgtgaggtggagtgcaggggagctaccggtttccctgctgacctgctgaatgctaccttcccctcgagttgaatacaccttaaggaaaatgataacacgagggacgtgtaacttgttttgaagcattaaaaaccagcagctcttcactatgttccatattttaaccaaactactgtagactactaaacatagccaagccagaacattccttctggattaagcctaggccacttgaggggcagccaggggtgatggtgtcaggtgagaatcctgtgtcttgaaggagtggcctttacaggaagagtgcccatgttttcacctgcagcgttgccaccagagtgtgcaatacctcctgcacacaggctcagggtaaactgctccaaagctgggttttgtgttgcatacaaagtcaataaaatagttgctaatcctgaatggcagccagtgatgtgaaggtactattaaagtgaacaaaaactagattgcaacagttttctttccttgcttgaagtataacacacgctccatttgatcctgcctgaaagaagctaacattatatttgtgacagacagaggctccatcaagccaagcaacaattaacagctcaagtgtaagatttataaatgcccgtgtactcacccttcaattgttaccacccagaggttacaggactctttcccagcatttaggggaacaggcttttagagtatttagaagaccaggctataatcagtaatgtgcctgggagcaggaaatagctcccaatttatttatggccttgggaaaactcaatccggtgtctccttgtagctcagaacactaatagcccccctggaagagagtggcacattgagctccaaacccaatcaacatacatccacttggctgcagatctgactgctgggtcatgaaggccgtgaaatgatgtttgccctcaagtcactagatattttaagaagccctatttttctccctttttgcaggagtagagagatgaaagaggacagaccattgaaaacttttagatgcaggagaattgagacttccacaagggagagaaacacagcctccccagaatccattatgccatcgggttgtggcactctcacccttgccataataccgtttcctaacaatatcaaatcagtggatgaaatacaagctcagaaacaggaacattttcctaaatcataacctaatagcaaacaaaaattgaaaaaacaattattctgaagctcattattcttagatctgtagatatatatgtgttgactcccacaggatggcaccaagtaaagatcttaagagcatagtaggggttctgagaccgactgtcacccgtggatcctgatggggaagaacagaggcttcactgtagctatagttttccaccaagtcaatcaaattaaaacatgactcattgtcccctccaaagattcataaaattcttgagctaaagtgatcttctgaagaaaagccacctaacaatgttaggaggctcataaagctcatttctcttttccctggtatgcacaaatatcaagcctataaaaaagtaattatttccccaaacctgtaaccactgcattcgttttctttggaggaacattgtagcatttcaggagggtcgagagatctaaagagtttggtctgaatgtgtgtctgtacaattccctttggcattaaactctgaaacctacaatcaatggccttcaaattggtgttaaattgggagaacaccctactgctttctgagtctacgagcaacagaaagactggtcttagtgcaattaggcaggagggatttggactcagaaacagccacagaagtatttctcagcactcccagttcctgccaacttagctggaaacgatgccacagcgagaccagaaagaggagtcgccttaaggtatccctacaaagtcacctttctgataaaaaggagggaaaaaaaagttagatatctaaaataagcctagaatctcacacacagctgtgacttctaagtgaaactcttttctccctcatgtccttaaatagtcacagaatcacacacagcctgacttttaaagacaagcttggctacaggaaatgaaccaaccccaaagactcttctaacctgtctcctgactgggctccttcagaaagtgttctcctgttccatctgtagggctgcttactactggaacctaaaacaaaacctgttgtttgtaccatcactttttctggtgtttcctgtgcttttgtgattccaagtctgttcataagttctgaagataaattatgtgaaatcatattttggcatatgggggtggaggatgaattctttacagactttttaagatgatccatttgtaccacagaaaacattttggaagttgttatatatgagtatataaatttttcttttcatattttacattaaaataaagctttattcagtcattaa

SEQ ID NO: 163655 - DNA, 7559 bp, Homo sapiens
  Payload ID: 12226
  Gene Symbol: PARD3B
  Gene Name: par-3 family cell polarity regulator beta
  ENST ID: ENST00000613457
  CDS Start-End: 1-3210
ctgattgctgtgtttgaagaacaagaaccactccacaagattgagagccccagtggaaaccctgcagatcggcagagcccagatgcttttgagacagaagtggccgcccaactggccgcatttaagccaattggtggggagattgaagtaaccccttctgctctaaaactaggcactccactgctggtgaggagaagcagtgacccagtgccaggcccacctgctgatacccagccaagcgcttcacaccctggtggccagagtctgaaactggttgttccagattccacgcagaacttggaagacagagaagttttgaatggtgtacagacagaactactaacttcgccaagaactaaggacacattgagtgatatgacaagaacagtggagatttctggggaaggaggcccattgggaatacatgtagtgcccttcttttcatctctgagtggaaggattctaggactcttcatccgaggcattgaagacaacagcaggtccaagcgggagggactatttcacgaaaatgaatgtattgtaaaaatcaacaatgtggatctcgtagacaaaacctttgctcaggctcaagatgtcttccgccaggcaatgaaatctccaagtgtgctcctccacgtgcttcctccacaaaaccgtgaacagtatgaaaagtcagtcattggctctcttaacatttttggtaataatgatggcgttttgaaaaccaaagtgccgcctcctgtccatggaaaatcgggactaaagacagcaaatctcacaggaaccgatagtcctgaaacagatgcatcagcttccctgcaacaaaacaagagtccccgagtaccaaggctgggaggaaaaccatcctctccctcactctcgcctctcatgggatttggcagcaataaaaatgcaaagaaaattaagattgacctaaagaaaggccctgaaggacttggtttcactgtggttaccagagactcttccatacatggtcccggtcccatttttgtaaaaaacattttaccaaagggagcagcaataaaagatggccgcctacaatcaggggacagaattttggaggtaaatgggagagatgtcaccggacgaacccaggaagagcttgtggccatgctcaggagcaccaagcagggggagacagcatcgctggtcattgcccgccaagaaggacattttctgccccgagagttggatggtcgtctgcgaatgaatgaccagctgattgcagttaatggggaatctcttttgggaaagtccaaccacgaagctatggaaacacttaggcggtcaatgtccatggagggaaacatccgagggatgatccagttggtgattctgaggaggccagagagaccaatggaggatcctgcagagtgtggggcattttccaagccatgctttgagaactgtcaaaatgctgtaaccacctctaggcgaaatgataatagtatcctgcatccacttggcacttgcagtccacaagacaaacagaaaggtctattgctgcccaatgacggatgggccgagagtgaagttccaccttctccaacaccacattctgctctgggattgggcctcgaagattacagccacagctctggggtggattcagcagtatattttccagatcagcacatcaacttcagatctgtgacaccggccaggcagcctgaatcaattaatttgaaagcctcgaagagcatggaccttgtgccagatgaaagcaaggttcactcattggctggacaaaaatcggaatctccaagcaaagattttggtccaactctgggtttgaaaaagtccagctccttggagagtctgcagactgcagtggccgaggtcaggaagaatgaccttccctttcacaggccccggccgcacatggttcgaggccgaggctgcaatgagagctttagagcagccattgacaaatcctacgatggacctgaagaaatagaagctgacggtctgtctgataagagctctcactctggccaaggagctctgaattgtgagtctgcccctcaggggaattcggagctagaggacatggaaaataaagccaggaaagtcaaaaaaacgaaagagaaggagaagaaaaaggaaaagggcaaattgaaagtcaaggagaaaaagcgcaaagaggagaatgaagatccagaaaggaaaataaagaagaagggcttcggcgccatgctgagatttggaaagaagaaagaggataagggtggaaaggctgagcagaaaggtactctgaaacatggtggcctgagagaagaagagctggagaaaatgaaagaagagcgtgaaaggattggagcaaaacatcaggagctaagggaaaagcaggcaagaggtcttcttgattatgctactggtgcaattggatcagtgtatgatatggatgatgatgaaatggaccccaattatgccagagtgaaccactttcgggaaccatgcacatcagcaaatgtctttagatctccatctccccctcgagctggaccatttggttaccctcgggatggccatccactgtctccagaaagagaccacttagagggtctctatgccaaggtcaacaagccataccatccactggttccagctgacagtggccgtcctacgggtggaagcactgaccgtatccagaagttgcggaaagagtattatcaggctcggagggaaggtttccctttatatgaagacgacgaaggaagagcaaggccatctgagtatgacctactctgggtgcctggaaggggtccagatgggaatgcacacaacctccgctttgaagggatggagaggcagtacgcatccttacccaggggaggacccgcagatcctgtagactatctgccagcagcacctcgggggctctacaaggaaagggagcttccctattatccaggggctcatcctatgcaccctcccaaagggagctatccccgccccacagagctcagggtggcagatctccggtatcctcagcactacccacccccgccagctccccagcacaaaggaccctttcgacaagacgttccgccttcccctccccagcaccaaagaatgccagcctatcaggaaacaggcagaccagggccccgtgggggcagcccagaccagtacccttaccgaacccaggattcccggcagaagaaccccatgactgcagccgtatagctgagtgccaccgaggccagcccggtccagaaaggaaggtgtctactctacctttgccctttctaaacctgaagacctccttggtgttaggaattctccatgttactgataagctttttctcactgacattgtaacgcatgactgctaatcagagagaaaaagaaggggaagggaattggggaggaaaaaaaatcagaaggaagacgaaagatggggctataaaaacaaaactacctgatagttgaaacgctttcagagttgttcaaatcagtgagagtggcaacggaacacacaaacaactaattatggaactctactctggggatcctctctggctagataacctgtgctgatgtgcagacacgtggacatccccctctgagactggcggtccagaggcagtctctgccaggcagcattacccgctccgaggtggagcctcagcccccttcttagagctgttaagtctaaggtgtggcagagcagacagagatagaggcatctgaagtgagtataggttttttgactaagaaaaaaaacaacagcaaacatgactagtgatcttgaaatattttgtaccgagagaaagactgcatttatttgtagaatttatcaggtttctgataccactcattggatgtaaacatttcatgtttcctcacttttgatatgaaagtcggtaaaatgcagtattagtcccgggaggatgtgcacagctggtcagagcttccagaaggaatatcttccgaggactaaggtgatcaggttaagagggttcaacatcccacggccctcaccttcctccctcccacattccaggcatggagatatctggtttcagagtcagccccaaatctcctgcctataattactttaactggggtctctaaggttcccacttgagggctaaaatgtagttgggaaagagggcctactggggaggtctcacaggaggcagtgccctgggaaatgccaagtccagactcagtgccaagcagtaaccatctgcactcggggacagcgaggagctgaccatggcctctgatgaccagcaggtattagatggaagtgaatgagagagagagagagagagagtatgtgtgtgtgtgtgtatgtgtgtgttcgaacacatatgattgccagtatggagaatgaaagattaataatgctttctggagagtttgatgcaaaagtgggggaaacggagaaaaggcgctaaggctaaatccatctgcatttgctatatttcattagctaaagtcaggtcagggcagggccaaggcctccaattggcaaaggacagtgttatggctttaaaaagctgaaaccccaacctctaagtagatcacaatgttttctgagctttgcagtaattttctatggaaactaaaacctctaaaacatacaagctggcccaaatgagaacacaagcaaaagatgtggaagacagcaaaacctgagcactggtttgaaccaggcactgacatttgaaatgctttaagccttttcacattccttctttattccctccaaaaaaaaaagtcttgagtttaatttaggtctattttggctgagattagcatacctctgactcacaggatttaataaattatagtattattgaatacataggacatccctctaccccagcttactcttatctttttaatttaaaatagtattctgctaccaagaaggatgcaactgctagttttagatgtaaatagtgttatttactggactttgtgatattattttcttaactacactttactatggccctgttgaaaacagactatcaagttttttgtctctgttctgtcatctctcttaagccaggcacctttagagtgtttgcaatttgttcgaagtggttgaggatctcaggccctgctcacgtgaggtggagtgcaggggagctaccggtttccctgctgacctgctgaatgctaccttcccctcgagttgaatacaccttaaggaaaatgataacacgagggacgtgtaacttgttttgaagcattaaaaaccagcagctcttcactatgttccatattttaaccaaactactgtagactactaaacatagccaagccagaacattccttctggattaagcctaggccacttgaggggcagccaggggtgatggtgtcaggtgagaatcctgtgtcttgaaggagtggcctttacaggaagagtgcccatgttttcacctgcagcgttgccaccagagtgtgcaatacctcctgcacacaggctcagggtaaactgctccaaagctgggttttgtgttgcatacaaagtcaataaaatagttgctaatcctgaatggcagccagtgatgtgaaggtactattaaagtgaacaaaaactagattgcaacagttttctttccttgcttgaagtataacacacgctccatttgatcctgcctgaaagaagctaacattatatttgtgacagacagaggctccatcaagccaagcaacaattaacagctcaagtgtaagatttataaatgcccgtgtactcacccttcaattgttaccacccagaggttacaggactctttcccagcatttaggggaacaggcttttagagtatttagaagaccaggctataatcagtaatgtgcctgggagcaggaaatagctcccaatttatttatggccttgggaaaactcaatccggtgtctccttgtagctcagaacactaatagcccccctggaagagagtggcacattgagctccaaacccaatcaacatacatccacttggctgcagatctgactgctgggtcatgaaggccgtgaaatgatgtttgccctcaagtcactagatattttaagaagccctatttttctccctttttgcaggagtagagagatgaaagaggacagaccattgaaaacttttagatgcaggagaattgagacttccacaagggagagaaacacagcctccccagaatccattatgccatcgggttgtggcactctcacccttgccataataccgtttcctaacaatatcaaatcagtggatgaaatacaagctcagaaacaggaacattttcctaaatcataacctaatagcaaacaaaaattgaaaaaacaattattctgaagctcattattcttagatctgtagatatatatgtgttgactcccacaggatggcaccaagtaaagatcttaagagcatagtaggggttctgagaccgactgtcacccgtggatcctgatggggaagaacagaggcttcactgtagctatagttttccaccaagtcaatcaaattaaaacatgactcattgtcccctccaaagattcataaaattcttgagctaaagtgatcttctgaagaaaagccacctaacaatgttaggaggctcataaagctcatttctcttttccctggtatgcacaaatatcaagcctataaaaaagtaattatttccccaaacctgtaaccactgcattcgttttctttggaggaacattgtagcatttcaggagggtcgagagatctaaagagtttggtctgaatgtgtgtctgtacaattccctttggcattaaactctgaaacctacaatcaatggccttcaaattggtgttaaattgggagaacaccctactgctttctgagtctacgagcaacagaaagactggtcttagtgcaattaggcaggagggatttggactcagaaacagccacagaagtatttctcagcactcccagttcctgccaacttagctggaaacgatgccacagcgagaccagaaagaggagtcgccttaaggtatccctacaaagtcacctttctgataaaaaggagggaaaaaaaagttagatatctaaaataagcctagaatctcacacacagctgtgacttctaagtgaaactcttttctccctcatgtccttaaatagtcacagaatcacacacagcctgacttttaaagacaagcttggctacaggaaatgaaccaaccccaaagactcttctaacctgtctcctgactgggctccttcagaaagtgttctcctgttccatctgtagggctgcttactactggaacctaaaacaaaacctgttgtttgtaccatcactttttctggtgtttcctgtgcttttgtgattccaagtctgttcataagttctgaagataaattatgtgaaatcatattttggcatatgggggtggaggatgaattctttacagactttttaagatgatccatttgtaccacagaaaacattttggaagttgttatatatgagtatataaatttttcttttcatattttacattaaaataaagctttattcagtcattaa

SEQ ID NO: 163656 - DNA, 1248 bp, Homo sapiens
  Payload ID: 12227
  Gene Symbol: PARD6A
  Gene Name: par-6 family cell polarity regulator alpha
  Uniprot ID: Q9NPB6
  ENST ID: ENST00000219255
  CDS Start-End: 81-1121
cgcgggcgggccggccgggctgtgcacctgcgcctcggcgggccgcctggggcaccgtccccggcccgcccggccccgccatggcccggccgcagaggactccggcgcgcagtcccgatagcatcgtcgaggtgaagagcaaatttgacgccgagttccgacgcttcgcgctgcctcgcgcttcggtgagcggcttccaggagttctcgcggttgctgcgggcggtgcaccagatcccgggcctggacgtgctacttggctatacggatgctcatggcgacctgctgcccctcaccaacgacgacagcctgcaccgggccctggccagcgggcccccgccactgcgcctactggtgcagaagcgggcagaagctgactccagcggcctggcttttgcctccaactctctgcagcggcgcaagaaagggctcttgctgcggccagtggcacccctgcgcacccggccacccttgctaatcagcctgccccaagatttccgccaggtttcctcagtcatagacgtggacctactgcctgagacccaccgacgggtgcggctgcacaagcatggttcagaccgccccctgggcttctacatccgagatggcatgagcgtgcgtgtggctccccagggcctggagcgggttccaggaatcttcatctcccgcctggtacgtgggggtctggctgagagtacagggctgctggcggtcagtgatgagatcctcgaggtcaatggcattgaagtagccgggaagaccttggaccaagtgacggacatgatggttgccaacagccataacctcattgtcactgtcaagcccgccaaccagcgcaataacgtggtgcgaggggcatctgggcgtttgacaggtcctccctctgcagggcctgggcctgctgagcctgatagtgacgatgacagcagtgacctggtcattgagaaccgccagcctcccagttccaatgggctgtctcaggggcccccgtgctgggacctgcaccctggctgccgacatcctggtacccgcagctctctgccctccctggatgaccaggagcaggccagttctggctgggggagtcgcattcgaggagatggtagtggcttcagcctctgacagtcaggatgaagccccatgccactccacactgctgggacatggcagggacttcacagtgggggtttttagctggctcacagggctccctcagcctggggaacattaaaggttttctacaaataca

SEQ ID NO: 163657 - DNA, 1260 bp, Homo sapiens
  Payload ID: 12227
  Gene Symbol: PARD6A
  Gene Name: par-6 family cell polarity regulator alpha
  Uniprot ID: Q9NPB6
  ENST ID: ENST00000458121
  CDS Start-End: 92-1129
gggcggggcggcgcgggcgggccggccgggctgtgcacctgcgcctcggcgggccgcctggggcaccgtccccggcccgcccggccccgccatggcccggccgcagaggactccggcgcgcagtcccgatagcatcgtcgaggtgaagagcaaatttgacgccgagttccgacgcttcgcgctgcctcgcgcttcggtgagcggcttccaggagttctcgcggttgctgcgggcggtgcaccagatcccgggcctggacgtgctacttggctatacggatgctcatggcgacctgctgcccctcaccaacgacgacagcctgcaccgggccctggccagcgggcccccgccactgcgcctactggtgcagaagcgggaagctgactccagcggcctggcttttgcctccaactctctgcagcggcgcaagaaagggctcttgctgcggccagtggcacccctgcgcacccggccacccttgctaatcagcctgccccaagatttccgccaggtttcctcagtcatagacgtggacctactgcctgagacccaccgacgggtgcggctgcacaagcatggttcagaccgccccctgggcttctacatccgagatggcatgagcgtgcgtgtggctccccagggcctggagcgggttccaggaatcttcatctcccgcctggtacgtgggggtctggctgagagtacagggctgctggcggtcagtgatgagatcctcgaggtcaatggcattgaagtagccgggaagaccttggaccaagtgacggacatgatggttgccaacagccataacctcattgtcactgtcaagcccgccaaccagcgcaataacgtggtgcgaggggcatctgggcgtttgacaggtcctccctctgcagggcctgggcctgctgagcctgatagtgacgatgacagcagtgacctggtcattgagaaccgccagcctcccagttccaatgggctgtctcaggggcccccgtgctgggacctgcaccctggctgccgacatcctggtacccgcagctctctgccctccctggatgaccaggagcaggccagttctggctgggggagtcgcattcgaggagatggtagtggcttcagcctctgacagtcaggatgaagccccatgccactccacactgctgggacatggcagggacttcacagtgggggtttttagctggctcacagggctccctcagcctggggaacattaaaggttttctacaaatacagtca

SEQ ID NO: 163658 - DNA, 1171 bp, Homo sapiens
  Payload ID: 12227
  Gene Symbol: PARD6A
  Gene Name: par-6 family cell polarity regulator alpha
  ENST ID: ENST00000602551
  CDS Start-End: 94-1044
aggggcggggcggcgcgggcgggccggccgggctgtgcacctgcgcctcggcgggccgcctggggcaccgtccccggcccgcccggccccgccatggcccggccgcagaggactccggcgcgcagtcccgatagcatcgtcgaggtgaagagcaaatttgacgccgagttccgacgcttcgcgctgcctcgcgcttcggtgagcggcttccaggagttctcgcggttgctgcgggcggtgcaccagatcccgggcctggacgtgctacttggctatacggatgctcatgcagaagctgactccagcggcctggcttttgcctccaactctctgcagcggcgcaagaaagggctcttgctgcggccagtggcacccctgcgcacccggccacccttgctaatcagcctgccccaagatttccgccaggtttcctcagtcatagacgtggacctactgcctgagacccaccgacgggtgcggctgcacaagcatggttcagaccgccccctgggcttctacatccgagatggcatgagcgtgcgtgtggctccccagggcctggagcgggttccaggaatcttcatctcccgcctggtacgtgggggtctggctgagagtacagggctgctggcggtcagtgatgagatcctcgaggtcaatggcattgaagtagccgggaagaccttggaccaagtgacggacatgatggttgccaacagccataacctcattgtcactgtcaagcccgccaaccagcgcaataacgtggtgcgaggggcatctgggcgtttgacaggtcctccctctgcagggcctgggcctgctgagcctgatagtgacgatgacagcagtgacctggtcattgagaaccgccagcctcccagttccaatgggctgtctcaggggcccccgtgctgggacctgcaccctggctgccgacatcctggtacccgcagctctctgccctccctggatgaccaggagcaggccagttctggctgggggagtcgcattcgaggagatggtagtggcttcagcctctgacagtcaggatgaagccccatgccactccacactgctgggacatggcagggacttcacagtgggggtttttagctggctcacagggctccctcagcctggggaacattaaaggttttctacaaataca

SEQ ID NO: 163659 - DNA, 4615 bp, Homo sapiens
  Payload ID: 12228
  Gene Symbol: PARD6B
  Gene Name: par-6 family cell polarity regulator beta
  Uniprot ID: Q9BYG5
  ENST ID: ENST00000371610
  CDS Start-End: 244-1362
gagggagggagctgcttccccgcctgccgcgccaccagtccgaccctcggtcccgccgtgtgagcagctggtggagtggagctcagcgcggacgccggagctgcggccgccccctctgcaggtgcctgtgaggaggcgcccgggccgcaaccgctttccgagatccccagtcgcgcactcgctccccgcgctcctgaggggccgcccggccggaggaggccgtcgcggggctcggcgttcagcatgaaccgcagccaccggcacggggcgggcagcggctgcctgggcactatggaggtgaagagcaagtttggagctgaatttcgtcggttttcgctggaaagatcaaaacctggaaaatttgaggagttttatggattactacaacatgttcataagatccccaatgttgacgttttggtaggctatgcagacatccatggagacttactacctataaataatgatgataattatcacaaagctgtttcaacggccaatccactgcttaggatatttatacaaaagaaggaagaagcagactacagtgcctttggtacagacacgctaataaagaagaagaatgttttaaccaacgtattgcgtcctgacaaccatagaaaaaagccacatatagtcattagtatgccccaagactttagacctgtgtcttctattatagacgtggatattctcccagaaacgcatcgtagggtacgtctttacaaatacggcacggagaaacccctaggattctacatccgggatggctccagtgtcagggtaacaccacatggcttagaaaaggttccagggatctttatatccaggcttgtcccaggaggtctggctcaaagtacaggactattagctgttaatgatgaagttttagaagttaatggcatagaagtttcagggaagagccttgatcaagtaacagacatgatgattgcaaatagccgtaacctcatcataacagtgagaccggcaaaccagaggaataatgttgtgaggaacagtcggacttctggcagttccggtcagtctactgataacagccttcttggctacccacagcagattgaaccaagctttgagccagaggatgaagacagcgaagaagatgacattatcattgaagacaatggagtgccacagcagattccaaaagctgttcctaatactgagagcctggagtcattaacacagatagagctaagctttgagtctggacagaatggctttattccctctaatgaagtgagcttagcagccatagcaagcagctcaaacacggaatttgaaacacatgctccagatcaaaaactcttagaagaagatggaacaatcataacattatgaaaccgtggtttgaatgttttcagagtgaggatgccatgaggacttgtacatttggctagtttaaaagcatatatacctctgaccagtgacgtggaataggcatgagacgagtaacgttgcaagcttacaatattattaaagtagtagtttgataattgttaatataaactttggtggatcagaggtgaatttaagtccaaaacaaaggggcctttgctgatgaagttacgtgcttttgctgttttgtctgtggagaatcagatgttaaagcacattcttggaactatgtgagaagactagatcatttctgttggaagtggttgcatatttaacctgctgtgcagagcccagttaatttttcctttaactgtatttttaaaattctaatgtgaagtctgattctctcttgtggtacattggggacctcagctcttaaaggtctcatgttcccaatattttattttgattttttttttttttttttttttttttttttttagtgactgggtctcactctgttgcccacactggaatgcagtggcatgatcacagctctctgcagcctcaatcccctgggctcaagcagtcctcccacctcagcctcctgagtagctgggaccataggcacataccaccacatctgtctactttttgtattttttgtagagacagggtttcgccatgttgcccaagttggtcttgaactcctgggcttaagcagtcctgcctcggcttcccaaaatgctaggattagagccaccatgcccagcctattttgatttttgtttttttatgttcctttctaataaattgtaacaaatgatgttctcaagtacatttccagtttcttttcttttctttctttttttttttttttttttttttgagatggagtctcgctctatcgcccaggctggagtgcagtggcgcgatcttggctcactgcaagctctacctcctgggttcacaccattctcctgcctcagcctcccaagtagctgggactacaggcgcctgccaccatgcctggctaatttttagtagagacggggtttcgcagtgttagccaggaaggtctcaatctcctgacctcctgatccgcccgcctcggcctcccaaagtgctgggattacaggcgtgagccaccgcgcccagttgtgcatttctggtttctaagaatcaaaccacttggctgtttttaggagttacttcccatgttataaagctgaggaagctttttttttttttttttgagacagagtctctgtcacccaggctggagtgcagtggtgcaatctcagctcccgggttcaagcaattctcctgcctcagccttctgagtagctaagattacaggtgtgcgccaacacgtctggcttatttttttgtatttttagtagagatggagtttcaccatgttggtcaggtgggtctcaaactcctgacctcaagtgatccgcccatctcctcccaaagtgctggattgcaggcatgagcgcctagccaggaagctatcttttcttgagttatgaaactttgcaacagttgttcaaattggtgtttgtccttcctatagctttcatattttcaaattaattctgtatggctatataatttatgttttaaaaggcaattctcttgactttggaaatatggaagtctctcctttaacctattcttgttcccattcccagtctcatttgaaatcattccttttattgttagtgtgtgtatttttgttggtgtgcttttaatgcatccaagtatgcatcattttggataaaaaatacatccaaattaagatgttttaacacataggacaaacttgtgcactttttatgccaaaaaaaaaaaaaattgggttttccttcatgggatttctagaaacactgcctacactttatgaaaactacatagtattcacctgtgacaggtagagtttatcactattaattttatgaggctatttattactttccaatgcatccacttagaacaagctaagagtaaggctgctaactttaattccttgcctgattttattgtacagtgtgcacaagcacaatggtatgcttgtatatagaaactaaaaatactatgaagtacataagttccctatggcttatggagagttatttattaattaactttatggtagggctagtatgaatacctttttaacaattgtgtgctattacaacaatgaagattcaaatgactccgctttgaaggatgttttctctatatggtaaaatatatatgaagaagtcttgattacgtgaagatcacttgactcagaatacttcaatgtattttgttcacattaccactaagcatattatcagtaaactattaactgactgcacattatgtaatacgttgtactttttgttgaattcaccgaagttcttccatttatatgctatttttaatggcattccggctttaacattctgtgagtcttacaaatttgactcttgaatggcaaaataatgttagtatgtagaaggttaactttcatttataatataagtggtgcaggggttcaacattttaagtaaaaatatttttacacactacctctctctttttttttttaaagttttaacatcagaacttttgggggaaaaactacttcagggcttgactttttgtacaaattttaactgtaaaatacagatttatcttgtacgcattcatggaaatggaaatcaaagctgctattgctttttattttaattatcctgttaagggtatctatcaatggtattttcaagtagatctctgtttcttaaattattggtgaaataattgattactagatatattgtaaaaccaatagatcctggttatacgataaaatatcagctcattggtaggctgaatcaattatttcaagtgcaccttattaacaaaagtatcagtggatccaacataaaattttatagtactaaatgtcaagcctaactgtgaattttgttctgtatcttaagtaaatttatgataatgttctcgagctatcaacaaaatatatgtacttttgtgagctatgaattttctaattaaattttacatgctataacatgatttttacatgaatgatactttgtttataactatcaaatgtcagtattttactacaattttattataaagtgtacattatcactaaatgaacttcgattttaaaaatcaaattagctttagttgtatattattttttacaaataaagatagacttgtataaaggcta

SEQ ID NO: 163660 - DNA, 522 bp, Homo sapiens
  Payload ID: 12228
  Gene Symbol: PARD6B
  Gene Name: par-6 family cell polarity regulator beta
  Uniprot ID: Q9BYG5
  ENST ID: ENST00000396039
  CDS Start-End: 123-470
gtgcctgtgaggaggcgcccgggccgcaaccgctttccgagatccccagtcgcgcactcgctccccgcgctcctgaggggccgcccggccggaggaggccgtcgcggggctcggcgttcagcatgaaccgcagccaccggcacggggcgggcagcggctgcctgggcactatggaggtgaagagcaagtttggagctgaatttcgtcggttttcgctggaaagatcaaaacctggaaaatttgaggagttttatggattactacaacatgttcataagatccccaatgttgacgttttggtaggctatgcagacatccatggagacttactacctataaataatgatgataattatcacaaagctgtttcaacggccaatccactgcttaggatatttatacaaaagaagggatgtgtattggaacattccaaaaacaatgtcaggatgccctgtttgaaaacactgtgaagtgctttacttttcacttgagatatttgccatgggaaagactatcatattt

SEQ ID NO: 163661 - DNA, 3868 bp, Homo sapiens
  Payload ID: 12229
  Gene Symbol: PARD6G
  Gene Name: par-6 family cell polarity regulator gamma
  Uniprot ID: Q9BYG4
  ENST ID: ENST00000353265
  CDS Start-End: 199-1329
cgctcctcccgcgcgcggcccctggagtccctgaggcgcgcggccagcccagctcgggcccgcagcaccgggagcagcccgccggccaagcgagcgcgggccggggccggggccggggcctgggggcgccgcccccgggagtctttctgcggcccctgaggagcgagggcgacggcgaggctgaccggggccgaaaccatgaaccgaagttttcacaagtctcagaccttgcgattctacgattgcagcgcagtggaagtcaagagcaagtttggggcggaattccgaaggttctctctggaccgtcataagcctgggaagtttgaagatttctacaagctggttgtgcacacccaccatatctccaacagtgatgtaactattggctatgcagatgtgcacggagacctgctgcccatcaacaatgatgacaacttctgcaaggcggtttctagtgcaaatcccctgctcagggtcttcatccagaaacgagaggaggccgagcgtggcagcctcggcgcgggctcgctgtgcaggcggaggcgggcgctgggcgcgctgcgtgatgaaggaccccggcggcgtgcacacctggacatcggcctcccgcgcgacttccgccccgtatcatccatcatcgatgtggacctggtccccgagacgcaccggcgagtgcggctgcaccggcacggctgcgagaagccgctgggcttctacatccgcgatggcgccagcgtgcgcgtgaccccgcacgggctggagaaggtgcccggcatcttcatctcgcgcatggtacccgggggcctggcggagagcaccgggctgctggctgtgaatgacgaggtcctggaggtgaacggcattgaggtggccgggaagacgctggaccaggtcacggacatgatgatcgccaacagccacaacctcatcgtcaccgtcaagcccgccaaccagcgcaacaacgtggtgcgcggcggccgcgcgttgggcagctcgggaccgccctcggacggcaccgcgggcttcgtgggtccccccgccccgcgcgtcctgcagaacttccaccccgacgaggcggagagcgatgaggacaacgacgtcgtcatcgagggcacactggagcctgcacgtcccccccagaccccgggcgcgcccgcaggcagcctctcccgggtcaatggcgcgggcctggcgcagcggctgcagcgggacctggccctggacggcggcctccagcggctgctcagctccctgcgggccgacccccgtcacagcctggcgctgccgccaggcggcgtggaggagcacgggcccgcggtcacgctctagactcccgagaggcccccaaatcctagctccagttccccggtaaggacagggacaggacctgcagactgcatccgctcattttttgttgtttttgtgaccacaaaaacaacgctgctctttgtttcaacttccggatataaaaacacaagtattgcctatttttatagaatttcgccacagaacttaaaatgaacgcctgtagagacactctataccaggcctgagtgcaggtcttggcgcctttgcaaagtgatagaaaagatctgaccaagtgcaaaaaaatgctttttaaaatttttacaaatactttgtttttaaagtgaagctttaaaattacttttttaaaatagtcaaattcatgtttttaagtaagttggcccatgcaacatatctcagcattcttgctgtgctctctgctgacttgcaggcgaggccgactgtgctgatgtacgtgacaagaggctggtttttaataacgaatgcagccaggtgcagtggctcacgtctgtaatcccagcactttgggaggcctacgtgggctgatcacgaggtcaggaggtcgagaccagcatggccaacatggtgaaaccctgtctctactaaaaatataaaaattagccaggtgtggtggcaggcgcctgtaatcccagctaccttgggaggctgaggcaggagaatcgcttgaacccgggaggcagaggttgcagtgagctgagatcgcaccactgcactccagcctgggtgacagagcaagactctgtctcgggaaaaaaaaaaaatacacccaaacctgtccatgtacaaccatggagatgaattccagattttcacactgttcatagtcataattcggttgggacaggagagctcccaccagcacacttatggcacccgcagctgtggaattgttccggggcttttttttgtttgttttgagacatagtgtcttgttctgtcatccaagctggagggatctcagctcactgcaacctccgcctcctgggttcaagcaattctcctgcctcagcctcccaaggagctgggacaggcacatgccaccatacccagctaatttttgtatttttagtagagatgggatttcaccacgttggtcaggctggtcttgaactcctgacctcaggtgatacggtcccccctcagcctccaaaaatgctaggattatagacgtgagccacagcaccagaccaggggctatttttgtgacccacataggtggcccattcagcctcaaggggaaatccagggtaggaagcagcagctctgctggactgggctcagcagtcccatttgggatgtaagcctctattgcctctaagatgacccttttcctgtgggttgactgactctgagggcgatttcggaaatgttttcagcagaaatgaaggataagcatcgcacatgtccagcaatgtctttgagaatgcagtcatttgcacgtgagttctcatctttgttttctgaaacagacgtttcttttagtaagtcacaatacatgctaattttcatttctagaatggtcactggcagttctcacttttaactataagaagtcacgtggaacttagtgatttttaacaaatactaaattcatcctcactttatgttgatcttccagcaacgtttatatatttagtaattttaaaaattcctatttgatacaattaaattttatataatgtgttttgcttgaataaaatgttacatttatactttgagaactctgaccaaatctttcatacagatacaggtaaagaaatatttttctaggttgtcggagctgcgtacctcccgctgcttctccttgtggtccagcaccacctgctggtcagtggcagaactgtcctgacttcgtgaacatggaactgctaagagggaaaactgcatctcagcattttcattttttctgaatattaagtgaaaagcaagttctatttttaagaaatagcttttgctgaggagttgtgaattcctgcacctgtgtttgatgttatttgtatgcaatggattgctggccctttgttcctaagcaagagaagaccaaagatgcttccccatgacctctccggtgaggatccgcaccccccggacttgctctctgatgaagggcatgtcgttcagtgccccagcagtcagaagcagtttttgtggaactaaaactaataatgttaccctcacaaaggaaatgttcttttactaagttattgctgattcttgaatgtctgttatataactgggtcggctatcaagaaggaaggttatatttcttatcacattttaagttgttaagcaaatgtgagtttttttttaagaaatgaggctttcactgagatttgtgtgctattcataattttaggaattactgcttagaacagctgcttgggtgtatttttctacacaggtctgtacttctgccactttctccttttaaaaaaacaaaactatgcatattatgtattaaagttttcttggttttatatatcagagaataaaaacttttttgacttttgagtaaacaaaa

SEQ ID NO: 163662 - DNA, 522 bp, Homo sapiens
  Payload ID: 12229
  Gene Symbol: PARD6G
  Gene Name: par-6 family cell polarity regulator gamma
  ENST ID: ENST00000463384
  CDS Start-End: 1-186
tttgaagatttctacaagctggttgtgcacacccaccatatctccaacagtgatgtaactattggctatgcagatgtgcacggagacctgctgcccatcaacaatgatgacaacttctgcaaggcggtttctagtgcaaatcccctgctcagggtcttcatccagaaacgaggtggtgaacactgaccacctcaaggaaccaagcagccagtggtgacagttgcaagatgacggagccctgcgaccaggaacctgactcttcagctcaaatcttggtttgaaagggggacttctctgtgcccctgttgtcggcatgccatggtagagaatggatggcccacgcagctggcccctcatgagaccccagccatctcattccactgggagccacgtcaggacgaaggaggactgggaggggcgtctggctgcgtggtgtggggcctgcagtgttgtggcacacgcagcttcagccaaacatctagccctgtacctagaactaagaaataaaactataacatcaga

SEQ ID NO: 163663 - DNA, 596 bp, Homo sapiens
  Payload ID: 12229
  Gene Symbol: PARD6G
  Gene Name: par-6 family cell polarity regulator gamma
  Uniprot ID: Q9BYG4
  ENST ID: ENST00000470488
  CDS Start-End: 1-324
atgaaccgaagttttcacaagtctcagaccttgcgattctacgattgcagcgcagtggaagtcaagagcaagtttggggcggaattccgaaggttctctctggaccgtcataagcctgggaagtttgaagatttctacaagctggttgtgcacacccaccatatctccaacagtgatgtaactattggctatgcagatgtgcacggagacctgctgcccatcaacaatgatgacaacttctgcaaggcggtttctagtgcaaatcccctgctcagggtcttcatccagaaacgagatgacggagccctgcgaccaggaacctgactcttcagctcaaatcttggtttgaaagggggacttctctgtgcccctgttgtcggcatgccatggtagagaatggatggcccacgcagctggcccctcatgagaccccagccatctcattccactgggagccacgtcaggacgaaggaggactgggaggggcgtctggctgcgtggtgtggggcctgcagtgttgtggcacacgcagcttcagccaaacatctagccctgtacctagaactaagaaataaaactataacatcagatttaaa

SEQ ID NO: 163664 - DNA, 2755 bp, Homo sapiens
  Payload ID: 12230
  Gene Symbol: PALM
  Gene Name: paralemmin
  Uniprot ID: O75781
  ENST ID: ENST00000264560
  CDS Start-End: 209-1240
ccgccgccgcccggacaataaacagcagctttgcgcggggcgatgcccgagccggtgccgccgcccccgcgccgcgcagccccggccgccaggccttagcccgccccggcccccgccaggccgcgtccccctcccctcccctcccccgcgcgccacccgcgcccgcccccgcccggcaccgcggacccacccggacctcggcggggagatggaggtcctggcggcagagaccacgtcccagcaggagcggctgcaggccatcgcagagaagcggaagcggcaggcggagatcgagaacaagcgccggcagctggaggacgagcggaggcagctgcagcacctgaagtccaaggcactgcgggagcgctggctgctggaggggacgccgtcctcggcctcagagggggatgaggacctgaggaggcagatgcaggacgacgagcagaagacacggctgctggaggactcggtgtccaggttggagaaggaaattgaggtgctggagcgtggagactccgccccagccactgccaaggagaacgcggcggccccgagcccagtccgggccccagccccgagtccagccaaggaggagcgcaagacagaggtggtgatgaattcacagcagacgccggtgggcacgcccaaagacaagcgagtctccaacacgcccctgaggacggttgacggctcccccatgatgaaggcagtggtccatgctgtggacggcaccgccgagaacgggatccaccccctgagctcctccgaggtggacgaactcatccacaaagcggacgaggtcacgctgagcgaggcagggtccacggccggggcggcagagacccggggggctgtggagggggcagcccggaccacgccctcccggcgggagatcaccggtgtgcaggcacagccaggcgaggccacgtccggcccgccggggatccagcccggccaggagcccccggtcacaatgatcttcatgggttaccagaacgtggaggatgaggccgagaccaagaaggtgctgggccttcaagataccatcacggcggagctggtggtcatcgaagacgcggctgagcccaaggagcctgcaccacccaacggcagtgctgccgagcctcccacggaggccgcctccagggaagagaatcaggcggggcccgaggccaccaccagcgacccccaggacctcgacatgaagaagcaccgttgtaaatgctgctccatcatgtgagccggcccccgagaccccggcccccaccccacaccacagacacccaccagcccggcccctcccggcgcctgcccaccctccacccacagcctcacgggtccaggacttggcgtgttgttacatgttccttccgagttttctttcgctggaaagagggacaggggcccccacccgtcaccacgccccaacactccccccgaaccagagccgtgcacttgtgcctggtaggagagagacaggacagacccgcttttcccgagacaaggaccccccatgtcacggcagcttcacagacgcggctcgcgcccaccggggtcctggcgggtgggacccgcagcctccacgcggcccaggccagcctgccaccctctgggcctcctacctgtgcctttctctgaggggacaccccgccagagagggccccgggagccgggggtgggtactgaggcctgctcaggccctggaagtgaggctctatggggttccctggccaaggcgctggccccccaatctcaggcagttggggtgaggccgtgcctctttgggggctaaaggtcttgggtggaggacaggcccctctgctgtgcccctatgccctgtgtgggcccaaccagtggacaatggagtctgggggagggggaaccccggggacatgcccccacccgggaggggccggtaacccctgggctatcttctagacggggcgaaccaggggtcattgacctgccccctgcacagggcagggaccgagtgagccactccttgtcccgagctcccgcccccactgggccctccttcctcctggtgctaatttggggaccccaggggccgcccccggcctcttctccatcctgcttggaccagggtcctgggtcttcccaaccataccccgagatcaggccccacctgccagctctactgggcttggagcacgtccgggcagtggagggagggacacagcctgggacaggaagcctcttgggttggagcaggagaccctcatttgccacccagaccaatgtgagcctgcccccagccccctctcattggaagtggcaaggggcttccctcctgggggcagctacactcgtccccagaggcacattcgtgcacattctcacagacaccgtctcacacgttggctttggacaaccaggccccaacttggtccctgccctagggacctccagcctggtgcccagtgctcaggccacctcctggtccagtcaccacctgcagcctcggcagggcaggtacaggggccacctcggatgggagcctgggtccctgcctccgctctgcccctgggtggctgggaggagaggccctctcgggggtgacctgggcgtcagccgtggaaccccctcctcctccctggagtctgcctgagtccctcgagccgcgagccttcgctgaagtgcccttgctataaccccctctgcttctggtgtgtgacgaggcccccgatgttcttgattttcccagagaagcaaataaacagcgtgaacagcccca

SEQ ID NO: 163665 - DNA, 2725 bp, Homo sapiens
  Payload ID: 12230
  Gene Symbol: PALM
  Gene Name: paralemmin
  Uniprot ID: O75781
  ENST ID: ENST00000338448
  CDS Start-End: 47-1210
ccgcccccgcccggcaccgcggacccacccggacctcggcggggagatggaggtcctggcggcagagaccacgtcccagcaggagcggctgcaggccatcgcagagaagcggaagcggcaggcggagatcgagaacaagcgccggcagctggaggacgagcggaggcagctgcagcacctgaagtccaaggcactgcgggagcgctggctgctggaggggacgccgtcctcggcctcagagggggatgaggacctgaggaggcagatgcaggacgacgagcagaagacacggctgctggaggactcggtgtccaggttggagaaggaaattgaggtgctggagcgtggagactccgccccagccactgccaaggagaacgcggcggccccgagcccagtccgggccccagccccgagtccagccaaggaggagcgcaagacagaggtggtgatgaattcacagcagacgccggtgggcacgcccaaagacaagcgagtctccaacacgcccctgaggacggttgacggctcccccatgatgaaggcagccatgtactcggttgagatcactgtggagaaggacaaggtgacaggggagaccagggtgctgtccagcaccacgctgctccctcggcagccgctccctctgggcatcaaagtctacgaggacgagaccaaagtggtccatgctgtggacggcaccgccgagaacgggatccaccccctgagctcctccgaggtggacgaactcatccacaaagcggacgaggtcacgctgagcgaggcagggtccacggccggggcggcagagacccggggggctgtggagggggcagcccggaccacgccctcccggcgggagatcaccggtgtgcaggcacagccaggcgaggccacgtccggcccgccggggatccagcccggccaggagcccccggtcacaatgatcttcatgggttaccagaacgtggaggatgaggccgagaccaagaaggtgctgggccttcaagataccatcacggcggagctggtggtcatcgaagacgcggctgagcccaaggagcctgcaccacccaacggcagtgctgccgagcctcccacggaggccgcctccagggaagagaatcaggcggggcccgaggccaccaccagcgacccccaggacctcgacatgaagaagcaccgttgtaaatgctgctccatcatgtgagccggcccccgagaccccggcccccaccccacaccacagacacccaccagcccggcccctcccggcgcctgcccaccctccacccacagcctcacgggtccaggacttggcgtgttgttacatgttccttccgagttttctttcgctggaaagagggacaggggcccccacccgtcaccacgccccaacactccccccgaaccagagccgtgcacttgtgcctggtaggagagagacaggacagacccgcttttcccgagacaaggaccccccatgtcacggcagcttcacagacgcggctcgcgcccaccggggtcctggcgggtgggacccgcagcctccacgcggcccaggccagcctgccaccctctgggcctcctacctgtgcctttctctgaggggacaccccgccagagagggccccgggagccgggggtgggtactgaggcctgctcaggccctggaagtgaggctctatggggttccctggccaaggcgctggccccccaatctcaggcagttggggtgaggccgtgcctctttgggggctaaaggtcttgggtggaggacaggcccctctgctgtgcccctatgccctgtgtgggcccaaccagtggacaatggagtctgggggagggggaaccccggggacatgcccccacccgggaggggccggtaacccctgggctatcttctagacggggcgaaccaggggtcattgacctgccccctgcacagggcagggaccgagtgagccactccttgtcccgagctcccgcccccactgggccctccttcctcctggtgctaatttggggaccccaggggccgcccccggcctcttctccatcctgcttggaccagggtcctgggtcttcccaaccataccccgagatcaggccccacctgccagctctactgggcttggagcacgtccgggcagtggagggagggacacagcctgggacaggaagcctcttgggttggagcaggagaccctcatttgccacccagaccaatgtgagcctgcccccagccccctctcattggaagtggcaaggggcttccctcctgggggcagctacactcgtccccagaggcacattcgtgcacattctcacagacaccgtctcacacgttggctttggacaaccaggccccaacttggtccctgccctagggacctccagcctggtgcccagtgctcaggccacctcctggtccagtcaccacctgcagcctcggcagggcaggtacaggggccacctcggatgggagcctgggtccctgcctccgctctgcccctgggtggctgggaggagaggccctctcgggggtgacctgggcgtcagccgtggaaccccctcctcctccctggagtctgcctgagtccctcgagccgcgagccttcgctgaagtgcccttgctataaccccctctgcttctggtgtgtgacgaggcccccgatgttcttgattttcccagagaagcaaataaacagcgtgaacagcccca

SEQ ID NO: 163666 - DNA, 2272 bp, Homo sapiens
  Payload ID: 12230
  Gene Symbol: PALM
  Gene Name: paralemmin
  ENST ID: ENST00000592155
  CDS Start-End: 29-757
gtgaaaatcactgggctgaggatgaggaatgaactacaagcgagtctccaacacgcccctgaggacggttgacggctcccccatgatgaaggcagccatgtactcggttgagatcactgtggagaaggacaaggtgacaggggagaccagggtgctgtccagcaccacgctgctccctcggcagccgctccctctgggcatcaaagtctacgaggacgagaccaaagtggtccatgctgtggacggcaccgccgagaacgggatccaccccctgagctcctccgaggtggacgaactcatccacaaagcggacgaggtcacgctgagcgaggcagggtccacggccggggcggcagagacccggggggctgtggagggggcagcccggaccacgccctcccggcgggagatcaccggtgtgcaggcacagccaggcgaggccacgtccggcccgccggggatccagcccggccaggagcccccggtcacaatgatcttcatgggttaccagaacgtggaggatgaggccgagaccaagaaggtgctgggccttcaagataccatcacggcggagctggtggtcatcgaagacgcggctgagcccaaggagcctgcaccacccaacggcagtgctgccgagcctcccacggaggccgcctccagggaagagaatcaggcggggcccgaggccaccaccagcgacccccaggacctcgacatgaagaagcaccgttgtaaatgctgctccatcatgtgagccggcccccgagaccccggcccccaccccacaccacagacacccaccagcccggcccctcccggcgcctgcccaccctccacccacagcctcacgggtccaggacttggcgtgttgttacatgttccttccgagttttctttcgctggaaagagggacaggggcccccacccgtcaccacgccccaacactccccccgaaccagagccgtgcacttgtgcctggtaggagagagacaggacagacccgcttttcccgagacaaggaccccccatgtcacggcagcttcacagacgcggctcgcgcccaccggggtcctggcgggtgggacccgcagcctccacgcggcccaggccagcctgccaccctctgggcctcctacctgtgcctttctctgaggggacaccccgccagagagggccccgggagccgggggtgggtactgaggcctgctcaggccctggaagtgaggctctatggggttccctggccaaggcgctggccccccaatctcaggcagttggggtgaggccgtgcctctttgggggctaaaggtcttgggtggaggacaggcccctctgctgtgcccctatgccctgtgtgggcccaaccagtggacaatggagtctgggggagggggaaccccggggacatgcccccacccgggaggggccggtaacccctgggctatcttctagacggggcgaaccaggggtcattgacctgccccctgcacagggcagggaccgagtgagccactccttgtcccgagctcccgcccccactgggccctccttcctcctggtgctaatttggggaccccaggggccgcccccggcctcttctccatcctgcttggaccagggtcctgggtcttcccaaccataccccgagatcaggccccacctgccagctctactgggcttggagcacgtccgggcagtggagggagggacacagcctgggacaggaagcctcttgggttggagcaggagaccctcatttgccacccagaccaatgtgagcctgcccccagccccctctcattggaagtggcaaggggcttccctcctgggggcagctacactcgtccccagaggcacattcgtgcacattctcacagacaccgtctcacacgttggctttggacaaccaggccccaacttggtccctgccctagggacctccagcctggtgcccagtgctcaggccacctcctggtccagtcaccacctgcagcctcggcagggcaggtacaggggccacctcggatgggagcctgggtccctgcctccgctctgcccctgggtggctgggaggagaggccctctcgggggtgacctgggcgtcagccgtggaaccccctcctcctccctggagtctgcctgagtccctcgagccgcgagccttcgctgaagtgcccttgctataaccccctctgcttctggtgtgtgacgaggcccccgatgttcttgattttcccagagaagcaaataaacagcgtgaacagcccca

SEQ ID NO: 163667 - DNA, 2137 bp, Homo sapiens
  Payload ID: 12230
  Gene Symbol: PALM
  Gene Name: paralemmin
  ENST ID: ENST00000590161
  CDS Start-End: 26-622
aaaatcactgggctgaggatgaggaatgaactacaagcgagtctccaacacgcccctgaggacggttgacggctcccccatgatgaaggcagtggtccatgctgtggacggcaccgccgagaacgggatccaccccctgagctcctccgaggtggacgaactcatccacaaagcggacgaggtcacgctgagcgaggcagggtccacggccggggcggcagagacccggggggctgtggagggggcagcccggaccacgccctcccggcgggagatcaccggtgtgcaggcacagccaggcgaggccacgtccggcccgccggggatccagcccggccaggagcccccggtcacaatgatcttcatgggttaccagaacgtggaggatgaggccgagaccaagaaggtgctgggccttcaagataccatcacggcggagctggtggtcatcgaagacgcggctgagcccaaggagcctgcaccacccaacggcagtgctgccgagcctcccacggaggccgcctccagggaagagaatcaggcggggcccgaggccaccaccagcgacccccaggacctcgacatgaagaagcaccgttgtaaatgctgctccatcatgtgagccggcccccgagaccccggcccccaccccacaccacagacacccaccagcccggcccctcccggcgcctgcccaccctccacccacagcctcacgggtccaggacttggcgtgttgttacatgttccttccgagttttctttcgctggaaagagggacaggggcccccacccgtcaccacgccccaacactccccccgaaccagagccgtgcacttgtgcctggtaggagagagacaggacagacccgcttttcccgagacaaggaccccccatgtcacggcagcttcacagacgcggctcgcgcccaccggggtcctggcgggtgggacccgcagcctccacgcggcccaggccagcctgccaccctctgggcctcctacctgtgcctttctctgaggggacaccccgccagagagggccccgggagccgggggtgggtactgaggcctgctcaggccctggaagtgaggctctatggggttccctggccaaggcgctggccccccaatctcaggcagttggggtgaggccgtgcctctttgggggctaaaggtcttgggtggaggacaggcccctctgctgtgcccctatgccctgtgtgggcccaaccagtggacaatggagtctgggggagggggaaccccggggacatgcccccacccgggaggggccggtaacccctgggctatcttctagacggggcgaaccaggggtcattgacctgccccctgcacagggcagggaccgagtgagccactccttgtcccgagctcccgcccccactgggccctccttcctcctggtgctaatttggggaccccaggggccgcccccggcctcttctccatcctgcttggaccagggtcctgggtcttcccaaccataccccgagatcaggccccacctgccagctctactgggcttggagcacgtccgggcagtggagggagggacacagcctgggacaggaagcctcttgggttggagcaggagaccctcatttgccacccagaccaatgtgagcctgcccccagccccctctcattggaagtggcaaggggcttccctcctgggggcagctacactcgtccccagaggcacattcgtgcacattctcacagacaccgtctcacacgttggctttggacaaccaggccccaacttggtccctgccctagggacctccagcctggtgcccagtgctcaggccacctcctggtccagtcaccacctgcagcctcggcagggcaggtacaggggccacctcggatgggagcctgggtccctgcctccgctctgcccctgggtggctgggaggagaggccctctcgggggtgacctgggcgtcagccgtggaaccccctcctcctccctggagtctgcctgagtccctcgagccgcgagccttcgctgaagtgcccttgctataaccccctctgcttctggtgtgtgacgaggcccccgatgttcttgattttcccagagaagcaaataaacagcgtgaacagcccca

SEQ ID NO: 163668 - DNA, 594 bp, Homo sapiens
  Payload ID: 12230
  Gene Symbol: PALM
  Gene Name: paralemmin
  ENST ID: ENST00000586055
  CDS Start-End: 557-594
ggcgctgggctcggcgcctgcccgggcagggaccccctcgttctggctggagctgcccgggcgtgggttctggaaggacgagtgcgacgcccccatcccacacacgcccctcccgcctcggacagggcccgccctgctcgctgggtgaccttggccgttgcgtaacctctctgggcccttccaacaccaacgccccgcaccgcggaggcctctgcggggctcccgtcgggtttgggcctcatgaactcatctcctggagcaggactatctcacgcgctccagacgacgccctcgccgggccccgagccgcccacaccgccacacgccgtaaaaagcatcgcggggacgggaggcctgtgcgcgccggggtgggcgtcgggcggggggcgtggcgctccaggggctctgcgcggctgccgggagccagggaggctcggagacccagcacctgccccgggacccccagcacctgccctgggacccccagcagcaccaggaccgccgccgccctgagcttttccacgcctttgcccgggactcagctcctccgcccagcatggtcctggcggcagagaccacgtcccagcaggagcg

SEQ ID NO: 163669 - DNA, 1332 bp, Homo sapiens
  Payload ID: 12231
  Gene Symbol: PALM2
  Gene Name: paralemmin 2
  Uniprot ID: Q8IXS6
  ENST ID: ENST00000314527
  CDS Start-End: 51-1286
gcgtgtgttttttctttcctctttcccctgcctgtgtgcccttctccaggatggcagaggcggaattgcacaaggaaaggctgcaagccatagcagaaaaaagaaagaggcagactgaaatagaaggcaagcgacaacagcttgacgagcagatacttctgctgcagcattccaagtccaaagtgcttcgggagaaatggctgctgcagggcatacccgctggaactgccgaagaggaggaagccaggaggcggcagtctgaagaggatgagttcagagtcaagcaacttgaagataacattcagaggctggagcaagaaatacaaacgctagaaagtgaagagtcccagatatctgccaaagagcaaatcatcctagagaaactgaaggaaacagaaaaatccttcaaggactttcagaagggtttctccagtacggatggagatgcagtaaattacatttcctcccagcttcccgacctgccaatcctctgttcacgaacagcagaaccatcacctgggcaggacgggaccagcagagcggctgctgtgtacgccatggaaattaatgtggagaaagacaaacaaacaggagagaccaagattctctctacatctaccattggcccagagggggtccatcagaaaggagtcaaagtctatgatgatggtaccaaagtagtgtatgaggtgcgctcaggaggcaccgtagtagaaaatggagtgcacaaattaagcacaaaggatgtagaagagcttattcagaaggctggacaatcaagcttaggaggagggcacgtgtctgaaaggactgtgattgcagatgggagcctcagccatcccaaggaacacatgctctgcaaagaagctaagttagaaatggtacataagtctaggaaagaccattcttccgggaacccagggcagcaggcccaagcccccagcgctgcagggccggaggcaaacttggatcagcccgtcaccatgatttttatgggctaccaaaatatcgaggatgaagaggagacgaaaaaggtgctaggctatgatgaaaccatcaaggctgaattggtcctcattgatgaagatgatgagaagtcattgagggagaagacagtgacggacgtgtccactattgacgggaacgcggctgagcttgtgtccgggaggccggtctcagacaccacagagccctcatccccagaagggaaggaagagagcctagctacagagccagccccaggtacccaaaagaaaaagcgctgtcaatgctgtgttgtcatgtgaccacttctttcttctcctttcttctgggcagcctgtactctccacc

SEQ ID NO: 163670 - DNA, 4492 bp, Homo sapiens
  Payload ID: 12231
  Gene Symbol: PALM2
  Gene Name: paralemmin 2
  Uniprot ID: Q8IXS6
  ENST ID: ENST00000374531
  CDS Start-End: 75-1214
gtgcactcggctccgggagaggcgagcagcgccggtgagccccgcagcagcgcacccggccgcggagccccgcgatggagatggcagaggcggaattgcacaaggaaaggctgcaagccatagcagaaaaaagaaagaggcagactgaaatagaaggcaagcgacaacagcttgacgagcagatacttctgctgcagcattccaagtccaaagtgcttcgggagaaatggctgctgcagggcatacccgctggaactgccgaagaggaggaagccaggaggcggcagtctgaagaggatgagttcagagtcaagcaacttgaagataacattcagaggctggagcaagaaatacaaacgctagaaagtgaagagtcccagatatctgccaaagagcaaatcatcctagagaaactgaaggaaacagaaaaatccttcaaggactttcagaagggtttctccagtacggatggagctgtgtacgccatggaaattaatgtggagaaagacaaacaaacaggagagaccaagattctctctacatctaccattggcccagagggggtccatcagaaaggagtcaaagtctatgatgatggtaccaaagtagtgtatgaggtgcgctcaggaggcaccgtagtagaaaatggagtgcacaaattaagcacaaaggatgtagaagagcttattcagaaggctggacaatcaagcttaggaggagggcacgtgtctgaaaggactgtgattgcagatgggagcctcagccatcccaaggaacacatgctctgcaaagaagctaagttagaaatggtacataagtctaggaaagaccattcttccgggaacccagggcagcaggcccaagcccccagcgctgcagggccggaggcaaacttggatcagcccgtcaccatgatttttatgggctaccaaaatatcgaggatgaagaggagacgaaaaaggtgctaggctatgatgaaaccatcaaggctgaattggtcctcattgatgaagatgatgagaagtcattgagggagaagacagtgacggacgtgtccactattgacgggaacgcggctgagcttgtgtccgggaggccggtctcagacaccacagagccctcatccccagaagggaaggaagagagcctagctacagagccagccccaggtacccaaaagaaaaagcgctgtcaatgctgtgttgtcatgtgaccacttctttcttctcctttcttctgggcagcctgtactctccaccactcacgtagacctcactgtaccactaactgcaatactgtgaactggaagcaaacacctgccttgccttgcagttgaattgctttgatctctctcattttttttccttttcctcacctgagagacaacgtgcatgtgtgtgcttcattctctccaagaacttgcttttcctctaaacctttccttgtgtcttcaagagtgaatcacttccttcctgctcgattggaatggactcttcgtatcagccagtgatatggtagccttaactcacttgactggaattgaacccattggcactgggggtttcattttgtagtgtgttcctgtaacgtagtcacacactgccatgtctctggtttctcacttgcctcctttgctgtggatctttgtttttatatcttgtgtggcaaaatgctgttggctctagccggttgctagtgtagccaaaagtggaccttacttagtctgtccgatctagggtgatgctttttgctgccttacataagcttccagattacagtattgtgcattcatggctttctttctgttaaaactgaaatgaagtcaatgtagaagaacccagagcttgtcacagctgaaatgtagggactgattccataacctgcccatcagcggttgtctctctttctatggtttaaccgatgaaccctttatataagaagcaccattttaaaatttctaaggacatgaaacaaacattgtttgaagcatcagtagcaattgatctccaaacttaggcaaattcacaagccttgtttctattctcttaaaaaaatgtaaatttttatattgtttcttttttctggatattttctggtcatgttaatctattttcaatgaggagatcatcttgagaagtatctttgcagtgaccatatttctaaaacagtctgtccaacctacaatggttgccatgatgctcccacttcatcatggatggtgctgtaatgcattaactgttcatctcctccccagttgattacaaagccttgcatccatactcttttctttctggccccatgagaaagagaatgttttaggtaacttcaacttgtaggtttatctgcccttcaaaaaaaaaaactttaaaaaacttttaaaaattaagaaagacctatcttctcaatgttaagcacttaatttcataacaaatattaagtggcacatagctgagcttcttagggcattgttttgtttttagcttctggagattccagaagagcaaagaatattttttatctagaacacaatgaacagtttttgaaataccttctcagcactcccccaaagcaaaaagccacatatgtagtaaaaccaaagggaaacaatttaataaaataacaatagtatagtaatgaaataaagatataacatgattactggttttaataagagttatcttaactttaagttatttgcccatttatagcattgttatgaattattcataaaattatgtcccacagtatatagttttgaaaaaacatatgatatactacatccagtctaacttctgtggaaagtagatcagaaaaaataagatagtcttgagagaattttattatagaagctgtctaatttgacctattttgcttgctcagtgctaaatctattgcttttttttaatctcctggcttgaaattatatttacttcaataggaaaggtaaaaacatcagtttttacttttcaaagttaattttctgaaataattgcattttaatgagcacaaaatgggtcattttatttttattatactcatcttgtttacacctatacataaacagaaaacgttaaagaagagaaaaataaaggagctaagttctgctgttgaagattatttcatccaaggcttggttttgaataactgagggaaatatctctaaatctcaagttcatcaaagcagctgcaatggaataaaattgctattttatcgagaaacctggtttggatgcttataaattccactactctcagcttcattttcctgagtacgtggtcactgaagcatcatttagacattacataaactggcatgcagataaacctatttacatagagggagaaaacagtttcaatgtcttggacaatctgttattttaatgatttacttaagaaagaaacaatctgaaagcttaccatagcttatcttttctactcacttggagattcaagctattcaatgtgagttttaaaaagttaagcacagttagtgagtgaaatggtagaatgtagaacctttaagcttgctggttgataaacagaatcaatcttccaggacagataattccctgaagggacctatccttgcataagtgaactagttactcatacagaaaatgatctgcacatcttactacaacactacacacaagaactaaaagattaatgattatctgtattctcttcactaattactattatgggggaataatgattagcaaattatatgaattcgagttctctctatacttttattagtaaagcttatcatttaatggactgaagtaagatgtgttacctttattcgagctatttgtagccacactaaatgaaggtgtgtttgaatatggcgcatatatttgcatatgtcccatcattttcttgtcataatggggaattcaggcttagccagtacttctatgggatgagacctataatcccacctatagcagcaagtaactacccttcatgatgatagtgtacatggagctgtgattatgaacatgctgcctttcctgctgccattggcattctctctgtaaattttattatgtgtggtatcacactctccaaaaatgcagggtatttggttacataaccaaactaattaaagaatcagtaatgaaattgcaaaaccatgatcttttttgagctaatgattagttgggctttcctttaaaataatataatcaggccgagtgcagcggctcacacctgtaatctcggcactttggaagtccgcggcgggtggttcacctgaggtcgggagttcaagaccagcctgaccaacatggagaaacccccatctctactaaaaaaaaaatacaaaattagccaggcgtgatggcgcatgcctgtaatcccagctactcgggagactgaggcaggagaatcgcttgaacctgggaggcaggggttgcaatgagccgagatgtgcactccagcctgggcaacaaagagcgaaactccatctcaaaaaaaaaaaaaaaa

SEQ ID NO: 163671 - DNA, 1418 bp, Homo sapiens
  Payload ID: 12231
  Gene Symbol: PALM2
  Gene Name: paralemmin 2
  ENST ID: ENST00000483909
  CDS Start-End: 87-1220
ccccggggtgcccatcagtttccttgggtgactacagcgtgtgttttttctttcctctttcccctgcctgtgtgcccttctccaggatggcagaggcggaattgcacaaggaaaggctgcaagccatagcagaaaaaagaaagaggcagactgaaatagaaggcaagcgacaacagcttgacgagcagatacttctgctgcagcattccaagtccaaagtgcttcgggagaaatggctgctgcagggcatacccgctggaactgccgaagaggaggaagccaggaggcggcagtctgaagaggatgagttcagagtcaagcaacttgaagataacattcagaggctggagcaagaaatacaaacgctagaaagtgaagagtcccagatatctgccaaagagcaaatcatcctagagaaactgaaggaaacagaaaaatccttcaaggactttcagaagggtttctccagtacggatggagctgtgtacgccatggaaattaatgtggagaaagacaaacaaacaggagagaccaagattctctctacatctaccattggcccagagggggtccatcagaaaggagtcaaagtctatgatgatggtaccaaagtagtgtatgaggtgcgctcaggaggcaccgtagtagaaaatggagtgcacaaattaagcacaaaggatgtagaagagcttattcagaaggctggacaatcaagcttaggaggagggcacgtgtctgaaaggactgtgattgcagatgggagcctcagccatcccaaggaacacatgctctgcaaagaagctaagttagaaatggtacataagtctaggaaagaccattcttccgggaacccagggcagcaggcccaagcccccagcgctgcagggccggaggcaaacttggatcagcccgtcaccatgatttttatgggctaccaaaatatcgaggatgaagaggagacgaaaaaggtgctaggctatgatgaaaccatcaaggctgaattggtcctcattgatgaagatgatgagaagtcattgagggagaagacagtgacggacgtgtccactattgacgggaacgcggctgagcttgtgtccgggaggccggtctcagacaccacagagccctcatccccagaagggaaggaagagagcctagctacagagccagccccaggtacccaaaagaaaaagcgctgtcaatgctgtgttgtcatgtgaccacttctttcttctcctttcttctgggcagcctgtactctccaccactcacgtagacctcactgtaccactaactgcaatactgtgaactggaagcaaacacctgccttgccttgcagttgaattgctttgatctctctcattttttttccttttcctcacctgagagacaacgtgcatgtgtgtgcttcattctct

SEQ ID NO: 163672 - DNA, 583 bp, Homo sapiens
  Payload ID: 12231
  Gene Symbol: PALM2
  Gene Name: paralemmin 2
  ENST ID: ENST00000497711
  CDS Start-End: 42-583
atcaaataaatctcacccagaatttcccactgtcttattctatggaaaaaagaaagaggcagactgaaatagaaggcaagcgacaacagcttgacgagcagatacttctgctgcagcattccaagtccaaagtgcttcgggagaaatggctgctgcagggcatacccgctggaactgccgaagaggaggaagccaggaggcggcagtctgaagaggatgagttcagagtcaagcaacttgaagataacattcagaggctggagcaagaaatacaaacgctagaaagtgaagagtcccagatatctgccaaagagcaaatcatcctagagaaactgaaggaaacagaaaaatccttcaaggactttcagaagggtttctccagtacggatggagatgcagtaaattacatttcctcccagcttcccgacctgccaatcctctgttcacgaacagcagaaccatcacctgggcaggacgggaccagcagagcggctgctgtgtacgccatggaaattaatgtggagaaagacaaacaaacaggagagaccaagattctctctacatctaccattggcccagaggg

SEQ ID NO: 163673 - DNA, 2262 bp, Homo sapiens
  Payload ID: 12232
  Gene Symbol: PALM3
  Gene Name: paralemmin 3
  Uniprot ID: A6NDB9
  ENST ID: ENST00000340790
  CDS Start-End: 1-2022
atggcggagagctccctctaccggcagcggctagaagtcatcgctgagaagcggcggctgcaggaggagatccgcgccgcgcgccgggaggtggaggaggagaaactccgcgtggagcgtctcaagaggaagtctctccgggaacgttggctaatggatggggcagctgcagtgccagagccatccgaagaccccacctcgaaggacccccagtcacccgagggccaggctcaggcccgaatccggaacctggaagacagtttgttcacactccagtcccagctgcaactgttgcaaagtgcttccacaggtgcccagcacaagccctcaggcaggcccagctggcgcagacagggtcaccgtcctctctcccagtccattgtcgaggcaggttctgtaggccagactgatctgaacaagagagcctccctgccggctggactagtgggcacgcctccagagtccccctctgagcccagggaggatgtcttggggtttctgccaggcccgaggcaggtccccggggcagcaggagactcctcagaagccaatggcccatgccccagccccatccccactccagagcaggggctaagtcagagggcagtgccatccgaagggcgggtgggtgaggccaaaggagggggcgtggtgagtgtggtgtgggaagggctgagggccacagaggactgtgccacaggggccacgggccccgagctggaggctaaggtggaggaagtggtgctggaagccatcggagacaggaagggagctggtagcctggagctcccggcctgggtgaaggaggacaggggcatcgtggaggtggtctgggagggggtgggtggcagtgatgcagaggccatgggggagataggcagggtccctgaggtcgtgcagactagctcgcctaggctccaggagagattagaggcagcagcttccatagaaggggaagatgtgccccagggcagccctgagggtgatgggcagggaggctctggaggagaggagggatccttcatttgggtggagagagtgaccctcagtgaagagtgggaggagctgctggtggaggggttggaagggcccgaggtggcagggagggagagaggagatgaaagcccgctgggggccgagggggccaagacgggaggaggcgaggagacctgggaggcagagaagagaaaagcggaagaatccatgggaataggaagtgaggaaaagccagggacagggagggatgaagcggagatgtcaccagtggtagagaggaaaggaggagagaagaagttggagctggagagcagaggaagtgcagaaaagctgggaacagagagggaaggaggtgaggaaccactgggcatagagagaaaagttgagggacatttgagggcagagaaggaaggagatgaggaaaagcgaggggcagaggaggaggaggtagaagaaccattgggagtagagaagaaaggaggtgaggaagagccagaggcaaccaaagaaccactggaggcagagagaaagggaggggaggagacactggaggcagagaaaaggggaggtgaggaatcattggagacagagaagacccaagggacggagggagatctgaatctagaacaagggtctagggaaggaagtgaatcccaggcagaggagatgaatgaggcagggcctccccttgaggctaacacggagacaaggccagagaaggaaggaccccagccccaggagaagccagtaggagccctggaggaggaaggagtgaagccccaaaccgctgctgagggccaaggccccttgggggatgccacacctcttctggcagagaccccagccccagagcagcccgccgaatgccagccactgcttcagggggaggggcccagcgccaaccccagtgcccaccctgtgcccacctacgcgcctgcccggcagcctgagccatctgcccccaccgagggtgaagaggcaagtggccctaagcaaaagacgtgccagtgttgtgcggtcatgtgaacccatgcccctccaccccatgtccagctcctctcacagctacctcggcctcttggcacccagaagagggtcccaggcacagacagggaccacaggactggccatggcacctgggagccagctagcctgcacgtccacctaaacctgggcttccagaccccttgcccactgcctgtaaccctggcctccttctgcgatgaagcctttatacttgaaaataaaatgtgaaagcactcaaga

SEQ ID NO: 163674 - DNA, 855 bp, Homo sapiens
  Payload ID: 12232
  Gene Symbol: PALM3
  Gene Name: paralemmin 3
  ENST ID: ENST00000589048
  CDS Start-End: 277-855
ccccgccctgggtgcagacccgcgctgggccacccccgccgggctcgctgcctcgggagccccgggagctccggtgagccccgcggaggagggaggggaaagggagggaagaggaggtggtggaggccgcgcccggccggcgggcagctccgggtcctctgtgcgcaggagaagcggcggctgcaggaggagatccgcgccgcgcgccgggaggtggaggaggagaaactccgcgtggagcgtctcaagaggaagtctctccgggaacgttggctaatggatggggcagctgcagtgccagagccatccgaagaccccacctcgaaggacccccagtcacccgagggccaggctcaggcccgaatccggaacctggaagacagtttgttcacactccagtcccagctgcaactgttgcaaagtgcttccacaggtgcccagcacaagccctcaggcaggcccagctggcgcagacagggtcaccgtcctctctcccagtccattgtcgaggcaggttctgtaggccagactgatctgaacaagagagcctccctgccggctggactagtgggcacgcctccagagtccccctctgagcccagggaggatgtcttggggtttctgccaggcccgaggcaggtccccggggcagcaggagactcctcagaagccaatggcccatgccccagccccatccccactccagagcaggggctaagtcagagggcagtgccatccgaagggcgggtgggtgaggccaaaggagggggcgtggtgagtgtggtgtgggaagggctgagggccacagaggactgtgccacaggggccacgggccccgagctggaggctaaggtg

SEQ ID NO: 163675 - DNA, 2590 bp, Homo sapiens
  Payload ID: 12233
  Gene Symbol: PNMA1
  Gene Name: paraneoplastic Ma antigen 1
  Uniprot ID: Q8ND90
  ENST ID: ENST00000316836
  CDS Start-End: 734-1795
gcggcgggttgcgggtaggactggacgccagagcagccgcgcagcgcctgaaccgctgcgggccgccgcggccgccccttcccaccctcgcctctgctgtctccagcctcgcttctccgactttcctgctcctctgctgccttcgtttctggtcctcggccgtcctcgccgcccgcccagaggagtccccgcgcccgccaagaagccgctttccgctggcccgcagccgccgcgacttcggcacagtttctccctctggctagtctcccaaacggccgctcctcgcccgcgggaagaccaggctgcgaccgcgaacgcccgatcctctccaggagccgcagcgagcgcccggcggccacgccccgcgaccacaccccggcggctctcggcccagcgcgcctgccttcgccgcccgccgtcgctcctcgcccgctgcacgacgacgcgacgcccctgctgcaggcggcggacccgaccggacccagacccagacgcaagatggcgacggccgcgtgactgcctcagcgtccccgagctcggctccgagtgcacctacggactgactgtgggggcagagaagggcgagatcaggactctgtctttgttaatcgtgactgcatgaaggtcgcctccctcgggcctacttggtgggagtgtctggtattgttctaaggccaggagcacggtgagccacagtctgttggtagaatttggcgtcttgatagttgagaaaatggcgatgacactgttggaagactggtgccgggggatggatgtgaactcccagagagctctgttagtctggggcatcccagtgaactgtgatgaggctgaaatcgaagagaccctccaggctgcgatgccccaggtctcctaccgaatgcttgggagaatgttctggagggaagaaaatgcgaaagcagccttattagagctcactggcgctgtagattacgccgcgatccccagggagatgccgggcaaaggaggggtctggaaagtgttatttaagcccccaacttctgatgctgaatttttagaaagattgcacctcttcctagctagagaggggtggaccgtgcaagatgttgcccgtgtccttgggtttcagaaccctactccgaccccgggcccagagatgccagcagagatgctaaactatattttggataatgttattcagcctcttgttgagtccatatggtacaagaggctgacacttttctcggggagggacatcccagggcctggagaggaaacctttgatccctggctggagcacactaatgaggtcctagaggagtggcaggtgtccgatgtagaaaagaggcggcggttgatggagagtcttagaggccccgccgctgatgttattcgcatccttaagtccaacaaccccgcgataaccactgccgaatgcctgaaggcgcttgagcaggtgtttgggagcgttgagagctctagggatgcccagatcaaatttctgaacacttatcagaacccgggagaaaaattgtctgcttatgtcattcgtctggagcctctgctacagaaggtggtagagaagggggccattgataaagataatgtgaaccaggcccgcctagagcaggtcattgccggggccaaccacagcggggccatccgaaggcagctgtggcttaccggggctggggaagggccagccccaaacctctttcagttgctggtgcagatccgtgaggaggaagccaaggaggaggaggaggaggctgaggccacccttctgcagttaggcctggaagggcacttctgagtgccaggaaaggcagctttagtgcagacctagatcacagctacttttcttgtccctgtggggtcttacagatgtgtctctgagtagtaaaggcttagccttgttctgttttgttgttttttggaggggaaggttagtcaggcctgagtattcatgtaacattctaaaattgtgccagcgagcaccgtgaacgactgcaatgcaagcgggtcttgctggctaaaatgccaggtaaagggttggttggacacagcgcttagtgcacgctgtcatcatggacatcataatcagttgtgaaaaacacgcgaacctatgacacttcttattccacactgaatgtgaaattgcatgttcagatgtttactacgaggcctggctcacaggaagtgttcagtaaaagtatgcactgttagattactgataacgcggatagatttttgtttaccataaattgttccagatttatattaatggaaggaagtgtgcatttattagctattactcaactttacaatgcaaacatcttatttctcatctttaaacatgtcgaccagtttaattgaaaagtattctgagactgcaaaatggggtgttaaaaaatactgcagttacggagctgtgtaaaccagtttctcattgcataagatacagatgtaaattgcatggagaggttgatatgcacctgtacagtaattcactcccccatttcacatctttgtcagagaatagttcttgttcatactgagtgttctaaatttgaagttatatatacaaattaaaatattttaaaaattc

SEQ ID NO: 163676 - DNA, 4965 bp, Homo sapiens
  Payload ID: 12234
  Gene Symbol: PNMA2
  Gene Name: paraneoplastic Ma antigen 2
  Uniprot ID: Q9UL42
  ENST ID: ENST00000522362
  CDS Start-End: 896-1990
gctcggggaagcggcaaagttggatctgggagggcgtccgctgcggctgcgggagccgaaaggctgccagttcccggcagcgctgggaggagggaggcgcgggcggggcgcggcgccggggaggggagcggtgctcaggggagggctggaggggagggaaggagagagagaggggagggcggcaccgcccctagccccgcgctccggaagtgaagcggccagaccaccagctaatggatgcggagcggagggcccgctgaccgctctccgcgcctggagcagcttggcttggctggagctaagagccagacacaccactgtgtggaggtgggtgatgtcttcctgtgctaaaaggtgaataaataagctcctcacctctcgcggaacactcgggaacacatcaacaggggtccaagccgccctgctgggaggcttctcttcaagagttctgggtcccagagtggaaggcattttcccatcaactggagagagacgaaacatcagagaccaggaggctgtggagaaagcagctgtcccaggtgcctcaactatcagagaagggtcagcgtcacgtggctgccagcatctttgagaaaatcactggcaatcggacttcagagctgcgggcacaggtgtggttagaactgagatacgacctgcccacctgggtcaggcctaaagacaagaagtcctgagttcttgccactgagtaggccagggtcatttgtccagaaaactttgtgactgtctttgagtgacctagtctgggacccattcattggtgggttctaaggttagaagctcatccaggatattttcaatattaagtcagtgcatagctgcaccactaacaaattggtgcctgtagagtcagagtgggtcaattcttaggacaatggcgctggcactgttagaggactggtgcaggataatgagtgtggatgagcagaagtcactgatggttacggggataccggcggactttgaggaggctgagattcaggaggtccttcaggagactttaaagtctctgggcaggtatagactgcttggcaagatattccggaagcaggagaatgccaatgctgtcttactagagcttctggaagatactgatgtctcggccattcccagtgaggtccagggaaaggggggtgtctggaaggtgatctttaagacccctaatcaggacactgagtttcttgaaagattgaacctgtttctagaaaaagaggggcagacggtctcgggtatgtttcgagccctggggcaggagggcgtgtctccagccacagtgccctgcatctcaccagaattactggcccatttgttgggacaggcaatggcacatgcgcctcagcccctgctacccatgagataccggaaactgcgagtattctcagggagtgctgtcccagccccagaggaagagtcctttgaggtctggttggaacaggccacggagatagtcaaagagtggccagtaacagaggcagaaaagaaaaggtggctggcggaaagcctgcggggccctgccctggacctcatgcacatagtgcaggcagacaacccgtccatcagtgtagaagagtgtttggaggcctttaagcaagtgtttgggagcctagagagccgcaggacagcccaggtgaggtatctgaagacctatcaggaggaaggagagaaggtctcagcctatgtgttacggctagaaaccctgctccggagagcggtggagaaacgcgccatccctcggcgtattgcggaccaggtccgcctggagcaggtcatggctggggccactcttaaccagatgctgtggtgccggcttagggagctgaaggatcagggcccgccccccagcttccttgagctaatgaaggtaatacgggaagaagaggaggaagaggcctcctttgagaatgagagtatcgaagagccagaggaacgagatggctatggccgctggaatcatgagggagacgactgaaaaccacctgggggcaggacccacagccagtgggctaagacctttaaaaaatttttttctttaatgtatgggactgaaatcaaaccatgaaagccaattattgaccttccttccttccttccttccctcccttcctccttctctccttctctcctcctctctcctctcctctcctctctttccttccttccttccttttttctttttctctttcttctttatttcttgggtctcactctcatcacccaggctagagtgcagtggcacaaaaatctcggctcactgcagccttgacttcccaggctcaggctcaggtgatcctcacaccttagcctcccaagtacctgggactacaggcacgcaccaccatgcctagctattcttttgtatttttggtagagacagggttttgctgtgttgctcaggctggtctggaacccctaggctcaaatgatgtgcccaactcggcctcccaaagtgctgggattacaggcatgaaccgccatgcctggcccttgatttttctttttaagaaaaaaatatctaggagtttcttagaccctatgtagattattaatgaacaaaagattaaactccaaatattaaatagtaagcctgaaggaatctgaaacacttgtacttccaattttctttaaataatcccaaatagaccagaattggcccataccatagaagaaagaattggcagtcaaaaaaaaaaataccttttgtaatgtttgaaaaataaagctgtttgacttgtcaggtgttttcctttctcaaatcagcaaattctctctgagtgcctggctttgtgagacactgtacaaggagttacaagactacagctataacctgcagttgagcagttataaacctacaaaatgggccctgccctcagagaggttccagtctagatgaggagctgatctagacaggtaaaaggctaactaaccctttgtgtaaataagttcatcaccccagtaaaagtgtcatcacccagtgaataggaccacctctgcctgcagatttttgttgttgttgttgtcattgttgttgttgttttaacctgggaagtgttcttcctgcctttctgctaggtgtcagatagatggtcccagagctaggtgctgtgtcaggccctgaagacacagatgactcaacctaagctttactttccagaggtccacagcctgagaggtgtccccaaagaaagggggacatgaggggactgcatgcttgagagcagggttgtttagggcaggtttggatttagtgagcaggctggtttgcttagagaaggcttttagtggcaacaaaggatgaagaggagagaaaaggaactcacatttattgagggcctactgtgtgcaaagtgtttcatgtatatctcattgaatgtatacagccaccctgttgtggtataattttgctctttataaagagaaagaccgaagctcagatgagttaagtggtctcctcaacaccaaaatgccaagaagtgatggagcctagacagaagcccagaactttctgactcacactagtccatcctctaccatcacgatgactttcaaattgtgctctgcagttctgcagattttctagcagtgccatctccaaaatgtgttttaaactctttatttttttaattattattagtattattttgagactgagtcttgctctatcacccaggctggagtgcagtggtgcaatctcagctcactgcaacctccgcctcccaggttcaagcgatttcgtgcctcagcctcccgagtagctgggattacaggcacccaccaccacgcccagctaatttttgtatttttagtagaaatggggtttcaccatgttggccaggctggtctcgaactcctgacctcaagtgatccactcacctcggcctcccaaagtgctgggattacaggtgtgagccaccatgcctgggctaaactctttaagtctctagtaaatgcagctagattcaaatgggctgataaccaaattttaacacatcagcattcaccaccaggtttacttttattttcagattggctcattttgtgcagaccttagagcaaagtttcctttatggtatctgtgtacgtatccaaacttcttttaattgttcacagattttaaaagcggtagcaccacatggttgtgtagatcagacctgtgtatttagatcagacctgtgtatcacgtaagtgtgtgagtgcagtgcagatgagcaccatttagttatatgtgctaggcaaatctccaacacagttgatgtgtagtcttgtggtagatttgtgcatactgtaagcaaattgcttagcttctctagacatcagtttccacatctgaaaaataagaagatgagagtacacggttgttatgaacaaatgacttaatgctttttaagcacgttgcatgacatctggaacacagaaagccctcaatacattgaagctcttaggattttcacgatgttcctgtctgctcaatgcatgctttctttattgttctgacagttgtgtggtaacaagctaatatgcttccagttgacttccagtctaccctggtgttagaaaccgtttcatctcttattgtaaatttgagtgcttgttgttttttatatttgtgatgactcttccagcagttgttgacaattgttagaggtttgacttttaaataattacttattttttctgattgtggttcagtttaactgaagaatatcctgagattgtaagaaaagcattttttaaaaggtatcacttgtgatcatttatctttctaaattctatttttaatactgttccaccaaagtgatgcagtggttaccatgacaccctaatttcatgtgtttttgtatttatgaaaatagtttcattgtcatttattggcggtatacaaagtaaaatgttataaatgtgaagttataaaataaatatatgctaataaaatcctgagtttttctg

SEQ ID NO: 163677 - DNA, 3158 bp, Homo sapiens
  Payload ID: 12235
  Gene Symbol: PNMA3
  Gene Name: paraneoplastic Ma antigen 3
  Uniprot ID: Q9UL41
  ENST ID: ENST00000424805
  CDS Start-End: 264-1655
gtgctgcgcgagcgagggagagccacagtctgagcgaacgtccgcgctgggagccaggggtgcccgacccccgtccgccgccgccgccgccgccgcgcatagcccccggagagccctctggggaccccgaccagaagggaccttgccctgggagaaggctgtggagacctgggccttctgcgatcaccctaggagttgatccagatatgtgcctcacgccctgatcactccccccaaattagtatccgcagagattcgaggacatgccgttgaccttgttacaggactggtgtcggggggaacacctgaacacccggaggtgcatgctcatcctggggatccccgaggactgtggcgaggatgagtttgaggagacactccaggaggcttgcaggcacctgggcagatacagggtgattggcaggatgtttaggagggaggagaacgcccaggcgattctactggagctggcacaagatatcgactatgctttgctcccaagggaaataccaggaaagggggggccctgggaagtgattgtaaaaccccgtaactcagatggggaatttctcaacagactgaaccgcttcttagaggaggagaggcggaccgtgtcagatatgaaccgagtcctcgggtcggacaccaattgttcggctccaagagtgactatatcaccagagttctggacctgggcccagactctgggggcagcagtgcagcctctgctagaacaaatgttgtaccgagaactaagagtgttttctgggaacaccatatccatcccaggtgcactggcctttgatgcctggcttgagcacaccactgagatgctacagatgtggcaggtgcccgagggggaaaagaggcggaggctgatggaatgcttacggggccctgctctccaggtggtcagtgggctccgggccagcaatgcttccataactgtggaggagtgcctggctgccttgcagcaggtgttcggacctgtggagagccataaaattgcccaggtgaagttgtgtaaagcctatcaggaggcaggagagaaagtatctagctttgtgttacgtttggaacccctgctccaaagagctgtagaaaacaatgtggtatcacgtagaaacgtgaatcagactcgcctgaaacgagtcttaagtggggccacccttcctgacaaactccgagataagcttaagctgatgaaacagcgaaggaagcctcctggtttcctggccctggtgaagctcctgcgtgaggaggaggaatgggaggccactttaggtccagatagggagagtctggaggggctggaagtagccccaaggccacctgccaggatcactggggttggggcagtacctctccctgcctctggcaacagttttgatgcgaggccttcccagggctaccggcgccggaggggcagaggccaacaccgaaggggtggtgtggcaagggctggctctcgaggctcaagaaaacggaaacgccacacattctgctatagctgtggggaagacggccacatcagggtacagtgcatcaacccctccaacctgctcttggtaaagcagaagaaacaggctgcagttgagtcgggaaacgggaactgggcttgggacaagagccatcccaagtccaaggccaagtaggctcgggagaacagggcaacatttcctaccacaggccaaggagacaaaagagatattggaaggaggggaaagagaagcccagacaaacagcagatgagttgagtggggcagagggacagggcagccagaccaaggccaagccttctcacccttggccagctggaagggacttcagcaaccaagaccacctggcaacaggctcagtgggggtcaggtccaggtccccgaagaggtgctggagaggaaagcagggagccactgcatccagcacatggggtgcctgggcctcagatggggaccccaaagaagcagaagctgaagaagggccaccagactcctggagagatcaagcaaggagaacctggggctgccatggccaaagcaactcaacagatgccaatgccaattccaaggccagccacaaccctgccaccttggggaatccagcctggaggcatcccctaagcagccagccatggcctgggtggaggcacctgaagacgtctgtcccaaactcccccagccctgagctgggagatgacagggggaaagaggccctctcaagggtgccagatgcctgggtctcccaagaggggtcccccaactcactgttcccgggacaggctgccccctgttccaggaagctcatcctcacctgtgtaggcccctgtagtgacccacgcgtccagcagacgcccacccaccgctagccgttgttcctgtgcaaagtagtgtgctatgcacccacccaggtggccgcctctgggcccaaggcacatgctgtgagcttcctgtgagcccaggctctgctcactgctgtcccgcgtcatgagcaccacctctgctttccctgtgtagatctaggccagtggctgcttgttcttgtggagctgtgtgtgttcttctctgagcagctcctccccggagtcccccagcacagtcccaggagatgacaggaaggaagcaccagggcaaggcggacgctcaccctgtgaccacgatggtgaccgtgactgtgggaggaagaactggacccaggacggagcggggctgccctgcctgaggctcccgaggagctttgtgctttggtgttccacccctgttgttactcatgactcagtttccttaacctggtagggtgttccctgctgtgttttccagtgtcctgtgactgtcctgtgcgggccatagggcagggccctgccccagcagatgggcttgggaggggactccctaaagccagtggacactgccagagtctaccttcctggcaagaggcagaccccggggccctcaggaaggagggagttggcagcgggggctgcagcaggagtaggagcagatgaggcgtcttgccaggaacctcaggaggagggggcccgggacctgtgtgggacctgtgtcctgtggtggccgtttgcagtttctctctgtgttgtgattcccttctcttcaacgttttcagtacgtgtttctcttcaataaacttcattcagtgttcca

SEQ ID NO: 163678 - DNA, 1432 bp, Homo sapiens
  Payload ID: 12235
  Gene Symbol: PNMA3
  Gene Name: paraneoplastic Ma antigen 3
  Uniprot ID: Q9UL41
  ENST ID: ENST00000593810
  CDS Start-End: 21-1412
atccgcagagattcgaggacatgccgttgaccttgttacaggactggtgtcggggggaacacctgaacacccggaggtgcatgctcatcctggggatccccgaggactgtggcgaggatgagtttgaggagacactccaggaggcttgcaggcacctgggcagatacagggtgattggcaggatgtttaggagggaggagaacgcccaggcgattctactggagctggcacaagatatcgactatgctttgctcccaagggaaataccaggaaagggggggccctgggaagtgattgtaaaaccccgtaactcagatggggaatttctcaacagactgaaccgcttcttagaggaggagaggcggaccgtgtcagatatgaaccgagtcctcgggtcggacaccaattgttcggctccaagagtgactatatcaccagagttctggacctgggcccagactctgggggcagcagtgcagcctctgctagaacaaatgttgtaccgagaactaagagtgttttctgggaacaccatatccatcccaggtgcactggcctttgatgcctggcttgagcacaccactgagatgctacagatgtggcaggtgcccgagggggaaaagaggcggaggctgatggaatgcttacggggccctgctctccaggtggtcagtgggctccgggccagcaatgcttccataactgtggaggagtgcctggctgccttgcagcaggtgttcggacctgtggagagccataaaattgcccaggtgaagttgtgtaaagcctatcaggaggcaggagagaaagtatctagctttgtgttacgtttggaacccctgctccaaagagctgtagaaaacaatgtggtatcacgtagaaacgtgaatcagactcgcctgaaacgagtcttaagtggggccacccttcctgacaaactccgagataagcttaagctgatgaaacagcgaaggaagcctcctggtttcctggccctggtgaagctcctgcgtgaggaggaggaatgggaggccactttaggtccagatagggagagtctggaggggctggaagtagccccaaggccacctgccaggatcactggggttggggcagtacctctccctgcctctggcaacagttttgatgcgaggccttcccagggctaccggcgccggaggggcagaggccaacaccgaaggggtggtgtggcaagggctggctctcgaggctcaagaaaacggaaacgccacacattctgctatagctgtggggaagacggccacatcagggtacagtgcatcaacccctccaacctgctcttggtaaagcagaagaaacaggctgcagttgagtcgggaaacgggaactgggcttgggacaagagccatcccaagtccaaggccaagtaggctcgggagaacagggcaac

SEQ ID NO: 163679 - DNA, 3627 bp, Homo sapiens
  Payload ID: 12235
  Gene Symbol: PNMA3
  Gene Name: paraneoplastic Ma antigen 3
  Uniprot ID: Q9UL41
  ENST ID: ENST00000619635
  CDS Start-End: 337-1704
ccgccgccgcgcccccgccccgtgtccgcactgcagagagccgcggcgagcaggcgccggcgcactggcccacgtgctgcgcgagcgagggagagccacagtctgagcgaacgtccgcgctgggagccaggggtgcccgacccccgtccgccgccgccgccgccgccgcgcatagcccccggagagccctctggggaccccgaccagaagggaccttgccctgggagaaggctgtggagacctgggccttctgcgatcaccctaggagttgatccagatatgtgcctcacgccctgatcactccccccaaattagtatccgcagagattcgaggacatgccgttgaccttgttacaggactggtgtcggggggaacacctgaacacccggaggtgcatgctcatcctggggatccccgaggactgtggcgaggatgagtttgaggagacactccaggaggcttgcaggcacctgggcagatacagggtgattggcaggatgtttaggagggaggagaacgcccaggcgattctactggagctggcacaagatatcgactatgctttgctcccaagggaaataccaggaaagggggggccctgggaagtgattgtaaaaccccgtaactcagatggggaatttctcaacagactgaaccgcttcttagaggaggagaggcggaccgtgtcagatatgaaccgagtcctcgggtcggacaccaattgttcggctccaagagtgactatatcaccagagttctggacctgggcccagactctgggggcagcagtgcagcctctgctagaacaaatgttgtaccgagaactaagagtgttttctgggaacaccatatccatcccaggtgcactggcctttgatgcctggcttgagcacaccactgagatgctacagatgtggcaggtgcccgagggggaaaagaggcggaggctgatggaatgcttacggggccctgctctccaggtggtcagtgggctccgggccagcaatgcttccataactgtggaggagtgcctggctgccttgcagcaggtgttcggacctgtggagagccataaaattgcccaggtgaagttgtgtaaagcctatcaggaggcaggagagaaagtatctagctttgtgttacgtttggaacccctgctccaaagagctgtagaaaacaatgtggtatcacgtagaaacgtgaatcagactcgcctgaaacgagtcttaagtggggccacccttcctgacaaactccgagataagcttaagctgatgaaacagcgaaggaagcctcctggtttcctggccctggtgaagctcctgcgtgaggaggaggaatgggaggccactttaggtccagatagggagagtctggaggggctggaagtagccccaaggccacctgccaggatcactggggttggggcagtacctctccctgcctctggcaacagttttgatgcgaggccttcccagggctaccggcgccggaggggcagaggccaacaccgaaggggtggtgtggcaagggctggctctcgaggctcaagaaaacggaaacgccacacattctgctatagctgtggggaagacggccacatcagggtacagtgcatcaacccctccaacctgctcttggccaaggagacaaaagagatattggaaggaggggaaagagaagcccagacaaacagcagatgagttgagtggggcagagggacagggcagccagaccaaggccaagccttctcacccttggccagctggaagggacttcagcaaccaagaccacctggcaacaggctcagtgggggtcaggtccaggtccccgaagaggtgctggagaggaaagcagggagccactgcatccagcacatggggtgcctgggcctcagatggggaccccaaagaagcagaagctgaagaaggtacggctgggggttctgtcctgctcatccaaccacccctaaatacccaccctgtggactttgagctgaacatgcccactggcccccaggccacatgggacctggaggagcctacctggggcctgcccctgccagcaggtgccagggctggtgaggaagagctggggggcagaggtaaagccctgcaggggaggccacagggtccatcccgtcttcaggatcatctacactgcactaggggagccccaggaaggcagcaccctggaggccctgtgccagtgaggacaggagaccctaaggccccgggagcccagtgccagccagaggttgtgcaggcaaggagaccaaagattgatgagaagacccccagcaggggtactgggtacccggcaggccagtgccctcacagttgacttggaccagggtggctgtgaagggaagtctttgttgcaaaggaggaggaaaagggaggacttggtagggttttgtttcttctgcttgtttctgtacagggccaccagactcctggagagatcaagcaaggagaacctggggctgccatggccaaagcaactcaacagatgccaatgccaattccaaggccagccacaaccctgccaccttggggaatccagcctggaggcatcccctaagcagccagccatggcctgggtggaggcacctgaagacgtctgtcccaaactcccccagccctgagctgggagatgacagggggaaagaggccctctcaagggtgccagatgcctgggtctcccaagaggggtcccccaactcactgttcccgggacaggctgccccctgttccaggaagctcatcctcacctgtgtaggcccctgtagtgacccacgcgtccagcagacgcccacccaccgctagccgttgttcctgtgcaaagtagtgtgctatgcacccacccaggtggccgcctctgggcccaaggcacatgctgtgagcttcctgtgagcccaggctctgctcactgctgtcccgcgtcatgagcaccacctctgctttccctgtgtagatctaggccagtggctgcttgttcttgtggagctgtgtgtgttcttctctgagcagctcctccccggagtcccccagcacagtcccaggagatgacaggaaggaagcaccagggcaaggcggacgctcaccctgtgaccacgatggtgaccgtgactgtgggaggaagaactggacccaggacggagcggggctgccctgcctgaggctcccgaggagctttgtgctttggtgttccacccctgttgttactcatgactcagtttccttaacctggtagggtgttccctgctgtgttttccagtgtcctgtgactgtcctgtgcgggccatagggcagggccctgccccagcagatgggcttgggaggggactccctaaagccagtggacactgccagagtctaccttcctggcaagaggcagaccccggggccctcaggaaggagggagttggcagcgggggctgcagcaggagtaggagcagatgaggcgtcttgccaggaacctcaggaggagggggcccgggacctgtgtgggacctgtgtcctgtggtggccgtttgcagtttctctctgtgttgtgattcccttctcttcaacgttttcagtacgtgtttctcttcaataaacttcattcagtgttccagccgg

SEQ ID NO: 163680 - DNA, 3197 bp, Homo sapiens
  Payload ID: 12236
  Gene Symbol: PNMA5
  Gene Name: paraneoplastic Ma antigen family member 5
  Uniprot ID: Q96PV4
  ENST ID: ENST00000361887
  CDS Start-End: 423-1769
cattgcattgcgcagagctcagccatctttctcatccgtcaggcattcctgagaaagagggccactctacctctcttgctgccagccttcactccagcaaggagggtgctgggtgacctgagcccacatagccccgagtgagcagtgaggctgtctcctgccctcttctgcctggagggctcgtcagtgtccccaggtgtcaggccctgcctcctgacgttggccttttcactacaggcacccgaagcacacacagcagagtcctctggactttgaggaagaacccacagcaggaggaagctgtgtgaaacctgggaccacttctgccttcctacgtggcagtggctcagagttatttgagtgctgtcaaactgagctgattgctgccctagtattagatcagtccatagaaagtgggagcaatggcactgacactgctagaggattggtgcaaggggatggacatggaccccagaaaggccctgctgattgtaggcatccccatggagtgtagtgaggtggaaattcaggacactgtgaaggcaggcttacagcccctgtgcgcatacagggtcctagggagaatgttcaggagggaagacaatgccaaggcagtcttcattgaactggctgacactgtcaattacactactctgcccagtcacataccaggaaagggtggctcctgggaagtggtggtaaaaccccgtaacccagatgatgagtttctcagtagactgaactacttcctgaaagatgagggccgaagtatgacagatgtggccagagccctgggatgttgcagcctccctgccgagagcctggatgcagaggtcatgccccaagttagatccccacctttagagcctccgaaagaaagtatgtggtacaggaaactgaaagtgttttcgggaactgcttcccctagcccaggcgaagagacctttgaagactggctagagcaggtcactgagataatgcccatatggcaagtgtctgaggtggagaagaggcggcgtttgctggagagcttacgtgggcctgctctgtcaatcatgcgggtgctccaggccaacaatgactccataactgtggagcagtgccttgacgccctaaagcagatctttggggataaagaggactttagagcctctcagtttaggtttctgcagacctctccgaagattggagagaaagtctccactttcctgctgcgcttagagcccctgctgcagaaagccgtgcacaagagccccttgtcagtgcgcagcacagacatgattcgtctgaaacatctcttagctcgggtcgccatgacccccgccctcaggggcaagctggagctcttggatcagcgagggtgtcctcccaattttctggagttaatgaagctcattcgagatgaagaagagtgggagaacactgaggcagtgatgaagaataaggagaagccatcagggagaggccggggggcctccggtagacaggcaagagcagaagccagtgtctctgcacctcaggccaccgtgcaggcaaggtcttttagcgacagcagcccccagaccatacagggaggcttacccccattagtgaaacgcaggcggctgttaggcagtgaaagcactaggggagaagaccatggccaggccacgtatcccaaggctgaaaaccagactccaggcagggaggggccacaggctgcaggagaggagttgggaaacgaggcaggggctggggccatgagccatcccaagccctgggaaacataggctcagaagaccgaagcactccttcccctggcaggcagcagggacatttgaacaaggggaaggggcagcttacactaacagggaacttgactggggcagagggacagggaagccaggtcgagatcaagcccccttactttccaccagctggaagggacttcaccaaccaagaccaaatagcatctggttcagtgggggccgggcccatagcccctaacaggtacaggagacacaagcggggaaccactacacttagcacatggggtgcctgggcttcagatggggaccccagcgaagcaggggctgaagaaggtgtggctgggggctctggcctggtcctctggacacccccaaatatctaccctgtggactttgagctgagcatgcccactggcacccaggccacgtgggacctggaggagcctgcctggggcctgcctctgccagaaggagccagggctgctgaggaagagctgtggggcagaagtgaagccccgcaggggaggccacagggtccagcctgtctttaggatcatctacactgcatgaggggagccccaggaaggcagcattcataagcccctgcaccagtgaggaagagaaagaggaggagaattaagaagaggatgatcgggaggaggaagaggagaataaggaggagcaggaggaagagggggaggagaaggaggaagagggggaggaggaagaggggaaggaggaggaagaagtgtaagaagagaagagaggatgtgttgggggtgggtagttgtttttggtttgcgtcatcatcaggcccgggctctgctcactgctgttccgtgtcaagaactccacctctgctttgccggtgtagatctcggccagtggctgcttgttctcttggggatgtgtgtgtttttatctgagcagctcctttccagagtaccccagcgcagttccaggagacggtgggaaggaggcatggcagacgctcaccttgtgactgtgacctcgactgcaggaggaccaaccagacacgggaaggagcagggctgcctgaggctccccaggaagctttgtgctttggcgttccacccctgctgttactcgtgactcagtttcctcaacttggtggggtgttccctgctatgttttccagcatcctgtgactgtcctgtgcagtctatagggcagggccctgccccagcgggtgggctcaggagggggttccctgaagcgagtacacattgccagagcccaccatcctggcaagaggtggatcctggggccctatggaaggagggatgtggtggggggggccacactgagggaggggccggggacttgtgacctgtagtggctgtttgcagtttctctctgtgttagattcccttttcttcagcagtttcagttcatgtttctcttcagtaaattttgttcagtgttcca

SEQ ID NO: 163681 - DNA, 3213 bp, Homo sapiens
  Payload ID: 12236
  Gene Symbol: PNMA5
  Gene Name: paraneoplastic Ma antigen family member 5
  Uniprot ID: Q96PV4
  ENST ID: ENST00000439251
  CDS Start-End: 440-1786
tctcattgcattgcgcagagctcagccatctttctcatccgtcaggcattcctgagaaagagggccactctacctctcttgctgccagccttcactccagcaaggagggtgctgggtgacctgagcccacatagccccgagtgagcagtgaggctgtctcctgccctcttctgcctggagggctcgtcagtgtccccaggtgtcaggccctgcctcctgacgttggccttttcactacaggcacccgaagcacacacagcagagtcctctggactttgaggaagaacccacagcaggaggaagtcagcagggagtggctgtgtgaaacctgggaccacttctgccttcctacgtggcagtggctcagagttatttgagtgctgtcaaactgagctgattgctgccctagtattagatcagtccatagaaagtgggagcaatggcactgacactgctagaggattggtgcaaggggatggacatggaccccagaaaggccctgctgattgtaggcatccccatggagtgtagtgaggtggaaattcaggacactgtgaaggcaggcttacagcccctgtgcgcatacagggtcctagggagaatgttcaggagggaagacaatgccaaggcagtcttcattgaactggctgacactgtcaattacactactctgcccagtcacataccaggaaagggtggctcctgggaagtggtggtaaaaccccgtaacccagatgatgagtttctcagtagactgaactacttcctgaaagatgagggccgaagtatgacagatgtggccagagccctgggatgttgcagcctccctgccgagagcctggatgcagaggtcatgccccaagttagatccccacctttagagcctccgaaagaaagtatgtggtacaggaaactgaaagtgttttcgggaactgcttcccctagcccaggcgaagagacctttgaagactggctagagcaggtcactgagataatgcccatatggcaagtgtctgaggtggagaagaggcggcgtttgctggagagcttacgtgggcctgctctgtcaatcatgcgggtgctccaggccaacaatgactccataactgtggagcagtgccttgacgccctaaagcagatctttggggataaagaggactttagagcctctcagtttaggtttctgcagacctctccgaagattggagagaaagtctccactttcctgctgcgcttagagcccctgctgcagaaagccgtgcacaagagccccttgtcagtgcgcagcacagacatgattcgtctgaaacatctcttagctcgggtcgccatgacccccgccctcaggggcaagctggagctcttggatcagcgagggtgtcctcccaattttctggagttaatgaagctcattcgagatgaagaagagtgggagaacactgaggcagtgatgaagaataaggagaagccatcagggagaggccggggggcctccggtagacaggcaagagcagaagccagtgtctctgcacctcaggccaccgtgcaggcaaggtcttttagcgacagcagcccccagaccatacagggaggcttacccccattagtgaaacgcaggcggctgttaggcagtgaaagcactaggggagaagaccatggccaggccacgtatcccaaggctgaaaaccagactccaggcagggaggggccacaggctgcaggagaggagttgggaaacgaggcaggggctggggccatgagccatcccaagccctgggaaacataggctcagaagaccgaagcactccttcccctggcaggcagcagggacatttgaacaaggggaaggggcagcttacactaacagggaacttgactggggcagagggacagggaagccaggtcgagatcaagcccccttactttccaccagctggaagggacttcaccaaccaagaccaaatagcatctggttcagtgggggccgggcccatagcccctaacaggtacaggagacacaagcggggaaccactacacttagcacatggggtgcctgggcttcagatggggaccccagcgaagcaggggctgaagaaggtgtggctgggggctctggcctggtcctctggacacccccaaatatctaccctgtggactttgagctgagcatgcccactggcacccaggccacgtgggacctggaggagcctgcctggggcctgcctctgccagaaggagccagggctgctgaggaagagctgtggggcagaagtgaagccccgcaggggaggccacagggtccagcctgtctttaggatcatctacactgcatgaggggagccccaggaaggcagcattcataagcccctgcaccagtgaggaagagaaagaggaggagaattaagaagaggatgatcgggaggaggaagaggagaataaggaggagcaggaggaagagggggaggagaaggaggaagagggggaggaggaagaggggaaggaggaggaagaagtgtaagaagagaagagaggatgtgttgggggtgggtagttgtttttggtttgcgtcatcatcaggcccgggctctgctcactgctgttccgtgtcaagaactccacctctgctttgccggtgtagatctcggccagtggctgcttgttctcttggggatgtgtgtgtttttatctgagcagctcctttccagagtaccccagcgcagttccaggagacggtgggaaggaggcatggcagacgctcaccttgtgactgtgacctcgactgcaggaggaccaaccagacacgggaaggagcagggctgcctgaggctccccaggaagctttgtgctttggcgttccacccctgctgttactcgtgactcagtttcctcaacttggtggggtgttccctgctatgttttccagcatcctgtgactgtcctgtgcagtctatagggcagggccctgccccagcgggtgggctcaggagggggttccctgaagcgagtacacattgccagagcccaccatcctggcaagaggtggatcctggggccctatggaaggagggatgtggtggggggggccacactgagggaggggccggggacttgtgacctgtagtggctgtttgcagtttctctctgtgttagattcccttttcttcagcagtttcagttcatgtttctcttcagtaaattttgttcagtgttcc

SEQ ID NO: 163682 - DNA, 749 bp, Homo sapiens
  Payload ID: 12236
  Gene Symbol: PNMA5
  Gene Name: paraneoplastic Ma antigen family member 5
  ENST ID: ENST00000437210
  CDS Start-End: 330-749
atccagtgaagcaggacccatcacgcctgagtcaggaactgcctaactggatagagttgaaaagcagagcgagtctgaagtggctgtgttattgcagcatccgcgctgccagcagggccaacccagcaaggcacccgaagcacacacagcagagtcctctggactttgaggaagaacccacagcaggaggaagtcagcagggagtggctgtgtgaaacctgggaccacttctgccttcctacgtggcagtggctcagagttatttgagtgctgtcaaactgagctgattgctgccctagtattagatcagtccatagaaagtgggagcaatggcactgacactgctagaggattggtgcaaggggatggacatggaccccagaaaggccctgctgattgtaggcatccccatggagtgtagtgaggtggaaattcaggacactgtgaaggcaggcttacagcccctgtgcgcatacagggtcctagggagaatgttcaggagggaagacaatgccaaggcagtcttcattgaactggctgacactgtcaattacactactctgcccagtcacataccaggaaagggtggctcctgggaagtggtggtaaaaccccgtaacccagatgatgagtttctcagtagactgaactacttcctgaaagatgagggccgaagtatgacagatgtggccagagccctgggatgttgcagcctccctgccgagagcctggatgcagaggtcatgccc

SEQ ID NO: 163683 - DNA, 3113 bp, Homo sapiens
  Payload ID: 12236
  Gene Symbol: PNMA5
  Gene Name: paraneoplastic Ma antigen family member 5
  Uniprot ID: Q96PV4
  ENST ID: ENST00000452693
  CDS Start-End: 340-1686
tctcattgcattgcgcagagctcagccatctttctcatccgtcaggcattcctgagaaagagggccactctacctctcttgctgccagccttcactccagcaaggagggtgctgggtgacctgagcccacatagccccgagcacccgaagcacacacagcagagtcctctggactttgaggaagaacccacagcaggaggaagtcagcagggagtggctgtgtgaaacctgggaccacttctgccttcctacgtggcagtggctcagagttatttgagtgctgtcaaactgagctgattgctgccctagtattagatcagtccatagaaagtgggagcaatggcactgacactgctagaggattggtgcaaggggatggacatggaccccagaaaggccctgctgattgtaggcatccccatggagtgtagtgaggtggaaattcaggacactgtgaaggcaggcttacagcccctgtgcgcatacagggtcctagggagaatgttcaggagggaagacaatgccaaggcagtcttcattgaactggctgacactgtcaattacactactctgcccagtcacataccaggaaagggtggctcctgggaagtggtggtaaaaccccgtaacccagatgatgagtttctcagtagactgaactacttcctgaaagatgagggccgaagtatgacagatgtggccagagccctgggatgttgcagcctccctgccgagagcctggatgcagaggtcatgccccaagttagatccccacctttagagcctccgaaagaaagtatgtggtacaggaaactgaaagtgttttcgggaactgcttcccctagcccaggcgaagagacctttgaagactggctagagcaggtcactgagataatgcccatatggcaagtgtctgaggtggagaagaggcggcgtttgctggagagcttacgtgggcctgctctgtcaatcatgcgggtgctccaggccaacaatgactccataactgtggagcagtgccttgacgccctaaagcagatctttggggataaagaggactttagagcctctcagtttaggtttctgcagacctctccgaagattggagagaaagtctccactttcctgctgcgcttagagcccctgctgcagaaagccgtgcacaagagccccttgtcagtgcgcagcacagacatgattcgtctgaaacatctcttagctcgggtcgccatgacccccgccctcaggggcaagctggagctcttggatcagcgagggtgtcctcccaattttctggagttaatgaagctcattcgagatgaagaagagtgggagaacactgaggcagtgatgaagaataaggagaagccatcagggagaggccggggggcctccggtagacaggcaagagcagaagccagtgtctctgcacctcaggccaccgtgcaggcaaggtcttttagcgacagcagcccccagaccatacagggaggcttacccccattagtgaaacgcaggcggctgttaggcagtgaaagcactaggggagaagaccatggccaggccacgtatcccaaggctgaaaaccagactccaggcagggaggggccacaggctgcaggagaggagttgggaaacgaggcaggggctggggccatgagccatcccaagccctgggaaacataggctcagaagaccgaagcactccttcccctggcaggcagcagggacatttgaacaaggggaaggggcagcttacactaacagggaacttgactggggcagagggacagggaagccaggtcgagatcaagcccccttactttccaccagctggaagggacttcaccaaccaagaccaaatagcatctggttcagtgggggccgggcccatagcccctaacaggtacaggagacacaagcggggaaccactacacttagcacatggggtgcctgggcttcagatggggaccccagcgaagcaggggctgaagaaggtgtggctgggggctctggcctggtcctctggacacccccaaatatctaccctgtggactttgagctgagcatgcccactggcacccaggccacgtgggacctggaggagcctgcctggggcctgcctctgccagaaggagccagggctgctgaggaagagctgtggggcagaagtgaagccccgcaggggaggccacagggtccagcctgtctttaggatcatctacactgcatgaggggagccccaggaaggcagcattcataagcccctgcaccagtgaggaagagaaagaggaggagaattaagaagaggatgatcgggaggaggaagaggagaataaggaggagcaggaggaagagggggaggagaaggaggaagagggggaggaggaagaggggaaggaggaggaagaagtgtaagaagagaagagaggatgtgttgggggtgggtagttgtttttggtttgcgtcatcatcaggcccgggctctgctcactgctgttccgtgtcaagaactccacctctgctttgccggtgtagatctcggccagtggctgcttgttctcttggggatgtgtgtgtttttatctgagcagctcctttccagagtaccccagcgcagttccaggagacggtgggaaggaggcatggcagacgctcaccttgtgactgtgacctcgactgcaggaggaccaaccagacacgggaaggagcagggctgcctgaggctccccaggaagctttgtgctttggcgttccacccctgctgttactcgtgactcagtttcctcaacttggtggggtgttccctgctatgttttccagcatcctgtgactgtcctgtgcagtctatagggcagggccctgccccagcgggtgggctcaggagggggttccctgaagcgagtacacattgccagagcccaccatcctggcaagaggtggatcctggggccctatggaaggagggatgtggtggggggggccacactgagggaggggccggggacttgtgacctgtagtggctgtttgcagtttctctctgtgttagattcccttttcttcagcagtttcagttcatgtttctcttcagtaaattttgttcagtgttcc

SEQ ID NO: 163684 - DNA, 3198 bp, Homo sapiens
  Payload ID: 12236
  Gene Symbol: PNMA5
  Gene Name: paraneoplastic Ma antigen family member 5
  Uniprot ID: Q96PV4
  ENST ID: ENST00000535214
  CDS Start-End: 425-1771
agcctcgtggcgcagtcagcacggaggcggcagccgccatagacgtgtggtggtcgcgctgcgcgggaactccggcttggaggcacctccggcagatccagtgaagcaggacccatcacgcctgagtcaggaactgcctaactggatagagttgaaaagcagagcgagtctgaagtggctgtgttattgcagcatccgcgctgccagcagggccaacccagcaaggcacccgaagcacacacagcagagtcctctggactttgaggaagaacccacagcaggaggaagtcagcagggagtggctgtgtgaaacctgggaccacttctgccttcctacgtggcagtggctcagagttatttgagtgctgtcaaactgagctgattgctgccctagtattagatcagtccatagaaagtgggagcaatggcactgacactgctagaggattggtgcaaggggatggacatggaccccagaaaggccctgctgattgtaggcatccccatggagtgtagtgaggtggaaattcaggacactgtgaaggcaggcttacagcccctgtgcgcatacagggtcctagggagaatgttcaggagggaagacaatgccaaggcagtcttcattgaactggctgacactgtcaattacactactctgcccagtcacataccaggaaagggtggctcctgggaagtggtggtaaaaccccgtaacccagatgatgagtttctcagtagactgaactacttcctgaaagatgagggccgaagtatgacagatgtggccagagccctgggatgttgcagcctccctgccgagagcctggatgcagaggtcatgccccaagttagatccccacctttagagcctccgaaagaaagtatgtggtacaggaaactgaaagtgttttcgggaactgcttcccctagcccaggcgaagagacctttgaagactggctagagcaggtcactgagataatgcccatatggcaagtgtctgaggtggagaagaggcggcgtttgctggagagcttacgtgggcctgctctgtcaatcatgcgggtgctccaggccaacaatgactccataactgtggagcagtgccttgacgccctaaagcagatctttggggataaagaggactttagagcctctcagtttaggtttctgcagacctctccgaagattggagagaaagtctccactttcctgctgcgcttagagcccctgctgcagaaagccgtgcacaagagccccttgtcagtgcgcagcacagacatgattcgtctgaaacatctcttagctcgggtcgccatgacccccgccctcaggggcaagctggagctcttggatcagcgagggtgtcctcccaattttctggagttaatgaagctcattcgagatgaagaagagtgggagaacactgaggcagtgatgaagaataaggagaagccatcagggagaggccggggggcctccggtagacaggcaagagcagaagccagtgtctctgcacctcaggccaccgtgcaggcaaggtcttttagcgacagcagcccccagaccatacagggaggcttacccccattagtgaaacgcaggcggctgttaggcagtgaaagcactaggggagaagaccatggccaggccacgtatcccaaggctgaaaaccagactccaggcagggaggggccacaggctgcaggagaggagttgggaaacgaggcaggggctggggccatgagccatcccaagccctgggaaacataggctcagaagaccgaagcactccttcccctggcaggcagcagggacatttgaacaaggggaaggggcagcttacactaacagggaacttgactggggcagagggacagggaagccaggtcgagatcaagcccccttactttccaccagctggaagggacttcaccaaccaagaccaaatagcatctggttcagtgggggccgggcccatagcccctaacaggtacaggagacacaagcggggaaccactacacttagcacatggggtgcctgggcttcagatggggaccccagcgaagcaggggctgaagaaggtgtggctgggggctctggcctggtcctctggacacccccaaatatctaccctgtggactttgagctgagcatgcccactggcacccaggccacgtgggacctggaggagcctgcctggggcctgcctctgccagaaggagccagggctgctgaggaagagctgtggggcagaagtgaagccccgcaggggaggccacagggtccagcctgtctttaggatcatctacactgcatgaggggagccccaggaaggcagcattcataagcccctgcaccagtgaggaagagaaagaggaggagaattaagaagaggatgatcgggaggaggaagaggagaataaggaggagcaggaggaagagggggaggagaaggaggaagagggggaggaggaagaggggaaggaggaggaagaagtgtaagaagagaagagaggatgtgttgggggtgggtagttgtttttggtttgcgtcatcatcaggcccgggctctgctcactgctgttccgtgtcaagaactccacctctgctttgccggtgtagatctcggccagtggctgcttgttctcttggggatgtgtgtgtttttatctgagcagctcctttccagagtaccccagcgcagttccaggagacggtgggaaggaggcatggcagacgctcaccttgtgactgtgacctcgactgcaggaggaccaaccagacacgggaaggagcagggctgcctgaggctccccaggaagctttgtgctttggcgttccacccctgctgttactcgtgactcagtttcctcaacttggtggggtgttccctgctatgttttccagcatcctgtgactgtcctgtgcagtctatagggcagggccctgccccagcgggtgggctcaggagggggttccctgaagcgagtacacattgccagagcccaccatcctggcaagaggtggatcctggggccctatggaaggagggatgtggtggggggggccacactgagggaggggccggggacttgtgacctgtagtggctgtttgcagtttctctctgtgttagattcccttttcttcagcagtttcagttcatgtttctcttcagtaaattttgttcagtgttcc

SEQ ID NO: 163685 - DNA, 2209 bp, Homo sapiens
  Payload ID: 12237
  Gene Symbol: PNMA6A
  Gene Name: paraneoplastic Ma antigen family member 6A
  Uniprot ID: P0CW24
  ENST ID: ENST00000421798
  CDS Start-End: 254-1453
acagtcagagggaacgcccgcgcggggagccaggggcgcccgaccccgccgccgccgcagcggcgcgcagcccccgacgcgccctgtggggacccggaccaggagggaccctgccccgggaaaaggctgtggagacctgggctccgaccccagttcatccccccacacccccgccgccccgtgccaccctggtccgcgctgggaaccctatcctgcccctcgtgtcagcccggcactggccagaatcgcgggcatggcggtgaccatgctgcaggactggtgccggtggatgggggtcaacgctcgcaggggcctgctcatcctgggcatcccggaggactgtgatgatgccgaattccaagagtccctcgaggctgccctgaggcctatgggacactttacagtgctaggcaaagcgtttcgagaggaggataatgccaccgcggccctggtcgagctcgaccgggaagtcaactatgctttggtccccagggaaatccccggcactgggggcccgtggaacgtggtctttgtgccccgttgctcaggcgaggagtttctcggtctcggtcgcgtgttccacttcccggagcaagaggggcagatggtggagagcgtggccggcgccctgggtgtggggctgcgcagggtgtgctggctgcgatccatcggtcaggcggtccagccctgggtggaggccgtgaggtgccagagcctgggcgtgttttccgggagggaccagccagccccaggggaggagtcctttgaggtctggctagaccacaccaccgaaatgctgcatgtgtggcagggggtctcggaaagggagaggaggaggaggctgctggaaggcttgcgtgggaccgccctgcagctcgtgcacgcgctcctggcggagaaccccgccaggacggcgcaggactgtctggcggccctggcccaggtgtttggagacaacgagtcccaggcgaccatccgggtgaagtgtctgaccgctcagcagcagtcaggcgagcgtctctcagctttcgtgttgcggctggaagtgctgctgcagaaggccatggagaaggaggccctggccagagcatccgccgaccgcgtgcgcctgaggcagatgctcaccagggcccaccttactgagcctctggatgaagcactgaggaagctgagaatggccgggaggtctccaagtttcttggagatgctggggctcgttcgggagtctgaggcatgggaggccagtctagccaggagcgtgagagcccagacacaggaaggggccggtgcccgggctggtgcccaggctgttgccagagccagcactaaagtagaggcggtcccaggaggtcctggtcgggagccagagggcctcctccaggcaggaggccaggaggctgaggagctcctccaggaggggctcaagcccgtcctggaggaatgtgataactaggttggggctggggaggcagcccagcgcgagtcctccccgggcaaataggctccgagggccccggggcctcctctcctcctctcaggcagcagggccctggagacaggcggaggcggggccagggccggtccctcaccccacatcgggatcggggccccccacttccccccaaggggccctgcccaccaccaccttcccggtgacccagatgaccacatttaataccaaatggggtggggggaggcgcccctccagtgccaggggcacgtgctgtgagcttcctgggagcccaggttgtgctcactgctctcccgtatcgtgagcaccacctctgctttccctgcgtagatctaggccaggggctgcttgtttttgtggagccgtgtgtgttcttctctgagcagctcctccccagaggaccccagcgcagtcccgggagatggcggaaagaaggcaccagggcacagtggacactcatcccgtgacagcgatggtgaccatgactgtgggagaaagaacaggacccgggatggagtggggctgtctgagtttccccagtgaactttgtgctttggcgttccacccctgttgttacttgttactgagtttcctagacctggggtgggtgttcccccaggaggaggggggtcccgacctgtgtcctgtggtggccatttgcagcttctgtgttgtgattcccttctcttcaacggtttcagtacatatctctcttcaataaatttcattcagtgttcc

SEQ ID NO: 163686 - DNA, 3689 bp, Homo sapiens
  Payload ID: 12238
  Gene Symbol: PNMAL1
  Gene Name: paraneoplastic Ma antigen family-like 1
  Uniprot ID: Q86V59
  ENST ID: ENST00000313683
  CDS Start-End: 307-1626
agtgcgcaggcgcgcgctgcgacgccaacctcggcttctcgccgctaacggcatcgagtctggacgccccgtgacccgcctgggccggagcgggggcggacggcgccttcttggccctttctgcctctagcagcggcgccggggtagccggagccagcgactgggaaacggctgcattccactgcgtctccttggcctggctgggcggtcggaggctgatctgccaagattactgtttggagaccgctgcagcccacgtccacctgatagactatttactacacatagtaggttcagagccgctaaatgtccaagaccatggcgatgaaccttctggaggattggtgcaggggaatggaagtggacatccacaggtccttgttggtcacaggcatcccagaggactgtgggcaggcagaaattgaggagaccttgaatggggtcctctccccactgggcccgtaccgcgtgctcaacaagatttttgtgagggaagagaatgttaaagctgccctcattgaggttggtgaaggtgtgaatctgagcaccatcccccgtgaattcccaggaaggggtggtgtctggagagtggtctgtagagaccctacccaggatgccgagtttttaaaaaatctgaatgaattcctggatgccgaggggcgcacctgggaggatgtggtccgcctgctccagctcaaccaccccaccctgtcccagaaccagcatcagcccccagagaactgggcagaagctctgggggtgcttctgggagcagtggtgcagatcatcttctgcatggatgccgagatccgcagccgggaggaagccagggcccaggaggccgctgaattcgaggagatggcagcctgggctttagcagcagggaggaaggtgaagaaagaaccggggcttgcagcagaggtgggttctgccttaaaggcagagacccccaacaactggaatgccacggaagaccagcatgagcctaccaaacctttggttcgcagggctggagctaagtctcgctccaggagaaagaagcagaagaagaactccaggcaggaagcagtgccctggaaaaaacccaaaggcatcaattccaacagcacagctaacttggaggatcctgaggtgggtgatgctgaaagcatggcgatctcagagccgatcaagggcagcagaaagccctgtgtgaataaggaggagttggctttgaagaagcccatggcgaaatgtgcctggaagggtcccagagagccacctcaggatgcccgggcagaagccgagagcccaggaggcgcctctgagtcagaccaagatggtggccatgaaagcccaccaaagaagaaggccgtggcctgggtgtctgccaagaaccccgctcccatgaggaagaagaagaaggtgagcttgggccctgtctcctacgtcttggttgactcagaagatggcaggaagaagccggtgatgccaaagaaagggccaggctcaagaagggaggcatcagatcagaaggcccctcggggccagcagcctgccgaggcaacagcctcaacctctaggggtccgaaggccaagccagaaggctctcctcggcgtgccaccaatgaatccagaaaggtttgatctgggggaccacccatactgaggagttgaaagaacaaggaagaagtaccaagtcaaccaagttctctcttgtcactgaataagactttggactctcttagggcccctgttgatagagatctggccctgaggtaaacgataggtgaggtcttgggtgggagggagttggggaagggaggtggatctctatgcccttttctctaccaggcctgccgtttcaccgccttctctactcaccttctcttcggaggcaggagagttggtaagaggattgggaaaattctagaacattcattcccctttatgcatgagcagggtcactgttacactcatccatgttcagcttttctcccccacgccttgctccctcctcggaatggtcagcgacctctgcaggccctggcatttggaagagctgggtggccctgccatattcttcctcccgccttcctctcgtgtaaccagcggggtaagttaagccaggaccttcgctgcaaacctggttttattgctccttcagtctccagcttccatcctccagttatctagccaggaggtcccaagagttagttttagggaaaaagaatgtctgcctagacctcaaagtctttgagttttagagtctgttagtaaaaatggcactttgattcccatttgggatgagccctctcaggaatcctgtggggaaggggggtgattatagggaaggacgcaggcattcctaggtccccagctctaattccatccatctacccaactgtcaccatctttgcaccaaactgtcaccatctttgcagcagaaggtcactactcacattatagtaagaggggaaaaaaatcttttaaaacttggctgttggccgggcacggtggctcacgcctgtaatcccagcactttgggaggctgaggcaggtcgatcacgaggtcaggcgtttaagaccagcttgaccaacatggtgaaaccccatctctacaaaaattagctgggcgtggtggcgcgcgcctgtaatcccagctactcaggaggctgaggcagatgaattgcttgaatccaggaggcagaggttgcaatgagccgagattgtgccacggcactccagcctgggcagcagagtgagactctctctcaaaaaaacaaaacttggctgttaatgtctgccctctgaattcagacacactatattagaccagaccaccatgtgtcattgtgtgtgtgtgtgtgtgtgtttgcgtgcgcatgtgtagaggagagagcagggtccctgagataatggtttccaaactgtatcgtagccgtccacaaagatgtaatccaaatctatttttctcacgtgtttaaaaaactgaaaagtgactactcagatatgttggaagtcacatcgaagactatcagaatattaccttgtgttcataggttaacttgtttttgtacacgtcttagttatttcaggcatctctttgcttaaaattgagtttcttgtaaatgtgactgatgagcgaggttagaagtggaagaaattcctgtgcatgttctataatctgacaccctgaaagcaagtttcctttcgtcattcacatgctcttgttctgccgtgactgttcaggtgtatggtagtaagtaaatgtattaacatggtgaacagtagtaatattctatcatagagtattagcccttgcaagttttcagggcgtcttttccgacttcagtttttgtgataaagaatgtgaacagttgttagatgttctcagtgattcaactttaaaacaaatttctcgtgatgattcatttcaaaatcctgagtgagtctgactgaaaaatacgagagaaaagagagtggtttccgtttgcagctacacagctgtgtgcatcgacgttctcctggggtgtgtgccaagcgaaacccaggggtgaattggattcttgaagagaccaaagcctgtaactgtccagcttctaatttcaaaacgggtccattagggcttcgttgtgttaacaagttgacaccatgactagtaaatgtaaacgtgtatgtataaaataaagtttagcaaattaagtgtc

SEQ ID NO: 163687 - DNA, 3335 bp, Homo sapiens
  Payload ID: 12238
  Gene Symbol: PNMAL1
  Gene Name: paraneoplastic Ma antigen family-like 1
  Uniprot ID: Q86V59
  ENST ID: ENST00000438932
  CDS Start-End: 151-1287
gcgactgggaaacggctgcattccactgcgtctccttggcctggctgggcggtcggaggctgatctgccaagattactgtttggagaccgctgcagcccacgtccacctgatagactatttactacacatagtaggttcagagccgctaaatgtccaagaccatggcgatgaaccttctggaggattggtgcaggggaatggaagtggacatccacaggtccttgttggtcacaggcatcccagaggactgtgggcaggcagaaattgaggagaccttgaatggggtcctctccccactgggcccgtaccgcgtgctcaacaagatttttgtgagggaagagaatgttaaagctgccctcattgaggttggtgaaggtgtgaatctgagcaccatcccccgtgaattcccaggaaggggtggtgtctggagagtggtctgtagagaccctacccaggatgccgagtttttaaaaaatctgaatgaattcctggatgccgaggggcgcacctgggaggatgtggtccgcctgctccagctcaaccaccccaccctgtcccagaaccagcatcagcccccagagaactgggcagaagctctgggggtgcttctgggagcagtggtgcagatcatcttctgcatggatgccgagatccgcagccgggaggaagccagggcccaggaggccgctgaattcgaggagatggcagcctgggctttagcagcagggaggaaggtgaagaaagaaccggggcttgcagcagaggtgggttctgccttaaaggcagagacccccaacaactggaatgccacggaagaccagcatgagcctaccaaacctttggttcgcagggctggagctaagtctcgctccaggagaaagaagcagaagaagaactccaggcaggaagcagtgccctggaaaaaacccaaaggcatcaattccaacagcacagctaacttggaggatcctgaggtgggtgatgctgaaagcatggcgatctcagagccgatcaagggcagcagaaagccctgtgtgaataaggaggagttggctttgaagaagcccatggcgaaatgtgcctggaagggtcccagagagccacctcaggatgcccgggcagaagccgagagcccaggaggcgcctctgagtcagaccaagatggtggccatgaaagcccaccaaagaagaaggccgtggcctgggtgtctgccaagaaccccgctcccatgaggaagaagaagaagaatccagaaaggtttgatctgggggaccacccatactgaggagttgaaagaacaaggaagaagtaccaagtcaaccaagttctctcttgtcactgaataagactttggactctcttagggcccctgttgatagagatctggccctgaggtaaacgataggtgaggtcttgggtgggagggagttggggaagggaggtggatctctatgcccttttctctaccaggcctgccgtttcaccgccttctctactcaccttctcttcggaggcaggagagttggtaagaggattgggaaaattctagaacattcattcccctttatgcatgagcagggtcactgttacactcatccatgttcagcttttctcccccacgccttgctccctcctcggaatggtcagcgacctctgcaggccctggcatttggaagagctgggtggccctgccatattcttcctcccgccttcctctcgtgtaaccagcggggtaagttaagccaggaccttcgctgcaaacctggttttattgctccttcagtctccagcttccatcctccagttatctagccaggaggtcccaagagttagttttagggaaaaagaatgtctgcctagacctcaaagtctttgagttttagagtctgttagtaaaaatggcactttgattcccatttgggatgagccctctcaggaatcctgtggggaaggggggtgattatagggaaggacgcaggcattcctaggtccccagctctaattccatccatctacccaactgtcaccatctttgcaccaaactgtcaccatctttgcagcagaaggtcactactcacattatagtaagaggggaaaaaaatcttttaaaacttggctgttggccgggcacggtggctcacgcctgtaatcccagcactttgggaggctgaggcaggtcgatcacgaggtcaggcgtttaagaccagcttgaccaacatggtgaaaccccatctctacaaaaattagctgggcgtggtggcgcgcgcctgtaatcccagctactcaggaggctgaggcagatgaattgcttgaatccaggaggcagaggttgcaatgagccgagattgtgccacggcactccagcctgggcagcagagtgagactctctctcaaaaaaacaaaacttggctgttaatgtctgccctctgaattcagacacactatattagaccagaccaccatgtgtcattgtgtgtgtgtgtgtgtgtgtttgcgtgcgcatgtgtagaggagagagcagggtccctgagataatggtttccaaactgtatcgtagccgtccacaaagatgtaatccaaatctatttttctcacgtgtttaaaaaactgaaaagtgactactcagatatgttggaagtcacatcgaagactatcagaatattaccttgtgttcataggttaacttgtttttgtacacgtcttagttatttcaggcatctctttgcttaaaattgagtttcttgtaaatgtgactgatgagcgaggttagaagtggaagaaattcctgtgcatgttctataatctgacaccctgaaagcaagtttcctttcgtcattcacatgctcttgttctgccgtgactgttcaggtgtatggtagtaagtaaatgtattaacatggtgaacagtagtaatattctatcatagagtattagcccttgcaagttttcagggcgtcttttccgacttcagtttttgtgataaagaatgtgaacagttgttagatgttctcagtgattcaactttaaaacaaatttctcgtgatgattcatttcaaaatcctgagtgagtctgactgaaaaatacgagagaaaagagagtggtttccgtttgcagctacacagctgtgtgcatcgacgttctcctggggtgtgtgccaagcgaaacccaggggtgaattggattcttgaagagaccaaagcctgtaactgtccagcttctaatttcaaaacgggtccattagggcttcgttgtgttaacaagttgacaccatgactagtaaatgtaaacgtgtatgtataaaataaagtttagcaaattaagtgtcctgttaa

SEQ ID NO: 163688 - DNA, 572 bp, Homo sapiens
  Payload ID: 12238
  Gene Symbol: PNMAL1
  Gene Name: paraneoplastic Ma antigen family-like 1
  ENST ID: ENST00000602246
  CDS Start-End: 307-561
agtgcgcaggcgcgcgctgcgacgccaacctcggcttctcgccgctaacggcatcgagtctggacgccccgtgacccgcctgggccggagcgggggcggacggcgccttcttggccctttctgcctctagcagcggcgccggggtagccggagccagcgactgggaaacggctgcattccactgcgtctccttggcctggctgggcggtcggaggctgatctgccaagattactgtttggagaccgctgcagcccacgtccacctgatagactatttactacacatagtaggttcagagccgctaaatgtccaagaccatggcgatgaaccttctggaggattggtgcaggggaatggaagtggacatccacaggtccttgttggtcacaggcatcccagaggactgtgggcaggcagaaattgaggagaccttgaatggggtcctctccccactgggcccgtaccgcgtgctcaacaagatttttgtgagggaagagaatgttaaagctgccctcattgagaatccagaaaggtttgatctgggggaccacccatactgaggagttgaaag

SEQ ID NO: 163689 - DNA, 5308 bp, Homo sapiens
  Payload ID: 12239
  Gene Symbol: PNMAL2
  Gene Name: paraneoplastic Ma antigen family-like 2
  Uniprot ID: Q9ULN7
  ENST ID: ENST00000599531
  CDS Start-End: 1034-2941
gtgcaaaaccacaggatttattgtgcatgcatagttcagaatacaggaacgtgtatgggagtgagggccggtcccatcgagtggggcctgtaccctgcaagtgaggcccatataccctgaatggtgtcttgctcacaggtggtgcctgggcccccctatttgatactgagacccatatactgtgaatgaggccagtatcccgagtaagtcctggtcctacgctgcaaggccagtgccctttgatttaggcctatataatcctgaattccacctggcccctggaagggggaattgtaacccccagtgatgccggtaccctctggaaggaggcctctatcccctgaatgaggtcgggtatccttgagtgatttctggccctctgtggtttcggccttgttttttgctggttaatgaaagtggtgcttccaggccccaagtccttgtcatcgggacctttaagaaaagcgtctcaggccacagcgacgcagaccccagctcaaggctgcaccgttgccatggagacggttgggcgggggacaggggagggtgtgcggctccctctgcgcaggcgcacgcgcgagcagccgcgtcgcagcggaactgctgagattcaggcccagggtgcgcgctcagacgcggcgcgagcgccaggcaagctgcggctgctacctcccacgcctctccaggtgcactcggcgccgcccccctgcacctggctgcggtgccgagtcactcaggcctgtgtcagggagagagggagggagctgtcctggaaagcagacacgtaagccccccgcggatcctcagacagctctggagaggggtcccgggggaaggtcactgcgtccagccggccagcaggcagctagagcccccgagccccgagccccactccagccttgccacattcaccggaaccgggactctaagccctgcaagtggctttctagggttgcattgacaccgtgcgctgcagcccacccctatctcgggctccctgctgccccaagatcagcgccaagggggctgcaccatggccatgagccttttgcaggactggtgccggagcctggacgtggacgcgcacagggccctgctggtcaccggcatcccggagggcctggagcaggcagacgtcgaagccgtcctgcagccgaccctcctgcccctgggcacgttcaggttgcgacacatgaaggctttgatgaacgagaaggcccaggccgccctggtggagtttgtggaggacgtcaatcacgctgccattcccagggagatcccaggcaaggatggggtctggagggttctgtggaaggaccgtgcgcaggacacgagggtcctgaggcagatgagacgcctgctgctggatgacgggcccacgcaggccgcggaggctgggacccccggggaggcacccacccctcccgcttcggagacgcaggcccaggattctggggaggtaacagggcaggctggctcgcttcttggggcagccaggaacccaaggaggggccgtcggggtcgcagaaacagaaccagacgcaacaggttgacccagaagggcaagaagagaagccgaggaggacggccgtctgctcccgcgaggagtgaggccgaggactcttccgacgagagcctgggcatcgtgatcgaggagatcgaccagggcgacctgagcggagaagaggaccagagcgcgctgtacgccacgctgcaggccgctgccagggagctggttaggcagtgggcgccctgcaactccgagggggaagaagacggtccccgcgagttcttggctctggtcaccgtcaccgacaaatcgaagaaagaagaggcagagaaggagccagctggggccgaatccatccgcttgaacaccaaagaagacaaaaatggtgtccccgacttagtggccctgctggctgtgagagacaccccggacgaggagccggtggacagcgacacttcggagagcgactcgcaggaaagtggggaccaagaaacagaggagttggataatcctgagttcgtggccattgtggcctataccgacccgtcggacccctgggcccgggaggagatgttgaaaatcgcttctgttatcgagtcgctgggctggagcgacgagaaagacaagcgagaccccctccgacaggtcttgtccgtcatgtccaaggacactaacgggacccgcgtgaaggtggaagaggcgggccgcgaggtggacgccgtggtcctgcgcaaggccggggatgacggggacctccgggagtgcatttccaccttggcgcagccggatctccctccccaggcgaagaaggctgggcgtggcctcttcgggggctggagcgagcaccgtgaggacgaagggggtcttctggagctggtggcgctcctggctgcccaggacatggcggaggtgatgaaggaggaaaaagaaaacgcctgggaaggcgggaagtacaaataccccaaaggcaaactgggggaggtattggcgctcctggccgcccgggagaacatggggtccaacgaggggtcggaggaggcttcggacgaacagtccgaggaggagtcggaggacaccgagagcgaggcgtcggagccggaggacagggcatccaggaagccccgggccaagagggcgcgcacggcccccaggggcctgactccggccggcgcgcctcccaccgcttccggggcccgcaaaacccgcgcgggcggccgaggccgaggccggggcgtcactcccgagaagaaagccgggagccggggctcggcccaggacgacgccgcaggaagcaggaagaagaaggggagcgcgggcgccggggcccatgccagggcaggcgaggccaagggccaggcgcccactggatccaaggccgcgcgcgggaagaaggcccgtcggggccggaggctgccccctaaatgccgctagtggccccccaagaagccgcccaggctgcgagcaggccccgcagggcacccgcccgcctgtggcccccgccctcccctcccctcttcctgtcctccgcagacgcaatctcctcgcttcacagcgcgcccgggccgcgttttgccagcgtcacgttcccctctcgggccctcgcaggccgggggcgccagcgatcccgacggaggaagcccggatgggaggaggaaagagaagtgggcgcccgaggcagcagcgcagggccgagatggggacgcgccaagtggaccaggattgggggcccgggttgcccccggagggggtgtgtgtgtggacgccgggcacctgcagaggcgagcagggctcttcgtggcgctctcggggcctgcgcctggcaggtgctgtaggccgctgtcgcccctaccccagtctgactgggccctgggtctgtggtggaggctcagtcaccagccgcgcagcgcgtgtcagggcgcaactctcagccaggggaggccccagctcccagccaggggaagagatgattccagaaaggaaagtctgagagatagaaggcggttgggaaggggaggaggaggaaaggggagaggaacggtgggagaagggaaagaggaggaggagggggaggggggagcagagggaagacacatgccagccctgcctactggggcgcccctgataacaaaggaaccagccccaggccaaggccacctgcccctgaccacaagttgaatttgtcactcagactgcagtgtttcccaacattctaattatttgcagaggtgttcaatttggggtaattcacttaaaatccagttttggttcttctgggctgagtgggccctggcccctcccataggctgtggctcccctgggtgccccctctccagtggagctgacccaccgctcagcgctggccttgcagcccttactaaaagacttgaaagtccctgggttcaccccctgagtgaattaaaggccagaggggccccgaagggcactgtgagggacagaggctcacctgggcagtgcagaagccggccgcgtgtccctccttacaggggatgaaatgacctggggaggaaaccccagccctgccctggaggttccagagtaggcgggccggtgctgtgaggcttcacaacctgctgtcccaagcacgcttgagttgtatgtgagtctgtgccgtgccgtgccgtatgcttcagctcctgcaaccccggctgagctcgatttttacctaaatatcagtctccacgggaccccaccttcattcatgccttcttgtccctggggcaatgtgtgtgcttcctcgtcccaatttccattccctggcagtgaggagcccatcgtgccagggggccctgccccacttgtccctgggaaggaataggagggtttgggtgtgacctcacagtccagaccagactgtcccagtcctatgtcagggacacccagatgtagaagctgactgagacctgctgcagggcgtgggtgctcccctctgcttggaggctgtccctggacagtgacccacccactgaggaccaggctgggtgtaccttgagctgggcacagcagcctgtggtgttgcctgtgggtggggagggccccaggtgtgcttctcccgtagcagtcctaggcttctctccctgtgccctgtgtcacctggatcctccagtaaagtgaaattcagcactgtactctctctgtgctctgggcagtggggcaggcggggtgtgggagcgtgggccacagatgtccacggtcttgactgtggtttgcccagaatacctgggaactgtcctgtcactggtttacatacactgtcctttgctgcttcgggatccctgcctggctctccctaccccccagcatcatctcaccccttgcagatctgagccagcttccactcccacccctgatgcctccccacttccagcctcagctccgaagcccctggacacccatggagaccccgcccagccaatccccaccctagcttccacccagatacactctgccaggccacagctgcaggcactctccccccagcctccacccctcacctgtgccctggacctcagactcagctttccatcctacctgagttttctgcctccctccatcctgtgtccccccaccatacatggctgccagagacgtcctcttagaagtcacacctggggtctgattgcgtccctcgcctccccagatcccccaaggtctccttcctgtgccgtcatatctgcagttcttaggactgtctagacatgctttgttcaactaggtaatcacacggggtaaattggatttaaatgtaattaagattaaataaaaatacacatgcatgtc

SEQ ID NO: 163690 - DNA, 2568 bp, Homo sapiens
  Payload ID: 12240
  Gene Symbol: PON1
  Gene Name: paraoxonase 1
  Uniprot ID: P27169
  ENST ID: ENST00000222381
  CDS Start-End: 233-1300
gttggaaggagcaaaatgggacttttggctgaaagtgctgagctcctgcggtgggggctgaccgcaagccacgccttctgtgcacctggtcggcccagctagctgccgacccggcggggaggggcggggcgggccaatcggcgctgccccagcagggctgcggctgcaggcaggcagagcctcctagcccgtcggtgtctgcgcccatcgatccctttgtctatccccgaccatggcgaagctgattgcgctcaccctcttggggatgggactggcactcttcaggaaccaccagtcttcttaccaaacacgacttaatgctctccgagaggtacaacccgtagaacttcctaactgtaatttagttaaaggaatcgaaactggctctgaagacttggagatactgcctaatggactggctttcattagctctggattaaagtatcctggaataaagagcttcaaccccaacagtcctggaaaaatacttctgatggacctgaatgaagaagatccaacagtgttggaattggggatcactggaagtaaatttgatgtatcttcatttaaccctcatgggattagcacattcacagatgaagataatgccatgtacctcctggtggtgaaccatccagatgccaagtccacagtggagttgtttaaatttcaagaagaagaaaaatcgcttttgcatctaaaaaccatcagacataaacttctgcctaatttgaatgatattgttgctgtgggacctgagcacttttatggcacaaatgatcactattttcttgacccctacttacaatcctgggagatgtatttgggtttagcgtggtcgtatgttgtctactatagtccaagtgaagttcgagtggtggcagaaggatttgattttgctaatggaatcaacatttcacccgatggcaagtatgtctatatagctgagttgctggctcataagattcatgtgtatgaaaagcatgctaattggactttaactccattgaagtcccttgactttaataccctcgtggataacatatctgtggatcctgagacaggagacctttgggttggatgccatcccaatggcatgaaaatcttcttctatgactcagagaatcctcctgcatcagaggtgcttcgaatccagaacattctaacagaagaacctaaagtgacacaggtttatgcagaaaatggcacagtgttgcaaggcagtacagttgcctctgtgtacaaagggaaactgctgattggcacagtgtttcacaaagctctttactgtgagctctaacagaccgatttgcacccatgccatagaaactgaggccattatttcaaccgcttgccatattccgaggacccagtgttcttagctgaacaatgaatgctgaccctaaatgtggacatcatgaagcatcaaagcactgtttaactgggagtgatatgatgtgtagggcttttttttgagaatacactatcaaatcagtcttggaatacttgaaaacctcatttaccataaaaatccttctcactaaaatggataaatcagttatgtcaattgtcagatattaaataacagtgtgtgaccccaaaagtacttaccctaaaacatgtgttgcctggaagcacatgtgtgtatcgctgccttgccatgtcttgttcagaagacacaggggagcagggttagctcacgtgtctttagaactccagtactcacccagggactccagttcacaggccagaaaacatatgcattatgaagttcccctctactccatgcacatagtaagtctgactatggcagtcagacttacttactcccattttcccttcgatatatgactttttctcagtaaatattaacctgaattattccaactccccttgtactcttgctttttcaattctcctgttgcaatgacacataggaaaatcttaaaattcttgggagtgttgtcacacctgaaaattatgagtctctatgatcttggcacaaattgtacatttgagtgtctttgacttggttaaaggaagtttgttcacttcgatgactggatacagaatgaatcccataattgacatgggcgaagctaaaagtgtccccaaagactacactgttgttgaggtggtggtagtgctggtgggtttttgtttaatatttaaacttcttgttgtggaggctgaaaagaaaaaaaataatagaaaggtaaacaaacaaataaatagaaaagatcaacaacccctttggctatctactgagacatgactaggaagaaaacatgactttatcattttgttatagaaactgatatataaaggttacacattttcatttatttgtttttctgatttgaaggtataaccttcatgatgaattacttcttcagggtgttaaggcagtgactttagaaacaaatttttttcttgtttttgttttgtttttgagaccgaatctcactctgttgcccaggctggagtgcagtggtgcgatcttggctcactgcaacttctacctccgaggttcaagagattcttgtgcctcagcctcccggatagctg

SEQ ID NO: 163691 - DNA, 1058 bp, Homo sapiens
  Payload ID: 12240
  Gene Symbol: PON1
  Gene Name: paraoxonase 1
  ENST ID: ENST00000433729
  CDS Start-End: 2-235
catggcgaagctgattgcgctcaccctcttggggatgggactggcactcttcaggaaccaccagtcttcttaccaaacacgacttaatgctctccgagaggtacaacccgtagaacttcctaactgtaatttagttaaaggaatcgaaactggctctgaagacttggagatactgcctaatggactggctttcattagctcttcctggaaaaatacttctgatggacctgaatgaagaagatccaacagtgttggaattggggatcactggaagtaaatttgatgtatcttcatttaaccctcatgggattagcacattcacagatgaagataatgccatgtacctcctggtggtgaaccatccagatgccaagtccacagtggagttgtttaaatttcaagaagaagaaaaatcgcttttgcatctaaaaaccatcagacataaacttctgcctaatttgaatgatattgttgctgtgggacctgagcacttttatggcacaaatgatcactattttcttgacccctacttacaatcctgggagatgtatttgggtttagcgtggtcgtatgttgtctactatagtccaagtgaagttcgagtggtggcagaaggatttgattttgctaatggaatcaacatttcacccgatggcaagtatgtctatatagctgagttgctggctcataagattcatgtgtatgaaaagcatgctaattggactttaactccattgaagtcccttgactttaataccctcgtggataacatatctgtggatcctgagacaggagacctttgggttggatgccatcccaatggcatgaaaatcttcttctatgactcagagaatcctcctgcatcagaggtgcttcgaatccagaacattctaacagaagaacctaaagtgacacaggtttatgcagaaaatggcacagtgttgcaaggcagtacagttgcctctgtgtacaaagggaaactgctgattggcacagtgtttcacaaagctctttactgtgagctctaacagaccgatttgcacccatgccatagaaac

SEQ ID NO: 163692 - DNA, 1745 bp, Homo sapiens
  Payload ID: 12241
  Gene Symbol: PON2
  Gene Name: paraoxonase 2
  Uniprot ID: Q15165
  ENST ID: ENST00000222572
  CDS Start-End: 248-1312
aagtttcacatcatgagcctaatgtaaggcgtgtccgggccgtcccgaaggtatctggggaaataggtttgtgaggacaaagaccagggccaggcccagggcggagcctccgcggccccgacgcagggactcggcctaggcggaggacggggcggagcgcggccggcaccatcgagccgggaagatggcaccgcccacggagctgctggccaggccggagcgaggcagcgcgcccggctcccgcgccatggggcggctggtggctgtgggcttgctggggatcgcgctggcgctcctgggcgagaggcttctggcactcagaaatcgacttaaagcctccagagaagtagaatctgtagaccttccacactgccacctgattaaaggaattgaagctggctctgaagatattgacatacttcccaatggtctggctttttttagtgtgggtctaaaattcccaggactccacagctttgcaccagataagcctggaggaatactaatgatggatctaaaagaagaaaaaccaagggcacgggaattaagaatcagtcgtgggtttgatttggcctcattcaatccacatggcatcagcactttcatagacaacgatgacacagtttatctctttgttgtaaaccacccagaattcaagaatacagtggaaatttttaaatttgaagaagcagaaaattctctgttgcatctgaaaacagtcaaacatgagcttcttccaagtgtgaatgacatcacagctgttggaccggcacatttctatgccacaaatgaccactacttctctgatcctttcttaaagtatttagaaacatacttgaacttacactgggcaaatgttgtttactacagtccaaatgaagttaaagtggtagcagaaggatttgattcagcaaatgggatcaatatttcacctgatgataagtatatctatgttgctgacatattggctcatgaaattcatgttttggaaaaacacactaatatgaatttaactcagttgaaggtacttgagctggatacactggtggataatttatctattgatccttcctcgggggacatctgggtaggctgtcatcctaatggccagaagctcttcgtgtatgacccgaacaatcctccctcgtcagaggttctccgcatccagaacattctatctgagaagcctacagtgactacagtttatgccaacaatgggtctgttctccaaggaagttctgtagcctcagtgtatgatgggaagctgctcataggcactttataccacagagccttgtattgtgaactctaaattgtacttttggcatgaaagtgcgataacttaacaattaattttctatgaattgctaattctgagggaatttaaccagcaacattgacccagaaatgtatggcatgtgtagttaattttattccagtaaggaacggcccttttagttcttagagcacttttaacaaaaaaggaaaatgaacaggttctttaaaatgccaagcaagggacagaaaagaaagctgctttcgaataaagtgaatacattttgcacaaagtaagcctcacctttgccttccaactgccagaacatggattccactgaaatagagtgaattatatttccttaaaatgtgagtgacctcacttctggcactgtgactactatggctgtttagaactactgataacgtattttgatgttttgtacttacatctttgtttaccattaaaa

SEQ ID NO: 163693 - DNA, 1726 bp, Homo sapiens
  Payload ID: 12241
  Gene Symbol: PON2
  Gene Name: paraoxonase 2
  ENST ID: ENST00000433091
  CDS Start-End: 248-1276
aagtttcacatcatgagcctaatgtaaggcgtgtccgggccgtcccgaaggtatctggggaaataggtttgtgaggacaaagaccagggccaggcccagggcggagcctccgcggccccgacgcagggactcggcctaggcggaggacggggcggagcgcggccggcaccatcgagccgggaagatggcaccgcccacggagctgctggccaggccggagcgaggcagcgcgcccggctcccgcgccatggggcggctggtggctgtgggcttgctggggatcgcgctggcgctcctgggcgagaggcttctggcactcagaaatcgacttaaagcctccagagaagtagaatctgtagaccttccacactgccacctgattaaaggaattgaagctggctctgaagatattgacatacttcccaatggtctggctttttttagtgtgggtctaaaattcccaggactccacagctttgcaccagataagcctggaggaatactaatgatggatctaaaagaagaaaaaccaagggcacgggaattaagaatcagtcgtgggtttgatttggcctcattcaatccacatggcatcagcactttcatagacaacgaattcaagaatacagtggaaatttttaaatttgaagaagcagaaaattctctgttgcatctgaaaacagtcaaacatgagcttcttccaagtgtgaatgacatcacagctgttggaccggcacatttctatgccacaaatgaccactacttctctgatcctttcttaaagtatttagaaacatacttgaacttacactgggcaaatgttgtttactacagtccaaatgaagttaaagtggtagcagaaggatttgattcagcaaatgggatcaatatttcacctgatgataagtatatctatgttgctgacatattggctcatgaaattcatgttttggaaaaacacactaatatgaatttaactcagttgaaggtacttgagctggatacactggtggataatttatctattgatccttcctcgggggacatctgggtaggctgtcatcctaatggccagaagctcttcgtgtatgacccgaacaatcctccctcgtcagaggttctccgcatccagaacattctatctgagaagcctacagtgactacagtttatgccaacaatgggtctgttctccaaggaagttctgtagcctcagtgtatgatgggaagctgctcataggcactttataccacagagccttgtattgtgaactctaaattgtacttttggcatgaaagtgcgataacttaacaattaattttctatgaattgctaattctgagggaatttaaccagcaacattgacccagaaatgtatggcatgtgtagttaattttattccagtaaggaacggcccttttagttcttagagcacttttaacaaaaaaggaaaatgaacaggttctttaaaatgccaagcaagggacagaaaagaaagctgctttcgaataaagtgaatacattttgcacaaagtaagcctcacctttgccttccaactgccagaacatggattccactgaaatagagtgaattatatttccttaaaatgtgagtgacctcacttctggcactgtgactactatggctgtttagaactactgataacgtattttgatgttttgtacttacatctttgtttaccattaaaaagttggagttatattaa

SEQ ID NO: 163694 - DNA, 1099 bp, Homo sapiens
  Payload ID: 12241
  Gene Symbol: PON2
  Gene Name: paraoxonase 2
  Uniprot ID: Q15165
  ENST ID: ENST00000446142
  CDS Start-End: 26-178
aggcagcgcgcccggctcccgcgccatggggcggctggtggctgtgggcttgctggggatcgcgctggcgctcctgggcgagaggcttctggcactcagaaatcgacttaaagcctccagagaagtagaatctgtagaccttccacactgccacctgattaaaggaattgtgtggtgagtgtcttcttccttccccaaattcagcagaggagatacaagggtatttgatgagggctgcagaacaggtctaaaattcccaggactccacagctttgcaccagataagcctggaggaatactaatgatggatctaaaagaagaaaaaccaagggcacgggaattaagaatcagtcgtgggtttgatttggcctcattcaatccacatggcatcagcactttcatagacaacgatgacacagtttatctctttgttgtaaaccacccagaattcaagaatacagtggaaatttttaaatttgaagaagcagaaaattctctgttgcatctgaaaacagtcaaacatgagcttcttccaagtgtgaatgacatcacagctgttggaccggcacatttctatgccacaaatgaccactacttctctgatcctttcttaaagtatttagaaacatacttgaacttacactgggcaaatgttgtttactacagtccaaatgaagttaaagtggtagcagaaggatttgattcagcaaatgggatcaatatttcacctgatgataagtatatctatgttgctgacatattggctcatgaaattcatgttttggaaaaacacactaatatgaatttaactcagttgaaggtacttgagctggatacactggtggataatttatctattgatccttcctcgggggacatctgggtaggctgtcatcctaatggccagaagctcttcgtgtatgacccgaacaatcctccctcgtcagaggttctccgcatccagaacattctatctgagaagcctacagtgactacagtttatgccaacaatgggtctgttctccaaggaagttctgtagcctcagtgtatgatgggaagctgctcataggcactttataccacagagccttgtattgt

SEQ ID NO: 163695 - DNA, 1515 bp, Homo sapiens
  Payload ID: 12241
  Gene Symbol: PON2
  Gene Name: paraoxonase 2
  ENST ID: ENST00000455123
  CDS Start-End: 41-700
ggccaggccggagcgaggcagcgcgcccggctcccgcgccatggggcggctggtggctgtgggcttgctggggatcgcgctggcgctcctgggcgagaggcttctggcactcagaaatcgacttaaagcctccagagaagtagaatctgtagaccttccacactgccacctgattaaaggaattgaagctggctctgaagatattgacatacttcccaatggtctggctttttttagtgtgggtctaaaattcccaggactccacagctttgcaccagataagcctggaggaatactaatgatggatctaaaagaagaaaaaccaagggcacgggaattaagaatcagtcgtgggtttgatttggcctcattcaatccacatggcatcagcactttcatagacaacgatgacacagtttatctctttgttgtaaaccacccagaattcaagaatacagtggaaatttttaaatttgaagaagcagaaaattctctgttgcatctgaaaacagtcaaacatgagcttcttccaagtgtgaatgacatcacagctgttggaccggcacatttctatgccacaaatgaccactacttctctgatcctttcttaaagtatttagaaacatacttgaacttacactgggcaaatgttgtttactacagtccaaatgaagttaaagtggtatatctatgttgctgacatattggctcatgaaattcatgttttggaaaaacacactaatatgaatttaactcagttgaaggtacttgagctggatacactggtggataatttatctattgatccttcctcgggggacatctgggtaggctgtcatcctaatggccagaagctcttcgtgtatgacccgaacaatcctccctcgtcagaggttctccgcatccagaacattctatctgagaagcctacagtgactacagtttatgccaacaatgggtctgttctccaaggaagttctgtagcctcagtgtatgatgggaagctgctcataggcactttataccacagagccttgtattgtgaactctaaattgtacttttggcatgaaagtgcgataacttaacaattaattttctatgaattgctaattctgagggaatttaaccagcaacattgacccagaaatgtatggcatgtgtagttaattttattccagtaaggaacggcccttttagttcttagagcacttttaacaaaaaaggaaaatgaacaggttctttaaaatgccaagcaagggacagaaaagaaagctgctttcgaataaagtgaatacattttgcacaaagtaagcctcacctttgccttccaactgccagaacatggattccactgaaatagagtgaattatatttccttaaaatgtgagtgacctcacttctggcactgtgactactatggctgtttagaactactgataacgtattttgatgttttgtacttacatctttgtttaccattaaaaagttggagttatattaaagactaactaaaa

SEQ ID NO: 163696 - DNA, 555 bp, Homo sapiens
  Payload ID: 12241
  Gene Symbol: PON2
  Gene Name: paraoxonase 2
  ENST ID: ENST00000478801
  CDS Start-End: 459-555
atggggcggctggtggctgtgggcttgctggggatcgcgctggcgctcctgggcgagaggcttctggcactcagggaagcctgaagccagaatgccagacagcgcagacactattccatctcgcattttagttttaatgaaaatctctgaaatcgacttaaagcctccagagaagtagaatctgtagaccttccacactgccacctgattaaaggaattgaagctggctctgaagatattgacatacttcccaatggtctggctttttttagtgtgataaggggacagatgaggaggttctgaccacctacctccctggcttgggcagacataggagttcttggcatcttcataggtccagtttttctggaggaagaagtaaccaactctgacacctgactggtctaaaattcccaggactccacagctttgcaccagataagcctggaggaatactaatgatggatctaaaagaagaaaaaccaagggcacgggaattaagaatcagtcgtgggtttgatttggcctcattcaatccacatggcatcagcactt

SEQ ID NO: 163697 - DNA, 570 bp, Homo sapiens
  Payload ID: 12241
  Gene Symbol: PON2
  Gene Name: paraoxonase 2
  ENST ID: ENST00000632034
  CDS Start-End: 58-312
ccgcccacggagctgctggccaggccggagcgaggcagcgcgcccggctcccgcgccatggggcggctggtggctgtgggcttgctggggatcgcgctggcgctcctgggcgagaggcttctggcactcagaaatcgacttaaagcctccagagaagtagaatctgtagaccttccacactgccacctgattaaaggaattgaagctggctctgaagatattgacatacttcccaatggtctggctttttttagtgtggtgagtgtcttcttccttccccaaattcagcagaggagatacaagggtatttgatgagggctgcagaacaggtctaaaattcccaggactccacagctttgcaccagataagcctggaggaatactaatgatggatctaaaagaagaaaaaccaagggcacgggaattaagaatcagtcgtgggtttgatttggcctcattcaatccacatggcatcagcactttcatagacaacgatgacacagtttatctctttgttgtaaaccacccagaattcaagaatacagtggaaatttttaaatttgaagaagc

SEQ ID NO: 163698 - DNA, 1876 bp, Homo sapiens
  Payload ID: 12241
  Gene Symbol: PON2
  Gene Name: paraoxonase 2
  ENST ID: ENST00000633192
  CDS Start-End: 316-1443
tgctttctatgtaagtttctcactggaatagcgagtgagaaatgtgtttgaagactagggaaacgagaaaggtatgcgggctgctagagggtttcgggtgggttgtttgaaaaaggaagtgaaggaattcaaagtttcacatcatgagcctaatgtaaggcgtgtccgggccgtcccgaaggtatctggggaaataggtttgtgaggacaaagaccagggccaggcccagggcggagcctccgcggccccgacgcagggactcggcctaggcggaggacggggcggagcgcggccggcaccatcgagccgggaagatggcaccgcccacggagctgctggccaggccggagcgaggcagcgcgcccggctcccgcgccatggggcggctggtggctgtgggcttgctggggatcgcgctggcgctcctgggcgagaggcttctggcactcagaaatcgacttaaagcctccagagaagtagaatctgtagaccttccacactgccacctgattaaaggaattgaagctggctctgaagatattgacatacttcccaatggtctggctttttttagtgtgggtctaaaattcccaggactccacagctttgcaccagataagcctggaggaatactaatgatggatctaaaagaagaaaaaccaagggcacgggaattaagaatcagtcgtgggtttgatttggcctcattcaatccacatggcatcagcactttcatagacaacgatgacacagtttatctctttgttgtaaaccacccagaattcaagaatacagtggaaatttttaaatttgaagaagcagaaaattctctgttgcatctgaaaacagtcaaacatgagcttcttccaagtgtgaatgacatcacagctgttggaccggcacatttctatgccacaaatgaccactacttctctgatcctttcttaaagtatttagaaacatacttgaacttacactgggcaaatgttgtttactacagtccaaatgaagttaaagtggtagcagaaggatttgattcagcaaatgggatcaatatttcacctgatgataagtatatctatgttgctgacatattggctcatgaaattcatgttttggaaaaacacactaatatgaatttaactcagttgaaggtacttgagctggatacactggtggataatttatctattgatccttcctcgggggacatctgggtaggctgtcatcctaatggccagaagctcttcgtgtatgacccgaacaatcctccctcgtcagaggttctccgcatccagaacattctatctgagaagcctacagtgactacagtttatgccaacaatgggtctgttctccaaggaagttctgtagcctcagtgtatgatgggaagctgctcataggcactttataccacagagccttgtattgtgaactctaaattgtacttttggcatgaaagtgcgataacttaacaattaattttctatgaattgctaattctgagggaatttaaccagcaacattgacccagaaatgtatggcatgtgtagttaattttattccagtaaggaacggcccttttagttcttagagcacttttaacaaaaaaggaaaatgaacaggttctttaaaatgccaagcaagggacagaaaagaaagctgctttcgaataaagtgaatacattttgcacaaagtaagcctcacctttgccttccaactgccagaacatggattccactgaaatagagtgaattatatttccttaaaatgtgagtgacctcacttctggcactgtgactactatggctgtttagaactactgataacgtattttgatgttttgtacttacatctttgtttaccattaaaa

SEQ ID NO: 163699 - DNA, 566 bp, Homo sapiens
  Payload ID: 12241
  Gene Symbol: PON2
  Gene Name: paraoxonase 2
  ENST ID: ENST00000491069
  CDS Start-End: 1-255
atggggcggctggtggctgtgggcttgctggggatcgcgctggcgctcctgggcgagaggcttctggcactcagaaatcgacttaaagcctccagagaagtagaatctgtagaccttccacactgccacctgattaaaggaattgaagctggctctgaagatattgacatacttcccaatggtctggctttttttagtgtggtgagtgtcttcttccttccccaaattcagcagaggagatacaagggtatttgatgagggctgcagaacaggtctaaaattcccaggactccacagctttgcaccagataagcctggaggaatactaatgatggatctaaaagaagaaaaaccaagggcacgggaattaagaatcagtcgtgggtttgatttggcctcattcaatccacatggcatcagcactttcatagacaacgatgacacagtttatctctttgttgtaaaccacccagaattcaagaatacagtggaaatttttaaatttgaagaagcagaaaattctctgttgcatctgaaaacagtcaaacatgagcttcttccaaggt

SEQ ID NO: 163700 - DNA, 645 bp, Homo sapiens
  Payload ID: 12241
  Gene Symbol: PON2
  Gene Name: paraoxonase 2
  ENST ID: ENST00000469926
  CDS Start-End: 305-645
agctgctggccaggccggagcgaggcagcgcgcccggctcccgcgccatggggcggctggtggctgtgggcttgctggggatcgcgctggcgctcctgggcgagaggcttctggcactcagaagctggctctgaagatattgacatacttcccaatggtctggctttttttagtgtggtgagtgtcttcttccttccccaaattcagcagaggagatacaagggtatttgatgagggctgcagaacaggtctaaaattcccaggactccacagctttgcaccagataagcctggaggaatactaatgatggatctaaaagaagaaaaaccaagggcacgggaattaagaatcagtcgtgggtttgatttggcctcattcaatccacatggcatcagcactttcatagacaacgatgacacagtttatctctttgttgtaaaccacccagaattcaagaatacagtggaaatttttaaatttgaagaagcagaaaattctctgttgcatctgaaaacagtcaaacatgagcttcttccaagtgtgaatgacatcacagctgttggaccggcacatttctatgccacaaatgaccactacttctctgatcctttcttaaagtatttagaaacatacttgaacttaca

SEQ ID NO: 163701 - DNA, 550 bp, Homo sapiens
  Payload ID: 12241
  Gene Symbol: PON2
  Gene Name: paraoxonase 2
  ENST ID: ENST00000493290
  CDS Start-End: 392-550
accgcccacggagctgctggccaggccggagcgaggcagcgcgcccggctcccgcgccatggggcggctggtggctgtgggcttgctggggatcgcgctggcgctcctgggcgagaggcttctggcactcagggaagcctgaagccagaatgccagacagcgcagacactattccatctcgcattttagttttaatgaaaatctctgaaatcgacttaaagcctccagagaagtagaatctgtagaccttccacactgccacctgattaaaggaattgaagctggctctgaagatattgacatacttcccaatggtctggctttttttagtgtgggtctaaaattcccaggactccacagctttgcaccagataagcctggaggaatactaatgatggatctaaaagaagaaaaaccaagggcacgggaattaagaatcagtcgtgggtttgatttggcctcattcaatccacatggcatcagcactttcatagacaacgatgacacagtttatctctttgttgtaaaccacccagaattcaagaataca

SEQ ID NO: 163702 - DNA, 694 bp, Homo sapiens
  Payload ID: 12241
  Gene Symbol: PON2
  Gene Name: paraoxonase 2
  ENST ID: ENST00000490778
  CDS Start-End: 488-694
gaggacaaagaccagggccaggcccagggcggagcctccgcggccccgacgcagggactcggcctaggcggaggacggggcggagcgcggccggcaccatcgagccgggaagatggcaccgcccacggagctgctggccaggccggagcgaggcagcgcgcccggctcccgcgccatggggcggctggtggctgtgggcttgctggggatcgcgctggcgctcctgggcgagaggcttctggcactcagaaatcgacttaaagcctccagagaagtagaatctgtagaccttccacactgccacctgattaaaggaattgaagctggctctgaagatattgacatacttcccaatggtctggctttttttagtgtggtgagtgtcttcttccttccccaaattcagcagaggagatacaagggtatttgatgagggctgcagaacagactccacagctttgcaccagataagcctggaggaatactaatgatggatctaaaagaagaaaaaccaagggcacgggaattaagaatcagtcgtgggtttgatttggcctcattcaatccacatggcatcagcactttcatagacaacgatgacacagtttatctctttgttgtaaaccacccagaattcaagaatacagtggaaatttttaaatttgaagaagcagaaaattctctgttgcatctg

SEQ ID NO: 163703 - DNA, 1653 bp, Homo sapiens
  Payload ID: 12241
  Gene Symbol: PON2
  Gene Name: paraoxonase 2
  ENST ID: ENST00000633531
  CDS Start-End: 122-1186
ggactcggcctaggcggaggacggggcggagcgcggccggcaccatcgagccgggaagatggcaccgcccacggagctgctggccaggccggagcgaggcagcgcgcccggctcccgcgccatggggcggctggtggctgtgggcttgctggggatcgcgctggcgctcctgggcgagaggcttctggcactcagaaatcgacttaaagcctccagagaagtagaatctgtagaccttccacactgccacctgattaaaggaattgaagctggctctgaagatattgacatacttcccaatggtctggctttttttagtgtgggtctaaaattcccaggactccacagctttgcaccagataagcctggaggaatactaatgatggatctaaaagaagaaaaaccaagggcacgggaattaagaatcagtcgtgggtttgatttggcctcattcaatccacatggcatcagcactttcatagacaacgatgacacagtttatctctttgttgtaaaccacccagaattcaagaatacagtggaaatttttaaatttgaagaagcagaaaattctctgttgcatctgaaaacagtcaaacatgagcttcttccaagtgtgaatgacatcacagctgttggaccggcacatttctatgccacaaatgaccactacttctctgatcctttcttaaagtatttagaaacatacttgaacttacactgggcaaatgttgtttactacagtccaaatgaagttaaagtggtagcagaaggatttgattcagcaaatgggatcaatatttcacctgatgataagtatatctatgttgctgacatattggctcatgaaattcatgttttggaaaaacacactaatatgaatttaactcagttgaaggtacttgagctggatacactggtggataatttatctattgatccttcctcgggggacatctgggtaggctgtcatcctaatggccagaagctcttcgtgtatgacccgaacaatcctccctcgtcagaggttctccgcatccagaacattctatctgagaagcctacagtgactacagtttatgccaacaatgggtctgttctccaaggaagttctgtagcctcagtgtatgatgggaagctgctcataggcactttataccacagagccttgtattgtgaactctaaattgtacttttggcatgaaagtgcgataacttaacaattaattttctatgaattgctaattctgagggaatttaaccagcaacattgacccagaaatgtatggcatgtgtagttaattttattccagtaaggaacggcccttttagttcttagagcacttttaacaaaaaaggaaaatgaacaggttctttaaaatgccaagcaagggacagaaaagaaagctgctttcgaataaagtgaatacattttgcacaaagtaagcctcacctttgccttccaactgccagaacatggattccactgaaatagagtgaattatatttccttaaaatgtgagtgacctcacttctggcactgtgactactatggctgtttagaactactgataacgtattttgatgttttgtacttacatctttgtttaccattaaaaagttggagttatattaaagactaactaaaatccc

SEQ ID NO: 163704 - DNA, 699 bp, Homo sapiens
  Payload ID: 12241
  Gene Symbol: PON2
  Gene Name: paraoxonase 2
  ENST ID: ENST00000483292
  CDS Start-End: 1-367
agaaaattctctgttgcatctgaaaacagtcaaacatgagcttcttccaagtgtgaatgacatcacagctgttggaccggcacatttctatgccacaaatgaccactacttctctgatcctttcttaaagtatttagaaacatacttgaacttacactgggcaaatgttgtttactacagtccaaatgaagttaaagtggtagcagaaggatttgattcagcaaatgggatcaatatttcacctgatgataagtatatctatgttgctgacatattggctcatgaaattcatgttttggaaaaacacactaatatgaatttaactcagttgaagattttgacaatttctcatttggaaggtacttgagctggatacactggtggataatttatctattgatccttcctcgggggacatctgggtaggctgtcatcctaatggccagaagctcttcgtgtatgacccgaacaatcctccctcgtcagaggttctccgcatccagaacattctatctgagaagcctacagtgactacagtttatgccaacaatgggtctgttctccaaggaagttctgtagcctcagtgtatgatgggaagctgctcataggcactttataccacagagccttgtattgtgaactctaaattgtacttttggcatgaaagtgcgataacttaacaattaattttctatgaa
